United States Patent Application Publication US 2013/0332133 A1 - sequence listing, part 31

SEQ ID NO: 236935 - DNA, 493 bp, Unknown
  Bacterial polypeptide expressing nucleotide sequence isolated from the Sargasso Sea
atgtctgctcatcaatcggttcgaattttcgatacgacacttcgcgacggagaacaatctcctggtgcaagcatgaaccttacagaaaaaattgaggtggcgcatgcattatctcaattaggtgttgatattattgaggcaggttttccaatcgcttctcctggtgacttcgaatcagttcgagaaattgctcgggctgtgcgtgagccggtaatctgtggtcttgctcggtgcaatgacactgatattgaccgcgcctgggaagcccttgctgaagcagctcgcccacgaattcatgtgtttttagcaacgagcgccattcatcgtgagttcaaacttcgaatgggtgaagacgaagtcgttcagcgagcagtagctggagttcgtcgtgcaagagaaagttgtgaagatgtagagttttcaccagaggatgcagctcgtacagaaatagattttctctgccgtgttgttgaagcggttattgatgtggagc

SEQ ID NO: 236936 - DNA, 889 bp, Unknown
  Bacterial polypeptide expressing nucleotide sequence isolated from the Sargasso Sea
ggctggtgcagatcgagttgagggaacattattcggaaacggcgaaagaactggcaacgttgacattgttacattaggactaaacttatttactcaaggcgttgatccagatctcgatttctcaaatatcaattcacttatggatacagcagtacactgcaaccaactcccgatccatgcacgacatccttatgcaggcgaacttgttcacacagcattctcgggctcccatcaagatgcaatcaataagggtatgaaagcgatggaaactgccaacagtccgttatttgaagttccgtaccttccaatagatccaaaggatatcggaagagactatgaagcgattattcgcgtaaatagtcaatctggtaagggaggggtgtcctatattttagaaaatgattactcaattcggttacccaagccggcgcaagctcagttcagccaagttatacagaagataaccgatgaaaccagccaagagatcacgccggaagaaatttggaaggcattccaatcgacatttatagaacaaactggtccttttcagctaatttcgttctcttcagaagcggcttcgcgttccaatgatcttgaacgcatgactgcgaaagttgctttcaaaggtgcagaatatgaaataaagggaaccggcaacggacctatagcagctttcattcaaggtatacgagatacgtttgatcttaagttcaggcttaaagattatacggaacatacgcgaacagcaggttcagcatctgaagccgccgcctacattgaacttaaagtgcctaacgaaaatggtgcaagcgtatttggggttgggattgatacttccattacactcgcccctattaaggcagtcattagtgcattaaacaggatatag

SEQ ID NO: 236937 - DNA, 799 bp, Unknown
  Bacterial polypeptide expressing nucleotide sequence isolated from the Sargasso Sea
agccggttttcctatagcttcaccaggggattttgaagccgtttcagaagtaagtaaaattttaaaaaactctattcctgcaggactttcaagacactcagtaaaagatattgatagagcttatgaagctctaaaacatgcaccaagatttagaatacatacatttatttctacaagccctttgcacatgaagcataaattaaacatgtctccagaagatgtttatgaatcaataggaaaacatgttgcttatgcaagaaagttaactgatgatgttgagtggtcttgcgaagatggaacaagaactgatatggattacatgtgtaaaactgtagagcttgcaattaaaaatggagctacaacaattaatattcctgatacagttggttatacaataccatctgagtttactacaattatagaaactttattaaataaggttccaaatattgataaagcaattttatcaactcattgtcataatgatttaggtttagcagtagctaactcgttagctggagttcaagctggagctagacaaattgaatgtactattaatggtttaggtgaaagagctggaaatgctgcacttgaagaagttgtaatggcaataaaaacaagacctgatttaatgccctatgaaactggaataaatactactcttttaagtaaagcttctaaaattgtttcaaatgcaacaggatttcctgttcaatataataaagcgatagttggaaaaaatgcttttgctcacgaagcgggaattcatcaagatggaatgttaaaaaatagacaaaca

SEQ ID NO: 236938 - DNA, 837 bp, Unknown
  Bacterial polypeptide expressing nucleotide sequence isolated from the Sargasso Sea
gatgtcattatttcaacacactgtcacaatgaccttgtggttagctgtagctaactcactaacagcaataacagctggcgctagacaaattgaaggtgcaattaatggaattggggaacgtgcaggaaatacgtcaacagaagaaataataatggctgtaaaaacccggcaagatcagttcggagttgaaattcaagctgaaactcaagaaatttttgaaacttcacgattagtttcaaaactaactggatatcctgttcaatataataaagcagtcgtcggtaaaaatgcttttagccacgaatcaggaattcatcaacatggatatttaagaaatacaactacttatgaaataatgtcacctgactcagttggtcaagaagcaaaaattatacttggaaagcattctggtagagccggatttaaagatgctcttgataagttaggtatatctttaaataatgatgcattcaataatgcttttgatacatttaaaaagattgcagatagaaaaggtgaaattgtagaaaatgaacttagagcaattgtcggacaggtagaatcaagtagcgatagtccaaaacttgtgtctgtatctgtcaacagcaaagatgaatttgcttctgcaagcgttacactaaaagttggaaatgacgaaataacagaagaggcaactggagatggaatgatacatgctgcatttactgcagttaagtcaattctcaaatcagacgctacgttaattgattatagagttgagagtattacgaaaggtgctgacgcaacagctgaaattgtaacaataattaatgatggtcacctaatgaagcaaggaag

SEQ ID NO: 236939 - DNA, 562 bp, Unknown
  Bacterial polypeptide expressing nucleotide sequence isolated from the Sargasso Sea
gatgaaagatagacttgtaatatttgacaccacactaagagatggtgagcaaagtcctggtgcttcaatgaacattaatgaaaaagttaggattgcaaaagctcttgagaaactaaaagtagatgttattgaggcaggatttccaattgctagtgatggtgattttaaagctgtacaagaagttagtaaaaatataaaagatagtgttatatgtgcattagctagagcgattgataaagatattgaaagagcagggaatgcaatttcaaaagcaagtaaatcaagaattcatacatttatagctacttcagatatacatatggaaaaaaagctaaatatgacaaaagaacaagtcatagaccaagcagttaaatctattaagaaaattagaaaatatactgatgatatagagttttcacctgaagatgcaggaagatcagaatttaactttttatgcgagattatagaaaaggcgattaacgctggcgcaaatacaattaatataccagatactgtgggatataatatacctgtacaatttggcgatttaataaaagagcta

SEQ ID NO: 236940 - DNA, 856 bp, Unknown
  Bacterial polypeptide expressing nucleotide sequence isolated from the Sargasso Sea
aaacttgatatgactaacgatcaagttttagatgcaattaaagaaagtgtaacttacgcaagaaagtttaccaacgatgtagagtggtcttgtgaagatggaactagaacagatttagattttatgtgtaaaactatcgagctagcaattaaatgtggtgcgactacaattaatatacctgataccgttggttattcaattcctgaggaatttgcgcgaacaataacacatataaaaaacaacgtaccaaacatagataaagcaattatatcagcacattgccataatgatttaggtttagcagttgcaaatgctttagcaggtttatctgcaggtgttagacaaattgaatgtactatcaatggaattggagaaagagcaggtaacgctgctttggaagaaattgtaatggctatcaaaacaagaaatgatttaatgccttatgaaacaggaattaaaacagaacttattagtaaagcttcaaagatagtttcaaatgctactggatttccagttcaatttaataaagctatagttggtaaaaatgcttttgcacacgagtcaggaattcatcaagatggaatgttaaaaaatagagaaacatatgaaatcatgacaccagaaagtgttggtgttaaaaaaacatccttggtaatgggtaaacactctggaagacatgcgtttaaagataaattaggtgatttaggatattcagacttaacagatgacgttgtgcaagcagcatttggaaaatttaaggttttagccgataagaaaaagcacgtttatgatgaagatatcattgctttagtagatgatagcttaataattgacaataaaataaatgcgatcaacc

SEQ ID NO: 236941 - DNA, 574 bp, Unknown
  Bacterial polypeptide expressing nucleotide sequence isolated from the Sargasso Sea
atgagtgataaaaacagaataattatttttgatactacaatgcgtgatggagaacaatctccaggcgcaacgatgagtttagaagaaaaaattcaaatagctagatgctttgatgaactaggaattgatgttatcgaagcaggttttcctatcgcatctcccggagactttgaagctgtaacagaaattagtaaagttttaaagaaatcaattccagcaggcttatctcgagctacaaaaaaagatattgatgcatgtaaagattctttaaaacacgcaaagagatttagaatacatactttcatttctacgagtccacttcacatgaagcataaattaaacaagtctcccgaagaggttttaggtctaattaaagaaagcgtaagttatgctcgaaaatttacagatgatgttgagtggtcatgtgaagatgggacaagaacagatttagactacatgtgcaaaacagttgagcttgcaataaaatgtggtgccaaaacaattaatattcctgatacggtaggttattcagtaccatctgaatttaaaaaaattatagaaacattagtaaata

SEQ ID NO: 236942 - DNA, 724 bp, Unknown
  Bacterial polypeptide expressing nucleotide sequence isolated from the Sargasso Sea
atgacagataaaaacagaattataatttttgatacaacaatgcgtgatggagaacagtctccaggtgcatcaatgagcttagaggaaaaattacaaatctctagagtttttgatgagctaggcgttgatatcatagaggctggttttcctatagcttcacctggtgattttgaggctgtaactgaaataagtaaaacccttaagcgttctgttccagcagggttagctagagctactaaaaaagatattgatgcatgtcatcaagctttaaagcacgcaaaaaattttaggattcacacttttatatctacaagtcctcttcacatgaagcataaattaaataaatctcctgaggaagttttagaatctataaaagatagcgttacttatgctagaaaatttactgatgatgttgagtggtcttgtgaagacggaacacgaactgatatggattatatgtgcaagacagttgaacttgcaataaaatctggagcaaaaacaattaatattccagatactgttggctacactgttccctcagagtttaaaaaaattattgaaactttgataaataaagttccaaatattgataaagcgattctttctacacattgtcataatgatttaggactagcggtagcaaattcactagcaggagtaatggctggtgctagacaaattgaatgtacaattaatggcataggagaaagagctggtaacgcag

SEQ ID NO: 236943 - DNA, 226 bp, Unknown
  Bacterial polypeptide expressing nucleotide sequence isolated from the Sargasso Sea
attgaaaattagaatatttgacaccacactaagagatggagagcaaactccaggtgtttcactatctcctgaaaaaaaattgaacattgcaaaaaaattagatgtattaggaattgatgctatagaaacaggatttccggtcatttctgatggtgaacggaatgcagtaaagatgattgcaaatgagaatttacaatcagaattatgcggtttagcaagaacaaac

SEQ ID NO: 236944 - DNA, 850 bp, Unknown
  Bacterial polypeptide expressing nucleotide sequence isolated from the Sargasso Sea
cccggagattttgaagcagtaactgaagttagcaagattttaaaaaaatctatccctgcaggattatctagacattccaagaaagatattgatagagcctatgaagctttaaaacatgctccaagatttagaattcacacatttatttcaacaagtcctcttcatatgaagcataagttaaatatgtctccagatgatgtgtacgagtctattggacagcatgttgcctatgcaagaaaatttactgatgatgtcgaatggtcatgtgaagatggcacaagaacagatatggattttatgtgcaagactgtggaactagctattaaaaatggggcaacaacaataaatattcctgatacagttggttatacaattccatctgagtttaccaaaataattgaaactttattaaataaagttccaaatattgatcaagcaattttatcaacacactgtcataatgacttaggtttagcagttgcaaactctttagctggcgtacaggctggagctagacaaattgaatgtaccatcaatgggttaggagaaagagctggaaatgctgcacttgaagaggttgtgatggcaatcaaaacgagaccagatttgatgccttatgaaacaggtattaacacaacccttctaagtaaagcttctaaaattgtttcaaatgcaacgggatttcctgtacaatataacaaagcaattgttggtaaaaatgcttttgcacatgaggcaggtattcatcaggatggaatgcttaaaaatagacaaacatacgaaattatgacccctgaaagtgttggtgttaaacaaacctcattagtaatgggtaaacattctggcagac

SEQ ID NO: 236945 - DNA, 745 bp, Unknown
  Bacterial polypeptide expressing nucleotide sequence isolated from the Sargasso Sea
atgactaaaataattaatgattcagcttctaaatatcgaccattcaagtctatagatatagacaatcgaacttggccttcaaatactattactcaatcacctatgtggtgcagtgtagacttaagggatggtaatcaagctcttatagagcccatgggtgaagaaagaaagcttaggatgtttagtctcttaattgaaattggtttcaaagagattgaagtgggtttcccctctgcgtctcaaacagacttcgattttgtcagaaaaattattacggaaaatcttataccaaatgatgtaactatccaggctttaactcaagccaggcctgagttaattaagaaaacttttgaggctctagagggagcaaaaaaggctattgttcatgtctacaattctacttccactttacagcgtaaagttgtttttaagagtgatgaagcaggtataaagaaaattgcaactgatggtgctaaatgggtaaaagaagagtcagaactatatgatgaaactgactggtcatttgaatatagtccagagagctttactggaacagaactcccttatgcggttgaggtgtgtaatgcggtcaatgaaatttgggaaccgaatgatcaaaagaagacaatcatgaatctccctgccacagtggagatggcttctccaaatacttatgcagatcaaatagaatggatgtgtagaaatctgcaggatagagaaaatgtaatagttagtcttcatccac

SEQ ID NO: 236946 - DNA, 634 bp, Unknown
  Bacterial polypeptide expressing nucleotide sequence isolated from the Sargasso Sea
atgagcgataaaaatagagtatttatatttgatacaacaatgagagacggggaacagtctccaggtgcatcaatgagtttggaggagaaaattcaaatagcaagggtatttgacgaacttggggttgatataattgaagcaggttttccgatcgcctcaccaggagattttgaagcagtttcagaagtaagtaaaattttaaaaaattcaattcctgcaggattagcaagacattcaaaaaaagatattgaccgatgttttgaggcattgaaacacgctccaaggtttagaatacacacatttatttcaacaagcccacttcatatgaaacataaattaaataaaacgccagaacaagtttatgattcaataaaagaacacgtcacgtatgctagaaaatttactgacgatgtagaatggtcgtgcgaagacggaactagaacagatatggattatatgtgcaagactgttgaacttgcaattaaatgtggggcaaaaacaattaatattccagatacagttggctatacagttccatctgaatttacaaaaattattcaaacattattaaataaagttccaaatattgatcaagcgatactttctacacattgtcacaacgacttaggtttag

SEQ ID NO: 236947 - DNA, 877 bp, Unknown
  Bacterial polypeptide expressing nucleotide sequence isolated from the Sargasso Sea
tttagccagagctacaaaaaaagatattgatgcttgtcatcaagctttaatgtatgcaaaaaattttagaattcatacttttatttcaacaagtcctcttcatatgaaacataaattaaataaatcaccagaggaagttttagagtcaattaaagagagcgtaacttatgcgagaaaatttaccgacgacgttgagtggtcgtgcgaagacggaactcgaacagatatggactatatgtgcaagacagtggaacttgctatcaaatgtggagctaagactattaatattccagacactgttggctatacagtaccttctgagtttagaaaaattatagaaacattaattaataaagttccaaatattgataaagcaattctttctactcattgtcataacgatttgggattagcagtagcaaattcattagccggggttatggctggagcaagacaaatagagtgtacaataaacgggataggtgagagagctggtaatgctgcacttgaagaagttgttatggctatgagaacgagacatgatttaatgccttacactacaaatattaatactaaacttttgagcaaagcttctaaagttgtttcgaatgcaacaggttttcctgttcaatttaataaagctgtcgtaggaaagaatgcatttgctcatgagtcaggtatccaccaagacggaatgttgaagaatagaaatacctacgaaataatgactcctgagagtgttggagtaaaaaaaacatcattagtgatgggcaaacattcaggccgacacgcatttagagacaagctttcagatatgggttatgtagatgtaactgacgatataattaatacagcttttggaaatttaaaattttag

SEQ ID NO: 236948 - DNA, 895 bp, Unknown
  Bacterial polypeptide expressing nucleotide sequence isolated from the Sargasso Sea
gaagatgtcattatttctactcattgtcacaacgatctcggattagcagttgctaactctcttactgcaataactgcaggtgcgagacaaatagagggtgcaattaatggtattggtgaaagagctggtaatacttcaacagaagagatcattatggcaataaagacaagacaagatcagtttggagttaatataaaggcagaaactacagaaatttttgaaacttctagattagtttcgaaattaactggatatcctgttcaatacaataaggcggttgttggaaaaaatgcatttagtcacgagtctggaattcatcaacatggttatttgaggaatacaacaacttacgaaataatgtcacccgactctgttggacaagaagcaaaaataattttaggtaaacattctggtcgcgcaggatttaaagatgcactagagaatttaaatataagccttgatgatgattcatttaataatgcattcgatacttttaaaaaaattgcagataggaaaggtgaaatagttgaaaatgaattaagagctattgttggacaagttgaaaataaagaaaattcaacaaagttagtatctgtatctgtaaatagtaaagatgaatttgcatctgcagaagtaacactaaaagtggagggaaaagaagttacagaagaagcaactggtgacggaatgattcatgcagcatttacagcagtaaaaaagatactaaattctgatgcgaaattgattgattaccgtgtagaaagtattactaaaggttcagacgcaactgcagaaatcgttacaataataaacgatggccatttgatgaaacagggacgcgctgtatctacagatgtagtacaaggttcagttgaatcatttctaaatgcattaa

SEQ ID NO: 236949 - DNA, 877 bp, Unknown
  Bacterial polypeptide expressing nucleotide sequence isolated from the Sargasso Sea
catgaaagattctagagaaataattatatttgataccactttgagagacggtgagcaggctcccggctgcagtatgacaattggtgaaaagctaaaaattgcacatgcacttaaagaattaaatgttgatgtaattgaggctggttttgcagcagcatcaccaggtgattatgaagctgtgaatgcaattgcctctgagattgatggaccaactatatgctcacttgcaagatgcaatgaaagcgatatagaaaaagcatatgaggcacttaaggttaataaaaacagaagaatacatgtttttgtcgccaccagtgaaatacatctcaagcacaaactaaatatggctaaagatgaagtgcttaaagccgcttatgaaggcgttaaaatggcaaagtcattttgtgataatgttgagttttcacccgaagatgcttcaagaactgatcatggttttctcacagaagtggtcaatgctgcaattgaagcaggtgccacaacaattaatgttcctgatacagttggttacacaatcccttatgaatttggtgaattatttaaacacttgatttcaaattgtacacatgcagagaatgttgtttttagtgttcactgtcacgatgaccttggtctttcagttgcaaatagcttggcagctgttgagtctggagcaagacaaattgaatgtacgataaatggtatcggagaaagagctggaaatacctcacttgaagaagtatgcatggcaattagaacaagggaagagtattttgattttaaaacatcaatagattcaacaaaattatacccaacaagcagattggtttcctctatcactgggatgcatgttcctagaaataaagcaattggttggtga

SEQ ID NO: 236950 - DNA, 925 bp, Unknown
  Bacterial polypeptide expressing nucleotide sequence isolated from the Sargasso Sea
tacgcaagaaaattcacagatgatgttgaatggtcatgtgaagatggaactagaactaatcttgatttcatgtgcaaaacaattgaacttgccataaaatgtggtgcaactacaataaatattcctgatacagttggttactcaattccagaagaatttgctagaactattacacatataaaaaacaatgttccaaatatagataaagcaattatatctgctcattgccataatgatctaggattagcagttgcaaatgctttagcaggattatctgcgggtgttagacaaatagaatgtacaattaatggaattggagagagagcaggtaatgctgctttggaagagattgtaatggccattaagacaagaaatgatttaatgccatacgagactggaattaaaactgaacttataagcaaagcctcaaaaattgtttcaaatgctactggttttcctgttcaatttaataaagcaatagtgggtaaaaatgcttttgctcacgagtcaggcattcatcaagatggaatgttaaaaaatagagaaacttatgaaattatgactccagagagtgttggtgttaaaaaaacatctttggttatgggaaaacactcaggaagacatgcatttaaggataaacttaatgatttgggctatacagatgtcacagacgatgtaattcaagcagcattcggaaaatttaaagttttagcagataagaaaaaacatatttatgatgaagatatagtagctttagtcgatgatagtttaataattgataataaaattaatgctatcaatcttaaatcattaaaagtttttgcgggaacaggagaaccacaaagagcagaaatgacactagatgtttttggtgaagttaaaaaaactactcaaaatggagacggaccagtagatgcaatattta

SEQ ID NO: 236951 - DNA, 784 bp, Unknown
  Bacterial polypeptide expressing nucleotide sequence isolated from the Sargasso Sea
atgcgagatggtgagcaatcaccaggcgcatcaatgagcttggaagaaaaaattcaaattgcaagagtgtttgatgagcttggtattgatattattgaagctggatttccaatagcatcacctggagattttgaagcagtaacagaagtaagtaaagttttaaaaaattcaattccagcagggttatctaggcattcaaaaaaagatatagacagatgttatgaagcattaaaacatgcgccaagatttagaattcatacttttatttcaacaagtccgttacacatgaagcataaacttaataaatcttcagaagaggtatatgaatcaattaaagagcacgtgacatatgcaagaaaatttactgatgatgtagaatggtcatgtgaagacggaacgagaacagacatggattatatgtgtaagactgttgaacttgcaataaaatgtggagcaaaaacaataaatatacctgatactgttggttatactgtaccatcagagtttacaaaaattatacaaacattaatgaacaaagtaccaaatattgataaagcaatattatctactcattgtcataacgatttaggtttagcagttgctaattctttagctggtgttcaagcaggcgcaagacaaatagaatgtaccatcaatggtattggcgaaagagctggtaatgcagcactagaagaagttgtgatggcaataaaaacaagaaatgatcttatgccttataccacaggaattaacactacacttcttagtaaagcttcaaaaatag

SEQ ID NO: 236952 - DNA, 844 bp, Unknown
  Bacterial polypeptide expressing nucleotide sequence isolated from the Sargasso Sea
aatggctaacgaaaaagtaaaaatattagatacaacattaagagacggagaacaatctgctggcatcgggatgacagtcgaagagaagatggaaattgctaagcagctggaaaagcttaaagttgacattatcgaagcgggctttgctgctagttctccaggagatttccaggcagtagaaaacatagcgaaagaagttaggagttctgtcatttgctctttatccagagcgcaccctaacgacgtggaccaagcatggggagctattaaacaggctgaatcaccaaggatccatgtgtttctctcttcctcagagattcaagttttgcaccaactcagaaaaaaccgtgaagaagttatggatatggctgtagcaatggtcacaagagcaaagtcgtattgcgatgatgttgaattctcacccatggatgctactagaaccaatccagaatatttatacaagatgcttgaagccgtaattaaagcaggtgccaccaccatcaatattgccgacactgtaggttacgcaataccatcaaacttcgcggaattgataaccgacatacgtaataaaatacctggcatagaaaaaactaccctaagcgtacattgtcataatgacttggggttagcagtgtcaaatactctagcggctattcaggctggagtacgtcaagtagaaggatgtatcaatgggttaggagagcgcgcaggcaacgcctcattagaagaaataataatgggattggacactcgcaaagatctatttaatattgactgcaatattgataccactcaattatatccaacaagcagactagtaagccgaataacaggcatggca

SEQ ID NO: 236953 - DNA, 524 bp, Unknown
  Bacterial polypeptide expressing nucleotide sequence isolated from the Sargasso Sea
aatggaaaaaatccagatatttgacacaacccttcgtgacggtgagcaatcaccaggatgttccatgtctgcaggtgaaaaactgcttcttgcccgtcaattggaaaaactaggggtggatacgatcgaagccggttttgctgcatcgtctcctggagattttgaaagtgtcaggagcattggtcaggaaatctgtgaatccatggttgtctccctctgccgaatggtagaaaacgatgtggaccgtggagccgaggcattgaaagacgctcataaatgggggcttcacacatttatagcttcaagtccgcttcacatgaaacacaaattgcagatggaacccgaagaggtgcttaaagcaactacaaaatgtgtggaaagagcaaaaaaatacaccgacaatgttgaattcagtgcggaagatgcaacccgaagtgaaccagaatttttagtacaattgttctcagaagctgtgagagcaggtgctgtcgtgttgaatgtccctgataccgtgggatacacca

SEQ ID NO: 236954 - DNA, 863 bp, Unknown
  Bacterial polypeptide expressing nucleotide sequence isolated from the Sargasso Sea
tatgtgtaagacagtggaattagcaattaaatgtggtgctaaaacaattaatattccagatactgttggctatactataccatctgaatttacaaaaattattgaaactctcctaaacaaagttccaaatatagataaagcaattctttcaacgcattgtcataatgatttaggtttggcagttgctaattctttggcaggtgtccaagcaggagcaagacaaattgaatgtactattaatggtctaggagaaagagctggaaatgcagctcttgaagaagttgttatggctatgaaaacaagaccagatttaatgccatatgaaactggaattgaaactactcttttaagcaaagcatcaaaaatagtatcaaatgctacaggttttcctgtccaatataataaagctattgttggaaaaaatgcttttgctcatgaagcaggcattcatcaagatggaatgttaaaaaataggcaaacatatgaaattatgacaccagaaagtgtaggtgttaaacaaacatctctcgtaatgggaaaacactcaggcagacacgcatttaaagataaattaaccagcttaggatatccagatcttactgatgacgttgttgataatgcttttgcaaaatttaaaattttagcggataaaaagaaacatgtttatgatgaagatataattgctttaatagatgatagtctaataattgataacaaggtaagtgctattaatttgaaatctctgaaagtatttgctggtactggtgaacctcaaagagcagaaatgacattagatgtttttggtgaggttaaaaaagcatctgaaacaggtgacggaccagttgatgcaatttttaaatgta

SEQ ID NO: 236955 - DNA, 367 bp, Unknown
  Bacterial polypeptide expressing nucleotide sequence isolated from the Sargasso Sea
atgagtgataaaaatagaataattatatttgacacaactatgcgagatggagaacagtctcctggtgcttctatgagcttggaagagaaactccaaatttcaagagtgttcgatgaattgggtgtagatgtaattgaagctggtttccctattgcttctccaggagattttgaagctgtaactgaaattagcaaatctttgaaaaaatcaattccttgcggactggcgagagcaacaataaaagatatcgatgcttgtagagactctttgaaacacgcaaagaattttagaattcatacatttatttcaacaagtccacttcatatgaagcataaattaaataaatcaccccgatcaggtaattgag

SEQ ID NO: 236956 - DNA, 955 bp, Unknown
  Bacterial polypeptide expressing nucleotide sequence isolated from the Sargasso Sea
aataaatctccagaagaggtattagaagcaataaaagaaagtgtttcttatgcaagaaagtttacagatgatgtagagtggtcatgtgaagatggaacaagaacagatatggattatatgtgtaagacagtggaacttgctataaaatctggcgctaagacaattaatatacctgatactgtaggttatactgttccttcagaatttaaaaagattatagaaacattaagaaataaagttccaaatatagataaaactgtcatttctacgcattgtcataatgatttaggtttagcagtagcaaattcattagctggagtgatggctggagcgaggcagattgaatgtactattaatggtataggagaaagagcaggaaacgcagctctagaggaagttgttatggctatgagaacaagacatgatttaatgccgtacacaacaaatattaatacgaaacttttaagcaaagcatcaaaagtagtttctaatgcaactggttttcctgttcaatttaacaaagctgttgtaggaaaaaatgcatttgctcatgaatcaggaattcatcaggatggaatgcttaaaaacagaaacacttatgaaattatgactccagaaagcgttggagttcataaaacttctttggtaatgggcaaacactcaggtcgtcatgcattcaaagataaattaaatgatttaggttatgtgggagtaactgatgatgttattcaaacagcttttggtaaatttaaagttttagctgataaaaagaaacacatttatgacgaagatatagcagcgatagtagatgacagtttggtttcagaggataatgtaattaaattaaaatctttgaaagtttttgcaggtactggtgagccacaaaaagcagaaatgactttagaagtattcggagaggttaaaaagcatctgaaacaggagatgggcctgtaga

SEQ ID NO: 236957 - DNA, 816 bp, Unknown
  Bacterial polypeptide expressing nucleotide sequence isolated from the Sargasso Sea
cctgtctcaaaaaacaaaattattataaatcttcctgctactgtagaaatgtcaactccaaatatttatggcgatcaaattgaatggatgagcaaaaatttaaaaaatagaaatgacatatgcctgagcctgcatcctcacaatgatagaggaacagctgtcgcagcttctgagtttggaatcatggctggtgctgatagagttgaaggaacattatttggaaatggagagagaactggtaatgttgatatagtaacaattgctttaaatatgctcactcaaggcgttgaaccagatttagatttttctaatatcaattctgttatgagagaggtggagtactgcaatcaactgccagttcatccaagacatccttatgctggagatcttgtttttacagccttctcaggctctcaccaagatgcaattaaaaaaggttttcaagctattaaaaaatctaatgatccaaagtgggaagtgccctatcttccgatcgatccagctgatctaggtagaaattacgaagcagtagtaagaattaattctcagtctggtaaaggaggagttgcttttttattagaaaaagatcatggggtatctttgccaagaagacttcagattagcctaagtcaaagaattcaaaagttagcagatgatactggtaaagagattagtagctcacaaatatgggatatttttgaaaaaaaatatcttcaacctgttaataattactcgtacataaaacactcatcatcatctaaagatgatcttcataaattagaactgacaatgaatatgaataatgaggaaataaca

SEQ ID NO: 236958 - DNA, 415 bp, Unknown
  Bacterial polypeptide expressing nucleotide sequence isolated from the Sargasso Sea
atgagcgatagagtatatatttttgatacaacattaagagatggagagcaatctcctggagcaacaatgaatcttgatgaaaagatgcaaattgctcaactattggaagagatgcaagttgatataattgaagcaggttttccaattgcctcaaatggagattttgaagcagtatcagaaataagtaaaaatattaaaaactcaactatagcagggttagctagagcaaaacttgctgacatagatcgagcatgggaggccgttaagaacgcgaagtctccaagaatacatacattcattgctactagtccaattcatatgaaatataaattgaagaaaaccgaggaagaggttttagagtcaattaagcacacagtaacgcatgcgagaaacttatgtgataatatagagtgga

SEQ ID NO: 236959 - DNA, 817 bp, Unknown
  Bacterial polypeptide expressing nucleotide sequence isolated from the Sargasso Sea
gaggagtggggcgctacagttgagcatccgatgataattaatttaccttcaacagtcgaaatggcgacgccaaatgtgtatgcggatcagattgaatacttcattagacagtttcctaagcgtgattcgattatagtaagtttgcatacacataatgatcgaggcaccgggatagcggcaactgagttaggacttatggctggagcgcaaagagttgagggcacgctttttggcaatggggaacgtacgggtaattgtgacatagtcactgtcgcgatgaatttattcagccagggaatagatccctgcttggatttcaggaacatgccagaaatacgtgaaatcgtcgaatcgattaacaagttgccagttcacgagcgacatccttatgcaggcgacttagtatttacagctttttcaggatctcaccaagatgcaattaaaaaaggcatgaaaaaagtagatagagatagatgggaggtcccatatctgccaatcgatccggctgatgttggttcttcttataaagaaactgtccgagttaatagtcaatctggaaaggggggtataggttttgtactagaagaattctatggaatagctttgcccaaaagtatcctagttcagtttagtcaggtggttcaaaaattaacagagcaattagatagagaagtaaagccatcggaaattcttgaagcattgttggcagagtacgttgatgagacgggattatatcaattagtagattatgacctatcaagtggtatttcagctgatcaaaaaagtatcgctagagtaaaagttgcggataatcttg

SEQ ID NO: 236960 - DNA, 850 bp, Unknown
  Bacterial polypeptide expressing nucleotide sequence isolated from the Sargasso Sea
cttctgcataaatgctattaacctagctaagaaatttacagatgacgttgaattttctccagaagatgctggaaggtctgaatttgatttcctttgtgaagttatagaagccgctattgattcgggcgctactactatcaacatccctgacacggtaggctataatatgcctcatcaatttggatcattaataaactctttaataaaaaaaattagtaactcaaataaagctatattttcggtgcattgccacaatgatctcggtttggctgtagcaaattctctctcagcagtattaaatggtgcaagacagattgaatgtacaattaatggccttggagagcgtgctggcaatgcagcacttgaagaaatcgtaatgacagttaaaactagacgagatatctttgattgtaatacgagtatagatacaacaaaaattatgaaagcatctagattagtatcaggaatcacaggatttccagtacaacccaataaagctattgtaggcaagaatgcttttgcgcatgaatctggtatccatcaagatggagttattaaatccagagagacttacgagataatgaaggcagaggatattgggcttgtgagcaataaacttgttttaggaaaacactctggcagaaatgcatttaaacaaaaagttaaagatttgaatatttttccaaagactgttcaggaatttgatgagttattctacagatttaaagatttagctgataagaaacatgaaatttttgatgaggatattattcaattagcaactaacattgaatttaaagctcataatatttcctttaaacacatgagcgtagtctctgaaaccggaaaa

SEQ ID NO: 236961 - DNA, 979 bp, Unknown
  Bacterial polypeptide expressing nucleotide sequence isolated from the Sargasso Sea
tattccagatactgttggctatactataccatctgaatttacaaaaattattgaaactctcctaaacaaagttccaaatatagataaagcaattctttcaacgcattgtcataatgatttaggtttggcagttgctaattctttggcaggtgttcaagcaggagctagacaaattgaatgtactataaatggtctaggagaaagagctggaaatgcagctcttgaagaagttgttatggctatgaaaacaagaccagatttaatgccatatgaaactggaattgaaactactcttttaagtaaagcatcaaaaatagtatcaaatgctacaggttttcctgtccaatataataaagcaattgttggaaaaaatgcttttgctcatgaagcaggcattcatcaagatggaatgttaaaaaataggcaaacatatgaaattatgatgcccgagagtgtaggtgttaaacaaacatctcttgtaatgggtaaacactcaggaagacacgcatttaaagataaattaaccagcttaggatatccagatctcactgatgatgtagtcgacaatgcatttgcaaaatttaaaatcttagcggataaaaagaaacatgtttatgatgaagacataatcgctttaatagatgatagtttaataacagacaacaaagtaagtgcaatcaacttaaaatctttgaaagtatttgctggtacaggcgaacctcaaaaagcagaaatgacactagatgttttcggtgaggttaaaaaagcttcagaaacaggtgatggaccagttgatgcaatttttaaatgtataaaaaaactttacccacatgaggtaaacttgcaactttaccaagtgcatgcggttacagagggaacagacgcccaagccacagtaagtgttaaaattgaagaaaatggaaaaacaactgtaggacaagctgcagatactgacactttagttgcatctgcaaatgct

SEQ ID NO: 236962 - DNA, 421 bp, Unknown
  Bacterial polypeptide expressing nucleotide sequence isolated from the Sargasso Sea
tatggctgagaaagataaagtattcattttcgatacaactatgagggatggtgaacaatcaccaggggcctctatgagtgttgaggaaaaaattcagatatcaagagtttttgatgaaatgggaattgacattattgaggctggttttccaatatcatcgcctggtgactttgaagccgtaagcgcaattagtaaaagtgtaaaaaactcaattccttgcggtttagcaagggccacaaaaaaggatatcgatgcttgtcacgagtcacttaaatttgcaaagagatttcgtattcatacctttatttcaacaagtccagttcatatgaagcataaacttaacatgacagatgagcaagttttagaggctataaaagaaagtgttacttatgctaaaaaatttactgatgacgttgagtgg

SEQ ID NO: 236963 - DNA, 697 bp, Unknown
  Bacterial polypeptide expressing nucleotide sequence isolated from the Sargasso Sea
ctttgccccgaatcagggattcaccaggacggggtcctgaaaaacccactcacgtacgagatcatcgatgcccgcaccgtcggcctgagtgacaaccggatctccctgggcaaactcagtggccgtagtgctgtccgggcgcgtctcgaagaattgggttatgacctgacccgtgaggatctcgatgaggcctttgcccggttcaaggacctggcggatcgcaagcgagaaatcactgatcgcgatcttgaggcgattgtgagcgaacaggtccagcaaccggatgctcgcttcgtgctgaaactggttcaggtcagttgcggcagcagtctgcgaccaacggccacggtgacactggctgatgaagaggatggtgaacgaaccggctccgctgtcggtaccggaccggtggatgcggtctgtcgcgctctcaatgaccttgccggggtccccaatgagctggttgagttctcggtcaaatccgtcacggaaggcatcgatgccatgggcgaggtcaccatccgactgagacgggatggttccctgttttcaggtcattccgccgacaccgacgttgttgttgccgccgggcaggcgttcatcaatgcattgaatcgactggtcgctggtatggagagacggcctttgcatccccagaaggatgtggtgtcggttgaaacgcgcccaagcctctgac

SEQ ID NO: 236964 - DNA, 826 bp, Unknown
  Bacterial polypeptide expressing nucleotide sequence isolated from the Sargasso Sea
tttgcaaaaactataacttcaataaaaaacaatgtaccaaatattgataaggctattctttctgcacactgtcataatgatttgggtttagcagtagctaatgctttgtcaggtttatcagcaggagttagacaaattgaatgtactataaatggaataggtgaaagagctggtaacgcagcacttgaagaaattgtgatggctataaaaacacgagatgacttattaccttatgaaacaggaattaaaactgaactaattagtaaagcatctaaaattgtatctaatgctacaggttttcctgtccaatttaataaagcgatcgttggaaagaatgcttttgctcatgaatcaggaattcatcaagatggaatgttaaaaaatagagaaacttatgaaatcatgacaccagaaagtgttggtgtaaaaaaaacatctttagtaatgggaaaacactctggacgtcacgcatttaaggataaattaagtgatttaggatatgcagatgtaactgatgatgttgtccaagcagcttttggtaaatttaagattttagcggataagaaaaaacatatttatgacgaagatattgttgcattagtagatgatagtttaattattgataataagataaatgcgattaatctaaaatcattaaaagtatttgctggaactggtgagccccaaagggccgatatgactttggatgtttttggagaagttaaaaagacttctcaaactggtgatggtccagttgatgcaatatttaaatgtattaaagaactttatcctcatgatgtaaaattatctctttatcaagttcatg

SEQ ID NO: 236965 - DNA, 513 bp, Unknown
  Bacterial polypeptide expressing nucleotide sequence isolated from the Sargasso Sea
gatgaacaaagaaaataattacataaagatttttgacaccacattaagagatggcgagcagtctcctggcgcttcaatgaacattgaagaaaaattaaaaattgcagaagctttagaagatttgaaagttgatattattgaagcaggatttcctgccgcatcaaagggagactatgaagcagtttcagaaatatcaaaaaagattaaaaattcatcaatatgcgctttgagcagagcttcaaaaaatgacattcaaacagctgcggatgctctcaaaaatgcagcggctccaagaatacatacatttatctcaacaagtgaacttcacatgaaacataagttacagttgaattctgatgaggtttaccagaaggtaattgacagtgtatcatttgcacggaatctatgtgatgatgttgagtggtcttgtgaagatggaactaggacagatttagactttatgtgtaaaactgtcgaagcggcgattaagagcggcgcatctacaatacatat

SEQ ID NO: 236966 - DNA, 962 bp, Unknown
  Bacterial polypeptide expressing nucleotide sequence isolated from the Sargasso Sea
attaatctcattaagaataatgttcctaatattgataaagcaattatttctgctcattgtcataatgatttaggtttagctgtagcaaatgcattatctggattatcagctggtgttagacaaattgaatgcacaatcaatggtattggtgagagggctggtaatgcagctcttgaggaaatagttatggcaataaaaactagagatgatttattgccttatcaaactggtatcaagacagaattaattagcaaagcttcaaaaattgtttcaaatgccacagggtttccagttcagtttaataaagctattgttggaaaaaatgctttcgcacatgaatcaggaattcaccaagatggaatgctaaaaaacagggaaacatacgaaataatgactccagaaagtgtaggagttaaaaaaacttctttagtaatgggtaaacactcaggcagacatgcatttaaagataaattaagtgatcttggatatgcagatgtaactgatgatgttgttcaagcagcttttggaaaattcaaaattttagccgataaaaaaaaacatatctatgatgaggatattgttgctttagttgatgatagtttaattatagataataaaattaatgctatcaatcttaaatctctaaaagtttttgctggcacaggagagccacaaagagcagatatgaccttggatgtttttggagagattaagaaaactactcaaacaggagatggtcctgttgatgcaatttttaaatgtataaaagaactttatccacatgatgtaaaattgtctttatatcaagttcatgctgttacagaaggaacagatgcacaagcgactgtgagtgtaaaaattgaggaaaatgatcgtactactgttggacagtctgctgatactgatactttagtagcatcagcaaatgcatacttaaacgcattaaataaaatgttgattaa

SEQ ID NO: 236967 - DNA, 868 bp, Unknown
  Bacterial polypeptide expressing nucleotide sequence isolated from the Sargasso Sea
tagaatagcttctcaactgaaaaaattaaatgttgatattatagaagctggatttgctgctagttcacctggtgactttgcagctgtgcgaaaaattgctctagaaattgaaggtccaactattgctactcttgcaagagctgtaccttctgatatagattcagcaatcaattgtcttaaaggtgctatgaagcctaggattcatacatttttgtctgtttctgatattcatatgcttcatcaaatgaagaaagacagagaatctataatgtctatggcaatagatgctgtcaagagagctagagactctgttgcagatgtagaattctctccgatggatgcttctagatcagatccagattatttatatatgatgttagaaaatgctatttctgcaggagctacaactgttaatattccagatactgtaggctatactaatcctcaagaatttggagatttgatagcaggtgtatttaataatgtttcaaatataaataaggctgttgttagcgttcactgtcataatgacttaggtatggctgtagcgaatagcttgtctgcattagaaaatggtgcaaggcaaatagaaggttgcattaatggtttgggtgaaagagcaggaaatgctgccctagaagaagtaatcatggcagttaaaacaagaccagatcattatggagttgaaacacaaattaataccaaagaaataggaccttcgagtagattgatttctaacatatttggttttcctattcaatttaataaagctatcacaggtcaaaatgcttttagacattcatctggaattcatcaagacgcatttcttaaggaaagaacaacatttgaaataatgcttcccgaagaa

SEQ ID NO: 236968 - DNA, 734 bp, Unknown
  Bacterial polypeptide expressing nucleotide sequence isolated from the Sargasso Sea
attttgtacacagttacctgttcatgaaagacacccttatgcaggatctttagtgcatactgctttctcaggaagccatcaagatgccattagaaaagggatggaagcgatatctaagtctaatcaggataaatgggaagtcccttacttaccaattgatcccagtgatataggtaaaacttacgaagcaataattagagttaattcccagtcaggaaaagccggatctgcttggttgctcgagcaagaccataatatattcctacccagaggggctcaaattcaattcagccaatcagtccagaaaatagctgatcaaacaggtaaagaaataacttcacaaataatctgggatatttttaaaaaagaatacttaaatgatggaaaatttaagttaatagattttgatagtaaaaaactttcacgaaacagtaataaagaacaaattgacgctactataaaatttttagataagaatatagaaatatctgcttctggtaatggtccaataagtgcttttgtaactgctatgagagaaaggttcaacttgtcttttagattaagcgattttggtcaaaatacaagaagttctggttcaactgcagaagccgctgcttttgttgaaataaaagtaccaaatgagaacggtagaagtgtatatggtgttggaattgatacttctattactcttgcaccaataaaagcagttataagtgctataaacagaatttagt

SEQ ID NO: 236969 - DNA, 532 bp, Unknown
  Bacterial polypeptide expressing nucleotide sequence isolated from the Sargasso Sea
aaaactgagtctattactaaagcatcgcgtttagtttcttcaataactggattttctgtgcaacctaataaagcaattgtaggagcaaatgcttttgctcatgaggctggtattcaccaagatggaatgttaaaaaatgctgagacttatgaaattatgactcctgaaactgttggcttaacagaatcatcattagttttgggaaaacactctggaaaacatgctttttctgagaaattaaaagaacttggttatgaactaggtgacaatgcgctaatggaattatttggccgtttcaaagatttagctgatagaaaaaaagagatttttgatgaagatttaattgcgttggtgggagatagagcagcttcctataatgaacatattaaatttgtttccttaaaagttaatgctggctcttttgaaaagcatgaagctaaattagctatattaatcgatcaaaaaaataaagaaatagttaaaaatggtaatggtccagttgatgcaacttttaatgctattaaatcttaac

SEQ ID NO: 236970 - DNA, 1009 bp, Unknown
  Bacterial polypeptide expressing nucleotide sequence isolated from the Sargasso Sea
ggagagcaatctcctggagctacgatgaatcttgatgaaaagatgcaaattgctcaactcttggaagagatgcaagtggatataattgaagcaggctttccaattgcttccaatggcgattttgaagctgtatcagaaatcagtaaaaatattaaaaattcaactattgcaggattagctagagcaaaacttgctgatatagaccgtgcctgggaggctgttaaatacgccaagtctccgaggatacatacattcattgccactagtccaattcatatgaaatataaattaatgaaaactgaggaagaggttttagagtcaattaaacacacagtaacccacgcaagaaacttatgcgataatatagagtggagttgtgaagatggaggaagatctaatttagaatttttatataaatgtattgaacttgctatctcgtcgggagcatcaactatcaatattcctgatactgttggttttactttgccatcagaatttggatctatttttaaatctgtgaaaaacaatgttccaaatattgataaagctattttatcaacccatactcataatgatttgggattagcagtagcaaatagtattgcagcaatacaagaaggtgcacgtcaagttgagtgcactataaatggattaggtgagagagctggtaatgctgctcttgaagaagtagtaatgacattaaaagtaaaaaaagatttaataccatttcatacaaatgttaaatcggaatatattacaaaagcttccagacttgtttcctcaattactggatttagtgttcagcctaataaagctattgtaggcgctaatgcttttgcccacgaggcaggtattcatcaagatggaatgttaaaaaatgccgaaacatatgaaatcatgacccctgagtctgtaggacttaataaatcttctttggtcttaggcaagcactcaggaaaacatgcgttttcagaaaaactaaaagagttaggttatgattttggtgata

SEQ ID NO: 236971 - DNA, 739 bp, Unknown
  Bacterial polypeptide expressing nucleotide sequence isolated from the Sargasso Sea
ggcggctggcgccaccacggtgaatattcccgatacggtgggctgggcggtgcccgatgaattcggccagctcattgcgcatttgcacgacaacgtggaggaattccaaaccggcaaagccgtcattagcgtgcactgccataatgacttgggcttggccgtcgccaactcattggccgccgtgcaagccggagcccgtcaggtggaatgcaccgtgaacggcattggcgaacgcgccggcaacgcagccatggaagaggtggtgatggcgctcaagacacgcaagagtttctatcgcggcttcagcatgggcgtggacacgaaagagattgtaaaggcctccaagctggtcgcgcggatgagtggtttaagcgtgcagcgtagtaaggcgattgtgggcgagaatgcgtttgcacattccagcggcattcatcaggacgggatcctgaagaagcgagagacgtacgagatcatgaaccccaagcatgtgggctggggcaaaaccgaactgccactcaccaagcacagcggccgagcggcggtggcagctcgcttgaaacatctcggcttcaaaatggacgccgccgaagtggggtcgatctttgataagtttaaagagatcggagacaagaagaagtttgtttatgatgacgacttggccgcgctggtggagggccacatcaccaccgtgcaggaaacgtggtcgctcgattatttaagtgtcagcacaggcaaccaa

SEQ ID NO: 236972 - DNA, 925 bp, Unknown
  Bacterial polypeptide expressing nucleotide sequence isolated from the Sargasso Sea
atggacaaaacaaataaaaaatataatcccttcagtcctgtaaacaaggaaaacaggaagtggccgtcacaaataattaaaaaagcgccgatgtggtgttctgttgatttaagagatggtaatcaagcattaattgaacctatgggcgatgaaagaaaaaggagaatgtttgatttgctttgcaaaattggattcaaacaaattgaaattggttttcctgctgcatctcaaactgattttgattttacaagatacttaattactgaaaaaataattcccacagatgtcactattcaggtcttaacacaggctagatcagaaattattaaaaggacctttgaggcgctcgaaggggctcaaaatgtaattcttcatttttataactcaacttcaacactacaaagaagagttgtttttgacaaagacaaggaaggtgtaaaacaaattgcaactgatgctgcaaagcttataaaagaattagctgagaagtataaaactactaattggtcatttgaatactctcccgagagctttacaggcactgaattagattatgcagtaagtgtttgcgatgaagttgtcgatatattgaaagattcttctgataataaaattattatcaatcttcctgcaactgtcgagatgtcaacagcaaatatatatggagatcaaatagaatggatgagtgaaaactttaagaatagagaaaatatatgtctctcgcttcatccacataatgatagaggaactgcagtagcagcttctgagtttggtttaatggctggtgctgatagagttgaagggacactttttggaaatggagaaagaacaggaaatgtagacattgttaccttagccctaaatatgtacagtcagggtataaatccccaatttagatttttcacaaaattaataatgttatgag

SEQ ID NO: 236973 - DNA, 822 bp, Unknown
  Bacterial polypeptide expressing nucleotide sequence isolated from the Sargasso Sea
aggaacattatttggaaatggagaaagaactggcaatgttgatatagtaacaattgctttaaatatgctcactcaaggcgttgaaccaaatttagatttttctaatatcaattctgtaatgagagaggtggagtactgcaatcaactctcagttcatccaagacatccttacgcaggagatcttgtttttacagctttttcaggctctcaccaagatgcaattaaaaaaggttttcaagctattaaaaaatctaatgatccaaagtgggaagtgccctatcttccaattgatccagctgatctaggtagaaattatgaagcagtagtaagaattaattctcagtctggtaaaggaggagttgcatttttattagaaaaagatcatggggtctctttgcctagaagacttcagattagcctgagtcaaagaattcaaaagttagcagatgatactggtaaagagattagtagctcacaaatatgggatatttttgaaaaaagataccttcaacctgttaataattactcttacataaaacactcatcatcatctaaagatgatcttcataaattagaactgacaatgaatatgaataatgaggaaacaacaatacagggctcaggaaatggtccaattgactcatttgtaaatggtctttcagaaaaaattggagttgaaataaaagttgctgattatcatcaaacagctatctcctctgggtctgatgcaaaagcagcagcatatatagaacttgagaaggatggaaaaacattttggggagttggaatacatccaaacactacaagagcatcatttgatgc

SEQ ID NO: 236974 - DNA, 830 bp, Unknown
  Bacterial polypeptide expressing nucleotide sequence isolated from the Sargasso Sea
taaatataaatttaaatctacaagagagaaagtattagaacaagctgtttcatctgtaaaatatgctagaaaatactttgatgatattgaattttatcctgaagacgctggaagggctgatcaagattttttatctaaaatggttgaagaagtaatcaaagcaggtgttactgtaataaatatagctgatacaacaggatataatttacctgatatgtatggagaaaaaattaaatttttaaaaaataatgttcctaatattgataaggccacaatttcagttcattgtcataatgatttgggattagctacagctaattcaattgcaggattacaaaatggtgctcgacaagttgaagtcacgatgaatggtatcggagaaagagctggaaatacttctcttgaggaagtagtaatggctcttcatgctcataaacatttaaatttcagaaccggtataaacacaaaaaaaattgttccattaagtaaaaaagttagtaaactaatgaatatgcctgtgcagagaaataaagcaatagtgggagcaaatgcatttgctcattcatctggaatacatcaagatggttttcttaaacatagagaaacgtatgaaattatagatcctgaagttgtaggggttgattcttcttcaattgacttaactgccagaagtggaagagcagcattatctcatagactttctttattgggtattacattaagtaaaattgagttggaaacactttacactaaatttcttgaggtcgcagacaaaaagaaattaattcacgatgaagatttatatgaattagttaagaaaaaaaaataat

SEQ ID NO: 236975 - DNA, 580 bp, Unknown
  Bacterial polypeptide expressing nucleotide sequence isolated from the Sargasso Sea
aatgactgaaaaaatatatatttttgatacaactttaagagatggtgaacaatcaccaggagcttcaatgaatttggatgagaaacttcaaatagcagaagtattagactctatgaaagttgatattatagaagcaggtttcccaatagcatcaaatggagattttgaagcagtaagagaagtaagtaaaaaagtaaaaaactctacaatagcgggtttagcaagagctagtttaaaagatattgatagagcttgggaagctgtacaacatgcacaatctcctcgtattcatactttcattgctaccagtcctcttcatatgaaatataaattaaagaaaactgaagaagaagttttagaagctattaaaaaaacagtatctcatgcaagaaatttatgtgataatattgaatggagttgtgaagatgggggaagatcagaattagattttctttataaaagtattgagcttgcaataaattgtggagcaactacaataaatatacctgatacagttggatatactctaccagaagaatttggaaaaatttttaaaaatgtaaaaaataatgtcatcaat

SEQ ID NO: 236976 - DNA, 886 bp, Unknown
  Bacterial polypeptide expressing nucleotide sequence isolated from the Sargasso Sea
gtctggccccgtgcctcaggggccgacatcaaggcctgcgccgatgccgtggcgccagccccgcgtcgccgcattcacactttcatcgccaccagcgacatccacctcgagcacaagctgcgcaagagccgtgccgatgtgctcggcatcgtccccgagatggtgagctacgcccgctctcttgtggaggatgttgagttctcctgtgaagacgccggccgcagcgatccggagttcctctacgaggtgattgaggcggcgattgccgcgggtgccaccacgatcaacattcccgacaccgtcggctacaccaccccgtcggagttcggtgcgctgatcgctggcatcaatcagcaggtgcccaacattggcgatgccgtgatctcggtgcacggccacaacgatctcggcctggccgtggccaatttcctcgaggccgtcaagaacggcgcccgtcagctcgaatgcacgatcaacggcatcggcgaacgggccggaaatgcctccctcgaggagttggtgatggcgctgcacgtgaggcgtcgttactacaaccccttctttggccgggaggaggacagccccaccccactcacggctgtgcgcaccgaagagatcaccaagacctcacggctggtctccaacctcaccggcatggtggtgcagcccaacaaggccatcgttggtgccaatgccttcgcccatgaatccggcatccaccaggacggcgtacttaagaaccggctcacctacgaaatcattgacgcccagacggtgggcttgtccgacaaccgcatctcccttggcaagctgagcggccgcagtgccgttcgcgctcgcctggaggagatgggctacgacctcacccgtgaggacctcgatgagg

SEQ ID NO: 236977 - DNA, 889 bp, Unknown
  Bacterial polypeptide expressing nucleotide sequence isolated from the Sargasso Sea
catattatctactcattgtcataatgaccttggattagcagttgctaattctttagcaggtataatggctggagctagacaaattgagtgtactataaatggaataggagaaagagcaggtaatgccgctttagaagaagtagtaatggcaatgagaacaagacatgatttaatgccttacacaactaatataaatacaaaacttttaagtaaagcttcaaaagttgtttctaatgcaacaggatttccagtacaatttaacaaagcaatagttggaaaaaatgcttttgcacatgagtctggaatccatcaagatggaatgttaaaaaatagaaatacttatgaaattatgactcctgaaagtgttggggttaaaaaaacttcacttgtcatgggcaagcactcaggaagacacgcatttagagataaattatctgatatgggatatgtaaatgttacagatgatataattaacactgcttttggaaaatttaaaattttagctgacaaaaaaaaacatatttatgatgaagatattgcagctttagttgatgatagtttagttacagaggataatgtgattaagcttaaatccttaaaagtatttgcaggcactggcgagccccaaaaagcagaaatgacactagaaatttttggtgaagttaaaagcgctttagatacaggtgatggtcctgttgatgcaatatttaaatgtatcaaaaagctctatcctcacgatgttaagcttcttttatataatgtgcatgcagttactgaaggaacagatgctcaagcgaccgtgagtgtaagaatagaagaaaaaggcaaaactacggttggtcaagccgcagatactgataccttagttgcttccgcaatgcatatttaa

SEQ ID NO: 236978 - DNA, 687 bp, Unknown
  Bacterial polypeptide expressing nucleotide sequence isolated from the Sargasso Sea
attaattgtggtgcaaaaactataaatattccagatacggttggttattctatacctgaagagtttgcaaaaacaattaaatcaataaagaataatgttcataatattgataaagcaattatctctgctcattgtcacaacgatttaggtttagcagttgcaaatgctttgtcaggattatctgcgggagtaagacaaatcgaatgtacaattaatggaattggagaaagagctggtaatgcagctttagaagaaattgtaatggcaattaaaacaagagatgatttattaccctatgaaacaggaattaaaacagagttaataagcaaagcatcaaagattgtatctaatgctactggattcccagtacaatttaataaagcaattgtaggaaaaaacgcatttgcgcatgagtcaggcatccatcaagatgggatgcttaaaaatagagaaacctatgaaataatgactccagaaagtgttggcgtaaaaaaaacatctttagtaatgggaaaacattcaggacgacatgcttttaaagataaattaaatgatcttggttatacggatgtaactgatgatgtggttcaggcagcgtttggaaaatttaaaattttagctgataaaaagaaacatatatatgatgaagatattgtagctttggtagatgatagtttgattattgat

SEQ ID NO: 236979 - DNA, 517 bp, Unknown
  Bacterial polypeptide expressing nucleotide sequence isolated from the Sargasso Sea
tatggctgaaaaagataaagtatatatttttgatactacgatgcgtgatggtgaacagtcaccaggcgcttcaatgagtgttgaagaaaaaattcaaatttctagagttttcgatgaaatggggatcgatattattgaggcaggtttcccaatatcttctcccggtgactttgaagcagttagcgctatcagcaaaagtgttaagaactcaataccttgtggattagctagagcaacaaaaaaagatatagatgcttgtcacgagtcattaaaatttgcaaaaagatttcgtattcatacttttatttcaacaagccctgttcatatgaagcataaattaaacatgactgacgagcaagtattaggtgccataaaagaaagtgtaacatatgcaagaaaatttactgatgatgtggaatggtcatgtgaagatggaacaagaactgatttagactttatgtacaaaacaattgaacttgctattaattgtggtgcaaaaactataaatattccagat

SEQ ID NO: 236980 - DNA, 743 bp, Unknown
  Bacterial polypeptide expressing nucleotide sequence isolated from the Sargasso Sea
aatgtcaaaagatcctggaagaattttgatatttgatacaactcttcgagatggagagcaatctcctggtgccagtctaaatcttgaggaaaaacttgctatagcccatcagttagcaagattaggggtagatgtaattgaagctggattccctttcgcaagtccaggagatttcaaagctgttaataaaattgcgagtgccgtaggtaaagaaaatggccctataatatgtggtttagcaagagcctctaaaggagatataaaagcatgttacgaagcggtaagtccagcgccaaagagaagggtacatacttttattgcgacaagtgatattcatcttaaacataaacttaaaaaatccagaaaagatgttcttcaaatagttccagaaatggttaattatgcaaaatcattggtagatgatattgagttttcttgtgaagatgcctcaaggagtgatcctgattttttatacgaagtgatccaacttgcaatttctgcaggagcaaccacaataaacatccctgatacagttggatttacaactcctagtgaatttggcaaactaattgcagatataaataaaaatgtccccaatattgatgaagcagtaatctcggttcatggtcataatgatttgggtttagcagtagccaattttcttgaggcagtaaaaaatggagcgaaaccactagaatgtaccattaatggtattggtgaaagagccggggatgcttctttgg

SEQ ID NO: 236981 - DNA, 871 bp, Unknown
  Bacterial polypeptide expressing nucleotide sequence isolated from the Sargasso Sea
tgtgacgattcaggtcatgacccaggcgcgcagccacctcatcgcgcgcacgtttgaggcgttgaagggcgcgcctcgcgccatcgtgcatgtttacaatgcgacggcgcctgtgtttcgggatgttgtcttcaatgtggacaaggcgggctgcatcgagattgctacccaggcaacacgagagatcaagcagcacatggacgcgaaccccgatacgcagtggacgttccagtactccccggaaaccttttgcttcaccgagctggattttgcattgcaggtgtgtgaagcggtgacggatacgttcgggccgaccccgagcaacaagatgatcctgaatctgcccaccaccgtggaggtgtctaccgccaatgtcttcgccgaccagatcgaatggttctgccggcacttcagtcgccgtgacagtgtggtcatcagcgtgcatccgcacaatgatcggggcactggagtttccaccgcggagcaggcgtgcctggccggtgccgagcgtgtcgagggcacgttgttcggtaacggtgagcgtaccggcaacgtcgatatcctcacgttggcgatgaacctctacaccagcggcatcgatccgcagttggatttctccgacatcctgcacgtccagcgtgaggtggagttctgcaatcagttgccgacccatcctcgtcacccttacgccggtgagttggtgtttaccgcgttctccggctcgcatcaggacgcgatcaagaaaggctttgcggcgcgccaggccaatccgcagggcatgtgggaagtgccgtatctgcctatcgatcctgccgatatgggccgtagctatgaagcggtgattcgcgtgaacagcccagtcggcaagggg

SEQ ID NO: 236982 - DNA, 838 bp, Unknown
  Bacterial polypeptide expressing nucleotide sequence isolated from the Sargasso Sea
ttagctggagttatggcgggcgcaaggcagatagaatgcacaattaacggtattggagagagagcaggtaacgctgctttagaagaagttgttatggctatgcgaacaagacatgacttaatgccttacaccacaaatataaattctaagcttttaagcaaagcatcaaaagtagtttcaaacgcaactggttttccagttcaatttaataaagcagttgtcggaaaaaatgcctttgcccatgagtccggaattcaccaagatggaatgcttaaaaatcgaaacacatatgaaattatgacaccagaaagcgttggtgttcacaaaacttctttagtgatgggaaaacactctggtcgacatgcatttaaagataaattaaatgatcttggatacgttggtgttactgacgatgttattcaaacagcttttggaaaatttaaagttttggctgataaaaaaaaacatatttatgatgaagatattgctgcaattgtagatgatagcttagtaacagaagataatgtaattaaattaaaatccttaaaagtttttgctggcacaggagagcctcagaaagcagaaatgactttagaagtatttggagaggtaaaaaaagcatctgaaacaggtgatggaccagtagatgcaatatttaaatgtattaaaaaactttatccgcatgaggtaaagcttttattatataatgttcatgccgtcactgaaggaacagatgctcaagcaacagttagcgtaagaatagaggaagaaggaaaaactactgttggtcaagctgcagatacagatacattagtagcttcagctaacgcttatttaa

SEQ ID NO: 236983 - DNA, 877 bp, Unknown
  Bacterial polypeptide expressing nucleotide sequence isolated from the Sargasso Sea
gaagaatttgcaagaactattacatcaataaaaaacaatgtaccaaatattgataaggctatactttctgcgcactgtcataatgatttaggcttagcggttgctaatgctttatcaggtttatcagcaggagttagacaaattgaatgtactataaatggaataggtgaaagagcgggtaatgcagcacttgaagaaattgtaatggcgataaaaacacgtgatgatttattaccttacgaaacgggaattaaaactgagctaataagcaaagcatctaaaattgtatcgaatgctacaggttttcctgttcaatttaataaagcgatcgttggaaagaatgcttttgctcatgagtcgggaattcatcaagatggaatgttaaaaaatagagagacctatgaaataatgacaccagaaagtgttggtgtgaaaaaaacatctttagtaatgggaaaacactctggacgtcatgcatttaaggataaattaagtgatttaggttatgcggatgtcacagatgatgttgtccaagcagcttttgggaaatttaaaattttagcggataagaaaaaacatatttacgatgaggatattgttgcattagtcgatgatagtttaattattgataataagataaacgcgattaacttaaaatcattaaaagtatttgccggaactggtgagcctcaaagggctgacatgactttggatgtttttggagaggttaaaaaaacttctcaaactggtgatggtccagttgatgctatatttaaatgtattaaagaactttatcctcataatgtaaaattatctctttatcaagttcatgcagttacagaaggaactgatgcacaagctaccgtaagtgtaaaga

SEQ ID NO: 236984 - DNA, 454 bp, Unknown
  Bacterial polypeptide expressing nucleotide sequence isolated from the Sargasso Sea
tatggctgataaagataaagtattcattttcgatacaacgatgagagatggtgagcaatcacctggagcttctatgagtgttgaagaaaaaattcagatctcaagagtttttgatgaaatgggaattgacattatagaagcaggttttccgatatcatctcctggtgattttgaggctgtaagtgcaatcagcaaaagcgtaaaaaattctataccttgcggtttggcaagagcaaccaaaaaagatattgatgcttgtcacgagtctttaaaatttgcaaaaagatttagaattcatacttttatttcaacaagccctgtgcatatgaagcataaattaaatatgactaacgaacaagttttaggggctattaaagagagcgttacatatgcaaaaaaattcactgatgatgttgaatggtcttgtgaagatggcacaagaacagacttagat

SEQ ID NO: 236985 - DNA, 780 bp, Unknown
  Bacterial polypeptide expressing nucleotide sequence isolated from the Sargasso Sea
ggaaggactaaagaatttctcctctaacgtgaccttcgagtactcgccggaaagttttacgggaactgaattggatttcgctgtagatatatgtagtgcagttgccgagacatggggtgcatcgcccgaagaccctatcattatcaacttgccgtctactgtcgaaatggctacacctaatgtctatgctgatcagattgagtggtttgtgcggaatttttcctatagagatagttcgataatcagtcttcatacacataatgatcgaggtactggtgtggcggcaaccgaactggctattatggctggtgctgatcgggtcgaggggtgtttgtttggtaatggtgaaagaacggggaattgtgatttggtgactgttgcaatgaacttattcagtcaaggtgtagaccccactttagattttcgagccatgcccgaaatcagggaggccgttgagtcaataaacaagataccggtgcatgagaggcatccttatgcaggggatttagtcttcaccgctttttctggatctcatcaagatgcgatcaagaaaggcatgtccaaggtagagaaaggtctatgggaagttccttatctccccattgaccctggtgatgttggcagttcctacaaagaagctattcgagtaaatagtcagtctggaaagggaggagtcggcttcttactagaagagcattatgggattagtttgcccagagagctgttggtagagtttgcgacgatggtgcaacagttgaccgagcaattagatcgagaggt

SEQ ID NO: 236986 - DNA, 589 bp, Unknown
  Bacterial polypeptide expressing nucleotide sequence isolated from the Sargasso Sea
tatgacagataaaaatagaattataatttttgatacaacgatgcgtgatggagaacagtctcctggcgcttcaatgagtttggaagagaaattacaaatttcaagagtctttgatgaattaggtgtagatgtaattgaagcaggttttccaattgcatcacctggcgattttgaagctgtaacagaaattagtaaaactttaaaaagatctattcctgcagggcttgcaagagctactagaaaagatatcgatgcatgtcatcaagcattaaagcatgcaaaaaactttagaattcatacatttatctctactagccctcttcacatgaagcataaattaaataaatctcctgaagaagttttaaattcaataaaggaaagcgttacttatgctagaaaatttaccgacgatgtagagtggtcgtgtgaggatggaacacgaactgacatggattatatgtgtaaaacggttgagcttgcaattaaatgtggagcgaagacaataaatattccagacacagtcggttatactgtaccatcagaatttaaaaaaattattgaaacattaatcaataaagttccaaatatt

SEQ ID NO: 236987 - DNA, 881 bp, Unknown
  Bacterial polypeptide expressing nucleotide sequence isolated from the Sargasso Sea
gcttcagacactgatttcaattttgttagagaaatcattgaacagaatctcattcctgcggacgttactatacaagttctgacgcaagctagagaagaattaatacaacgtacttgtgaaagtttattaggatcaaaaaattgtattgttcatctttacaattcaaccagtacccttcaaaggcgtgtggtatttgaaagcgatcgaaatggcgtcaaagagatagctgtcgatggtgccaagatggttagagatcgaatctccatgctagaaaattctggcagtcaagtaagattagaatacagtccagaaagctttaccggcaccgaacttgactacgctttagaagtttgtgaagccgtcatggatatttggcagcctactagtgagaaccccacaataataaatttgccatcaaccgtcgaaatggccacgcctaatatatttgcagatcaaattgaatggatgcacacaaactttagaaaccgtgaaaacgtaattttatctgtccatccgcacaacgatcggggcacaggtgtggcagctgccgaacttgcacaaatggctggtgcggatagggtggagggaacattattcggcaatggtgaaagaactggcaacgttgatattgtcacattaggactaaatttatttacccagggcgtcgacccacaactcgatttttcaaatatcaattcactaatggatacggccatccactgcaatcaacttccaatccatgcccggcacccctacgctggtgaactcgtgcatacggcgttttcgggttcgcatcaagacgctattaataaggggatgaaagcaatggaaactgctaatagtccattatttgaagtaccctacctaccaatagatccgaa

SEQ ID NO: 236988 - DNA, 661 bp, Unknown
  Bacterial polypeptide expressing nucleotide sequence isolated from the Sargasso Sea
tacgaaattatcgatgcaaaaactgttgggttgagtgacaacaaaatatcgttaggaaaacttagtggaagaagtgcagtaagagcaagattagaagaaatgggatatgacttgagccgagaagatttaaatgatgcttttgctcgttttaaggatttagctgacaggaaaagagaaattactgatagagacttagaagcaattgttagtgaacaagtacagctaccagaagctaaatttcaattaagtcttgtacaagtaagttgtgggaacgcctctaaacctactgccaccatttcgcttctaaatacggaagataatagtgaggatactgctgtatcaatagggactggaccagtggatgctgtatgcgaggctttaaataaattagctaaagttcctaatgaattaattgaattttctgttaagtcggtaacagaaggaattgatgctttgggcgaagtaacaataagaataagaagggataataaaatttattctggtcattctgctgatacagacgttgtagttgctgcagcgaatgcttacgttaatgctttaaatagacttgtattttctgagaaaaaaaattcaattcatccacaatttgatgatttagagaattctgataataaatttctatctaatccagcgaattaaa

SEQ ID NO: 236989 - DNA, 921 bp, Unknown
  Bacterial polypeptide expressing nucleotide sequence isolated from the Sargasso Sea
ttctttggcaggtgttcagcaggagctagacaaattgaatgtactataaatggtttaggagaaagagctggaaatgcagctcttgaagaagttgtgatggctatgaaaacaagacctgatttaatgccatatgaaactggaattgaaactactcttctaagtaaagcatccaagatagtatcaaatgccacaggttttcctgtccaatataataaagctattgttggaaaaaatgcttttgctcatgaagcaggaattcatcaagatggaatgttaaaaaataggcaaacatatgaaattatgacacctgagagtgtaggtgttaaacaaacatctcttgtaatgggtaaacattctgggagacatgcatttaaagataaattaaccagtttaggatatccagatctaactgatgatgttgtagataatgcatttgcaaaatttaaaatcttagcagataaaaagaaacatgtttatgatgaagatataatcgctttaatagatgatagtttaataacagataataaagtaagtgctattaatttgaaatctttaaaagtatttgctggtacaggagaacctcaaagagcagaaatgacattagatgtttttggtgaagttaaaaaagcgtcagaaacaggtgacggaccggttgatgcgatttttaaatgcataaaaaaactttatccacatgaggtgaatttacaactttaccaggtgcatgctgttacagagggaacagatgcccaagccactgtaagtgttaaaattgaagaaaatggaaaaacaactgtaggacaagctgcagatactgacactttagttgcatctgcaaatgcttatataaattcacttaataaaatgattataaaaagagataaaacagcaccggagacaaatatagaaaatcaaaattttgaa

SEQ ID NO: 236990 - DNA, 782 bp, Unknown
  Bacterial polypeptide expressing nucleotide sequence isolated from the Sargasso Sea
tctgggcgctaaaacaattaatattcctgatacagtcggatacacagttccatcagagtttaaaaagatcattgaaacattgttaaataaagttccaaacatagataaagctattatttcaacacattgtcataacgatttaggtttagcggtagctaattctttagcaggtgttatggctggggcacgacaaatagaatgtacgattaatggaataggagaaagagctggaaatgctgctttagaagaagttgttatggctatgagaacaagacacgatttaatgccctatacaacgaatattaatacaaaacttttgagtaaagcttctaaagtagtttcaaatgcaactggatttcctgttcaatttaataaagcaatagtaggaaaaaacgcctttgctcatgagtcaggtattcatcaagatggaatgcttaaaaatagaaatacttacgaaattatgacgccagaaagtgttggtgttcataaaacttcattagttatgggtaaacattctggtcgtcatgcttttaaagataaacttaatgatttgggatatgttggtataaccgatgacataatacaaacagcatttggaaaatttaaagttctagctgacaaaaaaaaacatatatatgatgaagatatagcagctatagtagacgatagtttagtttctgaggataatgtaataaaattaaaatccctaaaagtttttgcaggaactggtgaaccacaaaaagcagaaatgactttagaagtatttggtgaagtcaaaagtg

SEQ ID NO: 236991 - DNA, 928 bp, Unknown
  Bacterial polypeptide expressing nucleotide sequence isolated from the Sargasso Sea
gaggcagtttctgaaataagtaaaataatgaaaaactcaatcccgtgtggtctttcaagagcattaaaaaaagatattgatgcatgtcatgagtcgttgaaacatgctccaagatttagaattcatacttttatttccacaagtcctttgcacatgaaacacaaacttgaaatgacaaacgagcaagttttagatgcaattaaagaaagcgttacttacgcaagaaaatttaccgacgatgtagaatggtcatgcgaagatggaacaagaacggatatggattttatgtgtaaaacagtagaacttgcaattaattgtggagctaaaacaataaatattccagatactgttggatattctattcctgaggaatttgctaaaacaatcaaacacttaaaaaataatgttccaaatatagataaagcaatattatctgcacattgtcacaatgatcttggcttagctgtagctaatgcattagctggagtttcagaaggtgtaagacaaatagaatgcacaattaatggaataggtgaaagagcaggaaatgctgcattagaagaagtagttatggcaattaaaacaagaaatgatttaatgccatataatactgggatcaaaacagaattgataagcaaagcctcaaaaattgtttcaaacgcaactggttttcctgttcaatttaataaagcaatagttggaaaaaacgcttttgctcatgagtcaggaattcatcaagatggaatgttaaagaatagagaaacttatgaaattatgactcctgaaagtgtaggtgttaagaaaacctcacttgttatgggtaagcattcagggcgacatgcttttaaagataaattaaatgacttgggttattcagatcttacagatgatattatttcagctgcttttggaaattttaagttttagc

SEQ ID NO: 236992 - DNA, 613 bp, Unknown
  Bacterial polypeptide expressing nucleotide sequence isolated from the Sargasso Sea
aatggaagataaaaatagaataataatttttgatactacgatgcgtgatggagaacagtctccaggagcatctatgtctcttgaggaaaaaattcaaatttcaagagtttttgatgagttaggaattgatgtgatcgaagcaggttttccaattgcttcgcctggtgactttgaagcagtaacagcaataagtaaaattttaaaaaaatcagtcccagctggattagcgcgacacacaaaaaaagatatagacgcttgtcacgagtctttaaaatctgcagaaagatttagaattcatacatttatttctacaagctctttacacatgaaacacaaattaaataaaacacctgagcaagtagtagactcaattaaagaacacgttacttacgcaagaaaatttactgatgatgttgagtggtcatgtgaggatggtacgagaactgatatggattttatgtgtaaaacagttgagcttgcaatcaaggctggtgcgaaaacaattaatattcctgacactgttggttatacggttccatcagaatataaaaaaattattgaaacactaaaaaataaagttccaaatattgataaagctattttatcagtgcat

SEQ ID NO: 236993 - DNA, 892 bp, Unknown
  Bacterial polypeptide expressing nucleotide sequence isolated from the Sargasso Sea
aatctcaaagattataaaaaacgcatcagtatgtgcgctgagtagagctaaccaaaaagatattgatgttgcagctgagtcattaaaaaatgcaaaaaaacccagaatccataccggtataggtacatctgaagttcatattaagtataaattcaactcaagtaaagattctataattgaaatagcaaaaaaatcagttgctcgtgcaagaaagtacgtcgacgatgttgaattttatgccgaagatgctggtagaacagataacgaatttcttgcaaaagtatgtgaagaagttattaagtctggagctactgttttaaatatacctgatacaactggctattgcttacctagtgaatatggagataaaattaagtttttaatgaataatgttaaagggattgaaaatgttacagtttcatgtcactgccataacgatcttgggctagcaactgctaactccatatatggagttattaatggcgcaagacaaattgagtgtacagttaatggtattggagagagagcaggaaacacatctttggaagaagttgttatgattttaagacagcatactaatttgaacctagatactaatattaactctaaacttctaaatcaaacaagccaaaaagtatcggaacttatggggatgcctgttcaaccaaataaggctatagttggatctaacgcatttgctcacagttctggaattcatcaagatggtgttattaaaaaaagagaaacatatgaaataattgacccacttgatgttggtgtagataaatcatcaattgtattgacagctaggagtggtagagctgcactggcatttagaatgaaacagtatggtgttaatctaacgaaaaaagagcttgatgatgtatataat

SEQ ID NO: 236994 - DNA, 694 bp, Unknown
  Bacterial polypeptide expressing nucleotide sequence isolated from the Sargasso Sea
aagcataaattaaatatgtcgccagaagatgtttacgaatctattggacagcatgtagcttatgcaagaaaatttaccgatgatgttgaatggtcttgtgaagatggcacaagaacggatatggattttatgtgcaagacagtagagcttgctatcaaaaatggagcaacaacaataaatattcctgatacagttggttatactattccatctgagttcacaaaaattattcaaacattattaaacaaagttcctaatattgataaagcaattttatccacgcactgtcataatgacctaggcttagcagttgcaaattctttggcgggagttcaggctggcgctagacaaattgaatgtacaataaatggtttaggggaaagagctggaaatgctgcgctagaagaggttgtaatggcaatcaaaacaagaccagatttgatgccatatgaaactggaattaatacaacacttttaagtaaagcttctaaaattgtgtcgaatgcaacaggtttccccgtgcaatacaataaagcaattgttggaaaaaatgcttttgctcatgaagcaggtatccatcaagatggtatgcttaaaaatagacaaacatatgaaattatgacacctgaaagtgttggtgttaaacaaacctcattggtaatgggtaaacattctggcagacacgcatttaagg

SEQ ID NO: 236995 - DNA, 757 bp, Unknown
  Bacterial polypeptide expressing nucleotide sequence isolated from the Sargasso Sea
aatagtttcaaatgctactggttttccagttcaatttaataaagcaatagttggaaaaaacgcttttgctcatgaatccggaattcatcaagatggaatgttaaagaatagagaaacttatgaaattatgactccggagagtgtaggtgttaagaaaacctcacttgttatgggtaaacattcaggacgacatgcttttaaagataaattatccgacttaggttattcagatcttacagacgatattatccaagctgctttcggaaaatttaaagttttagctgataaaaagaaacatatttatgatgaagacatagttgctttagttgatgacagtttaattgtagataataaaataaatgcaattaatttaaaatcgttaaaagtttttgccggaacaggggaaccgcaaaaagctgaaatgacactggatgtctatggtgatattaagaatactactgaaacaggagatggaccagttgatgcaatatttaaatgcataaaaaaattatttcctcacgacgtaaaattatctctttatcaagtacatgcagtaacagaaggtacagatgcccaagcaactgttagtgtaaaaatcgaagaaaatgataggactacagtaggtcaatcagctgacacagatactttagttgcatcagcaaacgcatatttaaatgcattgaataaaatgcttataaaacgtgagaaaaaagcaccatctcaaaatattaaacatcaaaaagtgaaaggaatataa

SEQ ID NO: 236996 - DNA, 865 bp, Unknown
  Bacterial polypeptide expressing nucleotide sequence isolated from the Sargasso Sea
gaaggcgctaggcaagtagagtgcactataaatggaatgggtgagagggctggtaattcatcattagaagaaattgtaatgactttaaaagtaaaaaaagatctaatgccttttcatactgacataaagactgagtcaattattaaagcctcacgattagtatcatctattacaggttttccagtacaaccaaataaagctatagttggtgcaaacgctttcgcacatgaagcaggaattcatcaagatggtatgttaaaacattctggtacatatgaaataatgacacctgagtcagttggacttgttaaatcatccttagtattaggtaagcactcaggcaaacatgctttttcagaaaaactaaaagaattgggttatgagccaggtgataatgctttaatggagttatttggaaggtttaaagaccttgctgataagaaaaaagaaatttttgaagaggatttgattgccttagcagaagatagagcagcatcatataatgaacacattaaatttatatcattagaggttaatgcagggtcagttgaaaaaccagaagcaaatttaaaaattcagatgcaagataaaattaaaacaatcaaaattaatggtaacggtccagttgatgcaacttttaatgcaattaaaaaacttactttaacagattataaattaaagctttatcaagttaatgcaattactgcaggaactgatgctcaaggagaagttacggtaagattagaagatgaagatttatcatctcaggctaaaggtagtgactctgatattatagttgcatctgctaaagcatatattaacgctttaaatagattgatttttaaaaaaacaaaatctatcaaag

SEQ ID NO: 236997 - DNA, 826 bp, Unknown
  Bacterial polypeptide expressing nucleotide sequence isolated from the Sargasso Sea
aatgactgataaaaatagagtttatattttcgatacaacgatgcgagatggtgaacaatcaccaggagcatcaatgagtttggaagaaaaaattcaaattgcaagagtgttcgatgaacttggtattgatattattgaagctggatttccaatagcatcacctggagattttgaagcagtaacagaagtaagtaaagttttgaaaaattctattccagcaggtctatctaggcattcaaaaaaagatatagacagatgttatgaagcgttaaaacatgcgcctagatttagaattcatacttttatttcaacaagtcctttacacatgaaacataaacttaataaatcttcagaagaagtatatgaatctattaaagagcacgtgacatatgcaagaaaatttactgatgatgtagaatggtcatgtgaagatggaacaagaacagacatggattatatgtgtaagactgttgaacttgcaattaaatgtggagcaaaaacaataaatatacctgatactgttggttatactgtaccatcagagtttacaaaaattatacaaacattaatgaacaaagtaccaaatattgataaagcaatattatctacacattgtcataacgacctaggcttagcagttgctaattctttagctggtgttcaagcaggtgcaagacaaatagaatgtaccattaatggtattggcgaaagagctggtaatgctgcactagaagaagttgtcatggcaatgaaaacaagaaacgatcttatgccttataccacaggaattaacactacacttcttagcaaagcttcaaaaatagtt

SEQ ID NO: 236998 - DNA, 943 bp, Unknown
  Bacterial polypeptide expressing nucleotide sequence isolated from the Sargasso Sea
gttgagatgtcaacggcaaatatatattggagatcaaatagaatggatgagtgagaactttaaaaatagggaaaatatatgtctttcacttcatccgcataatgataggggaacagcaatagctgcttctgagtttggcttaatggcaggtgcagatagagttgagggaacgttatttggtaatggtgaaagaacaggaaatgtagatatcgtaaccttagccctaaatatgtatagccagggtataaatcctaatttagatttttcacaaattaataatgttatgagagaagttgaatactgtaatcagctacccgtccatcccagacatccctatgccggagatttggtctttactgctttctcgggatcacaccaagatgccatcaaaaaaggcttaaacgcattaagaagctctaatgacccacaatgggaagtgccttatttgccaattgatcctgcagacctggggagaacctatgaagccgttgtaagaattaattcacaatctggaaaaggaggcgttgcttttctattggaaaaagatcatggcgtgtctctacctagaaggcttcaaataagcatgagtcagaagatacaaaaaattgctgatgagactggtaaagaaatttcaacatcagagatttgggaaatctttcatacaaactttgtcatgccaaaatcagggcatagttttaaaaactattccttaaaaacttcagatgcaactgatttaagtgatcatattaaagctgagattgaaattgatggtaaaaaccatgaaatatctggttcaggtaatggtccaattgacgcatttgtaaatgcactgaatcaaaaactatcaattgatataaaagtatctgattatcatcagagtgcaatttcatctggctctgacgctcaagctgctgcttatattgaactccaaaaaggtgacaaa

SEQ ID NO: 236999 - DNA, 487 bp, Unknown
  Bacterial polypeptide expressing nucleotide sequence isolated from the Sargasso Sea
atgagtacaaatgagcacttacacagcattcagcaacctagttcaatgccttatgaaaagtatagatcattcgaacccatagatatcgaagacagatcttggccatcaagagttatttctaaagcccccttgtggtgctctgttgaccttcgtgacggaaatcaagctctaatagagcccatggatcctgaaagaaaatggcggatgtttgaaactctcgtatcaatcggttttaaagaaatagaggtaggtttcccatctgcttctgaagccgactttcaatttgtgcgcgaaataatagatgcaaacgccattcccgatgacgtaactatccaagttttagtgcaaagccgagaagagttaattaaccgcacatttgaatctatcgccggaagtaaacaagcgataatccatttctataattcgacttcgacattgcaacgcgaggtcgtatttgggatcgacagaataggaataacaaaaatag

SEQ ID NO: 237000 - DNA, 799 bp, Unknown
  Bacterial polypeptide expressing nucleotide sequence isolated from the Sargasso Sea
ggttttcctattgcatctaatggagattttgaagctgttcaagaagttagtaaaaatgtaaagaattcttctattgctggtttagctagagctagtcttaaagatatcgatagagcttgggaagctattcagcatgctaaatctccaagaatacatacctttattgctaccagtccacttcatatgaaatacaagttaaagaaaacagaagatgaggttttagaagccattgagaagacagtaatgcacgcaagaaatctttgtgataacattgagtggagttgtgaagatggaggaagatctgaactagaatttctatacaaatgtattgagcttgcaattaattcaggggcttcaacaattaatattcctgatactgttggctatacattgccagaagaatttggagaaatttttaaacatgttaaaaataatgttcctaatatagataaagccattctttcaacgcatacacacaatgatcttggtttagctacagctaacaatgttgctgcaattaaagagggtgcaagacaggttgaatgtactattaatggtatgggcgaaagagcaggtaattcttctttagaagaaattgtcatgacgcttaaaattaaaaaagatcttatgccatatcatacagatattaaaacagaatcaattatgaaagcatctagacttgtttcatcaataacaggttttccagttcaaccaaataaagctattgtaggagcaaatgcatttgcacatgaagcaggaattcatcaagatggtatgcttaaacatgctgtacctatga

SEQ ID NO: 237001 - DNA, 758 bp, Unknown
  Bacterial polypeptide expressing nucleotide sequence isolated from the Sargasso Sea
gatgagctccgaagataaccatataagaatatttgatacaactctacgtgatggtgagcaatcaccaggcgcgacaatgacacttgatgagaaaattcaggttgcagaattattagacgacatgggtgttgatataatcgaagctggattcccgattgcttcaaacggtgactttgaagctgtatcaaaaattgctgaaagatcacaaaattcaatcatcgcaggactagcaagggcgattcctgaggatattgacagagcaggtgaagcagtaaaaaaagcaaaaagaggtagaattcacacgtttgtctccacatctccgatacatctagaacatcaaatgaaaaaaaatgaagaagaagttctagaaatcataaaaaaaacagttactttggcaagaagctatgttgaagatgttgaatggtcaggcatggatgcaacaagaacatctatcgattttttgtgtaaatgttgtgaggtagcaataaagaatggtgcaactactatcaatatcccggatacggtcgggtatgctatccctcatgagttcaataatttaattaaaacactacgggaaagagtgccaggagcggattcagttattttttctacacactgccacaatgaccttggtcttgctgtggccaattctttagcaggcgtcgacgctggcgcaagacagattgaatgcacgataaatggactcggagaaagggcaggaaatgcagcactagaagaggttgttatggcgattaata

SEQ ID NO: 237002 - DNA, 844 bp, Unknown
  Bacterial polypeptide expressing nucleotide sequence isolated from the Sargasso Sea
attggcggataatattaaaacatcaaggatttgcgccttagctagagcattagaaaaagatattctaagagcagctgatgccttgaaaaatgcaaaactttcaagaattcatacattcattgctacatctcctatacacatggagatgaagttaaaaatgactcctgagcaggtcattaaaaatgcagttaatgctgtaaacattgctaaagataatgctgaagatgtagaattttctccagaagatgctggcagatcagacttcaattttctttgtgagatcatcgagcatgtaattaatgctggggctacaactataaatattcctgatacagttggctataatatgccccatcaatttggacaattgatagaaaaaattatttcaaatgtacccaatgctaacaaagctatattttcagttcactgtcataatgatttgggactagcagtctcaaattcgctatcatctgttcttcatggtgcgagacaagttgagtgtacaattaatggtctaggtgaaagagcaggaaacgcagccttagaggaaatagtaatgactgtgaaaactaggcgagatattttttcctgtgatacaagaataaatacaaaaaaaattatgaactgctcgaggttagtatctagtatcacaggatttccagttcaacctaataaagctatagttggtaaaaatgcttttgctcatgaatctggcattcatcaagacggtattattaagtctagagaaacatacgaaattatgagagctgaagatgttggtcttatcagcaattcgttggttttaggtaagcactcaggaaggaacgccctcaagcaaaaaatg

SEQ ID NO: 237003 - DNA, 835 bp, Unknown
  Bacterial polypeptide expressing nucleotide sequence isolated from the Sargasso Sea
cttcatatgaagcataaattaaatatgtcgccagaagatgtttacgagtctattggacagcatgtagcttatgcaagaaaatttaccgatgatgttgaatggtcttgtgaagatggcacaagaacggatatggattttatgtgcaagacagtagagcttgctatcaaaaatggagcaacaaccataaatattcctgatacagttggttatactattccatctgagttcacaaaaattattcaaacattattaaataaagttcctaatattgataaagcaattttatccacgcactgtcataatgatctaggcttagcagttgcaaattctttggcgggagttcaggctggcgctagacaaattgaatgtacaataaatggtttaggggaaagagctggaaatgctgcgctagaagaggttgtaatggcaatcaaaacaagaccagatttgatgccatatgaaactggaattaatacaacacttttaagtaaagcttctaaaattgtgtcaaatgcaacaggttttcccgtgcaatacaataaagcaattgttggaaaaaatgcttttgctcatgaagcaggtatccatcaagatggtatgcttaaaaatagacaaacatatgaaattatgacacctgaaagtgttggtgttaaacaaacctcattggtaatgggtaaacattctggcagacacgcatttaaggacaaattaaatagcttaggctatccagatttaactgatgacattgttggtaatgcttttgctaagtttaaagtattagcagataagaaaaaacataattatgacgaagatataattgcacttatagatgata

SEQ ID NO: 237004 - DNA, 505 bp, Unknown
  Bacterial polypeptide expressing nucleotide sequence isolated from the Sargasso Sea
atggaagataaagataaagttttcatttttgatacaacaatgagagatggtgagcaatcacctggtgcttcaatgagtgtcgaagaaaaaattcagatctcaagagtttttgatgaaatgggaattgatattatagaggcaggttttccaatatcatctccaggtgattttgaagcggtaagcgcaataagtaaaagtataaaaaattcaatcccttgtggtttagctagagcaactaaaaaagatatagatgcgtgtcatgagtctttgaaatttgcaaaaagatttaggattcatacttttatttcaacaagtccagttcacatgaagcataaattaaacatgactaacgaacaagttttaggggctattaaagagagtgttacttatgcaaaaaaattcactgatgatgttgaatggtcttgtgaagatggcacaagaacagacttagatttcatgtataagacaatcgagcttgcgattaaatgtggtgctacgacaataa

SEQ ID NO: 237005 - DNA, 841 bp, Unknown
  Bacterial polypeptide expressing nucleotide sequence isolated from the Sargasso Sea
aaaaaagatatagatgcttgtcatgagtcacttaagtttgcaaaaagatttagaattcatacttttatctccactagtccagttcacatgaagcataaacttgatatgactaacgaccaagttttagatgcaattaaagaaagtgtaacttacgcaagaaagtttactaatgatgtagagtggtcttgtgaagatggaacaagaacagatttagattttatgtgcaaaacaattgagttagcaattaaatgtggtgcaacaacaattaatatacctgataccgttggttattcaattcctgaagaattcgctcggacaataacacacataaaaaataatgtgccaaacattgataaggcaatcatatcagcacattgtcacaacgatttaggtttagctgttgccaatgctttagcaggtttgtcagcaggtgttagacaaattgaatgcactataaatggaattggagagagagcaggtaacgctgctttggaagaaattgtaatggctattaaaacaagaaatgatttaatgccttatgaaacaggaattaaaacagaacttataagcaaagcatcaaagatagtttcaaacgcaactggatttccagttcaatttaataaagcgatagttggtaaaaatgcttttgcacatgaatcaggaattcatcaagatggaatgttaaaaaatagagaaacatatgaaattatgacaccagaaagtgttggtgttaaaaaaacatctttagtaatgggtaagcattctggtaggcatgcatttaaagataagttaagtgatttaggatattcagacttaacagatgatgttgtacaagcagcat

SEQ ID NO: 237006 - DNA, 838 bp, Unknown
  Bacterial polypeptide expressing nucleotide sequence isolated from the Sargasso Sea
ggtgcgacaacaatcaatattccagatacggtgggatacactatcccctatgagtttggtgaactatttaagcacttgatttcaaactgcaatgatgctgagaatgtgatcttcagtgtccattgtcacgatgaccttggcctttctgtagcgaatagcttggctgcagttgaatctggagcaagacaaattgaatgcacaatcaatggcattggagagcgagctggaaatacctcacttgaggaagtatgcatggcaatcagaacaagagaagagtatttcgattttaaaacatcgattgattcaacaaagctatatcccaccagtcgattggtctcttcgattacgggtatgcatgtccctagaaataaagccatcgttggcgacaatgcctttgcacatgaagcaggcattcatcaacacggcatgcttagagattcatctacatatgaaatcatgaagcctcaggatgttggtattgcaagatcaaacctcgtgcttggaaaacacagtgggagacatgcttttttagataggattaatgagctaggatttgcgctcgagaaagatgagattgatccagcttttcaggaattcaagaaattggctgatagaaaaaaggaaatattcgatacagacatagaagcaatcgttctaaatgcggatattgccaatatgagccgttggagccttatggacctagagacaacttcaggttcatcatggggatctacagcatcgctgaaattgaaagattctggagaagagataatcgagagggacaataatagcaatcctgccagtggacccattgaagctgttttcaatatcataagtg

SEQ ID NO: 237007 - DNA, 859 bp, Unknown
  Bacterial polypeptide expressing nucleotide sequence isolated from the Sargasso Sea
aattgcagagacaataaagacctctcgtgtatgtgcattagcaagagctcttaaaaaagatattttccgagctggtgatgcacttaaggatgcaaaattctcaaggatacatacatttattgcaacctctcccatacatatggaaatgaagctgaaaatgaccccgaatcaagtgatagaaaatgctataaatgcagtcaagatggcaaaagattttgttgaggatgtagaattttctcctgaagatgccggtagatcagactttaattttctttgtacgataattgaaaaagtcattgatgctggtgcatccacaattaacattccagacactgttggatataacatgcctcatcagtttggagaattgatgtcaaagattatagagaacgtaccaaactctaaagatgcgattttctctgtacattgtcataatgatctcggtttagctgtctctaactctctatcatctgtcttgaacggcgcaagacaagtggaatgtaccattaatggtttaggtgagagagcaggtaatgcagccctagaagaaatagtaatgactgtaaagacacgtagagatatctttaaatgtgatacaagaataaatacaaaaaaaattatgaactgttctaggcttgtatcaagtatcacaggatttccagtgcaaccaaacaaggcgattgttggtaaaaatgcttttgcccatgagtctggtattcatcaagatggtattattaagtcaagagaaacatatgaaataatgaaagctgaagatattggtttgataagtaattctctcgtacttggtaagcactctggcagaaatgcatttaaacaaaagcttgacgagctaaatata

SEQ ID NO: 237008 - DNA, 769 bp, Unknown
  Bacterial polypeptide expressing nucleotide sequence isolated from the Sargasso Sea
atgaaaaataaatacgaaaaatacagtgcatatccaactgtaaaaattttagatagaaaatggcctaataaaaccataactagtgaaccaatttggtgttcagtggatttaagagatggcaatcaagctctgattgaaccaatggattcagtcaggaaaatgcgtatgtttaaacatttagttaaaataggatttaaagaaatagaaattggctttccttctgcatctgaaacagattttaattttgtaagagaattaattactgataatcatattccagaggacgttactgttcaggtcttaactcaatccagaaaatctttgattgaaaaaactgttgaaagtttgaaagattgcaaaaatgcaattattcacctttacaattcaactagcaccctgcaaagagaaattgtttttaaggaatccatggacggagtaaaaaaaatagcaactgatggggctaaaataattttagatcaattatataaattggaaaaatccaacattagattgcaatattctccagagagctttactggaacagagttaccatatgcattagaagtttgtgaaactgttttagatgtatgggaagcaagcgagcaaaatcctgttataataaacctacctgcgactgttgaaatgtctaccccaaacattcacgctgaccaaatagaatggatgggagataattttagtaatagaaaaagggtaattttatcccttcatcctcataatgatagaggtactgcaatagcagcaactgaat

SEQ ID NO: 237009 - DNA, 453 bp, Unknown
  Bacterial polypeptide expressing nucleotide sequence isolated from the Sargasso Sea
aatgagtgacgataaattagtcatatttgatacaactctcagagatggagaacaaagccctggtattgctcttaccccatcagaaaagttattaattgctcaacagcttgaaaaattgaaagtagatgttattgaggcgggatttgctgcttcatctcctggagattgggaaggtgttaatttaattgcaaaaaatattaagaattcaacaatagcatctcttgcaagatgtcatccagatgatattgaacaagcatgggaagcaataaaagtagcaaaagattcacgtatacatgtttttacatcaacttcacaaatacatatggaacatatgctcagaaaatctaaagaagaagtgttaaaagacgctaaagaatcagttaaatatgcaaaaaaactatgtgacaatatagaattctctgcacaagatgcaaccagaactgacaaagattt

SEQ ID NO: 237010 - DNA, 644 bp, Unknown
  Bacterial polypeptide expressing nucleotide sequence isolated from the Sargasso Sea
aatgacagataaaaatagagtattcatttttgatacaacgatgcgtgatggagaacagtccccaggagcatcgatgagtctggaagaaaaaattcaaatagcaagagtttttgatgaacttggagtagacattatagaggctggctttccaattgcatcaccaggagattttgaagcggtatcagaggtaagtaaaattttaaaaaaatctattcccgcgggcctttctaggcattcaaaaaaagatatagacagatgttatgaagcattaaaacatgcgccaagatttagaattcacacttttatttctactagccctcttcatatgaagcacaaattaaatatgactaaagaacaagtatacgattcagtaaaagagcacgttacttatgctagaaaatttacagatgatgttgagtggtcatgcgaggatggcacaagaacagatatggattatatgtgtaagacagttgaacttgcaattaaatgtggagctaaaacaataaatattcccgacacagttggttatacagtaccatctgagtttacaaaaattatccaaactttattaaataaagttccaaatattgataaagcaattttatcaacacattgtcataatgacttaggtttagcagtagcaa

SEQ ID NO: 237011 - DNA, 914 bp, Unknown
  Bacterial polypeptide expressing nucleotide sequence isolated from the Sargasso Sea
ttcagcgggagctagacagattgaatgtacgattaacggaataggagagagagctggcaatgctgctctagaggaacttgtaatggctatgaaaactagaaatgatttaatgccatttagcacaggaataaatacaaaattattaagtaaagcttcgaaggttgtatcaaatgctactggttttcctgttcagtttaataaagctattgttggaaaaaatgcctttgctcatgaatctggaatacaccaggatggaatgcttaaaaatagaaacacttatgaaattatgactcccgagagcgtcggcgttaaacaaacttctttggttatgggaaagcattctggaagacatgcttttaaagataagttaaccgatctaggttataaagatattacagatgatgtaattcaaactgctttcggaaaatttaaaattcttgcagataaaaaaaaacatgtttacgacgaagatattgcagctttagtagatgatagcttaattaaagaggataatgttataactttaaaatctctcaaagtctttgcaggaacgggtgaaccacaaagagcagacatgacgcttgaagtttatggagaaattaaaaaagcaactgaaacgggtgacggaccagtagatgctatttttaaatgtataaaaaaattatattcacatgatgtgaaacttcaactttaccaagttcatgcagtaacggagggtacagatgctcaggctacggtaagtgtaagaattgaagaaaatggaaaaacaactgtcggtcaggcagccgacacagatactcttgttgcttcagcaaatgcgtatttaaatgcattaaataaaatgattataaaaagaaaaaaaacggcaccggatggataccaacaacaaaaaaattatcaaaataaaaaatgaa

SEQ ID NO: 237012 - DNA, 936 bp, Unknown
  Bacterial polypeptide expressing nucleotide sequence isolated from the Sargasso Sea
tattattaatcatttaatgaataatgttactaatattgataaggttacaatttcaacgcattgtcataatgaccttggattagcggtagcaaattctcttgcaggcgtgagagctggagctaggcaaattgagtgcacgattaatggtttgggtgaaagagctggaaacgctgcaatggaagaagtggtcatggcaataagaactagaaatgatatgatgccttttcaaacaaatatacagactgaaaaactaacaaaaacctcaaagcttgtttcggcagttacaggtttccccgttcaatttaataaagctatcgttggaaaaaatgcctttgcacacgaagcaggtattcatcaggacgggatgttaaaaaataataaaacgtatgagattatgaccccagaaagtgttggagtatcagagtcaaatcttgtaatgggtaaacactctggcagacatgcattcaaacaaaaaataattgaacttggatattcaattaatgacaatgtaattgaggaggcttttgaaaattttaaaaacttagcagataaaaagaaaaatatatatgatgaagatatcatcgctattattgatgaccaggtaatcagagttaatgactctattttacttcaagatttgcaggtgatcgctggaacaaaaggtcctcaaaaagctgagattagtcttttaattgatgatgagccaaagacagtaacctctaagggagacggacctgttgatgcaatctttaatggtttaagtcaacttgttcctcataaaggaaaattattactctatcaagttcatgctgttacggaaggaacggatgcacaagctgaagtttctgtaagattggcagaagatggtaaaactgttgttggacttggcgcacatacagatactcttgttgcctctgccaaagcatatataaacgc

SEQ ID NO: 237013 - DNA, 897 bp, Unknown
  Bacterial polypeptide expressing nucleotide sequence isolated from the Sargasso Sea
tgtcacaacgatttaggcttggctgtagcaaactctttagcaggagttcaggctggtgcaagacaaattgagtgtacaattaatggaatcggagaaagagccggtaacgctgcacttgaagaagtagttatggcaatgaaaacaagacctgatttaatgccatacgaaactggaattaatacaactcttttaagtaaagcttcaaaaattgtctcaaatgcaactggctttcctgttcaatataataaagcaattgttggaaagaatgcttttgctcacgagtcaggaattcatcaagatggaatgttaaaaaatagacaaacttatgaaatcatgacacctgaaagtgttggtgtaaaacaaacatctttggtgatgggcaaacattcaggaagacatgcttttaaagataaattgattagcctgggttatgttgatgttacagacgatgttattaataatgcatttggtaaatttaaagttttagcagataagaaaaagcacgtttatgatgaagatataattgctttagttgatgatagcttgattattgacaacaaagttaacgcaattagcttaaaaactttaaaagtgtttgcaggaacaggtgaacctcaaagagcagatatgactttagatgtttttggagaagttaaaaaagcatcagagactggagatggtcctgttgatgcaatatttaaatgtattaaaaaactttatccacacaatgtaaatttacaattatatcaagtgcatgcagtaactgaaggtaccgatgcccaagctactgttagtgttcgaattgaggaaaatgggaaaacaactgttggtcaagcagcagatactgatacattagttgcatcggcaaatgcatatataaatgctttaaataaaatg

SEQ ID NO: 237014 - DNA, 988 bp, Unknown
  Bacterial polypeptide expressing nucleotide sequence isolated from the Sargasso Sea
gatgatgtggaatggtcatgtgaagatggacccagaacagacatggactttatgtgtaaaacggtgaaacttgcaattaagtgtggagctaaaactataaatattcctgacactgtaggttatacagttccatcagaatttaaaaaaattatagagactttaaaaaacaaagttccaaatatcgataaagcaatattatccgtgcattgtcataatgatttaggtttagcagtagcaaactctcttgctggagtatcagcgggagcaagacaagtagaatgcacaataaacggaataggagaaagagctggtaatgctgccctagaagagattgttatggcaatgaaaacaagaaatgatttaatgccatttaaaacaggaatagatacaaaactaataagcaaagcatcaaaaactgtgtccaatgctactggttttccagttcaatttaataaagcaattgtaggaaaaaatgcttttgctcacgaatctggtatccaccaagatggaatgttaaaaaacagaaatacttatgaaattatgacaccagaaagtgtgggagttaaaaaaacatctttagttatgggaaaacactctggaagacatgcgtttaaggacaaactaagcgacttaggttacgcaagtgtcacagatgatgtaatccaaacagcttttgggaaatttaaaattttagcagataaaaagaaacatgtttatgatgaagatataattgccttagtagatgatagtttaataaaagaaagcaatgttattaatttaaaatctcttaaagtatttgccggaactggagagccgcaaaaagcagaaatgaccttagaagtttatggagatgtaaaaaaggctaacgaaactggagatggtccagttgatgctatatttaaatgtattaagaagttatatccacacgatgttaaacttcaattgtatcaagtgcacgctgtaacagaagggacagatgcccaagcta

SEQ ID NO: 237015 - DNA, 820 bp, Unknown
  Bacterial polypeptide expressing nucleotide sequence isolated from the Sargasso Sea
gcaaattctttagcaggagtgatggctggagcaagacaaatagaatgtacaattaatggaattggtgaaagagcaggtaatgctgcacttgaagaagttgtaatggctatgagaacaagacacgatttaatgccttacacaactaatattaacacaaaacttttaagcaaggcatcaaaagttgtatctaatgcaacaggatttccagttcaatttaataaagcgatagtaggaaaaaatgcttttgcacatgagtcaggaatacatcaggatggaatgttaaaaaatagaaatacttacgaaattatgacccctgaaagtgttggagtaaaaaaaacatctttagtaatgggtaaacactctggaagacatgcatttagggataagttatcagacatgggatatgtggatgttactgatgatattataaatactgcttttggtaagtttaaaattttagcagataaaaaaaaatatatatacgatgaagatatagctgcacttgtagacgatagcttagtaacagaagataatgttataaaattaaaatcacttaaggtttttgctggaacaggtgaaccccaaaaagctgaaatgactctagaaatttttggcgaggtaaaaagtgcttcagatacaggagatggcccagttgatgcaatatttaaatgcatcaaaaaactttacaaccacgatgttaaacttcttttgtataatgtgcatgctgttacagaaggtacagatgctcaggctaccgtaagtgtgagaatagaggaaaaaggaaaaaccacagtggacaagcagcagatactgatacact

SEQ ID NO: 237016 - DNA, 740 bp, Unknown
  Bacterial polypeptide expressing nucleotide sequence isolated from the Sargasso Sea
ttgtgaagacgggactagaacagatatggattatatgtgtaagacagtagaactagcaattaaatgtggtgctaaaactattaatattcctgatactgttggctatactataccatctgaatttacgaaaattattgaaactttgctgaataaagttccaaacatagataaagcaattctttcaacgcattgtcataatgatttaggtttggcagttgctaattctttggcaggtgttcaagcaggagctagacaaattgaatgtactataaatggccttggagaaagagctggaaatgcagctcttgaagaagttgtgatggccatgaaaacaagacctgatttaatgccatatgaaactggaattgaaactactcttctaagtaaagcatccaagatagtatcaaatgccacaggttttcctgtccaatataataaagctattgttggaaaaaatgcttttgctcatgaagcaggtattcatcaagatggaatgttaaaaaataggcaaacatatgaaattatgacaccagagagtgtaggtgttaaacaaacatctctcgtaatgggtaaacactcaggtagacatgcatttaaagataaattaaccagtttaggatatccagatcttactgatgatgttgttgataatgcatttgcaaaatttaaaatcttagcagataaaaaaaaacatgtttatgatgaagatataattgctttaatagacgatagtttaataa

SEQ ID NO: 237017 - DNA, 880 bp, Unknown
  Bacterial polypeptide expressing nucleotide sequence isolated from the Sargasso Sea
tatgaaatacaaactaatgaaaactgaaagcgaagtgctagaatcaatcaagcagactgtaacctttgcaagaaacttgtgtgataatattgaatggagttgtgaagatgggggtagatcagatttagaatttttatatcaatgtattgaattagcaatcgattgtggcgcttccacaattaatattcctgatacagttggatacactttgcctaatgaatttgggtcaatattcaaatcagtaaaaaataatgtttcaaatattgataaagcaattttatcaactcacactcataacgatttaggattagcagttgcaaatagtattgcagccattcaagaaggagcaaggcaagtagagtgtacaattaatggtttaggagaaagagcaggaaatgcagccctagaagaaatagtaatgactttaaaagtaaaaaaagaccttataccttttcatacagatatcaaaacagagtcaataacaaaagcctcacgtcttgtttcttcaataacaggtttttcagtgcaacctaataaagctatagttggagctaatgcatttgctcatgaggcaggcatacatcaagatggaatgttaaaaaatgctgagacatatgaaattatgacccctgaatcagttggattaactgaatcttcactagttttaggtaagcattcaggcaaacatgctttttctgaaaaacttaaagaacttggttatgagtttggtgacaatgctttaatggagctgtttggaagatttaaggatttagctgatagaaaaaaagaaatttttgacgaagatcttatagctttagttggtgatagatcagtatctttcgacgaaaatattaaattcgtatctcttaaagtaaatgct

SEQ ID NO: 237018 - DNA, 724 bp, Unknown
  Bacterial polypeptide expressing nucleotide sequence isolated from the Sargasso Sea
ccgccagagcaaaagaaagaaatcatccagttggctgcaagcgcaacgcaaaaaattcgcgcattgtgtgaagctaacccacagacccgatggcgctatgaatattccccggaaacattttgttttaccgagcctgattttgccctgcaaatttgtgaagcggtcgctgatgtctgggaaccctcccctgaaaggcaaatgatcattaatctgcctgcgaccgttgaagtgaataccccgaatgtgtacgccgatcagatagagtatttttgccgccatttttcaaggcgcaatgcagtttgtatcagcgtgcacccgcataatgaccgcggatgcggtgtcgccagcgcggagttggccatactcgcaggcgcagaccgcgtagaggggtgtctgtttggcaacggtgagcgcacgggaaacgtgtgtctggttacgctcgcaatgaacctctacagtcagggaatatcgccgaaacttgattttagcgatatgaaacacgtcgtcgaagcggtcgaacaatgtaaccagttgcctgtccatccgcgtcatccttatgccggtaaactcgcctttactgccttttctggttcgcaccaggacgctatcaaaaagggattcaccgcacggggacaatccgctagtgagcgctgggaaatgccttaccttcccgtcgacccgaacgatattggctgcagctacgaagcggtgattcgcgttaaca

SEQ ID NO: 237019 - DNA, 763 bp, Unknown
  Bacterial polypeptide expressing nucleotide sequence isolated from the Sargasso Sea
tatgagcgacaaagataaagtctttatatttgataccactatgagagatggggaacaatctcctggagcatcaatgagtcttgaagaaaaaattcaaatttcaagagtattcgatgaattaggaattgatataattgaagcaggttttccgattgcttcacccggggactttgaggcagtaaaagctataagtaaaattttaaaaaattcgattcctgcaggattatcaagagccaataaaaaagatattgatgcatgccatgaggcgttaaaatcagcacctagatttagaattcatacttttatttcaacaagtccacttcatatgaaacacaaattaaataaaactcctgaacaagttttagaagcaattaaagaaagtgttacttatgcaagaaagtttactgatgatgttgaatggtcttgtgaagatggaacaagaacagaaatggattttatgtgcaaaatagtggaacttgcaattaaaagtggcgctaaaacaattaatattcctgatacagttggttatacaactccatcagaatttacaaaaattattacaaatttaaaaaataaagttccaaatattgataaggcaattttgtcagttcattgtcataatgatttaggtttagcagtcgctaattcattagcaggtgtatctgcaggagcaagacaggtagaatgtacaattaatggaattggcgaaagagcaggtaacgcagctcttgaggaaattgtaatggctataagaactagaaat

SEQ ID NO: 237020 - DNA, 865 bp, Unknown
  Bacterial polypeptide expressing nucleotide sequence isolated from the Sargasso Sea
tatgggtgagagagcaggcaattcttcattagaagaaattgtaatgactctaaaggttaaaaaagatttgatgccttatcacacagatataaaaactgagtccattatgaaggcttcaagattggtatcatcaataactggttttcctgtgcaacctaataaagcaattgttggcgcaaatgcttttgctcatgaagctggtattcatcaagatggaatgcttaaacatgctggaacatatgaaattatgactccagaatctatcggtctaaataaatcatctttagttttaggaaaacactcaggtaaacatgcattttctgaaaaattgaaagaacttggatatgagcctggagataatgcattaatggagttatttggaagatttaaagatttagctgataagaaaaaagaaatttttgaggaagatttaatagcattagctgaggatagatctgcatcttatgatgaacacattaaatttgtatcattagaggtaaacgcaggttctctttctaaacatgaagccaaattgacattaattatggatgaaaaaaaagccaccaatattagtcaaggtaatggaccggttgatgcaacttttaatgctattaaaataattacaaatacagactttaaacttaagttattccaggtaaatgctattactgctggtactgatgctcaaggagaggtaactgttagacttgaggataaagacttatcttctcaagcaaagggtagtgatcctgatattattgttgcatctgcaaaagcatatattagtgctttaaatagattactttttaaaaaaacgaaatcagttgtaaaaaaatctgccgaaatcaaaatagaaagggtatag

SEQ ID NO: 237021 - DNA, 793 bp, Unknown
  Bacterial polypeptide expressing nucleotide sequence isolated from the Sargasso Sea
tgtggagtggtcatgtgaagatggaacaagaacatatatggactttatgtgcaagacagttgagcttgcaataaaatgtggggctaaaacaataaatattcctgatacagtagggtatacggttccatcagaatttaaaaaaattatagagactttaaaaaacaaagttccaaatatcgataaagcaatattatctgtacactgtcataatgatttaggtttggcggtagcaaattctcttgcaggagtgtctgccggtgcaagacaagtggaatgcacaataaacggaataggtgaaagagctggtaatgctgcactagaagagattgtaatggcaatgaaaacaagaaatgatttaatgccatttaaaactggaatagatacaaaactaattagcaaagcatctaaaactgtttctaatgctactggttttcctgtccaatttaataaagctatcgtaggaaaaaacgcttttgctcatgaatcaggaattcatcaggacggaatgttaaaaaatagaaatacttacgaaataatgacacccgaaagtgttggagttaaaaaaacctcacttgttatgggaaaacattcaggaagacatgcatttaaagataaattagaagatttaggttacgcgggtgttactgacgatgtaattcaaaccgcttttggaaaattcaaaattttagctgataagaagaagcatgtttacgacgaggatattatagctctagtcgacgatagtttaataaaagaaagcaatgtaattaatttaaagtcccttaaagttttt

SEQ ID NO: 237022 - DNA, 859 bp, Unknown
  Bacterial polypeptide expressing nucleotide sequence isolated from the Sargasso Sea
ggaacattatttggaaatggagagagaacgggtaatgttgatatagtaacaattgctttaaatatgcttactcaaggcattgaaccaaatttagatttttctaatatcaattctgtaatgagagaagtggagtactgtaatcaactgcctgttcacccaagacatccttatgcaggagatctagtttttacagctttttcaggctctcaccaagatgcaattaaaaaaggttttcaagctattaaaaaatctaatgatccaaaatgggaagtaccttatcttccaatcgatccagctgatctaggaagaaattatgaagcagtagttaggattaactctcaatctggtaaaggaggagttgcatttttattagaaaaagatcatggagtctctttgccaagaagacttcagattagcctaagtcaaaaaattcaaaagctagcagatgatactggtaaagagattagtagctctcaaatatgggacatttttgaaaaaaaatacctccaacctgttaataattactcttacataaaacattcctcgtcatctaaagacgatcttcataaattagagctgaccatgaatatgaataataaagaaacaacaatacaaggtacaggaaatggtcccatcgactcatttgtaaatggtctttcagaaaaaattggggttgaaataaaagttgctgattatcatcaaacagctatctcctccgggtcagatgctaaagcagcagcctacatagaactagaaaaagatgccagaacattttggggagttggaatacatccaaataccactagagcctcatttgatgcaattattgttgggctaagtaagttgttagaaagctaat

SEQ ID NO: 237023 - DNA, 551 bp, Unknown
  Bacterial polypeptide expressing nucleotide sequence isolated from the Sargasso Sea
tatgagcaataaagatagagtctttatatttgatactactatgcgtgatggcgagcaatcgcctggtgcatctatgagtttagaagaaaaaattcaaatcgctagagtgtttgatgaattaggtatcgatataattgaagcaggttttcctatagcttcaccaggggattttgaagctgtttcggaagtaagtaaaattttaaaaaattctattcctgcgggactttcaagacactcagtaaaagatattgatagagcttatgaagctttaaaacatgcaccaagatttagaatacatacatttatttcaacgagtccattacacatgaagcataaactaaatatgtcaccagaggatgtttatgaatcaattggaaaacatgttacttatgcaagaaagtttactgatgacgttgaatggtcttgtgaagatggaacaagaaccgatatggattatatgtgtaaaactgtagagcttgcaattaaacatggagctacaacaattaatattcctgatacagttggttacacaataccatctgagtttacta

SEQ ID NO: 237024 - DNA, 819 bp, Unknown
  Bacterial polypeptide expressing nucleotide sequence isolated from the Sargasso Sea
ttaattgacgaaaaaattatcccgtctgatgtcgctattcaagttcttacgcaagcaaggccagaaattataaaaagaacttttgaagctcttgatggggctcctaatgcaatccttcatttttataattcaacatcaacacttcaaagaaaagttgtctttgaaaaagacaaagagggtgttaaaaaaattgctacagatgcagcaaagcttattaaagagttgtcaagtaaatacaaaaatactaactggtcctttgaatactctcccgaaagttttacaggaactgagctagattacgcagtagaagtttgcgatgaggttgttgagatattaaaagaatcttcagataataagattattattaatcttccggcaactgttgagatgtcaacggcaaatatatatggagatcaaatagagtggatgagtgaaaactttaagaatagagagaatatatgtctttcacttcatccgcataatgatagaggaacagcaatagcagcttctgagtttggtttaatggcgggcgcagatagagttgagggaacattatttgggaatggagaaagaacaggaaatgtagatattgttactttagctctaaatatgtatagccaagggataaatccaaacttagatttttcacaaattaataatgtcatgagagaagttgaatactgtaatcaactccccgtccaccctagacatccctatgctggagatttggtctttactgctttctcgggatcgcatcaagatgccatcaaaaaaggtttaagtgctctaagaaactctaatgaccccgagtggggagtg

SEQ ID NO: 237025 - DNA, 799 bp, Unknown
  Bacterial polypeptide expressing nucleotide sequence isolated from the Sargasso Sea
atgactgataaagaaaaagtttatatttttgacactacaatgcgtgatggtgaacaatcgccaggtgcatcaatgagtgttgaggaaaaaatccaaatatctagggtatttgatgaaatgggaattgatattatcgaagccggatttccaatatcatcaccaggagattttgaagcagtaagcgctattagcaaaggtattaaaaaatcaatcccttgtggattagccagagcaactagaaaagatattgatgcttgttacgagtcgcttaaatttgccaaaagatttcgtattcatacatttatttcaacaagcccagtacatatgaaacacaaattgaatatgactgatgaacaagttttagcagccattaaagatagtgtgacctatgctagaaaatttacagacgatgttgagtggtcatgtgaagatggtactaggacaaatttagattttatgtataaaacaattgaacttgcaattaattgtggagcaaaaacaattaatattccagatacagttgggtattctattccagaagagtttgcaaaaactattacatctataaaaaataacgtaccaaatattgataaagctataatttctgcacactgccataatgatcttggattagctgttgcaaatgctttatcaggtctttcagctggagtaagacaaattgagtgtacaattaatggaataggtgaaagagcaggcaatgcagctttagaagaaatagtaatggcaattaagacaagagacgacctacttccttatgaaactgggatcaaaacagaat

SEQ ID NO: 237026 - DNA, 872 bp, Unknown
  Bacterial polypeptide expressing nucleotide sequence isolated from the Sargasso Sea
gtttgaagatattgatagagcgtgggaggctgttcaacacgcaaaatcaccttttatacatacttttattgcaaccagccctcttcatatgaaatttaaacttaaaaaaactgaagaagaagtattggaagcaattgataagactgtatcacatgcaagaaatttatgtgaaaatattgagtggagttgcgaagatgggggaagatcagaattagattttctttataaatgtattgaacttgcaattaattgtggcgcatcaacaattaatattccggatacggttggttatactttaccagaggagtttggtaaaatttttaaaaatgtaaaaaataatgttccaaatatagacaaggcaattttatcaactcatactcataatgatcttggattagctacagcaaataatgtagctgctattaaagaaggagcaagacaagttgagtgcacaataaatggtatgggagaaagagcaggtaattcatctcttgaagaaatagtaatgactttaaaagtaaaaaaagatttgatgccttatcatacagatataaaaactgatcttattatgaaagcttcaagattggtttcttcaattactggattcccagtacagccaaataaagcaattgtaggtgccaatgcttttgctcatgaagctggtatacatcaagacggcatgcttaaacatgctggaacatatgaaataatgactcctgaatctatcggcctaaataaatcttcattagtattaggaaagcattcaggaaagcatgctttttcagaaaaattaaaagaattaggatatgagcctggagacaatgctttaatggaattgtttggcagatttaaagatttagctgataagaaaa

SEQ ID NO: 237027 - DNA, 841 bp, Unknown
  Bacterial polypeptide expressing nucleotide sequence isolated from the Sargasso Sea
aggtttagcaagacattctaaaaaagatatagatagatgttatgaagcacttaaacatgctcctagattcagaattcatacttttatttcgacaagtccattacacatgaaacacaagttaaataaaagtcctgaacaagtttatgagtcgattaaggaacacgttacttatgcaagaaaattcacagatgatgttgagtggtcatgcgaagacggaacaagaacagatatggattatatgtgtaaaacagttgagctcgcaattaattgtggtgcaaaaacaataaatattcctgatactgttggttatactgttccatcagagtttacaaaaataattcaaactcttttaaacaaagtaccaaacatcgataaagcaatattatctacacattgccataatgatttaggtttagctgtggcaaattctttagccggtgttcaagctggagctagacaaattgaatgtactattaatggtattggtgagagagcaggtaatgcggcacttgaagaagtagtaatggcgatgaagaccagacctgacctaatgcctttcgaaacaggaattaacactaaacttataagtaaagcatcaaaaatagtttcaaatgctactggttttcctgttcagtataacaaagctattgttggaaaaaatgcttttgcacatgaatctggaattcatcaagatggtatgcttaaaaatagacaaacatatgaaatcatgactccagaaagtgtaggagttaaacaaacatctcttgtaatgggcaaacattccggaaaacatgcatttaaagataaattaacaagcttaggttatgttgatgttacggat

SEQ ID NO: 237028 - DNA, 589 bp, Unknown
  Bacterial polypeptide expressing nucleotide sequence isolated from the Sargasso Sea
tatgagcaataaagatagagtctttatatttgatactactatgcgtgatggtgagcaatcgccaggtgcatcaatgagtttagaagaaaaaattcaaatcgccagagtgtttgatgaattaggtatcgatattattgaagcaggttttcctatagcttcaccaggcgattttgaagctgtttcagaagtaagtaaaattttaaaaaattctattcctgcgggactttcaagacactcggtaaaagatattgatagagcttatgaggctctaaaacatgcaccaagatttagaatacatacatttatttctacaagtccattacacatgaagcataaattaaatatgtctccagaagatgtctatgaatcaattggaaaacatgtttcttatgcaagaaagtttactgatgatgttgagtggtcttgtgaggatggaacaagaactgatatggattacatgtgcaaaacagtagagttagcaattaaaaatggagccacaacaattaatattcctgatacagtcggctacacaataccatctgagttcactacaattatagaaactttattaaataaagttcaaatatag

SEQ ID NO: 237029 - DNA, 911 bp, Unknown
  Bacterial polypeptide expressing nucleotide sequence isolated from the Sargasso Sea
aggtgtaagacaaatagagtgtacaattaatggaataggtgaaagagcaggaaatgctgcattagaagaagtggttatggcaataaaaacgagaaacgatttgatgccatataatacaggtattaagacagaattaattagcaaagcctctaaaatagtttcaaacgcgactggttttccggttcaatttaataaagcaatagttggaaaaaatgcttttgcacatgagtcaggaattcatcaagatggaatgttaaagaatagagaaacttatgagattatgactcctgagagtgtaggagttaagaaaacctcgcttgttatgggtaaacattcaggacgacatgcttttaaagataaattatctgatttaggttattcagatcttacagatgacattattcaagctgcttttggaaaatttaaagttttagctgataaaaagaaacatatatacgatgaagatatagtagccttagttgatgacagtttaattgtagataataaaataaatgcaattaatttaaaatctttaaaagtatttgctggaacaggggagccacaaaaagctgaaatgaccttagatgtttatggtgatattaaaaatacaaccgaaacaggggatggaccggttgatgcaatatttaaatgtataaaaacattgtttcctcacgatgtaaaattatcgctttatcaagtacatgcagtaacagaaggaacagatgcacaagcgaccgttagtgtaaaaattgaagaaaatgataggactacagtaggtcaatcagctgatacagatactttagttgcgtcagcgaacgcatatttaaatgcattgaataaaatgcttataaaacgtgagaaaaaagcaccttctcaaaatattaaacatcaaaaagtgaaaggaatataat

SEQ ID NO: 237030 - DNA, 383 bp, Unknown
  Bacterial polypeptide expressing nucleotide sequence isolated from the Sargasso Sea
tatggctgataaagataaagtattcattttcgatacaacaatgagagatggtgagcaatcacccggagcttctatgagtgttgaagaaaaaattcagatctcaagagtttttgatgaaatgggaatcgacattatagaagcaagttttccaatatcatctcctggcgattttgaagctgtaagtgcaatcagcaaaagcgtaaaaaattccataccttgcggtttggcaagagcaaccaaaaaagatattgatgcttgtcacgagtctttaaaatttgcaaaaagatttagaattcatacttttatttcaacaagcccagttcatatgaagcataaattaaatatgactaacgaacaagttttaggggctattaaggagagtg

SEQ ID NO: 237031 - DNA, 413 bp, Unknown
  Bacterial polypeptide expressing nucleotide sequence isolated from the Sargasso Sea
aatgggaaaagataaagtttacgtattcgatacaacattaagagatggtgaacaagtacctggatgtcaacttaacactaacgaaaaaatagaaattgctcttgatctagagtctttaggagttgacgttattgaggctggttttcctatttcaagtcctggagatttcaattctgtttctgaaatttctaaagttgtaaaaaaaccaataatttgtgctttatctagagctattatttctgatatagatatggttagtttagcattaaaaaatgctaaaagaaaaagaatacatacaggaattggatcatcagatattcacataaaacataaatttaattcaacgagagaaaaaatattagaacaagctgttgcagctgttaaatattcaaaaaagtttttcgaggatgtag

SEQ ID NO: 237032 - DNA, 860 bp, Unknown
  Bacterial polypeptide expressing nucleotide sequence isolated from the Sargasso Sea
tgatgaattaggtatagacattattgaagcgggttttccgatagcatcacctggggattttgaagcagtaactgaagttagtaagatcttaaaaaaatctattcctgcaggactatctagacattctaaaaaagatattgatagagcttatgaggctttaaaacatgctccaagatttagaatccacacatttatttcaacaagtcctcttcatatgaagcataaattaaatatgtcgccagaagatgtttacgagtctattggacagcatgtagcttatgcaagaaaatttaccgatgatgttgaatggtcttgtgaagatggcacaagaacggatatggattttatgtgcaagacagtagagcttgctatcaaaaatggagcaacaaccataaatattcctgatacagttggttatactattccatctgagttcacaaaaattattcaaacattattaaataaagttcctaatattgataaagcaattttatccacgcactgtcataatgatctaggcttagcagttgcaaattctttggcgggagttcaggctggcgctagacaaattgaatgtacaataaatggtttaggggaaagagctggaaatgctgcgctagaagaggttgtaatggcaatcaaaacaagaccagatttgatgccatatgaaactggaattaatacaacacttttaagtaaagcttctaaaattgtgtcaaatgcaacaggttttcccgtgcaatacaataaagcaattgttggaaaaaatgcttttgctcatgaagcaggtatccatcaagatggtatgcttaaaaatagacaaacatatgaaattatgacacctgaaagtgttggtgtta

SEQ ID NO: 237033 - DNA, 931 bp, Unknown
  Bacterial polypeptide expressing nucleotide sequence isolated from the Sargasso Sea
accccggatgagatgtatgaactgataaccagactgatgaatgaagtctaccaggctgaccaagtagtattttcggtccatgttcataatgatcttgggatggcagttgccaattctatggcggctgtgagggcaggggcacgtcaaattgaatgtaccatcaacggcattggtgaacgggcaggtaatgcctcgctggaagaattggtgatggcaattaatacccggcagcagtattaccagtatgaaactggaatcacaacggagcagatctttccatcaagcaaacttctttcacaaattacgggagtcagtgttcagccgaataaggcgattgttggtgccaatgcctttgcacacgaagctggaattcaccagcacggggtgctgaaaaattccctgacctacgaaatcatgacccctcagtcggtggggatcaaagccagcaacctggtattgggcaaacattctggtcgtcatgcactttcggaccggatcaaggaacttggttttgagttgaatgatgttgagttgaatcaggtttttaaggaattcaaaaggctggcagatattaaaaaacagattttcgatgaggatcttgaggctttggttacccatggcatccgaaagcacaccgatcgattccagctggaacagttgaatattacctcaggaacatcggtgattccaactgcgacagtgatcatgaagatcgatggtgaacaggtcaaaaaggcagggtttggagacggtccggtggacgcagctttaaataccatccgtgacatgacaggtatcgactgcagacttacttcctacgtggttaaagccatcaccggagggacagatgcccaaggtgaagttagtgtaggagtcgatcaggacggaatgcaattgaccggaagaggagctcacaccgatatcgtagtgg

SEQ ID NO: 237034 - DNA, 829 bp, Unknown
  Bacterial polypeptide expressing nucleotide sequence isolated from the Sargasso Sea
agaaacattaaattttcaactgtttgtggtttagcgagagccaacttaaatgatataaaccgatgttgggaggcgataaaaaatgcaaaacaaccgagaattcatacttttatcggtacttcaccaattcatcgtgaatttcaggtaaggttaaataaaactgaagtaatagaaaaaataactggcactgtttcgcatgcacgaaatctttgcgaaaatgttcaatggtcgcctatggatgctacacgaacagaggaagactacctatgtcaagttgtagaggcagcaataaaagctggagctaatacaataaacataccagataccgtcggatatactgctcctaacgagagtgcaagaatcattgaaatactaaagaacaaggtgctcgacatagatagggttacaattgctactcattgccataatgatttaggaatggcaactgccaatgctcttgcagctgtttcagccggagcaagacaaatagaatgtacaataaatggtttaggagaaagagcaggcaacacagctcttgaggaagtcgttatggcaatgaaagtaagaaacgatattattccttacaagactagggttgatgcaaaaaagctcattaaagccagccggctcgttgccacagtgtctggttttccagtccaatttaacaaagccatagttgggaaaaatgccttcgcccatgaaagtggaattcatcaggatggaatgttgaagcactccggctcctttgaaattatgagccctgaggatattggcttaaccgagtctaatctggttatggggaaacattctggcagggcagcttacgaca

SEQ ID NO: 237035 - DNA, 877 bp, Unknown
  Bacterial polypeptide expressing nucleotide sequence isolated from the Sargasso Sea
agcagcaaagatagagttataatttttgatactacaatgcgagatggtgagcaatcaccaggtgcgtccatgagtttggaggaaaaaatccaaatagctagagtatttgatgaattaggaatagacattatcgaagcgggttttccaattgcatcacctggggattttgaagcagtgactgaagttagtaaaattttaaaaaagtccattcctgctggattatctagacattcaaagaaagatattgatagagctcacgaagccttaaaacatgctccacgatttagaattcatacatttatttctactagtcctcttcacatgaagcataaattaaacatgtcttctgaagatgtgtatgagtctattggacaacatgtagcttatgcaagaaaatttactgacgatgtagagtggtcatgcgaagatggcacaagaacagatatggattttatgtgcaagaccgtggagcttgcaattaaaaatggagcaacaacaataaatatacctgacactgttggctatactattccatctgagttcacgaaaataatcaaaacattaattaataaagttccaaatattgataaagcaattttatctacacattgtcataatgatttagggttggcagttgcgaattctttagcaggagttcaagctggggcgagacaaatagaatgtacaataaatggcttaggagaaagagctggtaatgctgccttagaggaagttgtaatggcaattaaaactagacctgatttaatgccttatgatactgcaattaatacaacgcttttaagtaaagcttcaaagattgtttcaaatgcaacaggttttcctgttcaatacaataaagcaattttggaaaaaatgc

SEQ ID NO: 237036 - DNA, 880 bp, Unknown
  Bacterial polypeptide expressing nucleotide sequence isolated from the Sargasso Sea
atgactgacaaaaacagagtatatatatttgatactactatgcgtgatggtgaacaatcaccaggcgcttcaatgagcttagaagaaaaaattcaaatagcaagagtatttgacgaacttggtattgatattattgaagcaggttttccaattgcttcaccaggtgattttgaagctgttactgaggtcagtaaaattttaaaaaattctattccagctggcctagcaagacattccaaaaaggatattgatagatgttatgaggctttaaaacattctccaagatttagaattcatacgtttatttctactagtccactacatatgaagcacaagcttaatatgactcctgaacaagtttatgattcaattaaagaacatgtcacatacgccagaaaatttactgacgatgttgagtggtcatgtgaagatggaacgagaactgatatggattatatgtgcaaaacagttgaactagcaattaaatgtggagcaaaaacaataaatattcctgataccgttggttatactgttccatctgagtttacgaaaattattcaaactttattaaacaaagtaccaaatatagataaagcaatcttatctacacattgtcataatgatttaggattagcagtcgcaaactctttagcgggagttcaagctggagcaagacaaattgagtgtacaattaatggaattggagaaagagcgggaaatgctgcacttgaagaagtagttatggcaatgaaaacaagaaatgatttaatgccatactcaacaggaattaactcaaccttattaagcaaggcttcaaaaattgtttctaatgcaactggctttccagttcaatttaacaaggcgatagtggaaaaaacgc

SEQ ID NO: 237037 - DNA, 491 bp, Unknown
  Bacterial polypeptide expressing nucleotide sequence isolated from the Sargasso Sea
tatgtcaaaaaatagagtaattatattcgatacaactcttagagatggtgaacaatcacccggggcatctatgagtctcgagggcaaattgcagattgcatctgcctttcaagatttaggtgtcgatgtattagaagcaggttttcctgcagcatcacctggagattttgaagcagtaactgaaatatctaaattattaaaaactacagttccttgtggattagctagagccgtaaaaaatgatttagaaaaatgcgttgactctttaaaacattctaagaattttagaatacatacttttatttcaacaagcgatttacatattaaacataagttacaaaaaacaaaagatcaggttttagaattaataaaatctagtattgagtatgcaaaaaaacatactgatgatgttgagtggtctcctgaggatgcaacaagaacagatccagattatttatgtaaaacagtagaattagcaattaaatgtggtg

SEQ ID NO: 237038 - DNA, 861 bp, Unknown
  Bacterial polypeptide expressing nucleotide sequence isolated from the Sargasso Sea
gcaagacaagtagaatgtacaattaatggtctaggcgaaagagctggcaatgcttctttggaagaaatagtcatgtcattaaaagtcaggaacgatttaaatccatatgaaactgaaatcgattctaagcaaatttatccaacaagcaggctggttagcagcgttacaggagtttttgttcagcctaacaaagcaatcgttggagccaatgcctttgcgcatgaagcaggcatccatcaagatggtgtgttgaagcagagtttaacttacgaaatcatggacccctctgaggtaggaataccttcaaatcatattgttcttggtaagcattcaggacgacatgcatttagagacaggttaacagaatttggatatgaactttcagaggataattttgaaatagcatttatcaaatttaaggaactatgtgacaagaaaaagtatgtattcgacgaagatattgaggcattaattaacgaagagttcgttagatcaggtgacttttataaactagaatcactcgagtgccaatctggtactgaaaaaactccaaaagctaagataaaaattcttgttgatggcgaagaaaagcaagctcaagcttcaggggatggaccaatagattcagttttcaaggcaatttctgaagcggtacaaatttttcctgttctagattcatattctgtttcctcaataactggaggtatggacgcgcaaggagaagtcactgttacaattaaggacgatgacataagtgctcgaggtaaaggggtcagtacagatgttattatcgccagcgctagggcactaattaatgcattaaacaccttagatggagaaaaaacacccaaaagtaaaaca

SEQ ID NO: 237039 - DNA, 655 bp, Unknown
  Bacterial polypeptide expressing nucleotide sequence isolated from the Sargasso Sea
caactacctgttcatccaagacatccgtatgcaggggatcttgtttttacagctttctctggatcccatcaagatgctataaaaaaaggatttaaagcgattaaaaaatctaataatccaaaatgggaagttccttatctacccattgatcccgctgacttaggcagaagctacgaagcagtagttagaataaattctcagtctggtaaaggaggagtagcatttcttttagaaaaagatcatggagtatctcttccaagaagactacaaataagtttgagtcaaaaaatacaaaaacttgctgatgaaacaggaaaagaaattacaagttctcaaatttgggaaatttttgatgctaattacctaaaacctaaaaataacttctcatatatcaaacattcttcgacttcagatggtgatttgcactctttaaaactggaaatgaatatggatgctaaagcaataaagattgaaggaactggtaatggtcctattgattcatttatgaatgggctttcaaatcaatttggatttgatatcaaggttgctgattatcatcaaacagcaatatcatctggttctgatgcaaaagctgctgcctatattgagcttgaaaaagatggtaaaacattttggggtgttggcattcatccaa

SEQ ID NO: 237040 - DNA, 811 bp, Unknown
  Bacterial polypeptide expressing nucleotide sequence isolated from the Sargasso Sea
cgctttagaagtatgtgaggccgtgatggatgtctggcagccaaatagagacaacccaacaataattaatttaccttcaacagtcgaaatggcgacacctaacatatttgcagatcaaatcgaatggatgcacacaaattttcggagccgtgaaaacgtaattctatccgtccacccacataacgaccgtggcacaggcgtagcagcggccgaacttgctcagatggctggtgcagatcgagttgagggaacattattcggaaatggcgaaagaactggcaacgttgacattgttacattaggactaaacttatttactcaaggcgttgatccagatctcgatttctcaaacatcaattcacttatggatacagcagtacactgcaaccaactcccgatccatgcacgacatccctatgcaggcgaacttgttcatacggcattctcgggctcccatcaagatgccatcaataagggtatgaaagcgatggaaactgccaacagtccattatttgaagttccgtaccttccgatagatccaaaggatatcggaagagactatgaagcgattattcgcgtaaatagccaatctggtaagggaggggtgtcttatattttagaaaatgattactccattcggttacccaagccggcgcaagctcagttcagccaagttatacagaagataactgatgaaacgagccaagagatcacgccggaagaaatttggaaggcattccaatctacattcatagaacaaacgggtccttttcagctaatttcgttctcttcagaagtggcttcgcgttcc

SEQ ID NO: 237041 - DNA, 605 bp, Unknown
  Bacterial polypeptide expressing nucleotide sequence isolated from the Sargasso Sea
attgaaaatcagaatatttgacactacattaagggatggagaacaaacccccggtgtttcactttctcctgaacaaaaactaaacattgcaaagaaattagatgcattaggtatcgatgctatagaaacaggatttcctgttatttctgatggagaacgcagtgcagtaaaaatgataacaagtgaaagtttcaattcagagttatgtggtttagcaaggaccaataaaaaggacattgacgctgcggtagactgtggattaaactatattcacacattcattgctacatctgatattcatttagaatataagctaaaaatgacacgtgagcaagcattagaaaaagcaattgatgcagttgaatatggtaaatcacgtggattacaagttgaattctctgcagaagatgcaacaagaacagatagagtgttcctaaaagagatttttagtgaagttgcaaaggctggtgcagatagaattgatattcctgacactgtaggttattcaaccccacaatatatcgcagagattactaaagacgcaatagatgcaacaaaattaccagtaagtgtacattgccataatgattttggattagctgttg

SEQ ID NO: 237042 - DNA, 760 bp, Unknown
  Bacterial polypeptide expressing nucleotide sequence isolated from the Sargasso Sea
acaggttggttacactaccccagacgaaatgtatgagttaatctcaaaattacgaaatgaggtttacgatgccgataaagtagttttttctgtgcactgccataatgacttgggacttggagttgcaaattccctcgcagcagtaagggctggggcaagacagattgaatgcacaataaatggtataggggaacgtgcaggaaatgcctcgcttgaggaaatagtaatggcccttaaaacacgtcaggaatattttggttttgaaagtgatatagatacagaacagctttatccgtctagtaaactactttcacaaattactggtgtagatgttcagccaaacaaggctattgttggtgcgaatgccttctctcatgaggctggaattcaccaacatggtgttcttaagaatcccttgacttatgaaattatgacaccacaatcagttggtattaagtcaagcaacctagtaatgggtaagcattcaggtcgttttgctcttggtcagaggatacaggaacttggatttgatctgaatgacattgatcttaataatattttcaaggaatttaaacgtcttgctgacttaaaaaaacaggtttttgatgaagatattgaagctctggttactcatggtgtcggcagaaactcggataaatttattttgaaggatttaatcgttacatctggtacaaatgcaattccaacggcaactatttcaatgaaaatagatgacaaggtttttaaaaaagcaggtttt

SEQ ID NO: 237043 - DNA, 793 bp, Unknown
  Bacterial polypeptide expressing nucleotide sequence isolated from the Sargasso Sea
gaagaggttgtaatggctatgagaaccagacatgatttaatgccttacacaactaatataaatacaaaacttttaagtaaagcatccaaggtagtatctaatgcaacaggattcccagttcaatttaataaagcagttgttggaaaaaatgctttcgcacatgaatctggaatacatcaggatggaatgttaaaaaatagaaacacctatgaaattatgactcctgaaagtgttggagtaaaaaaaacatctttagtaatgggtaaacactcaggaagacatgcatttagagataaattatcagatatgggctatgtagatgttacagatgacataataaatactgcttttggaaagtttaaaatcttagcagataagaaaaaacatatatatgatgaagatatagctgcacttgttgacgatagtttagttacagaggataacgttattaagcttaaatcattaaaagtatttgcaggaacaggcgagcctcaaaaagcagagatgactttagaaatttttggagaagtaaaaagtgcttcagatactggagatggcccagttgatgcgatatttaaatgtattaaaaaactttacgcgcatgaagtaaaacttttactttataatgttcatgcagtgactgaaggaaccgatgcgcaagctactgttagtgtgagaatagaagaaaatggtaaaactacggtcgggcaagccgcagatacagatacactggtggcttctgctaatgcatatataagtgctttaaataaattaattataaaaagaaaaaaaa

SEQ ID NO: 237044 - DNA, 718 bp, Unknown
  Bacterial polypeptide expressing nucleotide sequence isolated from the Sargasso Sea
atgtctgataaagagagagtttttatatttgataccacaatgcgagatggtgagcagtcaccaggtgcatctatgagccttgaagaaaaaattcaaattgcaagagtttttgatgaacttggtattgatattattgaagctggatttccaattgcatcacccggggattttgaagcagtatcagcgatcagtaaagttttaaaaaaatcaataccttgtggtttatctagacattcaaaaaaagatattgatcgttgttatgaagcattaaaacatgctccaagatttagaattcacacttttatatctacaagtccattacatatgaagcataaattaaataaaactccagaacaagtttatgattcaatcaaagaacatgtaacttatgcaagaaacttaacagatgatgttgagtggtcatgtgaagatggaaccagaactgatatggactatatgtgtaaaacagttgagcttgcgataaagtctggagcaacaacaatcaatatacctgacacagttggatatacagttccttcagagtttacgaaaattataaaaacattattaaataaagttccaaatattgataaagcaattctatctacccactgtcataacgatttaggtttagctgtagcaaattctttagctggagtacaagctggtgctagacaaattgaatgtactataaatggaataggggaaagagctggaa

SEQ ID NO: 237045 - DNA, 934 bp, Unknown
  Bacterial polypeptide expressing nucleotide sequence isolated from the Sargasso Sea
tatttttgatacaactcttcgagacggagaacaatctccaggtgcatcaatgaatttagatgaaaaacttcaaattgctgaagttcttgattcaatgaaagttgatattattgaagcaggttttccgatcgcttctaatggagattttgaagcagtctctgaagttagcaagcatgtcaaaaattcaacgattgctggtttagcaagagcaagctttaaagatattgaccgcgcttgggaagcagtacaacatgctaagtctcctagaattcatacttttattgcaaccagtcctctacatatgaaatataaattaaagaaaactgaagaagaagttttagaagctattcaaaaaactgtgtctcacgcaagaaatctttgtgataatattgagtggagttgtgaagatggcggaaggtcagagttagaatttttatatcaatgtatcgagctcgccatcaactcaggtgcttcaactattaatatccctgatactgttggttacactttaccagaagagtttggtaaaattttcagaaatgtaaaaaataatgtcccaaatattgataaagcaattctttctactcatacacataatgatttaggtttagcgacagcaaataatgttgctgctattaaagaaggtgcaagacaagttgaatgtacaattaatggtatgggtgaaagagctggaaattcatcattagaagaaattgttatgactttaaaagtaaaaaaagatctaatgccttttcatacagatattaaaacagagtccattatgaaagcttctagattagtatcatcaataacaggttttccagtccagccaaataaagcgatagttggtgcaaatgcttttgctcatgaagcaggaattcaccaagatggtatgctcaaacatggctggaactttatgaattatgacacctga

SEQ ID NO: 237046 - DNA, 784 bp, Unknown
  Bacterial polypeptide expressing nucleotide sequence isolated from the Sargasso Sea
aattcattagccgcagtactaaatggagctcgacaagttgagtgtactattaatggtcttggtgagagagctggtaatgctgctcttgaagaaatcgtcatgactgtccgaacaaggcaagatatttttccttgtgacactaggattaattccaaattgataatgaaatcttcgaggttagtatcaggcataacgggtttccccgtccagcccaataaagctattgttggtaaaaatgcatttgctcatgaatctggcattcaccaagatggaataataaaatcaagggaaacctatgaaattatgaaagcagaggatattggattagtaagtaattctcttgttttaggtaaacactctggcagaaatgctttcaagcaaaaattaacagatttaaacataatgccaaaaactaatgcagagcttgatggccttttttatcgatttaaagatttagcagataaaaagcatgaaatatttgatgaagatcttattaatttatcctcaaatataaaagtggctactaattctatcaattttaattatatgaatgtcattacagaaactaataaaaaaccgcatgctcatattaaactagtagtagatgatgagatacttgaggcaacatcaacaggagatggtgctgtagacgcagcgttcaatgcaatagaaaagataattaaaagtaaatgtaaattaatattatattctgttaataatataacatctggtaccgattctcagggagaagtaacggtaagaataacaaaggatgagagcatat

SEQ ID NO: 237047 - DNA, 574 bp, Unknown
  Bacterial polypeptide expressing nucleotide sequence isolated from the Sargasso Sea
tgttacagtttcatgtcactgccataacgatcttgggttggcaactgctaactccatatatggagttatcaatggtgcaagacaaattgaatgtacagttaatggtattggagagagagctggaaacacatctttggaagaagttgttatgattttaagacagcatactgatttgaacctagatactaatattaattctaaacttcttaatgtaacaagccaaaaagtatccgaacttatgggaatgcctgttcaaccaaataaggctatagttggatccaatgcatttgctcatagctctggtattcatcaagatggtgttattaagaaaagagaaacttatgaaattattgatccacttgatgttggtgttgataaatcatcaattgtactgacagctaggagcggtagagctgcacttgcttttagaatgaagcagtatggagttaatctgacaaagaaagaacttgacgatgtttataatgagttcttaatactagctgacaaaaagaaagaagtaacagacacggattttcctgaaattcttcagaataaaaatattagttatggctaa

SEQ ID NO: 237048 - DNA, 787 bp, Unknown
  Bacterial polypeptide expressing nucleotide sequence isolated from the Sargasso Sea
agcaattaaaagtggtgcaaaaactataaatatacctgatactgttggatatacagtaccatcagaatttacgaaaattattcaaacattgttgaataaagttccaaatatagataaagcaattttatcaacacattgtcataatgatttaggacttgctgttgcaaattcacttgcaggagtacaagcaggggcacgacaaattgaatgtactattaatggtattggagaaagagctggaaacgctgctcttgaagaagtcgtaatggctattagaactcgaaacgatttaatgccatattcgactggcataaatacgaaattattgagcaaagcctcaaaagttgtttcaaacgcgacaggttttccagttcagtataacaaagccattgttggaaaaaatgcatttgctcatgaggcaggcattcatcaagatggaatgttaaagaatagagaaacatatgaaataatgacacccgagagtgtaggtgtaaagcagacttctcttgtaatgggaaaacattcaggtaggcacgcatttaaagataaattaaatagcttaggttatgtagacgtaactgatgatgtaatccaaaatgcatttggaaaatttaaaattctggcagataaaaagaaacatgtatatgatgaagatatcatagccttagtagatgacagtttaattatagataataaagttaatgctttaacactaaaatctttaaaagtttttgctgggacgggagagccacagaaagaagaaatgacactagaaatttttggtgaa

SEQ ID NO: 237049 - DNA, 875 bp, Unknown
  Bacterial polypeptide expressing nucleotide sequence isolated from the Sargasso Sea
ggcagaagataaaaatagagtatatatatttgatacgaccatgcgtgatggtgagcaatcgccaggtgcatccatgagtcttgaagaaaaaattcaaatttctagagtttttgatgaattaggtatcgatattatagaagcaggatttccaatagcttcacctggagattttgaagctgttaccgaagttagtaaaattttaaaaaattctattccagcaggtctatcacgtcatacaaaaaaagatattgatgcatgttacgaggcattaaaatctgctaagagatttaggattcatacttttatatcgacaagtccattacatatgaaacataaattaaataaaacaccagaggaagttgtagagtcaataaaagaacatgttacatatgctagaaaatttactgatgatgtagagtggtcatgtgaagatggaacaagaacagatttagattttatgtgcaaaactgtcgagctagcaattaaatgtggagcaaaaacaattaatatacctgatacagttgggtattcagtaccttcagaatttaaaaaaataattgaagcattaattaacaaagtaccaaatatagataaagctattttatctactcactgtcataatgatttaggtttagctgtagcaaattctttagccggagtttctgcaggagcaagacaaattgagtgtacaattaatggaataggagaaagagcgggtaacgcagctctcgaagaaattgtaatggcgatgaaaacaagaaacgatttaatgccattcaaaacagggataaatacaaaattattaagcaaagcttcaaaggttgtatcaaatgcaacgggttttcctgttcaatttaacaaagctattgttggaa

SEQ ID NO: 237050 - DNA, 741 bp, Unknown
  Bacterial polypeptide expressing nucleotide sequence isolated from the Sargasso Sea
tttatgcagaagatgctggaagaactgagaatgattttcttgctagagtctgtgaagctgttatcaaagctggtgctaccgtattaaatattccagacactacaggatattgcctacctgaagagtatggagacaaaattaaatatctcaaagaaaatgttactggtattgacaaagctactctttcctgtcactgccataacgatttaggtcttgcgactgcgaattctattgctggtgttcaaaacggtgcaagacaaattgagtgtactattaatggaattggagaacgagcgggaaatacatctttagaagaggttgtgatgatattacgtcaacatcctacattgaatttggatacaaaaattcaatcaaataaattatatggaattagtcagcttgtatctgatagtatggcaatgccagttcaacccaataaagcaattgttggagccaatgcttttgcgcattcttctggaatccaccaagacggagttataaaaaaacgtgaaacttatgagataattaatccgaaagatgtaggcgtaaataaatcctcaattattctcactgcacgttcaggtagagcagcattagcgtatcgcgcaaaaaatattggatatgaattagataaattacaacttgacaaagtatatcaacaatttttgattatagcggatcaacaaaaagagataagtgatttagacttacctaaaattattaagtcaagtaatatttaac

SEQ ID NO: 237051 - DNA, 769 bp, Unknown
  Bacterial polypeptide expressing nucleotide sequence isolated from the Sargasso Sea
aaaagatttagaattcatacttttatttcaacaagccctgtacatatgaaacataaattaaatatgactaacgaacaagttttaggggctattaaagagagtgttacatatgcaaaaaaattcactgatgacgttgaatggtcttgtgaagatggcacaagaacagacttagattttatgtacaagacaatcgagcttgcaattaaatgtggtgcaacgacaataaatattcctgatacagttggatattcgataccagaagaatttgcaaaaactattaaattaatcaaaaataacgttccaaatattgataaagcaattatctcagctcattgtcataatgatttaggtttagcagttgcaaatgcattatcaggattatcagctggagtaaggcaaattgaatgtacaataaatggtattggggaaagagcaggaaatgcagccttagaggaaatagttatggcgattaaaacgcgagatgatttattaccttatgagacaggtataaaaacagagttaattagtaaagcatcaaaaattgtctctaacgctacaggatttccagttcaatttaataaagcgatcgttggaaaaaatgctttcgcacacgagtcagggatacatcaagatggaatgcttaaaaatagagaaacatatgaaatcatgacaccagagagtgttggggttaaaaaaacatcattagttatgggaaaacattctggaagacatgcttttaaagataagttaagtgatttaggttacgctg

SEQ ID NO: 237052 - DNA, 661 bp, Unknown
  Bacterial polypeptide expressing nucleotide sequence isolated from the Sargasso Sea
tacaactcctagtgaatttggcaaactaattgccgatataaataaaaatgttccaaatattgatgaagcagtaatctcggttcatggtcataatgatctaggcttggcagtagccaattttcttgaggcagtaaaaaatggagccagacaactagaatgtactattaacggaattggtgaaagagccggtaatgcctctctagaggaattagtaatggcactgcacgttaggaagagtttttttaatagttttttcaaaagaaatccagattcaccaactcctcttacggctataagaacagaagaaataacaaaaacctctagacttgtctccaacctaacaggaatgacagtacaacctaataaagcgattgtaggagccaacgcttttgcacatgagtcaggcattcatcaagatggggttttaaaaaataggctaacttatgaaattatcgacgcaaaaactgttgggttgagtgataacaaaatatctttggggaaacttagtggaagaagtgcagtaagagcaagattagaagagatgggatatgacttgagccgagaagatttaaatgatgcttttgctcgtttcaaggatttagctgaccggaaaagagaaattactgatcgagatttagaagcaatcgttagtgaacaagtg

SEQ ID NO: 237053 - DNA, 922 bp, Unknown
  Bacterial polypeptide expressing nucleotide sequence isolated from the Sargasso Sea
gaatcgataaaagagcatgtaacgtatccaagaaattatactgatgatgttgagtggtcttgtgaagatggaactagaacagatatggactatatgtgtaaaactgtagaattagcaattaaatgtggagctaaaacaattaatatacccgacactgttggctatactattccttctgaattcacaactattatagaaacattgctaaataaagttccgaatattgataaagcaattctgtcaactcattgtcacaatgatctgggtttagctgttgcgaattctttggcaggagtgcaggctggtgctagacaaattgaatgcacaataaatggattaggtgaaagagcaggtaatgctgctcttgaagaagttgttatggcaattaagacaagaccagatcttatgccttatgaaacaggtattaatacaactcttttaagcaaagcatcaaaaatagtttcaaatgctacaggatttcctgttcaatacaataaggcaattgtcggaaaaaatgcatttgctcatgaggcaggaattcatcaagatggtatgctaaaaaatagacaaacttacgaaataatgactcccgaaagtgttggtgtaaaacaaacttcattaattatgggtaagcactcaggaagacacgcttttaaagataaactaaacagtttaggttatcctgatttgacagatgatgttgttagtaatgcatttgcaaaatttaaggtattggctgataagaaaaaacatgtttatgacgaagatataattgcattggtagatgacagtttaattgtagataataaagttaatgcaataaacttaaaatcattaaaagtttttgctggtactggtgaaccacaaagagctgagatgactttagatgtttatggagagataaaacaagcatctgaaacag

SEQ ID NO: 237054 - DNA, 575 bp, Unknown
  Bacterial polypeptide expressing nucleotide sequence isolated from the Sargasso Sea
gaggattcacaccttcattgccacttccccaatccatatgaaggctaaactccggatgtcgcccgaggatgttctcgagaaggctgtgcaggcggttcgccaggcgagagatgccgtggatgacgttgagttctcggcggaagatgcgggccgatccgatgaggattttctctgcagagtctttgaggcggtgatcgacgcaggtgcccgaacggttaatattcctgacacggtgggttatacgatgcctcatcaatttggggatctttttactcggctgatggcgcgtattccaaactcagataaagctgtcttttccgtgcattgtcacaacgacctcggtgtcgcggtcgcaaactcccttgccgcagtacaaggaggagcgcgccaggtagagtgcacgattaatggtctgggtgagcgagcaggaaacgcctctctcgaggaggttgtcatggcggtgagaacccgtcaggacgttttctcctgcgatacggaaatcgataccacacagattcttcccgcgagccggatggtgtcaagctatcacgggttttccggttcagcccaataag

SEQ ID NO: 237055 - DNA, 448 bp, Unknown
  Bacterial polypeptide expressing nucleotide sequence isolated from the Sargasso Sea
atgagccagcaagtcattattttcgatacgaccttacgcgacggtgaacaagcgttacaagccagcctgagtgtgaaagagaaactgcagattgctatggccctggagcggatgggcgttgacgtcatggaagtgggcttcccagtctcgtctccaggcgactttgaatctgtgcaaaccatcgcgcgcacgatcaaaaacagccgcgtttgcgccctggcccgctgcgtagaaaaagatatcgatgttgcagcagaatcattaaaagtggcggaagcgttccgtattcacacttttatcgccacctcgccgatgcatatcgccaccaagctgcgcagtaacctggatgaggttattgaacgtgccatctatatggtgaagcgcgcacgcaactacactgacgatgtcgagttttcctgtgaagacgctggccgtacgccgattgccg

SEQ ID NO: 237056 - DNA, 569 bp, Unknown
  Bacterial polypeptide expressing nucleotide sequence isolated from the Sargasso Sea
aatgtcagagaataatagagtttatatatttgatactacaatgcgtgacggtgaacaatcaccaggcgcatctatgagtttggaagaaaaaatccaaattgctagggtatttgatgaattaggtgttgatataattgaagcaggatttccgattgcttctccaggagactttgaagctgtaactgaaattagtaaaatattaaaaaaatcaattccagcaggtttatcaagacattcaaaaaaggatatagatagatgttatgaatctttaaaacatgctgagagatttagaattcacacttttatatctacaagcccattacacatgaagcataaattaaataaatctccagaagaagtttatgaggcaataaaagaacacgtaacttatgcaagaaaatttactgatgatgttgaatggtcttgtgaagatggaacgagaactgatatggactatatgtgtaaaactgtagagttggcaattaaatgtggagcaaaaacaataaatattcctgacacagttgggtatacagttccttctgaatttacaaaaattatcaaactttatt

SEQ ID NO: 237057 - DNA, 637 bp, Unknown
  Bacterial polypeptide expressing nucleotide sequence isolated from the Sargasso Sea
atgccagacaaaaatagagtattcatatttgatacaacaatgcgcgatggcgaacagtcaccaggcgcctctatgagccttgaagaaaaaattcaaatttctagagtttttgatgaattgggtgttgacattattgaagctggctttcctgttgcttcacctggcgattttgaagctgttacagaagtaagtaaaattttaaaaaaatcaataccttgcggcctatcaagacatataaaaaaagatattgatgcatgctatgaggctttgaagtcagctaaaagatttagaattcatacttttatttcaacaagtccgcttcatatgaagcataaattaaataaatctccagaagatgttgttgaagcaataaaggaacatgtaacttatgcaagaaaatttactgacgacgtagaatggtcatgtgaagatggaacaagaacagatatggattttatgtgcaagacagttgagcttgcaattaaatgtggagctaaaacaattaatatacctgatacagttggatataccgtcccttcagaatttaaaaaaataattgagacacttattaataaagtaccaaatatagataaagcaattttatcaacacactgtcacaacgatttaggtttagcag

SEQ ID NO: 237058 - DNA, 835 bp, Unknown
  Bacterial polypeptide expressing nucleotide sequence isolated from the Sargasso Sea
aaagaggcgaatgtttgaacacctagtaaaacttggtttcaaggaaatagaagttggatttccctcagcatcccaaactgactttgattttgtcagagaaattatagaacttgaccttattccaagagatgtaaccattcaggttcttacccaagcccgagaggagctgataaagcgcacgtttgagtcagtaaagggagctaagacagctatcattcatctatataattcgacttctactcttcaacgacgcgtggttttcaatcaagataaggcaggagttaagaagattgctgtagatggtgcaaaaattattaaagatttagcaaacggcactccagataatgaaactattatttaccaatattctcccgagagctttacgggaacagagcttgattatgctaaagaagtttgcgaggcggttatggatgtatgggaaccaagcccagaaaataaagttattttgaaccttcctgcaactgtagaaatggccactccaaatatttacgccgaccaaatagagtggatgcacaagaatttaaaaaatagggattgcatcattctcagcctccaccctcacaacgaccgtggaaccggtgtagcagcggccgagcttggattaatggctggggcagatcgaattgagggcactctttttggaaatggagagcgaactggcaatgttgatattgtgaccttggcaatgaatctctacacacagggagtcgaaccatatttagacttctcaaatatcaatgaagtgagacgtgtagcagagcactgcaatcaattgcccgttcatccccgccatccttatggcggagatctcgtt

SEQ ID NO: 237059 - DNA, 884 bp, Unknown
  Bacterial polypeptide expressing nucleotide sequence isolated from the Sargasso Sea
gaagcataaattaaatatgacaaaagaacaggtttacgattcaataaaagaacatgttacctatgcaagaaaatttactgatgatgttgaatggtcatgcgaagatggaacaagaacagatatggattatatgtgtaagacagttgagcttgcaattaaatgtggagccaaaacaataaatattcctgacactgttggatatacagttccatcggaatttacaaatataattcaaacattatttaataaagtaccaaatattgataaagcaattttatccacacattgtcataatgatttaggtttagcggtagcaaattctttagcaggtgtacaagcaggagcacgacaaatagaatgtacaataaatggaattggagaaagagcaggtaatgccgctttagaggaagtggtaatggcaatgaagacaagacctgatttaatgccatatgaaactgggattaatacaactctattaagcaaagcatcaaaaattgtttctaacgcaacaggttttccagttcagtttaataaagcaatagttggcaaaaatgcttttgcacatgaagcaggaattcatcaagatggaatgcttaaaaatagaaatacttatgaaataatgactcccgaaagcgtaggagtaaaacaaacttcgcttgtgatgggcaaacattctggcagacatgcatttaaagacaaattagtaagtcttggatatgcagatttaactgacgatgtaattgaaaatgcttttggaaaatttaagattttagctgataagaaaaaacatgtatatgatgaagatatagttgcattagttgatgatagtttaattaaagacgataatgtaattgttttaaaatctttaaaagtttttgctggaa

SEQ ID NO: 237060 - DNA, 901 bp, Unknown
  Bacterial polypeptide expressing nucleotide sequence isolated from the Sargasso Sea
cacacttttatatctacaagccctcttcacatgaagcataaattaaataaatcaccggaagaagttttagagtctattaaagagagtgttacttacgctagaaaatttaccgatgatgttgagtggtcttgcgaagacggaacacgaactgatatggattatatgtgcaagacagttgaactcgcaataaaatcaggcgcaaaaacaattaatattccagacactgttggctacactgttccttcagagtttaaaaagattattgaaactttgataaataaagttccaaatattgatagagcaattctttctacacattgtcataatgatttaggactagcagtagctaattcattagcaggagtaatggctggtgcaagacaaattgaatgtacaattaatggtataggagaaagagctggtaatgcagcattggaagaagtcgtaatggctatgagaacaagacacgacttaatgccttacactacaaatattaatacaaaacttttaagtaaagcatctaaagtggtttcaaatgctacaggttttccagtacaatttaacaaagcaatcgttggaaaaaatgcttttgcacacgagtcaggcatccaccaagatggaatgttaaaaaatagaaacacttatgaaattatgacacccgaaagtgttggagtgaaaaaaacttcattggtaatgggtaagcactcaggccgtcacgcttttagagataaattatcagatatgggttatgtagatgtaactgatgatataatcaatacagcttttggaaaattcaaaatattagctgacaaaaaaaaacatatatacgatgaagatattgcggcaatagtagatgatagtttagtaactgaggataatgttatcaaattaaagtcttgaa

SEQ ID NO: 237061 - DNA, 754 bp, Unknown
  Bacterial polypeptide expressing nucleotide sequence isolated from the Sargasso Sea
ctattaaaaaatagagttccaaatatcgataaagctattttatctgttcactgtcataatgatttgggacttgctgttgctaattctttgtcaggtattaaagcaggagctcgtcaagtcgaatgtacaattaatggccttggagagagagcagggaatgctgctcttgaagagatcgtcatggcacttagaactagaaaagatgttttacctttttcaaataatattaaaactaattatattacaaaagcttcccgtttggtctctcaaataaccggttttgcagttcaaccaaataaagcaatagttggagctaatgcttttgctcatgaagcaggaattcatcaggatggtgtgttaaaaaatgcttcaacttatgaaataatgactcttgagtcagtaggattaattcaatctaatttagttcttggtaaacattcaggtagacatgcttttaaacagaaattaatagatatgggctatgaattaggtgctaactctttagaggacgcttttaaaagatttaaagatctagcagataagaaaaaagatgtttttgatgaagatataattgcactagtagatgatgaaagaagttcaaatgatcgaataaagtttgtttcgttaaaagtagttgctgggtcagttgaacctcaaacagcagaattagagcttgaaatagatggtaaaattataaaacaactatctagcggggacggtccagttgacgctacatttaattgtataaacaaaa

SEQ ID NO: 237062 - DNA, 728 bp, Unknown
  Bacterial polypeptide expressing nucleotide sequence isolated from the Sargasso Sea
aatgactgataaaaatagagtttatattttcgatacaacaatgcgagatggtgagcaatcaccaggtgcatcaatgagtttggaagaaaaaattcaaattgcaagagtgtttgatgaacttggtattgatattattgaagctggatttccaatagcatcaccaggagactttgaagcagtaacagaagtgagtaaaattttaaaaaattctattccagcaggtttatctagacattcaaagaaagatatagacagatgttacgaagcattaaaacatgcgccaagatttagaattcatacttttatttcaacaagtccgttacacatgaagcataaacttaataaatcttcagaagaggtatatgaatctattaaagagcacgtgacatatgcaagaaaatttactgatgatgtagaatggtcttgtgaagatggaacaagaacagacatggattatatgtgtaagactgttgaacttgcaattaaatgtggagcaaaaacaataaatatacctgatactgtgggttatactgtaccatcagagtttacaaaaattatacaaacattaatgaacaaagtaccaaatattgataaagcaatattatctacacattgtcataacgatctaggcttagcagttgctaattctttagctggtgttcaagcaggtgcaagacaaatagaatgtactattaatggtattggtgaaagagctggtaatgcagcac

SEQ ID NO: 237063 - DNA, 178 bp, Unknown
  Bacterial polypeptide expressing nucleotide sequence isolated from the Sargasso Sea
aatgagcaaagatcgcctgattatttttgataccaccctgcgtgacggtgagcagagccccggtgccaccatggaccaggatgaaaaactgcgcatcgcccgggcgctggaacgcatgcgggtagacgtcatcgaagccggcttcgccatcgccagccaagggggatttccgctcggt

SEQ ID NO: 237064 - DNA, 796 bp, Unknown
  Bacterial polypeptide expressing nucleotide sequence isolated from the Sargasso Sea
gtgcccaacgccgataaggcggtgttctccgtgcattgccacaatgacctgggcctggctgtggccaactctctggcggctgtggtggcgggtgcccgtcaggttgagtgcaccatcaacggtctcggtgagcgcgccggtaatgccgcgctggaagagatcgttatggcgatcaagacccgtgaagatctgctcggcgtgcacacgcgcatcgataccccacacatcctcagcacttcgcgcatggtctcgggcatcaccggtttcccggtgcagccgaacaaagccattgtcggcgccaatgcctttgcccacgagtccggtattcaccaggacggcgtgctcaagcaccgcgaaacctacgaaatcatgtctgcccagtcagtgggctggcacaccaataagttgtcgctaggcaagttgtccgggcgcaacgccttccgttcgcgtctggacgagctggggatcgtgctggccggtgaggctgagctgaatgcagcctttgctcgcttcaaggatttggctgacaaaaaacacgagattttcgatgaagacctgcaggccctggtgtccgatacgttggccgaagaggcaccggagcacttcaagctgattaccctggacgtggcgagcaaaacgggcgaagtaccgcaggcgcaggttgtggtcagcgtggaaggtgccgagcacagtggcaatgcccaggggtcggggccggtggatgccaccttcaaggccatcgaatcgattgcccgctccgaggccaatctgcagttgtattcggtaaacgccatca

SEQ ID NO: 237065 - DNA, 997 bp, Unknown
  Bacterial polypeptide expressing nucleotide sequence isolated from the Sargasso Sea
gctggacgctctgaatttgacttcctatgccaagtgattgaggcagtaattaatgctggcgcaacaacgatcaatatcccagatacagtcggatataacttaccgcaatactttggagagttaataggaaagctaatagagaatgtaccaaattctgacaaagctacattttcagtacactgtcataatgatctaggactcgctgtaggtaactcattggcagctgttataaatggcgcaaggcaagttgaatgtacaataaatgggctaggggagcgcgctggcaatgcggctttggaagaaatagtaatgtcagtaagaacacgaagggatgtatttgcatgtgataccaatatcgatacaagtcagattgttaattgttcaagacttgtctcaacaataacgggttttcctgttcaaccaaataaggctatagtcggcgctaatgcatttgcacatgaatcgggtattcatcaagatggagttttaaaaagtcgtgaaacttatgaaatcatgcgtgccgaggatgttggttggaataccaatagaatggttttaggtaaacactccgggcgtaatgcttttcgtactcgtttagaggaattaggaattacttttacggaagatgaagaattgaacgcagttttttctcaatttaaagaattagctgacaagaaacatgaagtttatgatgatgacttacaggccttggtaagcgatacaatccaaggaagtgctgacgaaagaataaagcttgtgtcactcaaagtggggacagagactggcgtaaagcctaaagcactcgttacattatcgattgacgggcaagaaaaatgtgccaatgctgaaggcggcggccctgttgatgcaacatataaggctattgaaaacatggttgagagtggctgtaatctgccattatattcggttaatacattactgatggcacagatcacaaggcgaaagtacagttcgtatttgacagggcggtcgaata

SEQ ID NO: 237066 - DNA, 862 bp, Unknown
  Bacterial polypeptide expressing nucleotide sequence isolated from the Sargasso Sea
tttgatgagttaggaattgacgtcatcgaagcaggtttccctattgcatctccaggggattttgaggcagttactgagattagtaaagttttaaagaagtctattccagctggactttcaagagctacgaaaaaagatatagatgcctgtaaagactctttaaaacacgcaaaaagatttagaattcatacttttatatctactagtcctttacatatgaagcacaaactcaataaatctccagaagaagttttgggattgattaaagagagcgtaacttatgcgagcaagtttacagacgatgttgaatggtcttgcgaagatggtactagaacagatcttgattttatgtgtaaatcagttgaacttgcgattaaatgtggagctaaaactataaatataccggatacagtaggttattctgttccttcagaatttaaaaaaattattgaaactttaataaacaaagttcctaatattgataaagctattctgtcaacgcattgtcataatgatttaggtttagctgttgctaactctttagctggtgtaatggctggtgcaagacaaattgagtgcacaataaacggtataggtgaaagagctgggaatgctgctttagaagaagttgtaatggccatgagaactagaaatgatttaatgccgtatacaactggaataaatactaaacttttaagcaaagcatcaaaaatagtttctaatgcaacaggttttcctgtgcaatttaataaagcagtggtaggaaaaaacgcttttgctcacgagtcaggaatacatcaagatggaatgttaaaaaatagaaacacttatgaaataatgaccccagaaagtgtggagtaaa

SEQ ID NO: 237067 - DNA, 368 bp, Unknown
  Bacterial polypeptide expressing nucleotide sequence isolated from the Sargasso Sea
tatgagcgacaaagaaaaagtttatatctttgatacaactatgagagacggtgagcagtcacctggcgcctcaatgagtgttgaggaaaaaattcaaatctctcgagtgtttgacgagatgggaattgatataattgaggcaggatttccaatttcatctcctggtgattttgaagcagtttcggaaataagcaaaagtgttaagaattctataccttgcggtttatcaagagcattaaaaaaagatatagatgcttgtcatgagtcacttaagtttgcaaaaagatttagaattcatacttttatttctacaagtccagttcacatgaagcataaacttgatatgaccaatgaccaagttttagatg

SEQ ID NO: 237068 - DNA, 332 bp, Unknown
  Bacterial polypeptide expressing nucleotide sequence isolated from the Sargasso Sea
aatgacccaggacgacaaaacccaggaccgtgttgtcatcttcgacaccaccctgcgcgacggcgaacaatcgcccggcgccaccatgacccatgccgaaaagctggaaatcgcgggcctgctggacgatatgggcgtcgacatcatcgaggcgggctttcccatcgcgtccgagggtgacttcaacgcggtgagcgagatcgccaaaacggcccaaaacgccgtgatctgcgggctggcccgcgcccagcttggcgatatcgaccgctgctgggaggcggtgaaacacgcggcaaggccccgcatccacaccttcatcggcacatccccac

SEQ ID NO: 237069 - DNA, 308 bp, Unknown
  Bacterial polypeptide expressing nucleotide sequence isolated from the Sargasso Sea
cattattttctataccaccttacgcgatggtgaacaggcgttacaggcaagcctgagtgtgaaagaaaaactgcagattgcgctggcccttgagcgtatgggcgttgacgtgatggaagtgggtttccccgtttcttcaccgggcgactttgagtcagttcagactatcgctcgtcaggttaaaaacagccgcgtttgtgccttagctcgctgcatagaaaaagatatcgacgttgccgcagaatctctgaaagtcgctgaggctttccgtattcatacgtttatcgccacctcaccgatgcacatcg

SEQ ID NO: 237070 - DNA, 724 bp, Unknown
  Bacterial polypeptide expressing nucleotide sequence isolated from the Sargasso Sea
tatgacagaaaaaaatagaattataatttttgatactacgatgcgtgatggggaacagtctccaggtgcatcaatgagtttggaagagaaattacaaatctccagagtctttgatgaattaggagtcgatgttattgaagcaggttttccaatagcatcacccggtgattttgaagctgtcacagaaattagtaaaactttaaaaagatcaattcctgcaggtcttgccagagctacaaaaaaagatattgatgcttgtcatcaagctttaaagcacgcaaaaaattttagaattcatacttttatttccacaagtcctcttcatatgaaacataagttaaataaatcgcctgaagaggttttagagtcaattaaagaaagtgtaatttatgctagaaagtttactgacgatgttgagtggtcgtgtgaagacggaacacgaacagatatggactatatgtgtaagacagtggaacttgctatcaaatgtggcgccaaaactattaatattccagatacagttggctacacagtcccatctgagtttaaaaaaattatagagacattaattaataaagttccaaatattgataaagcaattctttctactcattgtcataacgacttgggattagcagtagctaattctttagcgggggttatggctggagcaaaacaaattgagtgtacaattaatggaattggtgaaagagctggtaatgct

SEQ ID NO: 237071 - DNA, 938 bp, Unknown
  Bacterial polypeptide expressing nucleotide sequence isolated from the Sargasso Sea
atttctagagtttttgatgaattaggaatagatgttatagaggcaggatttccaattgcttcgccaggtgattttgaagcagtaactgctataagtaaaatattaaaaaaatcagttccagcaggattagccagacacacaaaaaaagatattgacgcatgttacgaagctttaaaatctgcaaaaaaatttagaatacatacttttatttctacgagtgcattgcatatgaaacacaagttaaacaaaactccagaacaagttatagattctattaaggagcatgtaacttatgcaagaaaatttactgatgatgttgaatggtcatgtgaagatggcacaagaactgatatagactttatgtgtaagacagttgagttagcaataaagtgtggagctagaacaattaatattccagatacagttggttatactgttccctcagaatttaaaaaaattatagagactttaaaaaataaagttccaaatattgataaagcaatattatctgttcattgtcataatgatttaggtcttgcagttgcaaattctttagctggagtttcagcaggagcaagacaagttgagtgcacaataaacggaattggtgaaagagctggaaatgcagcattagaagaaatagttatggctatgaaaactagaagtgatttaatgccatttaaaactggtattaataccaaacttataagcaaggcatcaaaaactgtttcaaatgcaactggttttccagttcaatttaacaaagcaattgtaggaaaaaatgcttttgcacatgagtcaggtattcaccaagatggtatgttaaaaaatagaaatacatatgaaatcatgacaccagagagcgttggtgttaaaaaaacctcttttggtatggggaaacattctggaagacatgcatttaaagataagttaacgga

SEQ ID NO: 237072 - DNA, 868 bp, Unknown
  Bacterial polypeptide expressing nucleotide sequence isolated from the Sargasso Sea
tttcatttctacgagccctctacatatgaagcataaattaaataagtctccagaggaagtcttagaagctattaaagaaagtgtaacctatgccagaaaatttacagatgatgtagagtggtcatgtgaggatggaacacgaacagatatggattatatgtgcaagacaatagagcttgcaattaagtgtggagccaaaactattaatatacccgatactgtaggttacacagttccctcagaatttaaaaaaattattgaaacattaataagcagagtgcctaatattgataaagcaatcttatcaactcattgtcacaacgatttaggtttagcagtagctaactcattagcaggagttatggctggagcaagacaaattgagtgtactataaacggtattggagagagagccggtaacgcagctttagaggaagttgtaatggctatgagaacaagacacgatttaatgccatacactacaaatataaacactaaactcttgagtaaagcttctaaagtagtttcaaatgctactggttttccagttcaatttaataaagctgttgtcggcaaaaacgcatttgcgcatgagtcaggcatccaccaagatggaatgttaaaaaatagaaacacatatgaaataatgacacccgaaagcgtgggagttaaaaaaacctcattagtaatgggaaaacattctggaagacatgcttttagagataaattgtcagatatgggatatgtagatgttactgatgacatcataaatactgcttttgggaaatttaaaattttagcagataagaaaaaacatatttacgatgaagacattgctgctcttgtagatgatagtttagttacagat

SEQ ID NO: 237073 - DNA, 829 bp, Unknown
  Bacterial polypeptide expressing nucleotide sequence isolated from the Sargasso Sea
gaaattcatctcaaacacaaactaaatatggcaaaagatgaggttctcaaagctgcttacgaaggtgtaaaaatggcgaagtcattctgtgaaaatgttgagttttctcctgaggatgcttccagaactgatcatggttttctaactgaagttgtgaatgctgcaattgaagcaggtgcgacaacaatcaatgttccagatactgtgggatacactatcccctatgagtttggtgaactatttaaacacttgatttcaaactgcaatgatgctgagaatgtgatcttcagtgtccattgtcacgatgaccttggcctttctgtggcgaatagcttggctgcagttgaatctggagcaagacaaattgagtgcacaattaacggcattggagagcgagctggaaatacctcacttgaggaagtatgcatggcaatcaggacaagagaagagtatttcgattttaaaacatcgatcgattcaacaaagctatatcccaccagtcgattggtctcttcgattacgggtatgcatgtcccaagaaataaagccatcgttggcgacaatgcctttgcacatgaagcaggcattcatcaacacggcatgcttagagattcatctacatatgaaatcatgaagcctcaggatgttggtattgcaagatcaaacctcgtgcttggaaaacacagtggaagacatgcttttttagataggattaatgagctcggatttgcactcgagaaagatgagattgatccggcttttcaggaattcaagaaattggctgatagaaaaaaggaaatattcgatacagacatagaagcaatcgttc

SEQ ID NO: 237074 - DNA, 807 bp, Unknown
  Bacterial polypeptide expressing nucleotide sequence isolated from the Sargasso Sea
ttttatttctacaagtgaattgcatatgcgacataagttgcaaatggagcccacagaagtcaaaaaaatggcaattgcagcggtagaaagggcaaaaaaagctactgataatgttgaattcagccctgaagatgccacaagaagtgatccaaactttttaattgaaatattatctgaaaccgtacgagctggagcgactatattaaatattccagacacggttggatacaccactccagacgaaatgtttgaattaataaaacttcttaaaaatgaggtatataattcagataaagtaacgttttctgtacattgccataacgatttagggcttggagtagcaaactcattagcggcaattagggctggtgcaagacaaattgagtgtacaatcaacggtattggtgaaagagctggtaatgcctcgcttgaagaattagttatggctcttaaaacccgacaggaatactttggatttgactttgatattgatactgaacaactttttccatccagcaaattactttcacagataacaggtgtggatgtacaaccgaacaaagctatagttggtgcaaatgcatttgcgcatgaagcaggaattcaccagcatggcgttcttaaaaacgcattaacatatgagataatgactcctcagtctgtggggatcaaatctagtagtttggttttgggtaagcattctgggcgttctgctttaggtgaaagaattaaagaaatgggatttaaactaaatgacattgatttgaaccacatatttgtagaatttaagaaactagcagacttgaa

SEQ ID NO: 237075 - DNA, 793 bp, Unknown
  Bacterial polypeptide expressing nucleotide sequence isolated from the Sargasso Sea
tcgcccagcagctttccccgcctgggtgtcgacatcattgaggctggttttccctttgccagcccaggcgatttcgaagccgtgcagcgcatcgctgcctcggttggcacatcggatggtccagtgatctgcggcctggcgcgcgccaccaaaggcgatatcaaggcctgcgctgaggccgtggctccggccgcccatcgcaggattcacacctttctggccaccagtgacatccacctcgagcacaagttgcgtaagagccgcgcagaggtgcttcagatcgtgccggagatggtggcctatgcccgctccctggtggaggacgtcgagttttcctgcgaggacgccggtcgcagcgatccagagttcatgcatcaggtgatcgaggcagccattgctgcaggcgccaccactatcaacatccctgacactgttggttacaccacccctggggagttcggtgccttgatcgctgacatcaatagcgaggtgcccaacatcgatcgggcggtgatttcagtccatggtcacaacgacctgggtctggcggtggcaaatttcctcgaggcagttaaaagcggtgctcgccagttggagtgcaccatcaatggcattggcgagcgggcgggcaacgcctcgctcgaggagttggtgatggcgctgcatgtgcgccgcagctatttcaatccctttttgggccgcggggaggggagcagcgagcctctcaccgcgatccgaaccgaggagatctacaaatcctcgcgcctggtctcaaacctcacgggcatggcag

SEQ ID NO: 237076 - DNA, 874 bp, Unknown
  Bacterial polypeptide expressing nucleotide sequence isolated from the Sargasso Sea
gtatgcagcgctagaagaagtagtgatggcaatgaaaacaagaaatgatttaatgccttatagtacaggaattaataccactcttcttagcaaagcttcaaaaatagtttctaatgcaacaggatttcctgttcaatttaataaagctatagttggaaaaaatgcttttgctcatgaggctggcattcaccaagatggtatgcttaaaaatagaaatacttacgaaatcatgacaccagaaagtgttggagttaaacaaacatctttagttatgggtaaacattcaggcagacatgcatttaaagataaattaacaagcttaggatatgttgatgtaactgatgatgtaatagaaaatgcttttggtaaatttaaagttttagcagataaaaagaaacatgtttacgatgaagatattttagctcttgttgatgatagcctaattactgataataaaattaatgcattaagtttaaaatctcttaaagtttttgcaggaacgggagaacctcaaaaagcagatatgacattagatgtatatggagatgttaaacaagcaacagaaactggcgatggaccagttgatgcaatattcaaatgtataaagaagctttatcctcatgatgtaaacttacagctttaccaagttcatgctgttactgaaggaacagatgcgcaggcaacagtaagtgttcgaattgaggaaaatgggaaaacaactgttggtcaagcagcagatactgatacattggttgcttcagcaaatgcatatatcaatgcattaaataaaatgattattaaaaggagcaaaactgcaccagagagtatagttgtagaaaagaatactaaaactaacaaaatgagaggaatataa

SEQ ID NO: 237077 - DNA, 892 bp, Unknown
  Bacterial polypeptide expressing nucleotide sequence isolated from the Sargasso Sea
agttcacaaaattgttcaaacattgttaaacaaagttcctaatattgataaagcaattttatccacgcactgtcataatgacttaggcttagcagttgcaaattctttggcaggagttcaggctggtgctagacaaattgaatgtacgataaatggtttaggggaaagagctggaaatgcagcgctagaagaagttgtaatggcaatcaaaacaagaccggatttaatgccttatgaaacaggaattaatacaacacttttaaataaagcttctaaaattgtgtcaaatgcaacaggttttcccgtgcaatacaataaagcaattgttggaaaaaatgcttttgctcatgaagcgggcatccatcaagatggtatgcttaaaaatagacaaacatatgaaattatgacacctgaaagtgttggtgttaaacaaacctcattggtaatgggtaaacattctggcaaacacgcatttaaggacaaattaaatagtttagggtacccagatttaactgatgacgttgttggtaatgcttttgctaagtttaaggtattagcagataagaaaaaacatgtttatgatgaagatataattgcacttatagatgatagtttaattatcgataataaagtaaatgcaattagtcttaaatctcttaaagtttttgctggaacaggtgaacctcaaagagcagaaatgacattagatgtatatggtgatgttaaacaagcatcagaaactggagatggtccagttgatgcaatttttaaatgtattaaaacactatttccgcatgatgttaatttgcaattgtatcaagtgcatgctgtaactgagggaactgatgctcaagctacagtaagtgttaaaattgaggaaaaaggaaaaact

SEQ ID NO: 237078 - DNA, 307 bp, Unknown
  Bacterial polypeptide expressing nucleotide sequence isolated from the Sargasso Sea
atgagtgataaagataaagtttttatatttgatacaacgatgcgtgatggagaacaatctcctggcgcttcaatgagtgttgaagagaaaattcaaatttcgagagtatttgatgagatgggaatagatataattgaggcaggcttccctatttcatcaccaggagattttgaagcagtatctgaaattagtaaagaaattaaaaactcgataccatgtggtttagctagagctataagaaaagatattgatgcatgtcatgaatctttaagacactcgaatagatttagaatccatacttttattc

SEQ ID NO: 237079 - DNA, 774 bp, Unknown
  Bacterial polypeptide expressing nucleotide sequence isolated from the Sargasso Sea
tatggaaaagataaggttcttggatactactctacgtgatggagagcagtcccccggatgttcaatgtcagcaagtgaaaagctgacccttgccaagcagctggaacgtcttggtgttaatacaattgaagcaggatttgcagcttcatcaccgggagactttgatagtgttcgggatattggacagcaaattcaaaactcaactattgtctcattgtgtcgtgcttcaaaaaacgacattgaagctgcagtagatgctttaagtgatgccaaaaactggggcatacacactttcatttccaccagtgacctgcacatgaaacataaattgcagatgaaacccaaagaggtaaaaaatatggctgtggcagcagttgaaagagcaaaaaaagccactgacaatgtagaattcagtcctgaagacgcaacacgcagtaatccgcaatttctagtggaagtactgtcagaggcggtacgtgctggcgcaaccattttaaacattcctgacactgttggttacacaactccggatgaaatgtttgaactaatcacaaggcttcgaaatgaagtttacaatgccgataaggtagttttttctgtacactgccataatgatttgggacttggagttgcaaactcacttgctgcagttagagctggtgcaagacaaattgaatgcacaatcaatggaataggggaacgtgctggtaatgcttcgcttgaggaaatagtgatggcgctaaaaacacgtcaggagtattttggatttgaaag

SEQ ID NO: 237080 - DNA, 742 bp, Unknown
  Bacterial polypeptide expressing nucleotide sequence isolated from the Sargasso Sea
tatggcaaaagatgaggttctcaaagctgcttacgaaggtgtaaaaatggcgaagtcattctgtgaaaatgttgagttttctcctgaggatgcttccagaactgatcatggttttctaactgaagttgtgaatgctgcaattgaagcaggtgcgacaacaatcaatgttccagatactgtgggatacactatcccctatgagtttggtgaactatttaaacacttgatttcaaactgcaatgatgctgagaatgtgatcttcagtgtccattgtcacgatgaccttggcctttctgtggcgaatagcttggctgcagttgaatctggagcaagacaaattgagtgcacaattaacggcattggagagcgagctggaaatacctcacttgaggaagtatgcatggcaatcaggacaagagaagagtatttcgattttaaaacatcgatcgattcaacaaagctatatcccaccagtcgattggtctcttcgattacgggtatgcatgtcccaagaaataaagccatcgttggcgacaatgcctttgcacatgaagcaggcattcatcaacatggcatgcttagagattcatctacatatgaaatcatgaagcctcaggatgttggtattgcaagatcaaacctcgtgcttggaaaacacagtggaagacatgcttttttagataggattaatgagctcggatttgcactcgagaaagatgagattgatccggcttttcaggaa

SEQ ID NO: 237081 - DNA, 880 bp, Unknown
  Bacterial polypeptide expressing nucleotide sequence isolated from the Sargasso Sea
tttgataccactctcagagacggggagcaatctcctggtgctagtttaaatcttgaagagaaactagcaattgctcaacaattagcgagattaggagtagatgttattgaagcgggatttccattcgcgagtccaggagattttaaagcagtaaataagattgcaaacgtggttggaggagaaaatggtccaataatctgcggactagctagagcttctaaaaatgatattaaagcttgttttgaagcagtgagtcctgccccaaaaaaaaggatacatacttttattgcaacaagtgatattcaccttaaacataaattaagaaaatcaagaaaagacgttctttccatcgttccagagatggttaattatgctaaatcactagtcgatgacgttgaattctcttgcgaagacgcctcaagaagtgaacctgaattcctctatgaagtaattcagcttgcaatttctgcaggggctacaacaattaatattcctgatactgtcggattcacaactcctagtgaatttggaaaacttatttttgatatcaataaaaacgtaccaaatattgatgaagctattatttcagttcatggtcataatgatctaggattagcagttgctaattttctcgaagcaataaaaaacggagcaaggcagttagaatgcacaattaatggaataggtgaaagagcaggcaatgcttcattagaagaattagttatgtctttacatgtaagaaaaagtttttttaataattatttaaaaaggaatcctgattcacctacacctcttacagcaataagaactgaagaaataacaaagacttcgagactagtttcaaacttaactggcatgaatgttcagcctaataaggcaa

SEQ ID NO: 237082 - DNA, 950 bp, Unknown
  Bacterial polypeptide expressing nucleotide sequence isolated from the Sargasso Sea
catgaagcataaacttgatatgactaacgaccaagttttagatgcaattaaagatagtgtaacttacgcaagaaagtttactaatgatgtagagtggtcttgtgaagatggaactagaacagatttagattttatgtgtaaaactatcgagctagcaattaaatgtggtgcgactacaattaatatacctgataccgttgggtattcaattcctgaggaatttgcgcgaacaataacacatataaaaaataacgtaccaaacatagataaagcaattatatcagctcactgtcataatgatttaggtttagctgttgcaaatgctttagcaggtttatctgcaggtgttagacaaattgaatgtactatcaatggaattggagaaagagcaggtaatgctgctttggaagaaattgtaatggctatcaaaacaagaaatgatttaatgccttatgaaacaggaattaaaacagaacttattagcaaagcctcaaaaatagtttcaaacgcaactggatttccagttcaatttaataaagcaatagttggtaaaaatgcttttgcacatgagtcaggaattcatcaagatggaatgttaaaaaatagagaaacatatgaaattatgacaccagaaagtgttggtgttaaaaaaacatctttagtaatgggaaagcattctggcaggcatgcatttaaagataagttaagtgatttaggatattcagacttaacagatgatgttgtacaagcagcatttggaaaatttaaagttttagctgataagaaaaagcatgtttatgatgaagatatcattgctttagtagatgatagcttaataattgataataaaataaatgcgatcaatcttaaatctttgaaagtttttgcaggaacaggggaaccccaaaaagccgagatgacactggatgtctttggtgaaataaaaaaaa

SEQ ID NO: 237083 - DNA, 469 bp, Unknown
  Bacterial polypeptide expressing nucleotide sequence isolated from the Sargasso Sea
gatgaataaggaaaataactacataaagatatttgacactacattaagagatggagagcagtctcctggagcttcaatgaacattgaagaaaaattaaaaattgctgaagctttagaagatttgaaagttgatattattgaagcgggattccctgccgcatcaaaaggagactatgaagcagtttctgaaatatcaaaaaagattaaaaattcatcaatatgtgctttgagtagagcttcgaaaaatgacattcaaacagctgcggatgctctcaaaaacgcagtagctccaagaatacatacatttatctcaacgagtgaacttcacatgaaacacaagttacaattgaattctgatgaggtttaccagaaggtaattgatagtgtatcttttgcacggaatctatgtgatgacgttgagtggtcttgtgaagatggaactaggacagatttagactttatgtgtaaa

SEQ ID NO: 237084 - DNA, 396 bp, Unknown
  Bacterial polypeptide expressing nucleotide sequence isolated from the Sargasso Sea
aatgtccaaagatcctggaagaatattgatctttgatacaactcttcgtgatggagagcagtctcctggcgccagtttaaatcttgaagagaagcttgctatcgctcatcaattagcaagattaggtgtagatgttattgaggctggattccctttcgcaagtcctggagactttaaagcagttaataaaattgccaatgcagtagggaaagaaaatggtcctacaatatgcggtttagctagagcatccaaaggagatataaaagcatgctacgaagcagtaagtccagctccaaaaaaaagaatacatacttttattgctacaagtgatattcaccttaaacataaacttaaaaaatcaagaaaagatgttcttcatattgttcccgagatggt

SEQ ID NO: 237085 - DNA, 915 bp, Unknown
  Bacterial polypeptide expressing nucleotide sequence isolated from the Sargasso Sea
ccaattgcatcacctggagattttgatgcagtatcagcaattagtaaagttttaaaaaaatcaattccatgtggtttagctagacattctaaaaaagatatagacagatgttatgaggcattaaaacatgctccaagatttagaattcatacttttatttctactagccctctccacatgaagcacaaattaaataaaacaccagagcaagtttatgagtcaattaaagaacatgttacttatgcaagaaatttaacagatgatgttgagtggtcttgtgaagatgggacaagaactgatatggattatatgtgcaaaacagttgagctagccatcaattctggagctagaacaataaatattcctgacactgtgggatataccgttccatctgaatttactaaaatcatagaaactttactaaataaagttccaaatattgataaagcaattttatctacgcattgtcataacgatttgggtttagcagtagctaactctctagctggggtacaggctggagcaagacaaatagaatgtacaattaatggaataggcgaaagagctggtaatgcagccttagaggaagtagtgatggcaattagaactagaaatgatttaatgccatatgaaacaggtattaatacaacattgctaagcaaagcatcaaaattggtatctaatgtgactggttttccagttcaattcaataaggcagttgtgggaaaaaatgcttttgctcacgagtcaggaatacatcaagatggaatgttaaaaaatagaaatacatacgaaataatgacacctgaaagtgtaggggtaaaacaaacatctttggtcatgggaaaacactcaggaagacatgcatttaaagataaattaattagtcttggttatgcagatttgacagatgac

SEQ ID NO: 237086 - DNA, 820 bp, Unknown
  Bacterial polypeptide expressing nucleotide sequence isolated from the Sargasso Sea
atggacatttgaatattctccagaaagttttacaggaacagaactagaatatgcaagagaagtttgtgataacgttgtagaaattctaaagcctgtctcaaaaaacaaaattattataaatcttcctgctactgtagaaatgtcaactccaaatatttatggcgatcaaattgaatggatgagcaaaaatttaaaaaatagaaatgacatatgcctgagcctgcatcctcacaatgacagaggcacagctgttgcagcttctgagtttggaatcatggctggtgctgatagagttgaaggaacactatttggaaatggagagagaactggtaatgtagatatagtgacgattgctttaaatatgctcactcagggcgttgaaccaaatttagatttttctaatatcaattctgttatgagagaagtggagtactgcaatcaactgccagttcatccaagacatccttatgcaggagatctcgtttttacagccttttcaggctctcaccaagatgcaattaaaaaaggttttcaagctattaaaaaatctaatgatccaaagtgggaagtgccctatcttccaatcgatccagctgatctaggtagaaattacgaagcagtagtaagaattaattctcagtctggtaaaggtggggttgcatttttattagaaaaagatcatggggtctctttgccaagaagacttcagataagcctaagtcaaagaattcaaaagttagcagatgatactggtaaagagattagtagctcacaaatatgggatattttgaaaaaaaataccttcaacctgttaataatt

SEQ ID NO: 237087 - DNA, 726 bp, Unknown
  Bacterial polypeptide expressing nucleotide sequence isolated from the Sargasso Sea
caatcgttggaaaaaatgcatttgcacatgaatctggaattcatcaagatggtatgcttaaaaatagacagacatatgaaattatgactccagaaagtgtaggagttaaacaaacatctttagtaatgggcaaacattctggaagacatgcatttaaagataaattgacgagcctaggttatgtagatgttaccgatgatattgttgaaaatgcatttggaaagtttaaaattttagctgataagaaaaaacatatatacgatgaggatattattgctttagttgacgatagtttaattattgataataaagttaacgcaattaatttaaaatctctaaaagtatttgcaggaacaggagagcctcaaaaagctgatatgaccctcgacgtatttggagaggttaaacaatcaacagaaacaggagatggcccagttgatgcaatatttaaatgtattaaaactttatatccccataatattaatttacagctatatcaggtccatgctgttacagaaggcacagacgctcaggcaactgtaagtgtacgtattgaagaaaatggaaaaacaacagttggtcaagcagcagacactgatacattagttgcgtcagcaaacgcatacataaatgcattaaataaaatgataattaaaagagataaaactgctccagataacccccaggttactgctgagtatgataataaagtgagaggaatataag

SEQ ID NO: 237088 - DNA, 913 bp, Unknown
  Bacterial polypeptide expressing nucleotide sequence isolated from the Sargasso Sea
acaactcctagtgaatttggcaaattaattgccgatataaataaaaatgttccaaatattgatgaggcagttatctcggttcatggacataatgatttgggtttagcagttgccaactttctagagtcagtaaaaaatggagcgagacaacttgaatgtacgataaatggaattggtgaaagagccgggaatgcctctctagaagaattagtaatggcattgcatgttaggaaaagtttttttaataatttttttaaaagaaatccagattcaccaactcctcttacagctataagaacagaagaaataacaaaaacctctaggcttgtttccaacttaactggaatgatcgttcaacctaataaagcaattgtgggagctaacgcttttgcacatgagtcaggcattcatcaggatggggtcttaaaaaatagactaacttacgaaattatcgatgctaaaactgttggtttgagtgacaacaaaatatctttagggaaacttagtggaagaagtgcagtaagagcaagattagaagagatgggatatgacttgagcagggaagatttaaatgatgcttttgctcgtttcaaggatttagctgacaggaaaagagaaattactgatagagacttagaagcaattgttagtgaacaagtacagcttccagaagctaaatttcaattaagtcttgtgcaagtaagttgcggtaatgcttctaaacctacagctactattactcttctaaacacggaagataatactgagcaaactgctgtatcaataggaactggacctgttgatgctgtatgcgaggctttaaataaattagctaaagttcctaatgaattaattgaattttctgtaaagtccgtaacagaaggaattgatgctttgggtgaagtaacaataa

SEQ ID NO: 237089 - DNA, 627 bp, Unknown
  Bacterial polypeptide expressing nucleotide sequence isolated from the Sargasso Sea
catgaaagaatctagagaaataattatatttgacacaacactccgtgatggtgagcaagcacctggatgcagtatgactatgggtgaaaaattaaagattgctcacgctttaaaagaattaaatgttgatgtgattgaagcaggttttgctgccgcatctcctggtgattttgatgctgtaaatgcaattgcatccgagattgatggtccaactatatgttcgcttgcaagatgcaatgagagcgatatagaaaaggcttacgaagccctcaaggtaaataaaaatagaagagttcatgtctttgtagctacgagtgaaattcatctcaaacacaaactaaatatggcaaaagatgaggttctcaaagctgcttacgaaggtgtaaaaatggcgaagtcattctgtgaaaatgttgagttttctcctgaggatgcttccagaactgatcatggttttctaaccgaagttgtgaatgctgcaattgaagcaggtgcgacaacaatcaatgttccagatacggtaggatacacaatcccctatgagtttggtgaactatttaagcacttgatttcaaactgcaatgatactgagaatgtgatcttcagtgtccattgtcacgatgacct

SEQ ID NO: 237090 - DNA, 724 bp, Unknown
  Bacterial polypeptide expressing nucleotide sequence isolated from the Sargasso Sea
aatgtccaaagatcctggcagaatattgatctttgatacaacactgagagatggtgagcagtctcctggcgcgagtttaaatcttgaggaaaagcttgcaattgctcatcaacttgcaagattaggagtagatgttatcgaagcaggatttccatttgctagtcctggagattttaaggcagtaaataaaattgctgaagtagttggtggagaaaatggtccaataatttgtggtttagctagggcttctacaaatgatataaaagcttgttacgaagctataagcccagcccctaaaaaaagaattcatacatttattgccactagtgatatccatctaaaacataaacttagaaaaacaagatcagatgttctttgtatagttcctgaaatggttagttatgctaaatcattagttgatgatattgaattctcttgtgaagatgcctcaaggagtgatcctgaatttctttatgaagtaattcaactagcgattacatctggagctacaactataaatattccagatacagttgggttcacaactccaagtgaatttgggaagcttatttttgatattaataaaaatgttccaaatattgatgaagctattatttcagttcatggtcataatgatttaggattagctgttgctaattttctagaagcagcaaagaacggagcgaggcaattagagtgcacaataaatgggataggtgaaaga

SEQ ID NO: 237091 - DNA, 798 bp, Unknown
  Bacterial polypeptide expressing nucleotide sequence isolated from the Sargasso Sea
aactattaaattaatcaaaaataatgttccaaatatcgataaagcaattatctcggcccattgtcataatgatttaggattagcagttgccaatgcattgtcgggattatcggctggagtaagacaaattgaatgtaccattaatgggattggcgaaagagcaggtaatgctgctttagaagaaatcgtaatggcgataaaaacaagggatgatttgttaccttatgagacaggtataaaaacagaattaattagtaaagcttcaaaaattgtgtcaaatgcaacaggatttccagttcaatttaataaagcaattgttgggaaaaatgcttttgcacatgagtcaggtatacatcaagatggaatgcttaaaaatagggaaacatatgaaatcatgacaccagaaagtgttggagtaaaaaaaacatcattagttatgggaaaacattctggaagacatgcttttaaggataaattaagtgatttaggttatgcagatgttacagatgatgttgttcaagcggcatttggaaagtttaaaattttagctgataaaaaaaaacatatttatgatgaagatatagtcgctttagttgatgatagtttgatcatcgacaataaaattaatgcaataaatttaaaatctttaaaagtttttgctggcacgggtgagccacaaagagctgaaatgacattagatgtttttggagatataaaacatactactcaaacaggtgatggtcctgttgatgcaatatttaaatgtataaaagacctttatccgcatgatgtaaaatt

SEQ ID NO: 237092 - DNA, 847 bp, Unknown
  Bacterial polypeptide expressing nucleotide sequence isolated from the Sargasso Sea
attaaaaataaagtaccaaatatagacaaagctattatatctgctcattgccataatgacttaggacttgctgttgcgaatgctttagctggactatcagcaggtgtaagacaaattgaatgtacaattaatggtattggtgaaagagctggaaatgcagcacttgaggaaattgtaatggcgattaaaacaagaaatgacttaatgccatatgaaacaggcattaaaactgaacttataagcaaagcatccaaaattgtatcaaatgcaactggctttccagttcaatttaataaagcaattgtaggaaaaaatgcttttgcacatgagtccggaatccatcaagatggtatgttaaaaaatagagagacgtatgaaattatgacaccagagagcgttggtgttaagaaaacttctttagtgatgggtaaacattccggaagacatgcatttaaggataaattaaatgaccttggttatacagacttgaccgatgatgtaatccaaaatgcatttggaaaatttaaaattctagctgataaaaaaaaacatgtttacgatgaagatatattagctttagttgatgacagtttaattgttgataacaagatcaacgctataaatttaaaatctttaaaagtttttgccggaactggagaaccacagaaagctgaaatgactttagatgtttttggtgaaataaaaaagacttctcaaactggcgatgggccagttgatgctacgtttaaatgcataaaggcattgtatcctcatgaaatgaaacttttattgtatcaagttcatgcagtaaccgagggcactgatgctcaagcaaccgtaagtgtaa

SEQ ID NO: 237093 - DNA, 623 bp, Unknown
  Bacterial polypeptide expressing nucleotide sequence isolated from the Sargasso Sea
aatggataaaacaaataaaaaatataagccatataagcctcttagcaaggaaaaccggctatggccttcaaaaattattgaaaaggctcctatttggtgttctgtagaccttcgtgatggaaaccaagctcttattgaaccaatgggagatgaaagaaaaaaaagaatgttcaatcttttatgtaaaattggctttaagcagatagagattgggtttccggctgcatcacaaactgattttgattttacaaggtatttaattaatgaaaaagtaatcccttccgatgtaagtattcaagttcttactcaggctaggcccgagattataaaaagaacttttgaagctctcgatggtgcacctaatgcaattcttcatttttataactcaacttcaactcttcaaagaaaagttgtttttgataaagacaaggaaggtgttaaaaaaattgcaacagatgcagcaaaacttattaaagaattatcaagtaaatacaaaaatactaattggtcatttgaatactctcctgaaagttttacaggaactgaactcgattatgcagtagaagtttgcgatgaggttgttgatatattaaaaggggcatcaaataatgcaattattatta

SEQ ID NO: 237094 - DNA, 394 bp, Unknown
  Bacterial polypeptide expressing nucleotide sequence isolated from the Sargasso Sea
ttgtatatttcgatcatcaaaaatatttatatggctgagaaagataaagtatttattttcgacacaactatgagagatggtgaacaatcaccaggggcttctatgagtgttgaggaaaaaattcagatatcaagagtttttgatgaaatgggaattgatattattgaggctggttttccaatatcatcaccgggtgattttgaggccgtaagcgcgataagtaaaagtgtaaaaaattcaattccttgtggtttagctagggctacaaaaaaagatatagacgcttgttatgagtctttaaaatttgcaaaaagatttcgaatccacacatttatttcaacaagtccagttcatatgaaacacaagcttaatatgactgatgaacaagtttagg

SEQ ID NO: 237095 - DNA, 904 bp, Unknown
  Bacterial polypeptide expressing nucleotide sequence isolated from the Sargasso Sea
agcagttcaatatgctaaatctcctcgaattcatacttttattgctactagcccactccatatgaaatataagttaaaaaaaacagaagatgaagttttagaagcaattaagaaaacagtatcatatgctagaaatttatgtgacaatatagaatggagttgtgaagatggaggtagatcagagttagactttttgtataaatgtattgaactagctataaattgtggtgcatcaacaattaatatccctgatacagttggttatactttacctgaggaatttggaaaaatttttaaaaatgtaaagaacaatgtatctaatatagataaagcaatactatcaactcacacacataatgatcttggtttagctacagcaaataatgtagcagcaataaaagagggtgctagacaagttgaatgcactatcaatggtatgggggaaagagctggtaattcatctcttgaagaaatagtaatgactttaaaagtaaaaaaagatttaatgccatttcacacagatattaaaactgaatcaattatgaaagcttcaagattagtttcttcaatcacagggtttcctgtacagcctaataaagctattgttggagcaaatgcatttgctcatgaagcaggaatacaccaagatggtatgcttaaacatgcgggtacttatgaaattatgactcctgagtctattggattaaataaatcatcattagttttaggaaaacattcaggtaagcatgctttttctgaaaaattaaaagaacttggttatgagcctggtgataatgcattaatggaattatttggtagatttaaagatttagctgataagaaaaaagagatctttgaagaggatttaatagcattagcagaagacaggtctgcatcttatgat

SEQ ID NO: 237096 - DNA, 532 bp, Unknown
  Bacterial polypeptide expressing nucleotide sequence isolated from the Sargasso Sea
aatgaccgataaaatatatatattcgacactactctaagagacggagaacaatctcccggtgcatctatgaacttagatgaaaagcttcaaattgctgaagttcttgagtctatgaaagttgatattattgaggctgggtttccaatagcttctaatggagactttgaagctgtaaaagaagtaagtaaaaatataaaaaattctacaatagctggacttgctcgcgcaagtcttaaagatatagatcgtgcttgggaggctgttcaatatgcaaaatcacctcgtatacatacatttattgcaacaagtcctcttcatatgaagtttaaattaaaaaaaactgaagatgaagttttagaagctatcaacaaaacagtttctcacgcaagaaatctttgtgataatattgagtggagctgtgaagatggaggtaggtcagaattagaatttttatataagtgtattgagcttgcaataaaaagtggtgcctctactattaatatacctgacacagttgggtatactcttcct

SEQ ID NO: 237097 - DNA, 715 bp, Unknown
  Bacterial polypeptide expressing nucleotide sequence isolated from the Sargasso Sea
caatacaaagattaatactaaacatattgttccaatatctaaattagtctcgagtataactgggtttccgatacaaccaaataaagccatagttggtgcaaacgcatttgcacacgaatcaggtattcatcaagacggagtattaaaacatagagaaacatatgaaattatgctagcacaagatgttggttgggacgataataaaatcgtgcttggaaaacattctggtagaaatgcattaaaaaccaggttaaacgaacttggttatgattttactgaagacaacgatcttaacaaaatatttgataattttaaaaaattagctgatatcaagcatgaaatttatgacgatgacttgcatacgcttgtatcaagtaaatattctgatcaaccgagtaaatattttaaattaataaatattcaatcctcaagtaactttaataacaaagctgagtccgaagtgataattttttataaaaataaagaaaataaaactactgcatctggcggaggggcagttgatgcaacttttaaagcaatagaaaaaatagttaaaagtaattctttgttgagattatactctgttaataatattactgatggaacagattctcttggcgaagtcactgtaaggctagaaaaaaataatattattgtaaatggattgggtgcagatagcgatattgttgttgcatcagcaaaagcatatatcgat

SEQ ID NO: 237098 - DNA, 775 bp, Unknown
  Bacterial polypeptide expressing nucleotide sequence isolated from the Sargasso Sea
atgagcgacaaagaaaaagtttatatcttcgatacaacaatgagagacggtgagcagtcacctggggcctcaatgagtgttgaggaaaaaattcaaatctctcgagtgtttgacgagatgggaattgatataattgaggcaggatttccaatttcatctcctggtgattttgaagcagtttcggaaataagcaaaagtgttaagaattctataccttgcggtttatcaagagcattaaaaaaagatatagatgcttgtcatgagtcacttaagtttgcaaaaagatttagaattcatacttttatctccactagtccagttcacatgaagcataaacttgatatgactaacgaccaagttttagatgcaattaaagaaagtgtaacttacgcaagaaagtttactaatgatgtagagtggtcttgtgaagatggaacaagaacagatttagattttatgtgcaaaacaattgagttagcaattaaatgcggagcaacaacaattaatattcctgacactgttggttattcaattcctgaagaattcgctcggacaataacacacataaaaaataatgtgccaaacattgataaggcaatcatatcagcacattgtcacaacgatttaggtttagctgttgctaatgctttagcaggtttgtcagcaggtgttagacaaattgaatgcactataaatggaattggagagagagcaggtaacgccgcgttagaggagattgtcatggctattaaaacaaggaatgatttaatgccat

SEQ ID NO: 237099 - DNA, 792 bp, Unknown
  Bacterial polypeptide expressing nucleotide sequence isolated from the Sargasso Sea
gcactgacccaagccagaccagagctaataaagagaacttttgaggcccttgaaggtgctcatagtgcaatagttcatgtgtataactcaacttctaccttacaaaggcgtgttgttttcaagagcgacgaggaagggataaaaaaaatagctacggatggagctaaatgggttttagagcaatcagaaaaatataatgagacagactggatgtttgaatatagtcctgaaagtttcacagggacggaattaccttatgcggttgaggtctgtaacgcggtcaatgaagtttgggagccaagaaaagataaaaagaccatcataaacctcccagcaactgtagagatggcttcgccgaatacttatgctgatcaaatcgaatggatgtgcagaaatcttgataatcgtgagaatgtaatagtaagcctgcatcctcataatgatagaggaacagcagttgcagcaacagagcttggagttatggcaggcgcagacaggattgaaggaactttatttggtaacggagagagaacgggtaatgttgatttggtaactttagctttaaatatgcttacccaaggagttgatcctcatttagacttctcaaatatcaatcctattatgcgtgaggctgaatactgcaaccagcttccggtacatccaaggcacccttatgcaggagatcttgtttttacagccttctcagggtcacatcaagatgcaataaaaaaaggattaactgaaatgagaaactccaatcagggtaattgggaagttccttatttacctatt

SEQ ID NO: 237100 - DNA, 421 bp, Unknown
  Bacterial polypeptide expressing nucleotide sequence isolated from the Sargasso Sea
tatgagtgatagagtttatatttttgatacaacactgagagacggtgagcagtctccaggagctacaatgaatcttgatgaaaagatgcaaatagcgcagcttttagaagagatgcaagttgatattatcgaagcaggttttcccattgcttcaaatggagattttgaagctgtgtctgagataagtaaaaatattaaaaattcaactattgcaggtttatcaagagcaaaaattgctgatattgatcgtgcttgggaagcagtcaaacatgctaaatcaccgcgtattcatactttcattgcaacaagcccaattcatatgaaatacaaattaatgaaaacagaagatgaggttttagagtcaataaaacatactgtttctcacgcaagaaatttatgtgataatattgaatggagttgt

SEQ ID NO: 237101 - DNA, 673 bp, Unknown
  Bacterial polypeptide expressing nucleotide sequence isolated from the Sargasso Sea
tatggcacaagaaaaagttattatatttgatacaactctcagggatggagagcaatctgcgggtataggattaacaactaatgaaaagctggaaatagctcgccaattagaaaggctaggggttgatgtaatagaagctggatttgcagctagttctccgggagatttagaagctgttaaagccatatctgctgaaattaaaaaacctatagtagcttccttggctagatgttacatacctgatgttgatgctgcttgggaaggtgttaaggatgctaaaaatcctcgtctgcatgtttttatatctagttcagataaccatataatgaatttgttaagaaaaaatccagaagaagttttagagacagctgtcgcttctgtagagaaagctaaaagttattgtgatgatgttgaattctctcctatggatgccactcggactgatccagaatatttatttaagatgttggaggcagttatagatgctggcgcgacgacagtaaatatagcggatactgttgggtatgctattccgtcagaatttgcccaacggattgaagatataaaatcaaatgttccaaatatagataaagcgattataagtgtgcattgtcataatgatttaggattgtcagttgccaatagcttggctgcggttaaagccaggtgtgag

SEQ ID NO: 237102 - DNA, 808 bp, Unknown
  Bacterial polypeptide expressing nucleotide sequence isolated from the Sargasso Sea
ttgtcataatgatttaggtttagcggtagctaattcattagctggagttcaagctggagcaagacaaattgaatgtacaataaatggtttaggagaaagagcgggaaatgctgcacttgaagaagttgttatggcaattaaaacaagacctgatttaatgccatatgaaactggaattaatactacacttttaagcaaagcttcaaaaattgtttcaaacgcaacaggatttcctgttcaatataataaagctatcgttggaaaaaatgcttttgctcatgaagcaggaattcatcaggatggaatgttaaaaaatagacaaacatatgagataatgacacctgaaagtgtaggagttaaacaaacctcattagtgatgggaaaacattctggacgacatgcatttaaagataaattaaatagcttaggttatccagacttaactgatgatgtagtaggaaatgcatttgcaaaattcaaagtcctagcagataagaaaaaacatgtctacgatgaagatattattgccttagtagatgatagtttaatagtagataataaagtgaatgcaattactcttaaatctttgaaagtttttgctggaacaggagaaccacaaaaagcagaaatgactttggatgtttatggcgatgttaaaaatgcaatagaaactggagatggtccggtggatgcaatatttaaatgtattaaaactttgtatcctcatgatgttaacttgcagctttatcaagttcatgcagttacagaaggaacagatgcacaagctacagtaagtgtaaaaatcgag

SEQ ID NO: 237103 - DNA, 397 bp, Unknown
  Bacterial polypeptide expressing nucleotide sequence isolated from the Sargasso Sea
atgagcagagacaacaagattacaatatttgataccactttaagagatggtgagcaatctccgggctgctctatgaatcttgaagaaaaaataaaaattttccaagcattagaaagtttgaatgtagatgtagtagaagcagggtttgctattgcatcagttggagactatgaagcaatcaaggaaatatctaaactatcaaaaacctccactatatgttctttggcaagggcaaataaagaagatattgacagagcctatgaggccttaaagtatgcaaaaaaatatagaattcatacttttattgctactagtgacttgcacataaaatataagttaaaactaacgaaagaaaaagtagttgattatgtaagagaaagtgttaagacatgctagg

SEQ ID NO: 237104 - DNA, 886 bp, Unknown
  Bacterial polypeptide expressing nucleotide sequence isolated from the Sargasso Sea
gatttcaagagtttttgatgagttaggaattgacattattgaagcaggtttcccaatagcttcacctggagattttgaagcagttaaagctataagtaaaattttaaaaaattcaatacccgctggtttatctagagcaaataaaaaagatattgatgcatgtcatgaggcattaaaatctgctcctagatttagaattcatacttttatttcaacgagtcctcttcacatgaaacacaaattaaataaaactccagaacaagttgtagatgcaattaaagaaagtgttacatatgcaagaaaatttactgatgatgttgaatggtcttgcgaggatggaacaagaacagatatggattttatgtgcaaaatagtagaacttgcaattaaaagtggtgctaaaacagttaatattcctgatactgttggttatacaactccatcagaatttacaaaaataattacaactttaaaaaataaagttccaaatattgataaagcaattttatcagttcattgtcataacgatttagggttagctgtagcaaattcattagcaggtgtttctgcaggagcaagacaagtagagtgcacaattaatggaattggtgaaagagcaggaaatgcagctttagaagaaatagtaatggcaataagaactagaaatgatttaatgccttatacaactggaattaaaacagaattattaagtaaagcttcaaaagttgtatcaaatgcaacatttcctgtacagtttaataaagctattgttggaaaaaatgcttttgcacatgaagcaggtattcatcaagatggaatgcttaaaaatagagaaacttatgaaattatgacacctgagagtgttggagttaaaaaacatccctag

SEQ ID NO: 237105 - DNA, 706 bp, Unknown
  Bacterial polypeptide expressing nucleotide sequence isolated from the Sargasso Sea
actcttcgagatggagagcaatctcctggtgccagtttaaatcttgaagaaaaacttgctatcgcccatcaattagcaagactaggagtagatgttattgaagctggattccctttcgcaagtccaggagattttaaagctgttaataaaattgctaatgcagtcgggaaagaaaatggccctataatatgcggcttagctagagcatctaaaggagatataaaagcatgttatgaagcagtaagtccagctccaaaaaaaagaatacatacttttattgcgacaagtgatattcatcttaagcataaacttaaaaaatcaaggaaagatgttcttcaaatagttccagaaatggttaattatgcaaaatcattagtagatgatattgagttttcttgtgaagatgcctcaaggagtgatcctgacttcttatacgaagtgattcaactagcaatttctgcaggagcgacaacaataaatatccccgatactgttggatttacgacccctagtgaatttggcaaacttattgccgatataaataaaaatgttccaaatattaatgaggcagtaatctctgttcatggtcataatgatttaggtttagcagttgccaattttcttgaggcagtaaaaaatggagcaagacaactagaatgtactattaatggaattggagaaagagccgggaatgcctctctagaag

SEQ ID NO: 237106 - DNA, 856 bp, Unknown
  Bacterial polypeptide expressing nucleotide sequence isolated from the Sargasso Sea
atgggtattgggagaaagagcaggtaatgcagctcttgaagaaattgtaatggcaattaaaacaagagatgatttgttaccttatgagactgggataaaaacagaattaataagcaaagcatcgaaaattgtctctaatgcaacaggattcccagtacaatttaataaagcaatagttggaaaaaatgcatttgctcatgagtcaggtatccaccaagatggaatgttaaagaatagagaaacctacgaaattatgactccagaaagtgttggagtaaaaaaaacatctctagtcatgggtaaacattcaggaagacatgcatttaaggataaattaaatgatcttggttatacagatgtgacagatgatgttgtgcaagctgcatttggtaaatttaaaatcttagcagataagaaaaaacatatttatgatgaagatattgttgctcttgtagatgatagcttaattattgataataagattaatgcaattagcctaaaatctttaaaagtattcgcaggaactggcgaacctcaaagggctgatatgacattagatgtttttggaactgtgaaaaaaacttcacagacaggcgatggtccagtcgatgcaatttttaaatgtatcaaagatctttatcctcatgatgttaagttatctctttatcaagttcatgcagttactgaagggacagatgctcaagcaacggttagtgtgaaaatagaagagaacgatagaacaactgttggacaatcagcagatacagatactttggtggcatcagctaatgcatatcttaatgcacttaacaaaatgttgattaaaagggaaaaaaatcactttataaaaatatag

SEQ ID NO: 237107 - DNA, 878 bp, Unknown
  Bacterial polypeptide expressing nucleotide sequence isolated from the Sargasso Sea
tgctttagcaggagttgttgctggcgcaagacaagtagagtgcacaattaatggtattggtgaaagagctggtaattcagcattagaggaaatagttatggcaatgaaaacaagaagtgatttaatgcctttcacaactggaataaatacaaaattgataagtaaagcttcgaaagtagtttcaaacgctactggatttcctgttcagtttaataaggcaattgttggaaaaaatgcatttgctcacgagtccggaattcatcaggatggaatgcttaaaaacagaaacacatatgagataatgactccggaaagtgtaggaatgaacaaaacatctttggttatgggaaaacactcaggaagacatgcatttaaagataaattaaatgatcttggttatataaatgtgacagatgatgtaattcaagaagcttttggaaaatttaaagttcttgctgataaaaaaaaacatgtttatgatgaggatattgctgctttagttgatgatagcatgatcactgaagacaatgtaataaaattaaaatcattaaaagtattcgcaggaacaggtgaaccccaaaaagctgatatgacacttgaagtttttggagaaattaaaaaagcttctgaaactggagacggtcctgtagacgcaatttttaaatgtattaaaaaattatacccgcacgaagttactcttcaattatataatgttcacgcagttactgaggggacagatgcgcaagctacagtgagtgttagaattgaagaaaaagggaagacaacagttggtcaagctgctgacactgatacattagttgcttcagcaaatgcttatttatcagctttaaataaaatgatcataaaacgaaaaaaaa

SEQ ID NO: 237108 - DNA, 418 bp, Unknown
  Bacterial polypeptide expressing nucleotide sequence isolated from the Sargasso Sea
atgacgaacacacgcacaatccgcatctttgacaccacccttcgtgacggtgaacagtcacccggtgccagtatgaaccgcaccgaaaagcttgaaattgctcaggcactgggaagccttggtgtcgacattattgaagccggctttccaatcgcctctccaggagactttgaaagtgttcgtgaaattgcctcagccgtgacgagcacaaccatttgcggacttgctcgatgtaacgacgcagatattgatcgtgcctgggaagcgcttcaaccagccaagcaaccacggattcatgtttttcttgccaccagttctattcatcgtgagtttaagctacgcatgactgagcaagaagttctggatcgtgccgtagcaggtgttcgtcgcgcccgcaacctttgtgctgacatcgaat

SEQ ID NO: 237109 - DNA, 921 bp, Unknown
  Bacterial polypeptide expressing nucleotide sequence isolated from the Sargasso Sea
gatgagtgagaactttaagaatagggaaaatatatgtctttcacttcatccgcataatgatagaggtacagcaatagctgcttctgagtttggcttaatggcaggtgcagatagagttgagggaacgttatttggtaatggtgaaagaacaggaaatgtagatatcgtaaccttagccctaaatatgtatagccaaggtataaatcctaatttagatttttcacaaattaataatgttatgagagaagttgaatactgtaatcaactgcccgtccatcccagacatccttatgccggtgatttggtctttactgctttttcgggatctcaccaagatgccataaaaaaaggtttaaatgcattaagaagctctaatgaaccacaatgggaagtgccttatttgccaattgatcctgcagatctggggagaacctatgaagccgttgtaagaattaattcacaatctggaaaaggaggcgttgcttttctattggaaaaagatcatggagtgtctctccctagaaggcttcaaataagcatgagtcagaaaatacaaaaaattgctgatgagactggtaaagaaatttcaacatcagagatttgggaaatctttcatacaaactttgtcatgccaaaatcggggcatagttttaaaaactattccttaaaaacttcagatgcaactgatgtaagtgatcatattaaagctgagattgaaattgatggtaaaaaccatgaaatatctggttcaggtaatggtccaattgacgcatttgtaaatgcactgaatcaaaaactatcaagtgatataaaagtatctgattatcatcagagtgcaatttcatctggctctgatgctcaagctgctgcttatattgaactccaaaaaggtgacaaaacaagttggggtgtgggtataaa

SEQ ID NO: 237110 - DNA, 275 bp, Unknown
  Bacterial polypeptide expressing nucleotide sequence isolated from the Sargasso Sea
tatggataaagattcggtaataatttttgatactacacttagagatggtgaacaatctgctggtgcaggtttaactgttgatgaaaaacttattatcgctaagcaactggaaagtttaggggttgatgtaattgaagccggttttgctgtcagttcaacaggtgattttaatgctgttagtttgattgctgaaacagtaaaaaattgtaaagttgcaagtttggcaagagttgttgaaaaagatattgataaggctgctccagctttagaaaaag

SEQ ID NO: 237111 - DNA, 814 bp, Unknown
  Bacterial polypeptide expressing nucleotide sequence isolated from the Sargasso Sea
tatgagtgacaaaaacagaattataattttcgatacaacaatgcgtgatggtgaacaatcaccaggcgcaacaatgagcttagaagaaaaaattcaaatagctagatgttttgatgaactaggaattgatgtgatcgaggcaggttttcctattgcttctcctggagattttgaagcagttacagagataagcaaagttttaaaaaaatcaattcccgcaggactttcacgagctacaaaaaaagatatagatgcttgcaaagactcacttaaacacgcgaagagattcagaatccatacttttatttcaacaagtccactacatatgaagcataaacttaataaatcccctgaagaagttttaggactaattaaagaaagtgttacgtatgctagtaagtttacagatgatgttgagtggtcatgtgaagatggaacaagaacagatcttgattttatgtgtaaatctgtagagcttgcgataaaatgtggagctaaaacaattaatattcctgatacagttggctattcagtaccttctgaattcaaaaagataattgaaactctaattaacaaagttccaaatatcgataaagctattttatctactcattgtcataatgatttaggattagctgtagctaattctttagctggagtgatggcgggagctcgacaaattgagtgcacaattaatggaataggtgaaagagcaggtaacgcagctttagaagaagttgtaatggcaatgagaacaagaaatgatttaatgccgtacacaactggaattaacacaaaacttttaagcaaagca

SEQ ID NO: 237112 - DNA, 913 bp, Unknown
  Bacterial polypeptide expressing nucleotide sequence isolated from the Sargasso Sea
aaattttaaaaactctattcccgcaggactttcaagacattcagtaaaagatattgatagagcttatgaagctttaaaacatgcaccaagatttagaatacatacatttatttctacaagtccattacatatgaagcataaattaaatatgtctccagaagatgtttatgagtcaattggaaaacatgttgcttatgcaagaaagtttactgatgacgttgagtggtcttgcgaagatggaacaagaactgatatggattacatgtgtaaaactgtagagcttgcaattaaaaatggagcaacaacaattaatattcctgatacagttggttacacaataccatctgagtttacaacaattatagatactttattaaataaagttccaaatatagataaagcaattttatcaactcattgtcataatgatttaggtttagcagtagctaactccttagctggagttcaagctggagcaagacaaattgaatgtacaataaatggattaggagaaagagcaggaaatgctgctcttgaggaagttgttatggcaattaaaacaagacctgatttaatgccatacgaaactggaattaatacaactcttttaagtaaagcttcaaaaattgtttcaaatgcgacaggatttcctgttcaatataataaagcaattgttggaaaaaatgcttttgcccatgaagcaggaattcatcaggatggaatgttaaaaaatagacaaacatatgagataatgacacctgaaagtgttggggttaagcaaacatcattagtgatgggaaaacattctggacgacatgcatttaaagataaattaaacagtttaggttatccggatttaactgacgatgtggttggtaatgcattcgcaaaattcaaagtcttagcagataaa

SEQ ID NO: 237113 - DNA, 448 bp, Unknown
  Bacterial polypeptide expressing nucleotide sequence isolated from the Sargasso Sea
atgaaaaatcaggtagaaatttttgatacaaccctaagagatggcgaacaggttccaggttgtaaacttgatactaaaagtaaattaattttagctgaaaaaattgatcaacttggggttgatattattgaagcaggttttccaatttctagtcctggagattttaaatcggttgttgaaatttccaaagttattaaaaatgcatctgtatgtgcactaagtagagcaaatgaaaaagacattgatgttgctgctgagtcattaaaaaaggcaaaaaaacctagaattcatactggtattggcacatctgaagttcatattaaatataaattcaactcaaataaagattcaataattgaaatagcaaaaaaatcggttgctcatgcaagaaagtatgttgacgatgttgaattttatgcagaagatgctggcagaacggataatgaat

SEQ ID NO: 237114 - DNA, 827 bp, Unknown
  Bacterial polypeptide expressing nucleotide sequence isolated from the Sargasso Sea
cgattatctgttcattgccataatgaccttggtctggcggtggctaactcccttgcagctgtaaagtctggcgcgagacaagtagaatgtacaattaatggtttaggagagagagcgggaaatgccgcgatggaagaaatagtcatggcactaagaacaaggtctgacggcttaccttatcacaacaatattaatactgagcacataactaaggcttcacgtttggtttcaacaataactggattttccatacaacctaataaagctattgttggtgcaaatgcatttgcgcacgaagcaggaattcatcaggacggtgttcttaagaacgcacaaacatacgaaataatgacaccagaaagtgttggattaactgagagtaagcttgtaatgggcaaacactctggccgtcatgcttttagacaaaaactggaagaactaggttatgaacttggagataatgccgttcaagatgctttcaagagattcaaggatttggctgatctaaaaaaggatatttttgatgaggacattatagcccttgtagatgatgcagttgtaagaagtaatgataggattcaacttgtatcacttgaagttttatgtggtaccgagcatagaccgccgagcgccaagttgcgtcttaattttgatggggatgaaaaatattctgaaacaactggggatgggccggtagatgccatattcaccggaataaaggagctcacttctcagtctccaaagttgcaactctatcaagttcatgctgtcacccaaggtacagatgcacaggcggaggttacggttagactggaggaaaatggtaa

SEQ ID NO: 237115 - DNA, 862 bp, Unknown
  Bacterial polypeptide expressing nucleotide sequence isolated from the Sargasso Sea
cctggagactttgaggcagtaactgctataagtaaaatcttaaaaaaatcgactcccgcaggattagctagacatacaaaaaaagatattgatgcttgttatgaggctttaaaagcagcaccaagatttagaattcacactttcatctcaactagcgatctacacatgaagcacaagctaaataaatctcctgaagaagtaatagattcaatcaaagagcatgttacatatgctagaaaatttaccgatgatgtagagtggtcttgtgaagatggaacaagaactggcatggattttatgtgcaagacagttgaacttgcaattaactgtggagctaaaacaataaatataccggatactgtaggatattcagttccttcagagtttaaaaaaattatagaaacattaattaataaagttccaaatattgataaagcaattttatcgactcattgtcataatgatttaggtttagcggttgcaaactctttagcaggggtagctgctggagcaagacaaattgagtgtacaataaatggaattggagaaagagctggaaatgctgctcttgaagaaattgtaatggcaatgaaaacaagatctgatttgatgccttttaaaactggtatcaatacaaaattattgagtaaagcatctaaagttgtttcaaatgcaacaggttttccagtccaatttaataaagcaattgtgggaaaaaatgcttttgcccatgagtctggcattcatcaagatggaatgttaaaaaatagaaatacctatgagatcatgactcctgagagtgtagggaataaaaaaacttctttagtaatgggaaaacattctggacgacatgccttaaaga

SEQ ID NO: 237116 - DNA, 842 bp, Unknown
  Bacterial polypeptide expressing nucleotide sequence isolated from the Sargasso Sea
aactatgagagatggagagcaatctccaggagcttctatgagtgttgaggaaaagatacaaatctcaagagtttttgatgagatgggaattgatattattgaagcaggatttccaatatcttctccaggagattttgaagctgtatcggcaattagcaaaggattaaaaaattcaattccttgtggtttatcaagagcattaaaaaaagatatagacgcatgtcatgaatcattaaaattcgcaccaagatttaggatacatacttttatttctacaagtccagtacatatgaaacacaaacttgatatgacaaatgaccaagttatagatgctattaaagaaagtgttacttatgcaagaaaatttactgatgatgttgagtggtcatgcgaagatggaacaagaacaaatttagattttatgtgtaagaccattgaactagcaataaagtgcggagctacgactataaatattccagacacagttggttattcaattcctgaagaatttgctagaactattactcatataaaaaataatgttccaaatattgataaagcaataatatcagcacattgtcataacgatttaggcttagcggttgcaaatgcacttgcaggattatcggcaggagtaagacagatagaatgtacaataaatggaattggtgaaagagcaggtaatgctgccttagaagaaattgtaatggcgataaaaactagaaacgatctaatgccgtttgatacaggtgttaaaactgaactaataagcaaagcatctaaaatagtttcaaatgcgactggttttccagttcaatttaataaagcaagttgtcggtaaa

SEQ ID NO: 237117 - DNA, 649 bp, Unknown
  Bacterial polypeptide expressing nucleotide sequence isolated from the Sargasso Sea
cctcacctacgaaatcatcgatgccaagaccgttggtctgagcgattaccgaatttcactgggcaagctcagcggccgcagtgcggtgagagcgagactggaagagctcgggtacgacctgacccgagaggatctggatgaggcgttcgcccgcttcaaagacctggccgatcgcaaacgggagatcaccgatcgcgatcttgaggcgattgtcagcgaacaggtgcaacagcccgaggctcgctatcagctccagctggtgcaggtcagttgcggaacgcgtttgaagccgaccgccaccgttactctctcggaggagaacggtccgcaacaaaccgtctcggccgtcggcacaggaccggtggatgcggtgtgccgggccctgaaccaactggctggagtgcctaacgagctcatcgagttctcggtgaagtcggtgaccgagggcattgatgccatgggtgaagtgacgattcgcttgcgtcgtgacggttcgctctattcaggccatgcggctgataccgacgtggtggttgctgccgccatggccttcatcaatgccttgaatcgtcttgtggcagcccaggaacatcagcctttgcatcctcagcgggatgttgttgttctcgacgctcggccgacgctctga

SEQ ID NO: 237118 - DNA, 593 bp, Unknown
  Bacterial polypeptide expressing nucleotide sequence isolated from the Sargasso Sea
aatggataaccctattgataaatattcaccttttgtgcctattgatttagagaatagaaaatggccaggtaaaacaattaaacaggctccagtttggtgttctgttgatttgcgtgatggtaatcaagcacttattgagccaatgggctctgaaagaaaaaatagaatgtttgatttgttgtgtaaattaggttttaaagaaattgaagttggatttccttctgcttctcaaactgattttgattttgtaagagatctcatagaaaataaaaaaataccctcagatgtaagtatacaagttctaactcaagcaagagaagaattaattcataaaacctttgaatcgcttaagggtgcatcaaaaggaattattcacttttataactcaacatcaacccttcaaagagaagtggtattcaacaaagataaaggtggcataaaaaaaatagccacagatgctgctatgctaataaagtcattggctaaagaaaatccagatactgattggagttttgagtattctcctgaaagtttcactggtactgaactagactatgcaagagatgtttgtgatgatgttgttgaaatactta

SEQ ID NO: 237119 - DNA, 712 bp, Unknown
  Bacterial polypeptide expressing nucleotide sequence isolated from the Sargasso Sea
atgagcactaaagataaagtttacatttttgacactaccatgagagatggtgaacaatcaccaggagcctctatgagtgtagaggagaaaattcagatttccagagtctttgacgaaatgggcatcgacattatagaagcaggttttccaatttcttctccaggtgattttgaggcagtaagcgctataagcaaaagtgtaaaaaattctattccttgtggattagctagagccacaaaaaaagatattgatgcctgccatgagtcattaaaatttgcaaaaagatttagaatacacacttttatttcaacaagtcctgttcatatgaaacacaaacttaatatgactgatgaacaagtgttgaaggcaatcaaagaaagtgtaacttatgcaagaaattttacagatgatgtagaatggtcttgtgaggatggtacaagaactaatttggattttatgtataagactattgagcttgcaataaaatgtggtgctaagaccataaatattccagatactgttggttattctatcccagaagaatttgctagaaccattactggaattaaaaataatgtaccaaatattgataaagcgattatttctgctcattgtcataacgatttaggattagctgttgctaatgcgttgtcaggcttatctgctggagttagacaaattgaatgtacaattaatggaatagggaaagagc

SEQ ID NO: 237120 - DNA, 472 bp, Unknown
  Bacterial polypeptide expressing nucleotide sequence isolated from the Sargasso Sea
tatggctgataaagataaagtatttattttcgacacaactatgagagatggtgaacaatcaccaggggcttctatgagtgttgaggaaaaaattcagatatcaagagtttttgatgaaatgggaattgatattattgaagctggttttccaatatcatcaccgggtgactttgaggccgtaagcgcaataagtaaaagtgtaaaaaattcaattccttgtggtttagcaagggctacaaaaaaagatatagacgcatgtcatgagtctctaaaattcgcaaaaagatttcgaatccacacatttatttcaacaagtccagttcatatgaaacacaagcttaatatgactgatgaacaagttttaggtgctattaaagaaagtgttacttatgctaaaaaatttactgatgatgttgagtggtcatgtgaggatggtacaagaacaaatttagaatttatgtataaaacaata

SEQ ID NO: 237121 - DNA, 879 bp, Unknown
  Bacterial polypeptide expressing nucleotide sequence isolated from the Sargasso Sea
atagataaagcgattttatcaactcattgtcataatgatttaggattagcagttgcaaactctttagcaggtgttcaagcaggagcaagacaaattgaatgtactataaatggaattggtgagagagctggtaacgctgcactagaagaagttgtaatggcaatgaaaacaagaccagatttaatgccatatgaaactggaattaacacaactcttttaagtaaagcatcaaaaattgtttccaacgcaactggatttccagttcagtataataaagcaatagttggaaaaaatgcttttgcacatgaagcaggaattcatcaagatggaatgttaaaaaatagacaaacttatgaaattatgactccagaaagtgttggagtaaaacaaacatctttagtaatgggtaagcactctggtagacatgcttttaaagataaattaattagcttaggttacgtagatgttacagatgatgttattagcaatgcatttggtaaattcaaggttttagctgacaaaaaaaaacatgtttatgatgaagatataattgctttggttgatgacagcttaattattgataataaagtcaatgcaattagtttaaaaactttaaaagtatttgctggaacaggtgaacctcaaagggcagatatgacattagatgtttttggagaagttaaaaaagcatctgaaactggagatggaccagtagatgcaatatttaaatgtataaagaaactttaccctcatgaagtaaatttacaattataccaagttcatgctgtgaccgagggaactgatgctcaagcaactgttagtgttcgaattgaggaaaatggaaaaacaactgttggtcaagcagcggatactgataca

SEQ ID NO: 237122 - DNA, 874 bp, Unknown
  Bacterial polypeptide expressing nucleotide sequence isolated from the Sargasso Sea
atgtcacctgaagatgtttatgagtctataggtaaacatgttgcttatgcaagaaaatatacagacgatgttgagtggtcatgtgaagatggaacaagaactgatttagattatatgtgtaagacagttgaacttgcaataaaaagtggagcaacaacaattaatattcctgacacagttggttacacaataccatcagaatttacaacaatcattgaaactttattaaataaagttccaaatatagataaagctgtattgtcaactcattgtcataatgatttgggtttagcagtagcaaattctttagctggagttcaagctggtgcaagacaagttgaatgtacaataaacggtttaggtgaaagagctggtaacgctgctttggaagaaattgtaatggcaataaaaacaagaccagatttaatgccatatgaaacaggaattaatacaaaacttttaagtaaagcatcaaaaattgtatcaaatgcaactggatttccagttcaatataataaagcaattgtaggaaaaaatgcttttgctcatgaagcaggtattcatcaagatggtatgttaaaaaatagacaaacttatgaaattatgacacctgaaagtgtaggagtaaaacaaacttcattagtaatgggtaaacattctggaagacatgcttttaaagataaattaaatagcatgggttatcctgacttaactgacgatgtcattagtaatgcttttgcaaaatttaaagttttagctgataaaaaaaaacatgtttatgatgaagatattattgctttagtcgatgagagtttgatcattgataacaaagtaaacgcaataaatttaaaatctttgaaagtttatgcaggaa

SEQ ID NO: 237123 - DNA, 724 bp, Unknown
  Bacterial polypeptide expressing nucleotide sequence isolated from the Sargasso Sea
cacaataaatgggctaggggagcgcgctggcaatgcggctttagaagaaatagtaatgtcagtaagaacacgaagggatgtatttacatgtgataccaatatcgatacaagtcagattgttaattgttcaagacttgtctcgacaataacgggttttcctgttcaaccaaataaggctatagtcggcgctaatgcatttgcacatgaatcgggtattcatcaagatggagttttaaaaagtcgtgaaacttatgaaatcatgcgtgccgaggatgttggttggaataccaatagaatggttttaggtaaacactccggacgtaatgcttttcgtactcgtttagaggaattaggaatcacttttacggaagaagaagaattgaacgcagttttttctcaatttaaagaattagccgacaaaaaacacgaagtttatgatgacgacttacaagccttggtaagcgatacaatccaaggaagtgctgatgaaagaataaagcttgtgtcactcaaggtggggtcagagactggtgtaaagcctaaagcgctcgttacattatcaatcgacggtgaagaaaaatgcgccaatgccgaaggcggtggccctgttgatgcaacatataaggctattgaaaacatggttgagagtggttgtaatctacaattatattcggttaataacataactgatggtacagattctcaaggtgaggtaacagttcgt

SEQ ID NO: 237124 - DNA, 869 bp, Unknown
  Bacterial polypeptide expressing nucleotide sequence isolated from the Sargasso Sea
gtctcctggtgcatcaatgagtttagaagaaaaattacaaatatctagagtgtttgatgagctaggcgttgacatcatagaggctggtttcccaatagcttcgcctggcgactttgaagctgtaacagaaataagtaaaactcttaaacgatcaataccagcaggattagcaagagccactaaaaaagatattgatgcgtgccatcaagctttaaagcacgcaaaaaatttcagaattcatacttttatttctacaagtccgcttcatatgaagcataaattaaacaaatcaccagaagaagttttagagtctataaaagaaagtgttacatacgctagaaaatttactgacgacgttgagtggtcttgtgaagatggaacacgaactgatatggattatatgtgcaagacagttgaactcgcaattaaatctggagcaaaaacaattaatattccagacactgtaggttatactgtaccttccgagtttaaaaagattatagaaactttaatgaacaaagttccaaatattgataaagcgattctttctacacattgtcacaatgatttaggactagcagttgccaattcattggcgggagtaatggcaggtgcaagacaaattgaatgtacaattaatggcataggagaaagagctggtaatgcagcattggaagaagttgtcatggccatgagaacaagacacgacttaatgccttacactacaaatattaatacaaaacttttaagcaaagcatcaaaagtggtgtcaaatgcaacaggatttccagttcaatttaataaagcgatagttggaaaaaatgcttttgcccatgaatctggcattcatcaagatggaatgttaaaaa

SEQ ID NO: 237125 - DNA, 754 bp, Unknown
  Bacterial polypeptide expressing nucleotide sequence isolated from the Sargasso Sea
ggcatcgaaagttgtctctagtgcaacatttccagttcaatttaataaagctattgttggaaaaaatgcttttgcacatgaagcgggtattcatcaagatggaatgcttaaaaatagagagacctatgaaattatgactcccgagagtgttggagttaaaaaaacttctttagtaatgggaaaacattctggcagacatgcatttaaagaaaaattgtctgatctaggttatgtagatgttacagatgacgttatccaaacagcctttggtaaatttaagatattagcagataaaaaaaagcatgtttatgatgacgatattgcagcactcgttgatgacagcatggttttagaaaaaaatattatcaatctaaaatctctaaaagtttttgctggcacaggggaacctcaaagagccgaaatgactcttgatgtatatggagaagttaaaaagacttcagaaactggtgatggtccggtagatgctatatttaaatgtataaaagttttatatcctcatgatgttaagcttttactatatcaagttcatgcagtaactgaaggaacagatgctcaagcaacagtaagtgttcgaattgaggaaaatggaaaaacaacagttggacaggctgcagatacagatacattagttgcatcagctaatgcttatcttagcgcattaaataagatgataattaaaagagacaaaactgctcctatggaacagggtattgagaaaatgagaggcatataa

SEQ ID NO: 237126 - DNA, 571 bp, Unknown
  Bacterial polypeptide expressing nucleotide sequence isolated from the Sargasso Sea
tatgagcggtaaagatagagtaataatttttgatactactatgcgagatggtgagcaatcaccaggtgcatctatgagtttggaagaaaaaatccaaatagcaagagtatttgatgaactaggtatagacattattgaagcgggttttccgatagcatcacctggagatttcgaagcagtaactgaagttagtaagatcttaaaaaaatctattcctgcaggactatctagacattctaaaaaagatattgatagagcttatgaggctttaaaacatgctccaagatttagaatccacacatttatttcaacaagtcctcttcatatgaagcataaattaaatatgtcgccagaagatgtttacgagtctattggacagcatgtagcttatgcaagaaaatttaccgatgatgttgaatggtcttgtgaagatggcacaagaacggatatggattttatgtgcgagacagtagagcttgctatcaaaaatggagcaacaaccataaatattcctgatacagttggttatactattccatctgagttcacaaaaatattcaaacattattaa

SEQ ID NO: 237127 - DNA, 765 bp, Unknown
  Bacterial polypeptide expressing nucleotide sequence isolated from the Sargasso Sea
tgaatttacaaaaattattcaaactttatttaaataaagttccaaatatagataaagcaattttgtcgacacactgtcataatgatttaggtttggctgtcgcaaattcactagcaggagttcaagcaggagcaagacaaatagagtgcacaattaatggaattggagaaagggcaggtaatgctgcactagaggaagtagttatggcaatgaaaacaagacctgacttaatgccttacgaaactggaattaatacaacactattgagcaaagcatcaaaagttgtttcaaatgcaactggttttcctgttcaatataataaagcaattgtaggcaaaaatgcttttgctcatgaatctggcattcaccaagacggaatgcttaaaaatagaaacacttatgaaataatgacacctgaaagtgtaggggtaaaacaaacttctctagtgatgggaaaacattcaggaagacatgcgtttaaagacaaattaacaagccttggatacaaagatgtaactgacgatgtaattgagagtgcatttggaaaatttaaagttttagcagataagaaaaaacacgtttatgatgaagatattattgctttagtggatgatagcttgattatagacaacaaagttaatgctattaacttaaaatcattaaaagtttatgcaggaacaggtgaacctcaaaaagctgaaatgattttagatgtttatggtgacgttaaaaacgccacagaaactggtgatggacccagttgac

SEQ ID NO: 237128 - DNA, 579 bp, Unknown
  Bacterial polypeptide expressing nucleotide sequence isolated from the Sargasso Sea
tatgtctaataaagaaagagtttttatatttgatactactatgagagatggagagcaatctcctggagcttcaatgagcgttgaagaaaaaatacaaatttctagagtatttgatgaaatgggaattgatattattgaggcaggttttccaatttcgtcccctggtgattttgaagcagtttctgcaataagcaaaggaattaaaaattctataccatgcggtttagcaagagcaatgagaaaagatatcgatgcttgtcatgagtctttaaagtatgcaaaaagatttagaatacatacttttatctcaacaagtccagtacacatgaagcataaacttaatatgtccaacgatcaggttgtagatgcagttaaagacagcgtaacatatgcgagaaaatttacagatgatgttgaatggtcatgcgaagatggaacaagaactagtttagatttcatgtgtaaaacaattgaacttgcaattaaatgtggagctacaacaataaatatacctgacacagttggatattctatccccgaagaatttgctaaaacaatcacacatattaaaaataatgt

SEQ ID NO: 237129 - DNA, 806 bp, Unknown
  Bacterial polypeptide expressing nucleotide sequence isolated from the Sargasso Sea
ggcaagagctagtttgaaagatattgatagagcatgggaagcagttaaatatgcaagatcgcctcgtattcatacatttattgctaccagtcctttacatatgaaatataaacttaaaaaaacagaatctgaagttttagatgcaattaataaaaccgtatcacatgcaagaaatctatgtgacaatatagaatggagttgtgaagacggtggaagatcagaattagattttttgtataaatgtatcgagctagcaataaactgtggagcatctacaattaatattcctgatactgtcggttatacattgccagaggaatttggtaaaatttttaaaaatgtaatagaaaatgttcccaatattgataaagcaattttatctactcatacacataatgatttaggcttagcaacagctaataatgtagcggcaataaaagaaggtgctagacaggtggagtgtactataaatggtatgggtgaaagagcaggaaattcttcactagaagaaattgttatgactttaaaggtaaaaaaagatttaatgccttttcatacagatattaaaactgagtctataatgaaagcttcaagacttgtttcatcaattacaggttttcctgtacaacctaataaagctatcgtaggcgctaatgcttttgctcatgaagctggcattcatcaagatggaatgttaaaacattctggcacatatgaaattatgactcctgagtccataggcttaaacaaatcttctttagtgctaggaaaacactcaggtaaacatgcattttctgaaaaattaa

SEQ ID NO: 237130 - DNA, 157 bp, Unknown
  Bacterial polypeptide expressing nucleotide sequence isolated from the Sargasso Sea
tcaggacagtcccactcccctcaccgccttccgtaccgaggaaatcaccaagacctcgcgtctggtttccaacctcacgggcatggtggttcagcccaacaaagccatagttggtgccaatgcctttgcccatgaatcgggcattcaccaggacggc

SEQ ID NO: 237131 - DNA, 789 bp, Unknown
  Bacterial polypeptide expressing nucleotide sequence isolated from the Sargasso Sea
aatggataacccaatagacaaatattctgcttatgagcctataaatcttaagaataggaaatggccaactaagcttatcaagaatgctccaatatggtgttctgttgacttgcgtgatgggaatcaagccttaatagagcctatgggctcagaaagaaaaaataggatgttcaatttattatgtaaacttggatttaaagaaatagaagttggatttccatcggcatctcagacagattttgattttgttagagatctcattgaaaataaaaaaattcctaatgatgtaaatattcaggtccttactcaagcaagagaagaacttataataaaaacctttgagtctctaaaagatgttcctaaagcaattgttcatttttataattcaacctcaactttacagagaagagtagtatttgatcaaaataaaaaaggtataaaaagaattgctactgatgcagcagagttaattaagaatttagcagaacaaaatcaagatactgattggacctttgaatactcacctgaaagctttacaggaactgaattagaatatgctagagaggtttgtgatgaagtcgtagaaattttaaagcctattactagaaataaaattattattaatctccctgcaactgtagagatgtcaacaccaaatatatatggcgatcagattgaatggatgaatgagaatcttaagaatagaaatgatatctgtttaagccttcatcctcataatgatagaggtactgcagtagcagcttctgaatttggactcatggctggtgc

SEQ ID NO: 237132 - DNA, 808 bp, Unknown
  Bacterial polypeptide expressing nucleotide sequence isolated from the Sargasso Sea
ttctctgggggattttgaagcggtaactgaagtaagtaaaattttaaaaaattcaattccagcaggtctatcgagacattcaaaaaaagatatagatagatgttatgaggcattaaaacatgcgccaagatttagaattcacacatttatctcaacgagcccacttcatatgaaacataaactaaacaaaactccagaacaggtttatgattcaattaaggaacacgttacttatgctagaaaattcactgatgatgttgaatggtcatgtgaagatggcaccagaacagacatggattatatgtgcaagaccgttgaacttgcaattcaatgtggagctaaaactattaatattccagatacagttggatatacagttccatcagaatttacaaaaattattcaaacattaatgaacaaggtacccaatatagataaagcaattttatcaacacattgtcacaatgatttaggtttagcagtagcaaactctttagctggagttcaggcaggcgctagacaaattgagtgtacaattaatggaattggagagagagcaggaaatgctgcgctcgaagaagttgttatggcaatgaaaacaagaagtgatttgatgccttattcaactggaattaacacgactttattaagcaaagcttcaaaaatagtttccaatgccactggttttccagttcaatttaataaagcaatcgttggaaaaaatgcttttgcacatgaagcaggaattcatcaagatggaatgttaaaaaatagacagacttatgaaattatgacgccagaaaaagtg

SEQ ID NO: 237133 - DNA, 872 bp, Unknown
  Bacterial polypeptide expressing nucleotide sequence isolated from the Sargasso Sea
catgaagcataaacttaataaatctcctgaagaggtatatgaagcgattaaagaaaatgttacttatgcgagaaactttactgatgatgttgaatggtcttgtgaagatggaacaagaactgatatagactatatgtgcaagacagttgaacttgcaattaaatgtggagcaaaaactataaatataccagacacagttggctacacaatcccatcagaatttacaaccattattgaaacattattaaataaagttccaaatattgataaagcaattttatcaacacattgtcacaatgatttaggcttagcggtcgcgaattctttagctggtgttcaggcaggagcaagacaaattgaatgtacaataaatggtttaggagagagagctggaaatgctgcgctagaagaagttgttatggctatgaagacaagacctgatttaatgccatatgaaactggaataaatacgactcttttaagcaaagcttctaaaattgtttcaaatgctacaggatttcctgttcaatacaataaagcaatagttggaaaaaatgcttttgcacatgaagcaggaattcatcaagatggaatgttaaaaaatagacaaacttatgaaatcatgactccagaaagtgttggcgtaaaacaaacttctttagtaatgggaaaacattctggaagacacgcatttaaagataaattaaatagcttaggttatcctgatttaacagatgatatagttagtaatgcatttgcaaaatttaaagttttagcagataaaaaaaaacatgtttatgatgaggatataattgctctagtagatgatagtttaattatagataataaggttaatgcatttaatttaaaat

SEQ ID NO: 237134 - DNA, 848 bp, Unknown
  Bacterial polypeptide expressing nucleotide sequence isolated from the Sargasso Sea
aatgtacaataaatggggattaggagaaagagcaggaaatgctgctcttgaggaagttgttatggcaattaaaacaagacctgatttaatgccatatgaaactggaattaatacaatacttttaagtaaagcttcaaagattgtttcaaacgcaacaggatttcctgttcaatacaacaaagccatcgttggaaaaaatgcttttgctcatgaagcaggaattcatcaagatggaatgttaaaaaatagacaaacttacgagataatgacacctgaaagtgtaggagttaaacaaacttctttagtaatgggtaagcattcgggcagacatgcatttaaagataaattaaatagtttaggttatccagatttaactgacgatgtagtaggaaatgcatttgcaaaattcaaagtcttagcagataagaaaaaacacgtttacgatgaagatattattgccttggtggatgatagtttaattgtagataataaagtaaatgcaataactcttaaatctttaaaagtttttgctggaacaggagaaccacaaaaagcagaaatgactttggatgtttacggtgatgttaaaaatgcaacagaaactggagatggtccggtggatgcaatattcaaatgtattaaaactttatatcctcacgatgttaacttgcaactttatcaagttcatgctgttacagaaggtacagatgcacaagcgactgttagtgtaaaaattgaggaaaatggcaaaacaactgtaggtcaagcagctgatacagatactttagttgcatcagcaaatgcttacataaatgcattaaataaaatgataattaaaagagataaaa

SEQ ID NO: 237135 - DNA, 889 bp, Unknown
  Bacterial polypeptide expressing nucleotide sequence isolated from the Sargasso Sea
tatgactgaaaaaatttatatttttgatactactttaagagatggtgagcaatctccaggggcttcaatgaatttagaagaaaaaattcaaatagctgaagttttagctgatttaaaagttgatattattgaagcaggttttccaatagcttctaatggagattttgaggctgtttctgaaattagtaaaaatatcaaaggcccaactattgcaggattagctcgagcaaagttagctgatatcgaaagggcttgggaagctgtaaaattttcagattctccaaggatacataccttcattgccacaagtccaattcatatgaaatataaattaatgaaatctgaaaatgaagttttagaagcaattaaacaaactgtaacttttgcaagaaatttatgtccaaatattgaatggagctgcgaagatggaggaagatcaaaattagattttctatatcaatgtattgaattagccattaaatgtggagctactacaattaatattcctgatactgttggttatactttgcctactgagtttggttcaatatttaaatcagtaaagaataatgtaactaatatagataaagcaattttatctactcatacccataatgatttaggtttagctgttgcaaatagtatttcagcaattcaagaaggagctcgtcaagttgaatgtactattaatggattaggtgaaagagcaggaaatgctgctttagaagaaatcgtaatggctttaaaagttaaaaaagatcttattccttttcatactgatattaaaactcaatctattacaaaagcatcaaggctagtatcatctataacaggtttttctgttcaacctaataaagccatagtaggtgcaaatgcttttgctcatgaa

SEQ ID NO: 237136 - DNA, 428 bp, Unknown
  Bacterial polypeptide expressing nucleotide sequence isolated from the Sargasso Sea
tatgagcgataaagaaaaagtttatatctttgatacaacaatgagagatggtgagcagtcacctggtgcatctatgagtgttgaggaaaaaattcagatctcaagggtgtttgatgaaatgggaattgatataatcgaggcaggatttccaatttcatctcctggtgattttgaagcagtttcagaaataagtaaaagtgtgaagaattctataccttgtggtttatcaagagcattaaaaaaagatatagatgcgtgtcatgagtcacttaagtttgcaaaaagatttagaattcatacttttatctcgaccagtccagttcacatgaagcataaattagatatgaccaatgaccaagttttagatgcaattaaagaaagtgtaacttacgcaagaaagtttaccaacgatgtagagtggtcttgtg

SEQ ID NO: 237137 - DNA, 832 bp, Unknown
  Bacterial polypeptide expressing nucleotide sequence isolated from the Sargasso Sea
tatgtcaaataataaaaatagagtttatatttttgataccaccatgcgagatggtgagcaatcgcctggagcatcaatgagtcttgaagagaaaattcaaatttcaagaatatttgacgaattgggagtagacattatagaagctggatttccaattgcgtcgccgggagattttgaggcagtatctgaagttagcaaagttttaaaaaaatcaattccttgtggattatctagacataccaaaaaagatatcgatgcttgtcatgaagctttaaaatcagctaaaagatttagaattcatacttttatttctacaagtccacttcacatgaaacataaattaaataaatctccagaagaagtaattgaagcaataaaagaaaatgtaacttatgcaagaaaatttacggatgatgttgaatggtcatgcgaagatggtacgagaactgatatggattttatgtttaaagctgtcgagcttgctataaaatgtggagcaaaaactattaatattcctgatacagttggatattcagttccttcagaatttaaaaaaattatcgaagcgcttattaataaagtgccaaacatagataaagctattctttcaacacattgtcataatgacctaggtttagctgttgcaaattcattagctggagtttcagcaggagccagacaaattgagtgtacaattaatggtattggagaaagagcaggcaatgcagccctagaggaaattgttatggcaatgaaaacaagacatgatcttatgccatttaatacaggaattaacacaaagctattaagcaaagcatccaaagttgtttca

SEQ ID NO: 237138 - DNA, 811 bp, Unknown
  Bacterial polypeptide expressing nucleotide sequence isolated from the Sargasso Sea
gttgtttttgataaagataaagaaggagttaaaaaaattgcaacggatgccgcaaaattaattaaagagttatcaagtgaatataaaaatactaactggtcatttgaatactctcctgaaagtttcactggaactgagctagattatgcagtagaggtttgcgatgacgttgttgatgtattaaaagaatcttcaaataataaaattattattaatcttccagcaacagtagagatgtcaacggcaaatatatatggagatcaaatagaatggatgagtgagaactttaagaatagggagaacatatgtctttcacttcatccgcataatgatagaggtacagcaatagctgcttctgagtttggcttaatggcaggtgcagatagagttgagggtacgttatttggtaatggtgaaagaacaggaaatgtagatattgtaaccttagccctaaatatgtatagccaaggtataaatcctaatttagatttttcacaaattaataatgttatgagagaagttgaatactgtaatcagctacccgtccatcccaggcatccctatgccggagatttggtctttactgctttctcgggatcgcaccaagatgcaatcaaaaaggggttaaatgcattaagaagctctaatgacccacaatgggaagtgccttatttgccaattgatcctgcagacctggggagaacctatgaagccgtagtaagaattaattctcaatctggaaaaggaggcgttgcttttctattggaaaaagatcatggcgtgtctctccctagaaggcttcaaataagca

SEQ ID NO: 237139 - DNA, 811 bp, Unknown
  Bacterial polypeptide expressing nucleotide sequence isolated from the Sargasso Sea
gtcccaaatatcgataaagcaattttatctacgcattgtcataatgacctgggtttagcagttgcaaattctttagcaggagtacaagctggagcaagacaaatagaatgtactataaatggaattggagagagagcaggcaatgctgcattagaagaagttgttatggcgatgaaaacaagacccgatctaatgccatatgaaactggaattaacactactttattaagtaaagcttctaagatagtttcaaatgcaacaggatttccagttcaatataataaagcaatagttggcaaaaatgcttttgctcacgaagcaggcattcaccaggatggaatgttaaaaaatagacaaacttatgaaattatgacaccagaaagtgttggagttaaacaaacatctttagtgatgggaaaacattcaggaaggcacgcatttaaagataaattaataagtcttggttatgtcgacgttacagatgatgtaataggaaatgcgtttggtaaatttaaagttctagctgacaagaaaaaacatgtatacgatgaagatattattgctttagttgatgatagtttaattattgataacaaagtaaatgcaattaacttaaagtcattaaaagtttatgctggaacaggagagccacaaagggcagagatgactcttgatgtttttggcgatgtaaaacaagccacacagactggagacggacctgtcgatgcaatatttaaatgtataaaatcactatatcctcataatgttaatttacagttataccaagttcatgcagtaacagaaggaacag

SEQ ID NO: 237140 - DNA, 802 bp, Unknown
  Bacterial polypeptide expressing nucleotide sequence isolated from the Sargasso Sea
ttggttcgggatgaaatctcaagacttagtaagtcgaatattagacttcaatattcccctgaaagcttcactggtacagaattagagtttgcattagaagtgtgcgaagctgtcatggatatttggcaaccaacgcctgaaaataaagtcatcttaaatcttcctgcaacggtagagatgtcgactccaaatatttacgcagatcagatcgagtggttttctaaaaatatttctagaagagattcagttattttatctgctcattgccataatgacaggggtaccgcggtagcagcaacagaactggctataatggcaggaattgaccgcgttgagggaacgttatttggtaatggagaaagaactggaaacgtagatatcgttacattagccttgaatatgtttacgcaaggagtcgatccaaaactagaacttcaagatataaacgagatagtagaggtttttgaggaatgtaataaattacctgttcctccccgtcatccatacgcaggagagtttgtttatacagccttctctggttctcatcaggatgcgatcaataaaggtttcaaggcttatgatgatagcgatagtaaaatttggggagttccatatttacctatcgaccctaaagatgtcggaagatcttatgagtccataattagggtaaacagccagtcaggaaaaggaggagttgcttatgtcatgggaactgagtttggttttaatcttcctaaacaaatgcacccagagttttcaaaaatagttcaagcagtttgtgatgctgaaggcagagaaatca

SEQ ID NO: 237141 - DNA, 465 bp, Unknown
  Bacterial polypeptide expressing nucleotide sequence isolated from the Sargasso Sea
gttgtatatttcttccattaaaaatatttatatggctgaaaaagataaagtattcattttcgatacaactatgagagacggtgaacaatcaccaggggcctctatgagtgttgaggaaaaaattcagatatcaagagtttttgatgaaatgggaattgatattattgaggctggttttccaatatcatcaccgggtgactttgaggccgtaagcgcaataagtaaaagtgtaaaaaattcaattccttgtggtttagcaagagccacaaagaaagatatagacgcatgtcatgagtctttaaaattcgcaaaaagatttcgaattcacacatttatttcaacaagtccagttcatatgaaacataaacttaatatgacagatgaacaagttttaggcgctattaaagaaagtgttacttatgctaaaaaatttacagatgatgttgagtggtcatgtgaggatgg

SEQ ID NO: 237142 - DNA, 809 bp, Unknown
  Bacterial polypeptide expressing nucleotide sequence isolated from the Sargasso Sea
caatattgataaagcaattttatcaactcattgtcataatgatttaggttttgcagtagctaactcgttagctggagttcaagctggagcaagacaaattgaatgtacaataaatggattaggagaaagagcaggaaatgctgctcttgaggaagttgttatggcaattaaaacaagacctgatttaatgccatatgaaactagaattaatacaacacttttaagcaaagcttcaaaaattgtttcaaacgcaacaggatttcctgttcaatacaataaagccattgttggaaaaaatgcttttgctcatgaagcaggaattcatcaggatggaatgttaaaaaatagacaaacatacgagataatgacacctgaaagtgtaggggttaaacaaacgtcattagtgatgggaaagcattctggtcgacatgcatttaaagataaattaaacagcttaggctatccagatttaactgacgatgtagtaggaaatgcatttgcaaaattcaaagtcttagcagataagaaaaaacatgtttacgatgaagatattattgccttagtagatgatagtttaattgtagataataaagtaaatgcaataactcttaaatctttaaaagtatttgctggaacaggagagccacaaaaagcagaaatgactttagatgtttatggagatgtaaaacaagcttcagaaactggtgatggtccagttgatgcaatatttaaatgcattaaaactttatatcctcacgatgttaacttacaactttatcaagttcatgctgttacagaaggtacagatg

SEQ ID NO: 237143 - DNA, 886 bp, Unknown
  Bacterial polypeptide expressing nucleotide sequence isolated from the Sargasso Sea
attctttcaacgcacacacataatgatttaggcttagcaacagcaaataatgttgctgctattaaagaaggagcaagacaagttgagtgtacaataaatggaatgggcgaaagagctggaaattcatcattagaagaaatagttatgactttaaaagtaaaaaaagatctaatgccttttcatactgatattaaaacagagtctattatgaaagcttctagattagtatcatcaataactggttttccagttcaaccaaataaagcgatagtaggtgcaaatgcttttgctcacgaagcaggaatacatcaagatggtatgctcaaacattcaggaacgtatgaaattatgacgcctgaatcaataggacttaataaatcttcattagttctaggaaaacattcagggaaacatgctttttcagaaaagttaaaagaacttggttatgaagtaggagataatgctctaatggaattatttggaaggtttaaagatttagctgataagaaaaaagaaatatttgaagaagatttaattgcattagcagaagatagaacttcgtcatacgatgaacacattaaatttgtatcattagaagtaaatgctggatctgttgaaaaagctgaggcaaaattaaagatagaaattaacgagaaagtggaaaatactataattaatggtaatggccctgttgacgctacatttaatgctataaaaaaacttactaatactcaatttaaacttaaactttatcaagtaaatgcaattacggctggaactgatgcgcaaggagaggtaacggtcagacttgaagatgataatctatcatcacaagcaaaaggaagtgatcctgatattatagttgcgtctgcaaaagcttatatca

SEQ ID NO: 237144 - DNA, 406 bp, Unknown
  Bacterial polypeptide expressing nucleotide sequence isolated from the Sargasso Sea
aatgggttctttaaaagataatattatcatttttgatacaactatgagagatggtgagcagtctcctggtgcctcaatgaatcttgaggagaaattaaaaatagctgagcttttatctcaacttggggttgatgtaattgaagctggatttcctatttcttctaatggagactttgaagctgtaaacgaaatttctaagttagttaaagattctgtaatttgtggtttatctagagctagtataaaagatattgaatgtgctgcagaagcattagctcctgcaaaaatgaaaagaattcatacctttattgcaacaagtgatttacatatgaaatataaattgcaaatgactgctgatgaagttcatcaatcagtcatagaaagtgtttcatatgctagaaattta

SEQ ID NO: 237145 - DNA, 952 bp, Unknown
  Bacterial polypeptide expressing nucleotide sequence isolated from the Sargasso Sea
gcaattgcatcagagattgatgttccaactatatgctcgcttgcaagatgcaatgagagcgatatagaaaaggcttacgaagccctgaaggtaaataaaaatagaagagtccatgtctttgtagctacgagtgaaattcatctcaaacacaaactaaatatggcaaaagatgaggttcttaaagctgcttacgaaggtgtaaaaatggcgaagtcattctgtgagaatgttgagttttctcccgaggacgcttccagaactgatcatggttttctaactgaagttgtgaatgctgcaattgaagcaggtgcgacaacaatcaatgttccagatacagtgggatacaccatcccctatgagtttggtgagctatttaagcacttgatttcaaactgcaatgatgctgagaatgtgatcttcagtgtccattgtcacgatgaccttggcctttctgtagcgaatagcttggctgcagttgaatcaggagcaagacaaattgagtgcacaatcaatggcattggagagcgagctggaaatacctcacttgaagaagtatgcatggcaatcagaactagagaagagtatttcgattttaaaacatcgattgattcaacaaaattatatccaacaagcagattggtttcctctatcacggggatgcatgttcctagaaacaaagcaattgttggcgataacgcatttgcacatgaagctggtatccatcaacatggaatgcttagagattcttcaacatatgaaatcatgaagcctcaggatgttggtattgctagatcaaacctcgtccttgggaaacacagtggcagacatgcttttttagataggattgatgaactaggatttgcactcgagaaagatgagattgatccggcttttcaggaattcaagaaattggctgacaaaaagaaggagatttttgatacagacatagaag

SEQ ID NO: 237146 - DNA, 871 bp, Unknown
  Bacterial polypeptide expressing nucleotide sequence isolated from the Sargasso Sea
gcaaagtgtaaaaaactctattccttgtgggttagcaagagccactaaaaaagatatagatgcttgtcatgaatctttaaagtttgcaaaaagatttcggatacatacttttatttccacaagtccagttcacatgaaacacaagcttaacatgactgatgaacaagttttagctgcaataaaagagagtgttacttatgctagaaaattcactgatgatgtggagtggtcttgtgaagatggtacaagaactaacttagattttatgtataaaacaatcgaacttgctattaattgtggagcaaaaactataaatatccccgacacagttggttattctataccagaagaatttgcaagaaccattacttcaattaagaataatgttcccaatatcgataaagctattatctctgcacattgtcataatgatttaggtttagctgtagcaaacgcattatcggggttatctgctggagtaagacaaatagaatgtactataaatggaataggtgaaagagcaggtaatgcagctcttgaagagatagtgatggcaataaaaacaagagatgatttattaccttacgagacaggtattaaaactgaattgataagtaaagcttctaagattgtatccaatgccacaggttttccagttcaatttaataaagcgattgttggaaaaaatgcatttgctcatgagtcaggtattcatcaagacggtatgctaaaaaatagagagacatatgagataatgacacctgaaagtgttggagtaaaaaaaacatctttagtaatgggtaaacattctggcagacatgcatttaaagataaattaagtgatttaggttatgcagatgttactgatgat

SEQ ID NO: 237147 - DNA, 889 bp, Unknown
  Bacterial polypeptide expressing nucleotide sequence isolated from the Sargasso Sea
gcagaaaacgaaaattagaatttttgataccactttgcgtgatggagagcaatcacccggggcctccatgaatttatccgaaaagattcgtatcgctgaattgctggaggaaatgggtgtagatatcatcgaggccggattcccgattgcttcagagggggatttcgaatcggtaagcgaaattgcaaagatagttaaaggctcaatcgtttgtggattagcccgttctagtatgggcgatattgaacgttgtgctgaagctataaagcccgccgccaagggtcgaattcacacctttatttcgacgtctccactacacatgaaatataaattacagatgcagcctgaagacgtgtaccaagcagtaattgatagcgtgacgtatgcccgaaaatttaccgatgacgttgaatggtcttgtgaagatggatcgcgcacagaacatgattttatgtgccgtacaattgaagctgcaattaatgccggcgcgactacaatcaatattcctgacacggttggttacgccatgcccacagaatacgctgctctgatcgaaatggtaaaaaatagggtccccaatattgataaagcgataatatctgttcactgtcataatgatttgggattagctgtagctaattccttggctgcggtgcattcaggggctcgtcaggtagagtgtacaataaacggattgggtgagcgcgctggtaacgcagccatggaagaaataattatgggtttacgaactagacctgatcatttgccgttcaatgtttctgtaaaatctgaattaataacaaaagcctctaaattagtttcgacgattaccggttttgcggttcaaccaaataaagctattgttggcgctaatgcttttgcccacgaa

SEQ ID NO: 237148 - DNA, 360 bp, Unknown
  Bacterial polypeptide expressing nucleotide sequence isolated from the Sargasso Sea
aatgaaaataacagcagacaaagaccgtgtagtaatttttgacaccacactgagagatggcgaacagtcaccaggggcaactatgacccatgaggaaaaattagaaattgcagagctcctggatgaaatgggagttgatattattgaagctgggtttcctattgcatcagagggagacttcaaagcagtaagcgaaattgccaaacgtagtaaaacagctgtcatatgtggcctagcaagagctaattttggggatatcgatcgttgttgggatgccgtgaaaaactcagagaatccaagaattcatacatttattggaacttcgccattacaccgagcaataccgaatttagacaagga

SEQ ID NO: 237149 - DNA, 406 bp, Unknown
  Bacterial polypeptide expressing nucleotide sequence isolated from the Sargasso Sea
atggcagacaaactcatcattttcgacaccactttgcgtgacggtgaacagtcccccggggcttccatgaccaaagacgagaagctgcgcattgcgcgccagctggagcgtctgaaggtggacgtgatcgaagccgggtttgctgccagctcgaacggtgattttgaggcagtgcaggcgattgccaatgccatcaaggactcgaccatttgctcgctgtcccgcgccaatgaccgcgatatttcccgtgctgccgaggctctcaggggtgccaattcagcgcgcatccacactttcatcgccacgtctccgttgcacatggagaagaagctgcgcatgactccagagcaggtgctggagcaagccaagcaatgggtacgcttcgcccgcaatttggtgtccgaca

SEQ ID NO: 237150 - DNA, 283 bp, Unknown
  Bacterial polypeptide expressing nucleotide sequence isolated from the Sargasso Sea
atgtctaacagagtaattatatttgataccaccttacgtgatggcgagcaggcgttagcggcaagcctgtcggtcaaagaaaagttacagatcgccatggcgttggaacgtctcggtgtggatgtaatggaagtcgggtttcccgtgtcttcccccggtgattttgagtcggtgcagaccattgcccgtaccatcaaaaatagccgtgtgtgcgccttatcccgcgcctggaaaaagatatcgatgccgccgcccaagcattatcggttgccgaacagttccg

SEQ ID NO: 237151 - DNA, 759 bp, Unknown
  Bacterial polypeptide expressing nucleotide sequence isolated from the Sargasso Sea
tatgaagaataaatatgaaaaatacaacgcttatccaactgtaaagaacttagagcgaacatggcctaataaaactataaccagtgctccaatatggtgttcagtggatttgagagatggtaatcaagctcttattgaacctatggactctgtcagaaaaatgcgtatgtttaaacatttagttaaaataggatttaaagaaatagaaattggatttccttctgcctctgaaacagattttaattttgtaagagaattaattaccgatgatcatattccagaggacgttactgttcaggttttaactcaatctagaaaacccttaattgaaaaaactgttgaaagtttaaaagattgcaaaaatgcaataattcacctttacaattcaactagcactcttcaaagagaagttgttttcaaggaatctatggatggagtaaaaaacatagcaactgatggggccaaaattattttagatcaattatgtaaattagaaaattctaatattcgattacaatattctccagaaagttttactggaacagaattgccttatgcattagatgtttgtgagtctgttttagatatttggcaagcaagcgaaaaaaatcctgttataataaatttacctgcaactgttgaaatgtctaccccaaatatccacgcggaccaaatagaatggatgggaaataattttagtaacagaaaaagggtaattttatcccttcatcctcaccatgatcgaagtactgcatttgc

SEQ ID NO: 237152 - DNA, 649 bp, Unknown
  Bacterial polypeptide expressing nucleotide sequence isolated from the Sargasso Sea
tttacgaaaattattgaaactttgctgaataaagttccaaacatagataaagcaattctttcaacgcattgtcataatgatttaggtttggcagttgctaattctttggcaggtgttcaagcaggagctagacaaattgaatgtactataaatggccttggagaaagagctggaaatgcagctcttgaagaagttgtgatggccatgaaaacaagacctgatttaatgccatatgaaactggaattgaaactactcttctaagtaaagcatccaagatagtatcaaatgccacaggttttcctgtccaatataataaagctattgttggaaaaaatgcttttgctcatgaagcaggtattcatcaagatggaatgttaaaaaataggcaaacatatgaaattatgacaccagagagtgtaggtgttaaacaaacatctctcgtaatgggtaaacactcaggtagacatgcatttaaagataaattaaccagtttaggatatccagatcttactgatgatgttgttgataatgcatttgcaaaatttaaaatcttagcagataaaaaaaaacatgtttatgatgaagatataattgctttaatagacgatagtttaataacagacaacaaagtaagtgctatcaacttga

SEQ ID NO: 237153 - DNA, 664 bp, Unknown
  Bacterial polypeptide expressing nucleotide sequence isolated from the Sargasso Sea
gagactgttcggacactgctatcgaaaataccgaatgctgataaagcaatcttttcagtgcactgtcataacgacctcggagtcgctgttgcgaattcactcgcggctgtccgtgccggatgtcgtcaaattgagtgtacgatcaatggacttggcgagcgtgcaggaaatacgtcgcttgaagaagtcgtgatggccgtcaagacacgatctgatattgtcgatgttgaaacacatattgatacacagcatattgttcccacatcgcgattggtctcctcgattacgggatttccagtacagccaaataaggcaattgttggtgccaatgcgttcgcgcatgagtcaggcatccaccaggacggtgtgttgaagcatcgcgaaacctacgaaatcatgcgtgctgaagatgttggctggaatgcaaacaaaatggtcttgggtaaacattcgggacgtgctgctttcaaatctcgacttgacgaacttgggattattctggccgatgaccaagccttgaatgaggcctttgcacgcttcaaggacctggctgaccgaaaacatgaaatctttgacgaagacctgcaagcgttgatgaatggccagaaaatggaggctgacagtgcgcgctacgatcttgcagatctgtctgtgacatcaaaaa

SEQ ID NO: 237154 - DNA, 895 bp, Unknown
  Bacterial polypeptide expressing nucleotide sequence isolated from the Sargasso Sea
aaaaacagaataataatttttgatactacgatgcgagatggagaacagtctccaggtgcatcaatgtctcttgaagaaaaaattcaaatttctagagtttttgacgaattaggaattgatgtaatcgaagcaggttttccgattgcgtcaccaggtgattttgaagcagtaacagcaattagcaaaattttaaaaaaatcagtcccagctggattagcacgacatacaaaaaaagatatagacgcatgttatgagtcattaagatctgcaaaaagatttagaattcatacatttatttctacaagctctttacacatgaaacacaaattaaataaaacacctgagcaagtaattgactctattaaagagcatgtaacctacgcaaggaaatttacggatgatgtcgagtggtcttgtgaagatggtacaagaactgatatggattttatgtgtaaaaccgttgagcttgctatcaagtctggtgctaaaactattaatattccagatacagttggttatacagtcccatcagaatttaaaaaaattattgaaacacttaaaaataaagttccaaatatagacaaagctattctttcagtacactgtcataatgatttaggtttagcagttgctaactctttagctggggtcactgcaggtgcaagacaagtagagtgcacaataaatggtattggtgaaagagcaggtaatgcagccctagaggagatcgttatggcaatgaaaaccagaagtgacttaatgccttacaaaactggaataaatacccagcttataagcaaagcatcaaaaacagtttctaatgccactggtttcccagtgcaatttaacaaagctatagttggtaaaaatgcttttgcacatgaatctgggattc

SEQ ID NO: 237155 - DNA, 949 bp, Unknown
  Bacterial polypeptide expressing nucleotide sequence isolated from the Sargasso Sea
gtttcaaactcacttagtgcgattattggtggagcaaggcaagttgagtgtactataaacggtatcggagaaagagcaggcaatgctgcactcgaggaaattgtaatgtgtttaaaaacaagaaaagatagtcttccttattattctgatgttgacacaaaaaaaataacaaatatttctcatctagtctctactataactggtttttctgttcaaccaaataaagcaatagtcggcaaaaatgcttttgcacatgagtcaggaatacatcaagacggtatgttgaaacattcaaatacttatgaaattatgactccagaatccgtaggattgtcatcatctgaacttgttttaggaaaacattctggaaggcacgccttcaaggtaaaactaaatgaattgggatatgaatttagcgaaaataaaataaacttattatttaaaaaatttaaagaacttgcagataaaaaaaagcaggtttttgaggaggatttacttgccttagctgatgagcaacaatctatatcaaagctcaaacacatcgatcttttagatatatctattaaatgtggttctaatcaaagatctttagcgcatgtaaagctaaaatatttaaataagacgcttgaaatagagttagaaggtactggaccgatagatgctgtattcaaagcaattaaaagtttgattacaactaaagctcatttggctgtttatcaggttaacgcaattactaagggtacagatgctcaagcggaagtaagtgttaggttggaagaggatggtgttagtgttcttggaacaggaaatgatatagacactattgtagcctcaggtaaagcctatattaacggactaaataaattaattaacaagaaaagtaaagcaaaagactcaaaaaagattttaagttcttcaaatagcaccatcgacaaacatgttatataat

SEQ ID NO: 237156 - DNA, 871 bp, Unknown
  Bacterial polypeptide expressing nucleotide sequence isolated from the Sargasso Sea
tctacgagctctttacacatgaaacacaaattaaataaaacacctgagcaagtaatagactcaattaaagaacacgttacttacgcaagaaaatttactgatgacgttgagtggtcatgtgaagatggcacgagaacagatatggactttatgtgtaaaactgttgagcttgcaataaagtctggtgcgaaaacaattaatattcctgacactgttggttatacagttccatcagaatataaaaaaattattgaaacattaaaaaataaagttccaaatatagacaaagcaattctttcagtacactgtcacaatgatctaggtttagcggttgcaaactctttagctggagtaactgcaggtgcaagacaagtagaatgtacaataaatggtattggtgaaagagcaggtaatgcagccttagaagagatcgttatggcaatgaaaactagaagtgacttaatgccatataaaactggtataaatactcagctcataagcaaagcctcaaaaacagtttcaaatgctactggttttccagtgcaatttaataaagctatagttggtaaaaacgcttttgcacatgagtctggaattcaccaagacggaatgcttaaaaacagaaatacatatgaaattatgacaccagagagcgtaggtgtaaaaaaaacttcattagtaatgggcaaacactctgggagacacgcattcaaagacaaactttctgatcttggttatgctggcgttacagatgatgtgatccaaactgcttttggtaagtttaaaattttagctgataaaaagaaacatgtttacgatgaagataaaatcgcattggtagatgatagtttgatcaaagaaagcaacgtta

SEQ ID NO: 237157 - DNA, 595 bp, Unknown
  Bacterial polypeptide expressing nucleotide sequence isolated from the Sargasso Sea
tatgagcaataaagatagagtctttatatttgatactactatgcgtgatggtgagcaatcgccaggcgcatctatgagtttagaagaaaaaattcaaatcgctagagtgtttgatgaattaggtatcgatattatcgaagcaggttttccaatagcttcaccaggggattttgaagctgtttcagaagtaagtaaaattttaaaaaattctattcccgcaggactttcaagacattcagtaaaagatattgatagagcttatgaagctctaaaacatgcaccaagatttagaatacatacatttatttctacaagccctttacacatgaaacataaattaaatatgtctccagaagatgtttatgaatcaattggaaaacatgttgcttacgcaagaaagtttactgatgacgttgagtggtcatgcgaagatggaacaagaaccgatatggattacatgtgtaaaactgtagagcttgcaattaaaaatggagcaacaacaattaatattcctgatacagttggttacacaataccatctgagtttactacaattatagaaactttattaaataaagttccaaatattgataaa

SEQ ID NO: 237158 - DNA, 917 bp, Unknown
  Bacterial polypeptide expressing nucleotide sequence isolated from the Sargasso Sea
ttcgggagggtgtaagacaaatagaatgtacaattaatggaataggcgaaagagcgggaaatgctgcattagaagaagtggttatggcaatcaaaactagaaatgacttgatgccatacaatacaggcattaaaacagaattaataagcaaagcctctaaaatagtttcaaatgcaactggttttcctgttcaatttaacaaagcaatagttggaaaaaacgcttttgctcatgagtcaggaattcatcaagatggaatgttaaagaatagagaaacttatgaaataatgactccagagagcgtgggtgttaagaagacctcacttgttatgggtaaacactctggacgacatgcttttaaagataaattatctgatttaggttattcagatcttacagatgacattatccaagctgcttttggaaaatttaaagttttagctgataagaagaagcatatatacgatgaagatatagtagctttagttgatgatagtttaattgtagataataaaataaatgcaattaatttaaaatctttaaaagtttttgcagggactggtgagccacaaaaagctgaaatgacattggatgtttatggtgatattaaaaatacaactgaaacaggagatggaccagttgatgcaatatttaaatgtataaaaaaattgtttcctcatgatgtaaaattatcactttatcaagtacatgcagtaacagaaggtacagatgctcaagcaactgttagtgtaaaaatcgaagaaaatgataggacaacagtaggtcaatcagctgacacagatactttagttgcatcagcgaacgcatatttaaatgcattgaataaaatgcttataaaacgtgaaaaaaaagcaccttctcaaaatattaaacatcaaaaagtgaaaggaatataa

SEQ ID NO: 237159 - DNA, 349 bp, Unknown
  Bacterial polypeptide expressing nucleotide sequence isolated from the Sargasso Sea
tatgagcaaaaaagaaaaagtttttatatttgataccactatgcgtgatggagaacagtctccaggtgcatcaatgagtgttgaagagaaaattcaaatttccagagtatttgacgaaatgggtatagatattatagaagctggttttccaatttcatctcctggtgattttgaggcagtatctgcaataagtaagggtattaaaaattctataccttgtggattagcaagagcaatgagaaaagatattgatgcttgtcacgagtctttgaaatatgcaaaaagatttaggattcatacttttatttcaacaagccctgtacatatgaaacataaacttaatatgtca

SEQ ID NO: 237160 - DNA, 811 bp, Unknown
  Bacterial polypeptide expressing nucleotide sequence isolated from the Sargasso Sea
gatgttgagtggtcatgtgaagatggcacgagaactgatatggactatatgtgcagaactgtcgagcttgcgattaaatgtggagctaagacaataaatatcccagatacagttggctatacagttccatctgaatttacaaaaattattcaaacgttattaaataaagtaccaaatatagacaaagcaattttatctactcattgtcataatgatttaggtttggcggttgcaaattctttagcaggagttcaagctggcgctagacagattgaatgcacaatcaatggaattggagaaagagcaggtaatgccgcgcttgaagaagtagttatggcaatgaaaacaagaagtgatttaatgccttacacaactggaattaatacaactttattaagcaaagcttcaaaaatagtttctaatgcaactggttttcctgttcaatttaataaagcaattgttggaaaaaatgcttttgcacatgaagcaggaatccatcaagatggaatgctaaaaaatagaaatacttatgaaattatgacaccagaaagtgttggagtgaaacaaacctcacttgttatgggtaaacattctggaagacatgcttttaaagataaattgttaagtcttggatatgcagatttaactgatgatgttattgaaaatgcttttggcaagtttaaaattctagctgataagaaaaaacatgtctatgatgaggatatagttgcattagttgatgatagcttaattaaagaagataatgttattactttaaaatctttaaaagtttttgcaggctacaggtgaa

SEQ ID NO: 237161 - DNA, 793 bp, Unknown
  Bacterial polypeptide expressing nucleotide sequence isolated from the Sargasso Sea
tacataaacactagtgctatttcaaaaacctcaaaacttgtatcctcaattactggttttcctattcaacctaataaagcaattgttggtgctaatgctttcgctcatgagtcaggaatccatcaagatggagttttaaaaaatgttcaaacttatgagattatgtctccagagacaataggtttaaaaaaatcaagtttggttcttggcaaacactcaggaaaacatgccttcaaagaaaaacttaaaattttaggatatgaagtaggtgataattatatcaatgaaatatttgaaagatttaagcttttagcagataagaaaaaagatgtatatgatgaagatctaatagctcttgttgatgatacacattttaataaatctaacattttaaaactaaaaaatttaagtattatgtctggaactaactccaaacatgttgcatcattagaattaaattttaaaaaggaaccaaaagagataagtgggtctggaaatggtccagtagatgctgtatttagttgtatttcaaaagtagtaggtttttccccaaaattagttttgtatcacataaacgccatcactccagactctgatgcacaaggagaagttactgttaaactagagtattttaataaagaatttattggtaaggcctcagatatagatattatagttgcctctgcaaaatcttatatcaatgcatgcaataaaatattaaacttcgagaaaaactctaaaacgcaagagggagtttctgagataagcatctcaaatattaaaggaatataaa

SEQ ID NO: 237162 - DNA, 742 bp, Unknown
  Bacterial polypeptide expressing nucleotide sequence isolated from the Sargasso Sea
atgacagataaaaacagaattataatttttgatacaacaatgcgtgatggagaacagtctccgggtgcatcaatgagtttagaagaaaaattacaaatttctagagtgtttgatgagttaggagtggatatcatagaagctggttttccaatagcttcgcctggtgactttgaagctgtaactgaaataagtaaaactcttaagtgttcagtgcctgcaggattagccagagccactaaaaaagatattgacgcatgtcatcaagctttaaagcacgcaaaaaattttagaattcacacttttatatctacgagtccgcttcatatgaagcataaattaaataaatctcctgaagaagttttagaatctattaaagagagcgtgacttatgctagaaaatttacagatgatgttgaatggtcttgtgaagacggtacacgtactgatatggattacatgtgcaagacagttgaacttgcaataaaatctggagcaaaaacaattaatattccagacactgttggctacactgttccttcagaatttaaaaagattattgaaactttaataaataaagttccaaatattgataaagcaattctttctacacattgtcataatgatttaggactagcggtagcaaattcattagcaggagtgatggctggtgctagacaaattgaatgtacaattaatggcataggagaaagagctggtaatgcagcttggaagaagttgtaag

SEQ ID NO: 237163 - DNA, 349 bp, Unknown
  Bacterial polypeptide expressing nucleotide sequence isolated from the Sargasso Sea
gatgaaagataaaatcaaaatatttgatacaacattaagggatggtgagcaagtcccagggtgtaaattagaaacaaaagaaaagctaaaaatagctgaaaagctagataatttaggtgttgatattattgaagcaggcttccctgtatcaagtcctggagattttaaatcagtattagaaatttcaaaagttgttaagaatgcaagtgtctgcggtttaactcgtgctgtaaaaaatgatattgatgttgcggtagatgctttaaaatatgccaaaaaacctagattacacacgggaattggaacctctaaatctcacatacttcacaaatttaattcaactcctgaa

SEQ ID NO: 237164 - DNA, 904 bp, Unknown
  Bacterial polypeptide expressing nucleotide sequence isolated from the Sargasso Sea
aaagctgcccaagcgttagaaaaagcatctaatccaagaattcatacatttgtatctagttctgcaatacatatggaacatcagatgaggaaagacccagaagaaatcattgaaatggctgttaaagctgtatcaaaagcaaagtattatgtagatgatgttgaattttctcctatggatgccactagaactgacattgatttcttggttactttgcttgaggcaactattgacgctggagccactactataaatattcctgatactgttggttacgcagtatcaaaagaatttggcgagtcaataaaaattcttagagacaggattagaaatatcgataatgtaatagtaagcgttcattgtcataatgatttaggtcttgcagtttcaaatagtttggcggctgtagaaaacggggccagacaaattgaaggatgtataaatggattaggggaaagggcaggaaatgcagctttggaagaggtgattatgggactggaagtgagaaaagatcattttaatgtagaaactaaagtaaatacttctgaaattggtccgactagcagattagttagcaaccttttcggatttcctatgcaagcaaataaagctatcgtaggtcaaaatgcttttaggcattcttctgggattcatcaggatgcctttttaaaggataggagcacatttgaaataatggaacctgagacagttgggtggagaggcgaagctcttgttttaggaaaactctctggaagggcaggccttaaatcaagattgaatgacttaggttatgattttgataatgatcaattaaacactctatttataaaatttaaagatctcgctgatagtaaaaaagaagtaactgatgttgacttagaagcattaatattgaacaatcaag

SEQ ID NO: 237165 - DNA, 910 bp, Unknown
  Bacterial polypeptide expressing nucleotide sequence isolated from the Sargasso Sea
gctggctcggctcggcgtggatgtgatcgaggctggattccctttcgccagtcccggtgattttgccgctgtgcagcggatcgcccagcaggtcggtggggacaacggtccgattatttgcggtctggcccgggcatcgagggcagacatcaaggcctgcgccgatgcggttgcaccggcgccgcgtcgccgcattcatacctttattgccaccagcgacattcacctcgagcacaaactgcgcaaaagccgtgccgatgtgctgggcatcgttcccgagatggtgagctatgcccgctcgcttgtggaagacgttgaattctcctgtgaagacgcagggcgaagtgatccggagttcctctacgaggtgattgaggcggcgattgctgcgggtgccaccacgatcaacattcccgacaccgttggctacaccacgccgtcggagttcggtgctctgatcgcgggcatcaatcagcacgtgcccaacatcgccgatgccgtgatctcggtgcatggccacaacgatctcggtctggcggtggcgaatttcctcgaagcggtcaagaacggcgcccgtcagctcgaatgcacgatcaatggcattggcgaacgcgccggcaatgcatccctcgaggagttggtgatggcgttgcatgtgcggcgtcgctactacaacccgttcttcggacgggatgaggaaagccctacgccactgacggccgtacgcaccgaagagctgaccaagacctccaggctggtctcgaatctcaccgggatggttgttcagcccaacaaggcaatcgtcggtgcgaacgccttcgcccatgaatccggcattcaccaggacggcgtgctcaagaaccgcctgacctacgaaatcatcgatgccaagaccgtgggggttgtctga

SEQ ID NO: 237166 - DNA, 874 bp, Unknown
  Bacterial polypeptide expressing nucleotide sequence isolated from the Sargasso Sea
actattaatggtttaggagaaagagcaggaaatacctctctagaagaagtagtcatgacattaaaggttaaaaaagacttaattccttatcatacaaatgtaaaaagtgaatatataacaaaagcttcaagactagtatcatctattactggtttttctgtgcaaccaaataaagcgatagtaggagctaatgcatttgcccatgaagctggaatacatcaagatgggatgttaaaaaattctgaaacttatgaaattatgactcctgaatcagtaggtttgacaaaatcatctttggttttaggcaaacattcaggaaagcatgccttttctgaaaaattaaaagaacttggatatgattttggagataatgctttaatggagctatttggtagatttaaagatttagcggataagaaaaaagaaatttttgatgaggatttaattgctttagctggagagagatcatcgtcatatgatgaacatattaaatttgtatcacttaaagtgaatgctggatcccttgaaaaacatgaggctatattgtcattagaaatcgataatgaaaaaaaacaaaaaaaatcaatgggcaatggacctgtagatgctacatttaatgctattaaggatttaacgaatacaaaatttagattaaaattgtaccaagtacatgctattacagaaggtacagatgctcaaggagaagtaactgttagattggaagatgataccttatcttcacaggctaaaggttcagatcctgatataatagttgcatctgctaaagcatatattaattctttaaataggttaatttttaaaaaatctaaatctattgcaaatgaagtttcggaacttaaaattaaaggagtta

SEQ ID NO: 237167 - DNA, 869 bp, Unknown
  Bacterial polypeptide expressing nucleotide sequence isolated from the Sargasso Sea
tcatctccaggtgattttgaggctgtaagcgcaattagtaaaagcgttaaaaattctattccttgtggattagcaagagctactaaaaaagatattgatgcatgttatgagtcattaaagtttgcaaaaagatttcgtattcatacttttatttcaactagtcctgttcatatgaagcataaacttaatatgaccaacgatcaagtattaggggccataaaagagagcgtcacttatgcaaagaaatttactgatgatgtagaatggtcgtgtgaggatggaacaagaacagatttagattttatgtataaaactatagaattagctattaactgtggtgcaactactattaatattccagatactgtaggttattctatacctgaagaatttgcaaaaaaaattgagtcaataaaaaataatgtgccaaacattgacaaagcaattatttctgcccactgtcataatgatcttggattagcagttgctaatgcattatctggtttatccgcaggtgtaagacaaattgaatgtacaataaatggtattggtgaaagagcaggtaatgcagcacttgaagaaattgtaatggcaattaaaacaagagatgatttattaccttatgaaactggaataaagactgaattaattagtaaagcttcaaaaatagtttctaatgctactggttttccagttcaatataataaagcaatagtcggaaaaaatgcttttgcacatgagtctggcatacatcaagacggaatgcttaaaaatagagaaacttatgagataatgactccagaaagcgtgggtgttaaaaagacatctttagttatgggcaagcactcaggaagacatgcgtttaaaga

SEQ ID NO: 237168 - DNA, 949 bp, Unknown
  Bacterial polypeptide expressing nucleotide sequence isolated from the Sargasso Sea
caatgtggagcaaaaactattaatattccagatacagttggctacactgtgccatcagaatttacaaaaattattgaaactttaaaaaataaagttccaaatatagataaagcaattttatctacacattgtcataatgatctaggtttagctgttgctaattctttagcaggtgttcaagctggtgcaagacaaatagaatgtactataaatggaataggagaaagagcgggcaatgctgctttagaagaagtagtgatggcaatgaaaacaagaccagacttgatgccatatgaaactggaatcaatacaacattattaagcaaagcttcaaaaattgtttcaaatgcaacaggatttcctgttcaatataacaaagcaatagttggaaaaaacgcttttgcgcatgagtcaggaattcatcaagatgggatgctaaaaaatagacaaacctatgaaattatgactccagagagcgttggggtaaaacaaacatctttggtaatgggtaaacactctggaagacatgcattcaaagataagttaattagcttaggctacgtagatgttacagatgatgtaatagaaaatgcatttggtaaatttaaaattttagcagataaaaaaaaacatgtttatgacgaagatataattgcattagttgatgatagcttaataattgataataaagttaatgcaattaaccttaaatcattaaaagtatttgctggaacaggagaaccccaaagagctgagatgactttagatgtttttggtgaagttaaaaaagcatctgaaactggggatggacccgtagatgcaatatttaaatgtattaagaaactttaccctcacgatgtaaagttacagctttaccaagttcatgccgtaacagaaggaaccgatgcccaagcaactgtaagcgttcgaattgaggaaaatggaaaaa

SEQ ID NO: 237169 - DNA, 844 bp, Unknown
  Bacterial polypeptide expressing nucleotide sequence isolated from the Sargasso Sea
tttagaggaaaaaattcaaatcgctagagtgtttgatgaattaggtatcgatataattgaagcaggttttcctatagcttcaccaggggattttgaagctgtttcagaagtaagtaaaattttaaaaaattctattcctgcaggactttctagacactcagtaaaagatattgatagagcttatgaagctctaaaacatgcaccaagatttagaatacatacatttatttctaccagcccattacatatgaaacataagttgaatatgtctccagaagatgtttatgaatcaataagaaaacatgttgcttatgcaagaaagtttactgatgacgttgagtggtcttgcgaagatggaacaagaactgatatggattacatgtgtaaaactgtagagcttgcaattaaaaatggagctaaaacaattaatattcctgatacagttggctacacaataccatctgaatttactaaaattatagaaactttattaaataaagttccaaatattgacaaagcgattttatcaactcattgccataatgatttaggtttagcagtagctaactcattagctggagttcaagctggagcaaggcaaattgaatgtacgatcaatggattaggagaaagagcaggcaacgctgctcttgaggaggtcgtgatggcaattaaaacaagacctgatctaatgccatacgaaactggaattaatacgacacttttaagtaaagcctcaaaaattgtttcaaacgcaactggattccctgttcaatataataaagctatcgttggaaaaatgcctttgctcatgaagcaggaattcatcaggatggaaggttaa

SEQ ID NO: 237170 - DNA, 832 bp, Unknown
  Bacterial polypeptide expressing nucleotide sequence isolated from the Sargasso Sea
ttcgcccggtgattttgaagcagtatctgctattagcaaaatattaaaaaaatcagttcccgcaggattatctagacacacaaaaaaagatattgatgcttgttacgatgctctaaaatctgcaaaaagatttagaattcatacatttatatctacaagttcattacatatgaaacacaaattaaacaaaactcctgagcaagtaattgagtcaattaaagagcacgttacatatgcaagaaaattcactgatgatgtcgaatggtcttgcgaagatggtactagaactgatatggattttatgtgcaagacagttgaacttgcaattaagtgcggtgctaaaacaataaatattccagatacagttggttatacagttccatcagaattcaaaaaaattatagagactttaaaaaataaagttccaaatatagataaagcagtactgtctgttcattgtcacaacgatctaggtctagcagtggcaaattctttagctggagtttctgcaggtgcgagacaagttgagtgcacaataaatgggatcggtgaaagagcaggtaatgctgctctagaagaaattgttatggcaatgaaaacaagagctgatttaatgccatttaaaacgggcataaatactaaattaataagcaaagcatccaaaactgtttcaaatgccactggttttccagtgcaatttaataaagcaattgttggaaaaaatgcttttgcacatgaatcaggcatccatcaggatggtatgttaaaaaatagaaatacttatgaaattatgacaccagagagcgttggagtaaaaaaaacttctttagtt

SEQ ID NO: 237171 - DNA, 875 bp, Unknown
  Bacterial polypeptide expressing nucleotide sequence isolated from the Sargasso Sea
agtccattacacatgaagcataaactaaataaatcgtcggaagaagtttatgagtcgattaaagaacacgtaacttatgcaagaaaatttactgatgatgttgagtggtcatgtgaagatggaacaagaacagatatggattatatgtgtaaaacagttgagttagcaattaaatgtggtgcaaaaacaataaatattcctgatacagttggttatacagttccttcagaatttacaaaaattattaatactttaatgaataaagttccaaatatagataaggcaattttatctacacattgtcataatgatttaggcttagctgttgcgaattcattagctggggtacaagcaggagcaagacaaatagaatgtacaataaatggtattggcgaaagagcaggaaatgcagctttagaagaagtagtaatggcaatgaaaactagaaatgatttaatgccatacaaaactggaattaatacaactcttttaagtaaagcttcaaaagtggtttctaatgcaacaggttttcctgttcaatttaacaaagcaatagttggaaagaatgcatttgctcatgagtcaggtattcatcaagatggaatgcttaaaaatagaaatacatatgagattatgacaccagaaagtgtcggtgttaaacagacctcattagttatgggaaaacattctgggagacatgcatttaaagataaattgaatagcttagggtatgttgatgtcacagatgacgttatagagaatgcttttggaaagtttaaagttttagcagataaaaaaaaacatatttatgatgaagatataattgctttagttgacgatagcctaatcatagacaataaagtaaatgcaataaa

SEQ ID NO: 237172 - DNA, 949 bp, Unknown
  Bacterial polypeptide expressing nucleotide sequence isolated from the Sargasso Sea
agttggtaacacaataccttcagaatttactacaatcatagaaactttattaaataaagttccaaatatagataaagcaattttatctacgcattgtcataatgatttaggtttagctgttgcaaattctttagcaggagtacaagcaggtgctagacaagttgaatgcactataaatggcttaggtgagagagcaggtaatgctgctttagaagaaattgtaatggcaattaaaacaagaccagatttaatgccatatgaaactggaataaatacaaaacttttgagtaaagcttcaaaaattgtttcaaatgcaactggatttcctgttcaatataataaagcaattgtcgggaaaaatgcttttgcccatgaagccggtattcaccaagatggaatgttaaaaaatagacaaacatatgaaatcatgacaccagaaagtgtaggtgtaaaacaaacttcattagttatgggtaaacattcaggaagacatgcatttaaagataaattaaatagcttgggttaccctgatttaactgatgatattattagtaacgcttttgcaaagtttaaagttttagcagataagaaaaaacatgtttatgatgaagatattattgcactaatcgatgacagtttgattattgataacaaagttaatgcaattaatctaaaatcattaaaggtttatgcgggaacaggtgaaccacaaaaagcagaaatgactttagatgtttatggagatgtaaaacaagcgactgagacaggagatggtccagttgatgctatttttaaatgtataaaaattctttaccctcatgatgtgaatctacaactttatcaagttcatgctgtaactgagggaactgacgcacaagctactgtgagtgttaaaattgaagaaaatggaaaaacaactgttggtcaagcagctgacacggatacatta

SEQ ID NO: 237173 - DNA, 709 bp, Unknown
  Bacterial polypeptide expressing nucleotide sequence isolated from the Sargasso Sea
atggaagataaaaacagaataataatatttgatacaactatgcgggatggagaacagtctccaggcgcatccatgagtcttgaagaaaagattcaaatatcaagagtatttgatgaattaggaattgatattgtcgaagcagggtttccaattgcttcaccaggtgattttgaatcggttaccgctataagtaaaatcttaaaaaaatcaatacccgcaggtttagccagacatacaaaaaaagatatagatgcatgctatgaagcgttaagatctgcaaaaaaatttagaatacacactttcatctctactagttctttacatatgaagcataaattgaataagactcccgagcaggttattgagtcgataaaagaacacgtcacgtatgccagaaaatttaccgacgatgtggagtggtcatgtgaagatggaacaagaaccgacatggattttatgtgtaagacagtcgagcttgctataaaatgtggagcaaaaacaataaatattccagatacggttggttacacagtcccatctgaatttaaaaagattatagaaactttaaaaaataaagttcctaatattgataaagcaatattatctgtacattgtcataatgatttaggtctagcagtagcaaactcattagcaggtgtttatgctggagcaagacaagtagagtgtacaataaatggaattggtgaaa

SEQ ID NO: 237174 - DNA, 964 bp, Unknown
  Bacterial polypeptide expressing nucleotide sequence isolated from the Sargasso Sea
agtcgccagcctagcaagagttgttgagaaagatattgataaagcggctcaagctttagaaaaagcaatggacccaagaattcatacctttgtttctagttcagcaatccacatggaacatcaaatgcgaaaagatcctgaagaaattattgaaatggctgttaaagcagtatcaagagcaaaaaagtatgtagatgatgttgaattttcccctatggatgccactagaacagatatggattttttgattactttacttgaagaaacaatcagtgctggtgccacaactatcaacataccagatacagttgggtactccgtttcaaaagaatttggtgaatcaattaaattgataataaataaagttaagaacattgatggtgtaattgtaagcgttcattgtcacaacgacttgggtttggcagtttcaaatagtttgtctgctgttgaaaatggagcaaggcaaattgaagggtgcataaatggtcttggagaaagagcaggcaatgcggctttagaagaagtgataatgggccttgaagtaagaaaagaccattttaatcttaaaactagggttaatacttcagagattgggcctactagtagaatggtaagtaatatatttgggtttccaatgcaggcaaataaagctattgttgggcagaatgcatttaggcattcatccggaatacatcaagatgcatttttaaaagataaaagcacttttgaaataatggaacccgaaacagttggctggaggggagaagccttagttcttggaaaattatctggaagagcaggccttaaatctagattgaaagaccttggttatgattttgatgaagatcagttaaactcacttttcataaaattcaaagatcttgctgatagtaaaaaagaagttactgatatggatttggaatcaattattcttgaacattctaggtcagataaaaataagcaa

SEQ ID NO: 237175 - DNA, 615 bp, Unknown
  Bacterial polypeptide expressing nucleotide sequence isolated from the Sargasso Sea
catgagtaaaaaagatagagttattatatttgatacaacgatgcgtgatggtgagcaatcgccaggtgcttctatgagtttagaagagaaaattcagatagctagagtatttgatgaattaggtatagatattatagaagctggatttcctatcgcttcaccaggagattttgaggctgtttcagaagtaagtaaaattttaaaaaactctattcctgcaggactttcaagacattcaattaaagatattgatagagcttatgaagcattaaaacacgctccaagatttagaatacatacttttatttcaacaagtccattacacatgaaacacaaactcaatatgtcaccagaggatgtttacgagtcaattggtaaacatgttacttatgcaagaaaatttactgatgatgttgaatggtcatgtgaagatggaacaagaacagatatggattacatgtgtagaactgtagaacttgctattaaaaatggagcgacaacaattaatattccagatactgttggttatacaattccttcagagtttacaactattattgagaccctattaaataaagtaccaaatatagataaagcaatattatcaactcattg

SEQ ID NO: 237176 - DNA, 209 bp, Unknown
  Bacterial polypeptide expressing nucleotide sequence isolated from the Sargasso Sea
aatgagtgacgataaattagtcatattcgatacaactctgagagacggagaacaaagccctggtattgctctcaccccatcagaaaaattattaattgctcaacaacttgaaaaattgaaagtagatgttattgaggcgggttttgctgcttcatctcctggagattgggaaggtgtcaatctaattgcaaaaaatataaagaattcaa

SEQ ID NO: 237177 - DNA, 589 bp, Unknown
  Bacterial polypeptide expressing nucleotide sequence isolated from the Sargasso Sea
atgaccgataaaaatagagtatttatatttgatacaacaatgcgcgatggagaacagtctccaggcgcctcaatgagcctagaagaaaaaatacaaattgctagagtatttgacgagcttggagttgacattatcgaggctggctttcctattgcttctcctggagatttcgaagcggtaacagaggtaagtaaaatattaaaaaattcaattccagctggtctagcaagacattccaaaaaagatatcgacagatgccatgaagcattaaagcatgcaccaagatttagaattcatacttttatttcaacaagccctctacacatgaagcataaactgaataagacacctgaacaagtttacgaatctataaaagaacatgtgtcttacgcacgaaagtttaccgatgatgtagagtggtcatgtgaagacgggacaagaacagatatggactatatgtgcaaaacagtcgaacttgcaattaaatgtggagcaaaaacgataaatattcctgatacagtaggatatacagttccatctgaatttacaaaaattattcaaaatcttttaaataaagttcctaatattg

SEQ ID NO: 237178 - DNA, 838 bp, Unknown
  Bacterial polypeptide expressing nucleotide sequence isolated from the Sargasso Sea
gcagctcttgaagaagttgttatggctatgagaacgagaaatgatttaatgccttatactacaaatattaataccaaacttttaagcaaagcatctaaagtagtctctaatgcaacaggttttccagttcaatttaacaaagcagtagttggaaaaaacgcatttgcccatgaatcaggtattcatcaagatggaatgcttaaaaatagaaacacttatgagattatgacaccagaaagtgtaggagtgcataaaacttctttagttatgggtaaacactcaggtcgtcatgcattcaaagataaactaaatgacctaggttacgtcggagtaactgacgatgtgattcaaactgcttttggtaaatttaaagttttagcagataaaaaaaaacacatttatgatgaagatattgctgcaatcgtggatgatagtttagtaactgaagataatgtaattaaattaaaatctcttaaggtctttgctggaacaggcgaacctcaaaaagcagaaatgactttagaggtttttggagaagtaaagaatgcttcggagacaggtgacggaccagttgatgctatatttaaatgtattaaaaaactttatcctcacgaagttaaacttttattatacaatgttcatgctgttacagaaggtacagatgctcaagcaactgtgagtgttagaatagaagaaaaaggaaaaactacagtaggtcaagcagcagacacagatactttagtagcatctgctaatgcatatttaagtgcattaaataaattaattattaaaagagaaaaaacagcgccagaccctagtttgagcgcacaaatataag

SEQ ID NO: 237179 - DNA, 764 bp, Unknown
  Bacterial polypeptide expressing nucleotide sequence isolated from the Sargasso Sea
tatgagtgatagagtatacatttttgatacaaccctaagagacggagagcaatctcctggagctactatgaatttggatgaaaagatgcaaattgctcaacttttagaggagatgcaagttgatattattgaagctggttttccaatagcttctaatggagattttgatgcagtaactgaaataagtaaaaatattaaaaattcaactattactggacttgcaagagcaaaactgtctgatatcgacagagcatgggaagcagtaaagcatgctaactctccacgaatacacacatttattgcaactagtcccattcacatgaaatacaaattaaagaagaccgaacaagaagttttggatgctattaaacacacagttactcatgcaagaaatttatgcgataatattgagtggagttgcgaagatggaggaagatctaatttagaatttttatataaatgtattgaacttgctattacttcaggagcttcaacaattaatattcctgatactgttggatttactttaccttctgagtttggtttaatttttaaggctgtaaaaaataatgtacctaatatagataaagcaattttatcaacacatactcataatgacttaggtttagctgtcgcaaatagtgttgcggcaatacaagaaggagctagggcagttgagtgcacaataaatggacttggagaaagggctggtaatgcagctcttgaagaggtggttatgactttaaagggtaaaaaagacttaa

SEQ ID NO: 237180 - DNA, 713 bp, Unknown
  Bacterial polypeptide expressing nucleotide sequence isolated from the Sargasso Sea
tgaggcaggttttcctatagcttccccaggagattttgaggctgtatcagaggtaagtaaaattttaaaaaattctattcctgcaggactttcaagacattcagtaaaagatattgatagagctcatgaagctttgaaacacgcgccaagatttagaattcatacatttatttctacaagtccactacacatgaaacataaattgaatatgtctccagaggatgtctatgagtcaattggaaaacatgttgcttatgcaagaaagtttactgatgatgttgagtggtcttgcgaagatggaacaagaactgatatggattatatgtgtaaaactgtagaacttgcaattaaaaatggagctactacaattaatattccagacacagttggttatacaataccatctgaatttacttcaattattgaaactttattaaataaagtcccaaatatagataaagcaattctatcaactcattgtcataatgatttaggtttagctgtggctaactctttagctggagtacaggctggagcaagacaaattgaatgtacaattaatggtttaggagaaagagcaggaaatgctgcacttgaagaggtagtgatggcgattaaaacaagacctgatttaatgccttatgaaactggaattaatacaactcttttgagtaaagcttctaaaattgtttcaaatgcaacagggtttcctg

SEQ ID NO: 237181 - DNA, 846 bp, Unknown
  Bacterial polypeptide expressing nucleotide sequence isolated from the Sargasso Sea
tgtgataatattgagtggagttgtgaagatggtggaaggtcagagttagaatttttatatcaatgtattgagcttgctattaactctggtgcttcaactattaatatccctgatactgttggttatacactaccagaagagtttggtaaaattttcaaaaatgtaaaaaataatgttccaaatattgataaagcaattctttctactcatacacataatgatttaggtttagcgaccgcaaataatgttgccgctatcaaagaaggtgcaaggcaagttgagtgcacaattaatggtatgggtgaaagagctggaaactcatcattagaagaaatagtcatgactttaaaagtaaaaaaagatctaatgccttttcatacagatattaaaacagagtccattatgaaagcctctagattagtatcatcaataacaggctttccagttcaaccaaataaagcaatagttggtgcaaatgcttttgctcacgaagcaggaatacatcaagatggtatgctcaaacatgctggaacctatgaaattatgacacctgagtctatagggcttaataaatcctcactagttcttggaaaacattcaggtaaacatgctttttcagaaaagttaaaagaacttggttatgaagtaggtgataatgctttaatggaattatttggaagatttaaagatttagcagataagaaaaaagaaatatttgaagaagatttaattgcgttagcggaagatagaacatcgtcatacgatgaacacattaaatttgtatctctagaagtaaatgctggatctgttgaaaaagctgaggctaaattaaagattgaaattaac

SEQ ID NO: 237182 - DNA, 934 bp, Unknown
  Bacterial polypeptide expressing nucleotide sequence isolated from the Sargasso Sea
aagttccaatatagataaagcaattttatcaactcattgtcacaatgatttaggcttagcggtggctaattcattagctggagttcaagctggagcaagacaaattgaatgtacaataaacggattaggagaaagagcaggaaatgcagctcttgaggaagttgttatggcgattaaaacaagacctgatttaatgccatacgaaactggaattaatacaaaacttttaagcaaagcttcaaaaattgtttcaaacgcaacaggatttcctgttcaatataataaagctatcgttggaaaaaatgcttttgctcatgaagcaggaattcatcaggatggaatgttaaaaaatagacaaacatatgaaataatgacacctgaaagtgtaggagttaagcaaacatcattagtaatgggcaaacattcaggaagacatgcttttaaagataaaatgaatagtttaggctatcctaatcttactgatgacgttgtcagtaatgcatttgctaaatttaaagttctagcggataaaaaaaagcatgtttatgatgaagatattattgctttagtagatgatagtttaattgttaataacaaggtaaatgcaataagtttaaaatcattaaaagtttttgcaggaacaggagaaccacaaaaagcagaaatgactttagatgtttatggagatataaaacaagcttcggaaacaggtgatggtccggttgatgcaatattcaaatgcattaaaactctctatccgcacgatgttaatttgcaactttatcaagttcatgctgttacagaaggaacagatgcacaagcaactgtaagtgttaaaattgaggaaaaaggaaaaactactgttgggcaagcagctgatacagatacattagttgcatcagcaaatgcttatattaatgcattaaataaatga

SEQ ID NO: 237183 - DNA, 700 bp, Unknown
  Bacterial polypeptide expressing nucleotide sequence isolated from the Sargasso Sea
tttgcgagatggaaatcagtcattaattgagccaatggatactccgaaaaaattaaagctttttaaaactttagtatctatgggctttaaggaaatagagattggttttcctgctgcctcagaaacagattataacttttgtcgatatttaattgaaaataaactgatccctaatgatgttacaattcaagttcttactcaagctagagagcaccttatagataatacttttgaggccttgataggttgcaattcagctattgttcacctttataactcagtttctacacttcaacgaagggtagtatttaaacaagatagaataggcgtgaaaaatatagcattagatggtgcaaaatatattttaaataaacttgataaatttgatcaaggtgtaataaagttacaatattcgcctgaaagttttactggaactgagctcgactatgctttagaagtttgtgaagaggtattagattgctggaaggcaaatcaaaaaaatccagttatcattaaccttcctgctactgttgaaatgtcgactccaaatatatatgcagaccaaatagagtggatgagcaacaacttctcaaatagagatagagtaattctatcactgcatcctcacaatgatagaggtactggagttgctgcaactgaattagctctcatggctggggctgatagagttgaagggaca

SEQ ID NO: 237184 - DNA, 399 bp, Unknown
  Bacterial polypeptide expressing nucleotide sequence isolated from the Sargasso Sea
gatgaacaaaaataatttaataatttttgatactacactaagagatggagagcagagcccgggagcttcaatggatatgcacgaaaaattacagatagctcatacactagaagagctaaatgttgatgtaattgaggcaggatttcctatagcaagtgcaggagatttcgaatctgtatcagaaattgctaattcgattaaacagtcttctgtttgtgctcttgcaagagctcttgacaaagatattgatagagctgctgaggcacttaaaaattcttcaaaaccaaggatacacacatttattgcaacatcacctattcatatggaaaaaaagcttaggatgtctcctaatgaagtaattacttcagcgacaaaggctattaatctagccaaggaatt

SEQ ID NO: 237185 - DNA, 793 bp, Unknown
  Bacterial polypeptide expressing nucleotide sequence isolated from the Sargasso Sea
atggataaccctacagacaaatattcaccttttaagccaattgatcttaaagatcgaaagtggcctaatcaacttattaataaaacaccaatttggtgttcagtagatttaagagatggcaaccaagctctcattgaacctatgggttcagatagaaaaaataggatgttcgatttgttatgtaacttgggttttaaagaaatagaggtaggattcccatcagcctccaaaactgattttgattttgtgagaaaccttattgaaaacaaaaaaattccttctgatgtaaatatacaggttttaactcaggcaagagaggaattaataattaaaacttttgaatcgcttgatggtgcttcaaaaggaattattcacttctataattctacgtcaactttacaaagaaaagttgtttttggacaagataaaaaaggtataaagaaaattgcaactgatgctgcaacattaattagagatctagcgataaaaaaatctcaaactgaatggacttttgaatattctccagaaagttttactggtacggaattagattttgctagcgaagtgtgtgatgaggttgtagatatattagaaagcgccactaaaaacaaaataattatcaatctgcctgcaacagtagaaatgtcaacgccaaatatatatggtgatcagattgagtggatgcataataatttaaaaaatagagaaaatatttgtcttagtcttcatcctcataatgatagagggactgctgttgctgcaactagaatttggactgatggctggagctaga

SEQ ID NO: 237186 - DNA, 853 bp, Unknown
  Bacterial polypeptide expressing nucleotide sequence isolated from the Sargasso Sea
atgaaaaaccaagtcaaaatatttgatactacgttaagagacggtgagcaggtaccaggatgcaagcttgatacgaaaagtaaactaattttagctgaaaaaattgatatgctaggtgtcgatattattgaagctggttttcctatttccagtcctggagatttcaaatcggtagttgaaatttcaaagataatagagaatgcatctgtttgcgctctcagtcgcgctaatgaaaaagatatagatgttgctgccgaatcacttaaatatgcaaaaaaaccaaggatccatactggaattggaacatctgaaattcatatcaaacataaatttaattcaaataaagactctattattgatcttgcaaaaaaagcagtttctcacgcaaaaaaatatgtagaggatattgaattttatgctgaagatgctggcagaacagaaaatgattttcttgcaaaagtatgtgaggaggttataaaatctggtgcaactgtcttaaatattcctgacacaactggttattgcctaccaagtgaatatggtgaaaaaataaaatatttagttgaaaatgttaagggtgtagataaagttacgatttcatgtcactgtcacaacgatttaggattagcaacagcaaattcaatttatggagttttaaatggtgctagacaagttgaatgtacaataaacggcattggagaaagagctgggaatacatctctcgaagaggttgtaatgattcttagacagcattcagacttgaacttagatacaaatataaattctaaactcttaaatgtaacaagtcagaaggtttcagagcttatgggaatgcctgtgcaaccccaataaa

SEQ ID NO: 237187 - DNA, 721 bp, Unknown
  Bacterial polypeptide expressing nucleotide sequence isolated from the Sargasso Sea
aaagttccaaacatagataaagcgattctttcaactcattgtcataacgatttaggtttggcagttgccaattctttggcaggcgttcaagcaggagctagacaaattgaatgtactataaatggcctaggagaaagagctggaaatgcagctcttgaagaagttgtgatggctatgaaaacaagacctgatttaatgccatatgaaactggaattgaaactactcttctaagtaaagcatccaagatagtatcaaatgccacaggttttcctgtccaatataataaagctattgttggaaaaaatgcttttgctcacgaagcaggcattcatcaagatggaatgttaaaaaataggcaaacatatgaaattatgacaccagagagtgtaggtgttaaacaaacatctcttgtaatgggcaaacattcaggaagacacgcatttaaagataagttaactagcttaggatacccagatctcactgatgatgttgtagataatgcatttgcaaaatttaaaattttagcagataaaaagaaacatgtttatgatgaagatataatcgctttaatagatgatagtttaataacagacaataaagtaagtgctattaatttaaagtctttgaaagtatttgctggtacaggagaaccccaaagagcagaaatgacactagatgtttttggtgaagttaaaaaagcatcagaaacaggcgatggac

SEQ ID NO: 237188 - DNA, 670 bp, Unknown
  Bacterial polypeptide expressing nucleotide sequence isolated from the Sargasso Sea
tatggaaaagataaagttcttagatactactcttcgtgatggagagcagtcccccggatgttcaatgtcagcaagtgaaaaacttacccttgcaaagcaactggagcgtctcggtgtaaatacgattgaagccggatttgcagcttcatcaccgggtgactttaatagtgtacgggatatagggcaacaaattcagaactcaacggttgtttcattgtgtcgtgcttcaaaaaatgatattgactctgcagttgacgctttaagagatgcaaaaaactggggtatccacactttcatttccaccagtgatctgcatatgaagcacaaattacagatggattccaaagaagtaaaaagtttggcggtcgcagcagttgaaagagcaaaaaaaagcacagagaatgtggaattcagtcctgaagacgcaacacgtagtaaccctgaatttctagtggaaatactgtctgaggtagtaagagcaggggcaactattctaaacattcctgacaccgtcggttacactactcctgatgaaatgtttgagttaataacaaggttactaaatgaggtttacaatgccgaaaaggtagttttttccgtgcactgccataacgatttaggacttggtgtagcaaactcccttgcagcagtgcgagctggtgcaagacag

SEQ ID NO: 237189 - DNA, 484 bp, Unknown
  Bacterial polypeptide expressing nucleotide sequence isolated from the Sargasso Sea
atgaatcacagcacccatccagaaaaaattacaatattcgacactacgctgcgtgacggtgaacaatcgcctggtgcgtcgatgaatcttgatgaaaagttacgtatagctgagttattggaagagatgggcgtcgacgtaatcgaggcgggatttccggttgcctctaacggtgattttgaagctgttaatgaagtttcaaaacttattaagagttcaatagtctgcggtcttgcgcggtctggtcgtggagatattcaacgtgccgctgaagctttaaaaccctctgccagaaaccgcattcacacttttatttccactagtcctttacacatgaaatataaactgcaaatggagcctgatgacgtttatgaggcagtgattgaaagtgtaacttacgcacggaacttcaccgatgatgtggagtggtcacccgaagatggtagtcgaagtgaaccagattttctttgcccgatgcgttgag

SEQ ID NO: 237190 - DNA, 523 bp, Unknown
  Bacterial polypeptide expressing nucleotide sequence isolated from the Sargasso Sea
tatccctgatacggtaggttacactgttccttcagagtttaaaaaaattatcgaaaccttaattaataaagttccaaatatagataaggccatactttctactcattgtcataacgacttaggtttagcagttgcaaattcattagcaggagtaatggctggagccagacaaattgaatgtactttcaacggtataggagaaagagctggtaacgcagctcttgaagaagttgtaatggctatgagaactagacatgatctaatgccgtacacaacaaatattaaccccaaacttttaagtaaagcctcaaaggtagtttctaacgctacaggttttcctgttcagtttaacaaagctgttgttggaaaaaatgcttttgcacacgaatcaggaattcatcaggatggaatgctaaagaatagaaatacttatgaaataatgacaccagaaagtgtaggagttcataaaacatcattagtaatgggaaaaccttctggtaggcccgcttttaaagataaatta

SEQ ID NO: 237191 - DNA, 540 bp, Unknown
  Bacterial polypeptide expressing nucleotide sequence isolated from the Sargasso Sea
ggaggtggggttcccggtctcctcccccggcgactttcaatcggtgcagaccatcgcccgccatatcaaactgagccgggtctgtgccctcgcccgagccctgcccaaggacatcgacgccgccggcgaagccttgcgggtcgccgaagcgtttcgcatccacaccttcatctccacctcctccatccacgtcgagagcaagctgaagaagagcttcgaagacgtgctggagatgggggtcaatgccatcaagcatgcccgccgctacacagacgacgtggagttctcctgcgaggatgcgggccgcaccccgatagacaacctgtgccgcatggtggaggccgccatcaaggccggtgcccgcaccatcaatattccggataccgtcggctacacggtaccgaccgagttctccggcatcatccagaccctgttcaaccgggtacccaacatcgatcaggccatcatctcggtacactgccacgacgatctgggcctctcggtggccaactccatcggcgccgcccggatggtgagcta

SEQ ID NO: 237192 - DNA, 938 bp, Unknown
  Bacterial polypeptide expressing nucleotide sequence isolated from the Sargasso Sea
gaagcataaattaaataaatcaccagaagaagtttatgaatccataaaagagcacgttgcatatgctcgaaatctaactgacgatgttgagtggtcatgtgaggatggaacaagaactgatatggattatatgtgtaaaacagttgaacttgcaattagttgcggagctaaaacaataaatattcctgataccgtaggttatacagtaccatcagaatttacaaaaattatagaaactttaataaacaaagtaccaaatattgataaagctattttatctacacactgtcacaatgaccttggattagcagtagcaaactcacttgctggagttcaagcaggagcaagacaaattgaatgtacaattaatggaataggggaaagagcgggtaacgcagcattagaagaagtagtcatggcaatgaagactagaagtgatttaatgccttattcgacaggaattaatacaacattgctaagcaaagcttcaaaaatagtttccaatgcaactggctttccagttcaatttaataaagcaatagttggtaagaatgcatttgctcatgaatcgggcatccatcaagatggtatgctaaaaaatagaaacacttatgaaattatgactcctgaaagtgttggagttaaacaaacatctttagtaatgggaaaacattcaggaagacatgcatttaaagataaacttacaagccttggatatgctgatttaaccgatgatataattgaaaatgcttttggaaaatttaaagttttagctgataagaaaaaacatatttatgatgaagatatttttgcattagtcgatgatagcttaattaaagaagataatgttattaatttaaaatcattaaaagtatttgctggaacaggcgaacctcaaagagcagaaatgactttagaaattcatggagaaattaaaa

SEQ ID NO: 237193 - DNA, 387 bp, Unknown
  Bacterial polypeptide expressing nucleotide sequence isolated from the Sargasso Sea
aatgacaaaagaaaaagtttacatatttgacaccactatgagagatggcgagcaatctcctggagcatctatgagtgttgaagagaaaattcaaatttctagagtatttgatgaaatgggtattgatattattgaggcaggatttccaatatcttcacctggagattttgaagcagtttctgcaataagcaaaattgtaaaaaattcaatcccttgcggtttatctagggcattaaaaaaagatatagatgcatgccacgagtcattacaatacgcaagcagatttagaatacatacttttatttctaccagccctgttcacatgaagcataaattagatatgacaaaagatcaggttttagatgcgattaaagaaagtgtaacata

SEQ ID NO: 237194 - DNA, 931 bp, Unknown
  Bacterial polypeptide expressing nucleotide sequence isolated from the Sargasso Sea
gtctgggaagctagtgaacaaaaccctgttataattaaccttcctgcaaccgttgaaatgtctactccaaatactcatgctgaccaaatagaatggatgggagataattttagtaacagaaaaagggtaattttatctcttcatcctcataatgatagaggtactgcagtagctgcaactgaattaggattaatggcaggtgcagacagagttgagggaactttgtttggtaatggagaaagaactggaaatgtagatcttgtgacacttggattaaatttatttactcaaggcattgatcctaaaatagattttagcaagattaatgatttaattgatacagctgagttttgcaatagactacctgttcatcaaagacatccatacgcaggttctttagtacatacagccttttctggaagtcatcaggatgcaattagaaaaggtatggagaatatggaaaagtcaccgaccaaaaaatgggctgttccatatttgccaattgacccagctgatattggaagaacttatgaggccataattcgtgttaacagccaatcaggcaaagggggaacagcttggttactagaaacagattaccaaataagattaccaaaaggtgcagaagttgaattgtcaaaaaaagtacaaaagatagcagacgaaactgggaatgaaattacaagcgatattatttggaagacctttaatgagaactttattctacaaaaaccatttgaattaattgaattcaaagttgagggtgctaatagagaaaacaaccttgaaataatcaatgcgaaggtaaaattcaaagatgaattgcatcaattctcttctcaaggcaatggaccaatttcagcgtttgtaaacggaatgagagagaattttgacttgcattttacattagaagactttagtcaaaatacca

SEQ ID NO: 237195 - DNA, 667 bp, Unknown
  Bacterial polypeptide expressing nucleotide sequence isolated from the Sargasso Sea
tatggccaaagatccgggccgagttttaatttttgacaccaccttaagagatggagagcaatctcctggagctagtcttaatttagaagaaaagttagctatcgctcaacaattagcaagattaggagttgatgtaattgaggcaggattccctttcgctagccctggggatttcgctgcagttcagaaaatagctgagaatgtaggaggagaagagggacctatcatttgcggactatcaagagcctcaaaacctgatatcaaagcttgtgccgatgcgattgctccagccccaaaaaaaaggattcataccttcattgcaaccagtgatatacatcttgagcataaattaaggaaatccagaaaagaagtactagatatcgttccagatatggtggggtatgcaaaaagttttgttgacgatgttgaattttcctgtgaagatgccgcaagaagtgatttagattttctttacgaagtaatagaattagctatatcctcgggcgctaatacaataaatattccagatacagttggttatataaccccttctgaatttggagatttgatattaaatatcaacaaaaatgttccaaatatcaatgaagcagttctctcggtccatggtcacaacgatttaggacttgctgtcgcaaacttcccttga

SEQ ID NO: 237196 - DNA, 796 bp, Unknown
  Bacterial polypeptide expressing nucleotide sequence isolated from the Sargasso Sea
tctgatatttgacacaactcttcgagatggagagcaatctcctggtgccagtttaaatcttgaagaaaaacttgctatcgcccatcaattagcaagattaggagtagatgttattgaagctggattccctttcgcaagtccaggagattttaaagctgttaataaaattgctaatgtcgtaggtaaagaaaatggccctataatttgtggtttagctagagcgtctaaaggagatataaaagcatgttatgaggcagtaagtccagctcccaagaaaagaatacatacttttattgcgacaagcgatattcatcttaaacataaactaaaaaaatccagaaaagatgttcttcaaatagttccagaaatggttaattatgcgaaatccttagtagatgatattgagttttcttgtgaagatgcctcaaggagtgatcctgaatttttatacgaagttattcaactagcaattactgcaggagcgacaacaataaatatccctgatactgttgggtttacaactcctagtgaatttggcaacttaattgccgatataaataaaaatgttccaaatattgatgaggcagtaatctcggttcatggtcataatgatttgggtttagcagtagccaattttcttgaggcagtaaaaaatggagcaagacaattagaatgtactattaatggaattggagaaagagccgggaatgcctctctagaagaattagtaatggcacttcatgttaggaaaagtttttttaatagttttttcaaaaaaaatccagattccccaact

SEQ ID NO: 237197 - DNA, 759 bp, Unknown
  Bacterial polypeptide expressing nucleotide sequence isolated from the Sargasso Sea
tatgactgagaagatttacatttttgatactactttgagagatggtgaacaatctccaggtgcttcaatgaatttagaggaaaaaattcaaatagctgaagttttggctgatttaaaagttgatattattgaagcaggttttccaatagcttctaatggagactttgaggctgtctctgaaattagcaaaaatatcaaggggcctactattgcaggattagctcgagcaaagttagctgatatagaaagagcttgggaagctgtaaaattttcagattctccaaggatacatactttcattgctacgagtccaattcatatgaaatataaattaatgaaatctgaaaatgaagttttagaagcaattaaacaaactgtaacttttgctagaaatttatgtccaaatattgaatggagttgtgaagatggaggaagatcaaatttagattttttatatcaatgtatagaattagccattgaatgtggagctactacaatcaatattccagatactgttggttatactttgcctactgagtttggttcaatatttaaatcagtaaaaaataatgtaactaatatagataaagcaattttatctactcatactcataatgacttaggtctagctgttgctaatagtatagctgcaattcaagaaggagctcgtcaagttgaatgtactattaatggattaggtgaaagagcaggaaatgctgctttagaagaaatcgtcatggctttaaaagttaaaaaaga

SEQ ID NO: 237198 - DNA, 914 bp, Unknown
  Bacterial polypeptide expressing nucleotide sequence isolated from the Sargasso Sea
tgaatggtcatgtgaagatgcctcaagatcaaaaagagactttgtatataaatgtattgaacttgctattgattcaggagcaagaacaattaacattcctgatacagtaggctactcaatcccatttgagtttgcagaattaattaatgatgttaaagaaaatgtttcaaatattgataaagcaattatatcagtccattgtcataatgatttaggtcttgctgtttcaaattcaatttttgcaattaattctggagcaaggcaagtagaatgtacaattaatggtttaggagaaagagcaggaaatgcatccatggaagaaattgtcatggctattaaaacaagaaacgatttattacctttcaaaactggaattcaaactaaaatgataacaaaaacttcaaaattagtttctaaaattacagggtttgaagtccaacctaacaaagctatagttggtgcaaatgcttttgctcatgaatctggaatacatcaagatggtatgctaaaacattcaaacacctatgaaattatgactccggaatctgtaggtttaaaagaaactaaattagttctaggaaaacattcagggaagcatgcttttagtgtaaaacttcaggaattaggttataaaataaataaaaagaatattgataaaatttttagtagttttaaagaattggcagatagaaaaaaagatttgtatgaagaagatatagttgcgttggtggaagacgaaattattagagtaaataatcatataaaatttgtttccttagatgttcattgtggatcaactggagctcaaaaggcagaactagaacttgaagtaaatggttttgtaaaaaaaacttcatctactggacaaggaccagttgacgcagtttttaattgtataaataaactagttccaa

SEQ ID NO: 237199 - DNA, 460 bp, Unknown
  Bacterial polypeptide expressing nucleotide sequence isolated from the Sargasso Sea
cgccatgtgattaagcatcgcatggaggaaatgggctacagtgagcaggatttcaatctggatgccctgtacgaacagtttttacatttggccgataaaaagggtcaagtcttcgattatgacttagaagccttagcctttatggaagctcaagcggcggaagataacttctatcaattacagcagttagtggtgcagtccgactccaccgaaggcgtggccacggctactgtacgcatcgatgtcggcggagagattaaaaccgaagctgcgaccggtaatggtcccgtcgatgccgcctataacgccattgcccgtgcgacggaccgtcgtatcgatatcatcagctacaaattgggtgctaagggcgaggggcaaaatgcgcttggccaggtcgacattaccgcggtttaccatgaacaaaatttccacggtgttgggttagcgaccgatgtggttg

SEQ ID NO: 237200 - DNA, 765 bp, Unknown
  Bacterial polypeptide expressing nucleotide sequence isolated from the Sargasso Sea
tttgcaatctacacgagaggtagtattatccaaaagcaaaatattaaaaaaaatgagctctaaagaaaaagtatttatttttgacactacaatgagagatggtgagcagtcacccggtgcatctatgagcgtcgaagagaaaattcaaatttcaagagtattcgacgaaatgggaattgatataattgaagctggttttccaatttcttctccaggcgattttgaagcagtaagtgcaattagcaaaagtcttaaaaattccatcccgtgtgggttatcaagagcaatgaaaaaagatattgatgcttgctatgagtctttaaaatatgctccaagatttagaattcacacgtttatttcaactagtcctgtgcatatgaagcataaattagatatgtcaaacgaccaggttttagacgcaatcaaagaaagtgtaacctatgcaagaaaatttacagatgatgttgaatggtcatgcgaagatggaacaagaacagatttagattttatgtgcaagacagttgagttagcaattaactgtggagcaacaactataaatattcctgatacagtgggttattcaatacccgaggaatttgcaagaactattattcatttaaaaaacaaagttccaaatatagacaaagcaatattatcagcgcactgccacaacgacctgggacttgcagtcgcaaatgcattagcgggattatctgcgggtgttagaccaattgaatgtacaattaatggaataggagaaagagc

SEQ ID NO: 237201 - DNA, 370 bp, Unknown
  Bacterial polypeptide expressing nucleotide sequence isolated from the Sargasso Sea
atgtcaaaagatcctggaagaattttgatatttgacacaactcttcgagatggagagcaatctcctggtgccagtttaaatcttgaagaaaaacttgctattgcccatcaattagcaagattaggagtagatgttattgaagctggattcccttttgcaagtccaggagattttaaagctgttaataaaattgctaattcagtcgggaaagaaaatggccctataatatgtggtttagctagagcttctaaaggagatataaaagcatgttacgaagcagtaagtccagccccaaaaaaaagaatacatacttttattgcaacaagtgatattcatctgaaacataaacttaaaaaatccagaaaagatg

SEQ ID NO: 237202 - DNA, 851 bp, Unknown
  Bacterial polypeptide expressing nucleotide sequence isolated from the Sargasso Sea
tgcaacaagtgatattcatatgaaatataaattgagaatgaaccctgaagatgttttagaagcaataaaggagagtgtttcatatgcaaaaaattattttgaagatgttgagtggtcatgtgaagacggcactcgttcaaatatagattttttatataagtgttttgatgtggcaattaagagtggtgctactacggtaaatatagctgatactgtaggctattctatgccgggcgagtttcaaaacttaataaagaaaataaggaataatgttacaaatattgataaagtatttttttctgttcattgtcacaatgatttaggttttgcagtttccaattctatagcctctttggatagtggtgttagacaaatagaatgtacaataaatgggttaggagaaagagcaggaaatgcatctttagaagaaatagtaatgacactaaatactagaagcgacttatatccctataagacatcggtcttaactgaacatctaactgaagtctctaaaaaagtatctgaatgtagtggttttatagttccaccgaataaagcgatagtgggaaaaaatgcatttgctcatgaatcaggaattcatcagcatggagtaattgtaaatcctaatacatatgaaataattaaaccagataaagtaggagccgcgggatcaaaaatattaatgggaaaacattctggcagacatgcattcaaacataaattattagaaatgggattcaaacttggaaataatgagctagaacaggctttttatttatttaagagaatggctgatactaagaaagatatttctgataagcaaattataaagttaataaagtctatttagc

SEQ ID NO: 237203 - DNA, 829 bp, Unknown
  Bacterial polypeptide expressing nucleotide sequence isolated from the Sargasso Sea
attctatcgacacattgtcataatgatttagggttagcggttgctaattctttagcaggagtgatggctggagcacgacagattgaatgtacaataaatggaattggtgaaagagcaggtaatgctgcacttgaggaagttgttatggctatgagaactagacatgatcttatgccgtacaccacaaatattaacactaaacttttaagtaaagcttcaaaagtggtatccaatgctacaggatttcctgtccaatttaataaagcaatcgtaggtaaaaatgcttttgctcatgaatcaggaattcaccaagatggaatgcttaaaaatagaaatacttatgagataatgactccagaaagtgttggcgttaaaaaaacatctttagtaatgggtaaacactctggtcgacatgcgtttagggacaaactttcagacatggggtacgtaaacgtaactgatgacattataaatactgcatttggcaaattcaaaattttagcggataagaaaaaacatatctacgatgaagatatagctgcattagttgatgacagcttggtaacagaagataatgtaataaaattaaaatctttaaaggtatttgctggaacaggtgaacctcaaaaagcagaaatgactttagaaatttttggtgaagttaaaaatgctacagaaactggagatggtccggttgatgcaatttttaaatgtataaaaaaactttatgcccatgatgttaaattacttttatataacgtacatgcagtaacagagggaactgatgcgcaggcaactgttagtgtaagaatcgaggaaaagggtaaaa

SEQ ID NO: 237204 - DNA, 928 bp, Unknown
  Bacterial polypeptide expressing nucleotide sequence isolated from the Sargasso Sea
tatattttttgatactactttaagagatggtgagcaatctccaggagcctcaatgaatttagatgaaaaaatccaaatagctgaagtacttgagtctatgaaagttgatatcattgaagctggttttccaattgcatctaatggtgactttgaagcagtaactgaagtgagtaaaaatataaaaaactctactatagctggattggcacgtgcaagtttaaaagatattgatagagcttgggaggctgtgcaatatgctaaatcacctagaattcatacttttattgccactagtcctcttcatatgaaatataaattaaaaaaaactgaagatgaagtattagaggcaatagagaagactgtttctcatgcaagaaacttatgtgataatattgaatggagttgtgaggatggagggagatctaaactagattttctatataagtccattgaacttgctattaattgtggagcttctactataaatattcctgatactgttggttatactttgccagaagaatttggtcaaatttttagaaatgtaaaaaataatgttccaaatattgataaagcaatattatcaactcatacacataatgatttaggattggctacagctaataatgttgctgctattaaagaaggtgcaagacaagttgaatgtacaataaatggaatgggtgaaagagctggtaattcatctttagaagaaattgtaatgactttaaaagttaaaaaagatcttatgccttttcatactgatattaaaactcaatcaataattaaagcttcaagattagtatcctcaataactggttttcctgttcagccaaacaaagcaatagttggcgctaatgcttttgctcatgaagcaggtattcatcaagatggaatgttaaagcattcaggaacatatgaaatcatg

SEQ ID NO: 237205 - DNA, 738 bp, Unknown
  Bacterial polypeptide expressing nucleotide sequence isolated from the Sargasso Sea
tgcagataccttattgataataacctaattcctgaagatgtaactgtacaggtcctaactcaagctcgagagcatttgattgataagacatttgaagctttgtcaggatgcaagtccgcaatattacacctttataactcagtttcaacattgcaaagaagagtcgtatttaatcaggatagagaaggtgtaaaaaaaatagcacttgatggtgctcagatggtttttgatagactaaacaaattacaagaaacaaaactccaactacagtattcaccggaaagttttactggaactgagttagattatgctttggatgtttgtgaaacagttcttgactgttggaaggcttctaagtccaacagagtaattataaaccttcctgccacagtggagatgtctacgcctaatatatatgcagatcagattgaatggatgctacaaaacttctctgatagagaccgtatcattttatctcttcatccccataatgatagaggaactggagtagccgccaccgagttagctttaatggctggagcagatcgtgttgaaggaactctttttggaaatggagaaagaacaggtaacgtagatattgttactttgggtctcaatatgtttactcaagggatagatccaaatttagatttttctgatattaataagctgatagaaactgcagaattttgtaatcaactcccagtacatcagagacatccatatgctgggtctttg

SEQ ID NO: 237206 - DNA, 912 bp, Unknown
  Bacterial polypeptide expressing nucleotide sequence isolated from the Sargasso Sea
cctgcgcgccgagcttccgcaagatcgtcttcaccaggacaaggcgggggtgaaagccatcgccgtcgcagccggcagcaccatcaagcgcctggccgacgccgcgccggaaacccagtggggcttcgagtactcgccggaggtgttcagcagcaccgagatcgacttcgccgtcgaggtgtgcaacgcggtgatcggcgtgttccagccgaccccggcgaacaagctgatcctcaacctgccggccaccatcgagtgcgccacgccgaacaactacgccgaccagatcgaatggttcggccgccacgtcgaccgccgcgacagcgtgctgatcagcgtgcacacgcacaatgaccgtggcaccggcgtcgccgcctctgagctggccgtcatggccggcgccgaccgcgtcgaaggctgcctgttcggcaacggcgagcggaccggcaacgtctgcctggtgaccctggcgctgaacctctacacccagggcatcgaccctgagctggacttctccgacatcgacgccgtgcgcaaggtggtggaagactgcaaccagattccggtgcatccgcgtcatccgtacgtcggcgacctggtgcacaccgcgttctccggctcgcaccaggacgccatccgcaagggcttcgcccagcaggacccggaagccgtctgggaagtgccgtacctgccgatcgacccggccgacatcggccgcgactacgaggcggtgattcgcgtcaacagccagtccggcaagggtggtatcaccttcctgctggagcaggaatacggcatcaacctgccgcgccgcatgcagatcgaattcagccaggtggtacagcgcgagaccgatcgcctgggcctggaaatgaccgcttcgcagatccaccagttgctcgagagcgagta

SEQ ID NO: 237207 - DNA, 909 bp, Unknown
  Bacterial polypeptide expressing nucleotide sequence isolated from the Sargasso Sea
tagctggagtgatggcaggtgcaagacagattgaatgcactattaatggtataggagaaagagctggaaacgctgctttagaagaagttgttatggccatgagaactagacatgatttaatgccttacaccacaaacattaatactaaacttttaagcaaagcatctaaagtagtttcaaatgctacaggttttccagttcaatttaacaaagcggtagttggaaaaaatgcttttgctcatgaatcaggaattcatcaagatggaatgcttaaaaatagaaacacttatgaaattatgactcctgaaagtgttggtgttcacaaaacttctttagtaatgggtaagcactcaggtcgtcatgcttttaaagataaattaaatgatcttggatatgtgggagttacagatgatgtaattcaaattgcttttggtaaatttaaagttttagctgataaaaaaaaacatatttatgatgaagatattgctgcaatagtagatgatagtttagtaacagaagataatgtaattaaattaaaatctttaaaagtttttgctggcactggtgaacctcagaaagcagaaatgactttagaagtatttggagaggtgaaaaaagcatctgaaacaggagatggaccagtggatgctatatttaaatgtattaaaaaactttacccgcatgaagttaaacttttactatataatgttcatgctgtaacagaaggaactgacgctcaagcaacagtgagtgttcggatagaggaaaaaggaaaaaccactgttgggcaagccgcagatactgatactttagtagcatctgctaatgcctatttaagtgcgttaaataaattaataatcaaaagaaaaaaaacagcgccagacccaagtttgagcgcacaaatataag

SEQ ID NO: 237208 - DNA, 1179 bp, Unknown
  Bacterial polypeptide expressing nucleotide sequence isolated from the Sargasso Sea
catgtccgacaaactgatcatattcgacaccaccttgcgcgacggcgagcaatcgcccggcgcgtcgatgacgaaagaagaaaaaatccgtatcgccaagcaactcgaacggatgaaagtggacgtgattgaagcgggcttcgcggccagttcgaacggcgacttcgattcgatccagacgatcgcgggcctgatcaaggacagcacgatctgctcgctggcccgtgccaacgacaaagacattcaacgcgctgccgacgcactcaaaccggccgatcatttccgcatccacacgttcatcgcaacgtcgccgctgcatatggaaaagaagctgcgcatgacgccggatcaggtgttcgaacaggcgaagctggcggtgcgtttcgcccgcaaattcacagacgacgtcgagttttcgccggaagacggcagccgctcggatatggatttcctgtgccgggtgctggaagcggtgatcgccgagggcgccaccaccatcaacatcgcggacacggtgggctatggcgtgccggagttgtacggccagctcgtgaagacgctgcgtgagcggattccgaactcgcataaggccgtgttctcggtgcattgccataacgaccttggcatggccgtggcgaactcgctggccggcgtgcagattggcggtgcgcgtcaggtcgagtgcacgatcaacgggctcggcgagcgcgcgggtaatacgtcgctcgaagaaatcgtgatggcggtgaagacccgcaaggattacttcggcctcgatatcggactcgatacgacgcagatcgtgccggcttcgaagctggtgtcgcagatcaccggtttcgtcgtgcagccgaacaaggcagtcgttggcgcgaacgcatttgcgcatgcatccggtattcaccaggatggcgtgctgaaggcgcgcgacacgtacgaaatcatgcgtgccgaagatgtgggctggagcgcgaacaagatcgtgctgggcaagttgtcgggccgcaatgcgttcaagcaacgtctgcaggaactgggtatcgcgctcgatagcgaaggcgagttgaataccgcgttcgcacgcttcaaggaactggcggaccgcaagtcggaaatcttcgacgaagacattattgcgatcgtcaccgaggagtcggccgaggcgcaggagaaagagca

SEQ ID NO: 237209 - DNA, 646 bp, Unknown
  Bacterial polypeptide expressing nucleotide sequence isolated from the Sargasso Sea
gatgtcaaaagatcctggaagaattttgatatttgatacaactcttcgagatggagagcaatctcccggtgccagtttaaatctcgaagaaaaacttgctatcgcccatcaactagcaagattaggagtagatgttattgaagctggattccctttcgcaagtccaggagatttcaaagctgttaataaaattgctaatgctgtagggaaagaaaatggccctataatatgcggtttagctagagcgtctaaaggagatataaaagcatgtttcgaagcagtaagtccagctcccaagaaaagaatacatacttttattgctacaagtgatattcatcttaaacataaacttaaaaaatctagaaaagatgttcttcaaatagttccagaaatggttaattatgcaaaatcattagtagatgatattgagttttcttgtgaagatgcatcaaggagtgatcctgaatttttatacgaagtgattcaactagcaatttctgcaggagcgacaacaataaatatccctgatactgttggatttacaacacctagtgaatttggcaaactaattgccgacataaataaaaatgttccaaatattgatgaggcagtaatctcggttcatggtcataatgatttaggttta

SEQ ID NO: 237210 - DNA, 1309 bp, Unknown
  Bacterial polypeptide expressing nucleotide sequence isolated from the Sargasso Sea
aatgacagaaaaaatatatatttttgatacaacattaagagatggagaacaatctccaggagcttctatgaacctggatgagaaacttcaaattgctgatgttttagactctatgaatgtcgatattatcgaagctggatttcctatagcatccaatggggattttgaggcagtaagtgaagttagcaaaaatgttaaaaattctacaattgctggtttagctagagccagtttaaaagatattgatagggcgtgggaagcagttcaacatgcaaagtcacctagaattcatacttttattgcaacaagcccgcttcatatgaagtataaattaaaaaaaactgaagaggaagtaattgaagcaataaaaaaaaccgtatcacatgcaagaaatttgtgtgaaaatattgaatggagttgtgaagatgcaggaagatcagaattaaactttctttatagatgtatagaacttgcaatagactgtggtgcttctacaataaatatacctgatacagttggatatacattacctgaagagtttgggaaaatttttaaaaatgtgaaaaataatgtatctaatattgataaagctatactgtcaagtcatacacataatgatcttggattggcaactgcaaataatgtagctgctattaaagaaggagctagacaggttgaatgtactataaatgggatgggtgagagagcaggtaattcgtctttagaagaaattgtgatgacattaaaagttaaaaaagatttaatgccttaccataccgatattaaaactgagtcaattatgaaagcgtcaagattagtatcttcaataactggatttcctgtgcaacctaataaagcaattgtaggagcaaatgcctttgctcatgaagctggtattcatcaagatggtatgctaaagcatgccggaacctatgaaattatgacacctgagtcagtaggtctaaataagtcttcattggtattaggaaagcattctggaaaacatgccttttcagaaaaattaaaagaacttggatacgagcccggagataatgcattgatggaactttttggaaggtttaaagatttagctgataagaaaaaagaaatttttgaagaagatttaattgctttggctgaagatagatcagcatcttatgatgaacacattaaatttgtatctttagaggttaatgcaggttcagttgaaaaacctgaagctgatcttaaaattaatatggaagataaaattaagtcagtaaagataaatggaaatggtccagttgacgccacatttaatgctattaaa

SEQ ID NO: 237211 - DNA, 1158 bp, Unknown
  Bacterial polypeptide expressing nucleotide sequence isolated from the Sargasso Sea
aagatggaacaagaacggatatggactacatgtgcaaaactgttgaactagcaattaaatgtggagcaaagactataaatataccagatacagttggctatacagtgccatcagaatttacaaaaattattcaaactttattaaataaagttcctaatatagataaagcgattttatcaactcattgtcataatgatttaggattagcagttgcaaactctttagcaggtgttcaagcaggagcaagacaaattgaatgtactataaatggaattggtgagagagctggtaacgctgcgctagaagaagttgtaatggcaatgaaaacaagaccagatttaatgccatatgaaactggaattaatacaactctattaagtaaagcatcaaaaattgtttcaaatgcaacaggctttcccgtgcaatacaataaagcaatagttggaaaaaatgcttttgcacatgaagcaggaattcatcaagacggaatgctaaaaaatagacaaacttatgaaattatgactccagaaagtgttggggtaaaacaaacttcattagttatgggaaaacattcaggaaggcatgcatttaaagataaattaattagcttaggttacgtagatgttacagatgatgttattagcaatgcatttggtaaattcaaggttttagctgacaaaaaaaaacatgtttatgatgaagatataattgctttggttgacgacagcttaattattgataataaagtcaatgcaattagtttaaaaactttaaaagtatttgctggaacaggtgaacctcaaagggcagatatgacattagatgtttttggcgaggtaaaaaaagcatctgaaactggagatggaccagtggatgcaatatttaaatgtataaagaaactttaccctcatgaagtaaatttacaattataccaagttcatgctgtgaccgagggaactgatgctcaagcaactgttagtgttcgaattgaggaaaatggaaaaacaactgttggtcaagcggcagatactgatacattagttgcatcagccaatgcatacataaatgcattaaataagatgattattaagagagacaaaacagcacctggatactctccagagcaaaaaaaagaagaaaaggtgaaaggaatataaa

SEQ ID NO: 237212 - DNA, 1459 bp, Unknown
  Bacterial polypeptide expressing nucleotide sequence isolated from the Sargasso Sea
atgtctgaaaaagaaagagtttatatatttgatactaccatgcgagatggtgaacagtcaccaggcgcgtccatgagtttggaggaaaaaattcaaattgcaagagtatttgacgaattaggaattgatataattgaagcaggttttccgattgcttccccaggtgattttgaagctgtaacagaaattagcaaaatattaaaaaaatctattccagcaggattatcaagacattcaaaaaaagatattgatagatgttatgaagcattaagacatgctccaagatttagaattcatacttttatatctactagcccactgcatatgaaacataaattaaataaatcttctgaagaagtttatgactcaattaaagaacatgtaacatatgcaagaaaatttacagatgatgttgaatggtcttgtgaagatgggacaagaacagatatggattatatgtgcaaaacagttgaattggccatcacatgtggtgcaaaaactattaatattcctgatacagttggatatacggtaccatcggaatttactaaaattatacaaacattgttaaataaggttccaaatatagataaagctatactatctactcattgtcataatgatttgggtttggcagtagcaaattctttagctggagttcaagctggggcaagacaaattgaatgtactataaatggtatcggtgaaagagcaggcaatgctgctcttgaagaagttgtaatggctatgaaaactagaccagacctaatgccatatgagacaggaattaatactaaattattaagcaaggcctcaaaaattgtttcaaatgcaacaggttttcctgttcaatataataaagctattgttggaaaaaatgcatttgcacatgagtcaggtatccatcaagatggaatgcttaaaaacagacaaacatacgaaataatgacacctgaaagtgtgggtgttaaacaaacatcattagtgatgggaaaacattcaggaagacatgcgtttaaagataaattaaccagtcttggttatgttgatgttaccgatgatattgttgaaaatgcttttggtaaatttaaggttttggctgataagaagaaacacatttatgatgaagacataatcgctttagttgatgacagcttaattatagataataaagtaagtgcgataaacttaaaatctttaaaagtatttgcgggaacaggcgaaccacaaagagctgatatgacactagatgtttttggtgaagtaaaagaagcaactgaaactggagatggcccagttgatgcaatatttaaatgtataaaaactttatatccacataatataaatttacaattataccaagtacatgctgtgactgaaggtacagatgcacaggcgactgtaagcgtacgaattgaggaaaatggaaaaaacactgttgggtcaagcggcagatact

SEQ ID NO: 237213 - DNA, 1162 bp, Unknown
  Bacterial polypeptide expressing nucleotide sequence isolated from the Sargasso Sea
atgtataatcaggttcaaatttttgatacaactttaagagatggagaacaggttccaggttgtaaacttgataccaaaagtaaattaattttagcagagaaaattgatctacttggagttgacataattgaagcaggctttccaatttcaagtcctggagattttaaatccgttgtcgaaatctccaagattataaaaaacgcatcagtatgtgctttgagtagagctaacgagaaagatattgatgttgcagctgagtcattaaaaaatgcaaaaaaacctagaatccataccggtataggtacatctgaagttcatattaaatataaattcaactcaaataaagattctataattgaaatagcaaaaaaatcagttgctcatgcaagaaagtacgtcgacgatgttgaattttatgccgaagatgctggcagaacagataacgaatttcttgcaaaagtatgtgaagaagttattaagtctggagctactgttttaaatattcccgatacaactggctattgcttacctagtgaatatggagataagattaagtttttgatgaataatgttaaagggattgaaaatgttacagtttcatgtcactgccataacgatctcgggctagcaactgctaactccatatatggagttattaatggcgcaagacaaattgagtgtacagttaatggtattggagagagagcaggaaacacatctttggaagaagttgttatgattttaagacagcatactgatttgaacctagatactaatattaactccaaacttctaaatgaaacaagccaaaaggtatcagaacttatggggatgcctgttcaaccaaataaggctatagttggatctaatgcatttgctcacagttctggaattcatcaagatggtgttattaaaaaaagagaaacatatgaaataattgacccacttgatgttggtgtagataaatcatcaattgtactgacagctaggagtggtagagctgcattggcatttagaatgaaacagtatggcgttaatctaacgaaaaaagagctagatgatgtatataatgagtttttaatagtagctgacaaaaagaaagaagtaacagacacagattttcctgaaattcttcagaataaaaatattagttatggctaaa

SEQ ID NO: 237214 - DNA, 1414 bp, Unknown
  Bacterial polypeptide expressing nucleotide sequence isolated from the Sargasso Sea
ctgacaaatcccggtgaaaaatatcgcccctggccgcccatttccctgcccgaccgccgctggccggacaacccgataacccacgcaccgcgctggctctctaccgacctgcgcgacggcaatcaggcgctagccgaaccgatggacagcgcacgtaagctgcagttttgggagctgctgctggagtgcggatttaaagagattgaagtcgccttcccctcggcatcacagaccgacttcaacttcgtccgtcagctgattgaggaacggcgcattccagaagatgtcaccatccaggtgctgacccaggcgcgagaagatcttatcctgcggacctttgaatcgctgcgcggcgcccattgcgccaccgtccatctgtacaacgccaccgctccgctgttccgcaagctggttttcgggatggataaatcacaggtcattgagctggccacccgcgccactcgcttgattcgccagcagtgcgaagagcagccgcagacccgctggcagtatgaatactccccggaaaccttctgctttaccgaaccggaatttgccctggctatctgcgaggcggtagcggatatctggcagccctgcgcacaacgaccgatgattatcaatctgcccgccaccgtcgaggtcagtaccccgaacgtttacgccgaccagattgagtttttctgccgccatttctcccgccgggccgatgtctgcatcagcgttcatccgcataatgaccgggggaccggcgttgccagcgcggagctggcggtgatggccggcgccgaccgcgtagaaggctgtctgttcggtaacggcgagcgtaccggcaacgtctgtctggtcaccctggccatgaatctctacagccaggggattacgccgcggctcagcttcccggagatgaaacgggtagtcgaagtggtggagaattgcaatcagctgccggttcacccgcgccatccgtgggccggcagccttgcctacaccgccttttccggttctcatcaggatgccattaagaagggattcgatgcccgtcagcccggcgatcgctgggagatgccctacctgcccgtcgacccgcaggacatcggctgtagctatgaagcggttatccgcgtcaacagccagtccggtaagagcggcagcgcctggttaatcgaacagaatcacggattgaagctgccccgtgcgctgcagcaagatttcagcctgcacgttcagcgagagaccgatacacatggcaaagagatgacgcagaatgccctctggcagctgttccgttcccgttacgggctggttgcgcaaccgccgctggcgctgctggagtataaaaccgacagccgacaggatggccagcttgcgttgcaggggacgctacgggtcaacggtgagacgcgtcgtcttc

SEQ ID NO: 237215 - DNA, 919 bp, Unknown
  Bacterial polypeptide expressing nucleotide sequence isolated from the Sargasso Sea
gcaagacaaattgaatgtacgatcaatggtatcggagaaagagctggtaatgcagcttgggaagaagttgtaatggcgatgagaactagaaatgatttaatgccttatactacaggaataaatactaaacttttaagcaaagcatcaaaaatagtttctaacgcaacaggctttcctgtacagttcaataaggcagtagttggtaaaaatgcatttgctcatgaatcaggaatacatcaggatggaatgttaaaaaatagaaatacttatgaaataatgactcctgaaagtgttggagttaaaaaaacttcacttgtaatgggtaaacactctggtcgacatgcttttagagataaactttcagacatgggttacgttgatgttactgatgatattatagacattgcttttggaaaatttaaagtgctggctgacaagaaaaaacatgtctacgatgaggatatcgccgcactcgttgatgatagtttaattaaagaggataatgttatcagacttaaatcattaaaagtttatgctggaactggagaaccacaaaaagcagtaatgaaacttgaggtttttggtgatgtaaaagaagctacagagtcaggagatggaccagttgatgctatattcaaatgtattaaaaaactttaccctcacgaagtaaatttacaactttataacgttcatgctgtaacagagggaactgatgcgcaagcaactgtaagtgtaagaattgaggaaaacggaaaaacaacagtcgggcaagctgctaacacagatacattggttgcttcggcagacgcatatttgaatgcgctcaataaactaataatcaaaagaaaaaaaactgctccagaaccaatggacttgagtggttcaaaatatataagggaaaaagatggcactatttaaa

SEQ ID NO: 237216 - DNA, 1315 bp, Unknown
  Bacterial polypeptide expressing nucleotide sequence isolated from the Sargasso Sea
ggaagggtggtctccctctgccgaatggtagaaaacgatgtggaccgtggagccgaggcattgaaagacgcacataattgggggcttcacacgtttatagcttcaagtccgctacacatgaaacacaagttgcagatggaaccggatgaggtgctaaaagcaactacaaaatgtgtggaacgagcaaaaaaatacaccgacaacgttgaattcagtgcagaagatgcaacccgaagtgaaccagaatttttggtacaactgttctcagaagctgtgagagcaggtgctgtcgtgttgaacgtccctgataccgtgggatataccaccccggatgagatgtatgaactgatcaccaggctgatgaatgaagtctaccaggcagaaaaagtggtattttcggcccattgtcataatgatcttgggatggcagttgcaaattctatgtcggctgtgagggcaggggcacgtcaaatcgaatgtaccatcaacggcattggtgagagggcaggtaatgcttcgttggaagaattggtgatggcaatcaatacccgccagcagtattaccagtatgaaactagaatcacaacggaacagatctttccatcaagcaaacttctttcacaaattacgggagtcagtgttcagccgaataaggcgattgttggtgctaatgcctttgcacacgaagctggaattcaccagcacggggtgctgaaaaattccctgacctacgaaatcatgactcctcagtcggtggggatcaaagccagcaatctggtgttgggcaaacattctggtcgtcatgcactttcggaccggatcaaggaacttggttttgagttgaatgatgttgagttgaatcaggttttcaaggaatttaaaaggctggcggatattaaaaaacagattttcgatgaggatcttgaggctttggttacccatggcatccgaaagcacaccgatcgattccagctggaacagttgaacattacctcaggaacatcggtgattccaactgcgacagtgatcatgaagatcgatggtgaacaggtcaaaaaggcagggtttggagacggtccggtggacgcagctttaaataccatccgtgacatgacaggtatcgactgcagacttacttcctacgtggttaaagccatcaccggagggacagatgcccaaggtgaagttagtgtaggagtcgatcaggacggaatgcaattgaccggaagaggagcgcacaccgatatcgtagtggcgagtgcgatggctttcatcaatgccctcaaccgtatccaggcacggtccaatgcgatca

SEQ ID NO: 237217 - DNA, 815 bp, Unknown
  Bacterial polypeptide expressing nucleotide sequence isolated from the Sargasso Sea
tgatttgatgccatatgaaacaggtatcaacacgacattattaagcaaggcttctaaattagtttcaaatgtaactggttttccagttcaatttaataaagcaatagttggtaaaaatgcttttgctcatgagtcaggaattcatcaagatggtatgttaaaaaatagaaacacttatgaaattatgacaccagaaagtgtaggagttaaacaaacctcattagtgatgggaaaacattctggtagacatgcttttaaagacaaattgattagtcttggttatgcagatttaacagatgatgtaatagaaaatgccttcggaaagtttaaagttttagctgataaaaaaaaacatatctatgacgaagatattatagctttggtagatgacagcttagttttagataataaagctaacaatttagtattaaaatcattaaaagttttcgctggcacaggtgaacctcaaaaagcagacatgacattagatgttaatggacaaattaaatcagctacagagacaggtgatggcccagtggatgctatttttaaatgtataaagagcttatatcctcacgatgttaatctccaattataccaagttcatgctgtgacagaaggaactgacgctcaagccactgtaagtgttcgtattgaggaaaatggtaaaacaactgttggtcaagcagcagatacggatacattggtcgcttcagcaaatgcttatattgctgctttgaacaaaatgattttaaaaagagaaaaaactgcaccaatgatggagcaacaagaagaaaaaatgagaggtatttaaa

SEQ ID NO: 237218 - DNA, 907 bp, Unknown
  Bacterial polypeptide expressing nucleotide sequence isolated from the Sargasso Sea
gccgcagagttcggagtcatggctggagctgatcgtgtgaaaggcacgctatttggcaacggagaaagaaccggcaatgtcgacatcgtcacattggcaatgaatctgttcagtcaaggcgtagaccctgaacttgacatcagccatatcgacaacctccgccgaatcaccgagtattgcaatcaactccctgttcatccgcgtcacccctacggcggcgatttggtgtacaccgcattttcgggcagtcatcaagacgcaatcaagaagggatttgaagcgttatcagacgattacgacgtatgggaagtgccgtacctgcctattgaccctgcccacgtgggccgcacatatcaggatgtcatcagggtcaacagccaatcaggtaaaggcggtgttgcatatgtcatgaagaacaacttcggactcgatttgccgcgccgcttacagattgaattcagccaagtgatccaatcgatcaccgatgaaggcggagaaattcttccagagaccattaagaagacattcgatgagacgtatcttcacaccacacagccattcacttatttaggccacaaaagcactttcgattccgaatcctcggatttgtcgacggtctctgcgacactcaacgtgtcgggtgaaaagcaaacgatcacaggtgaaggcaacggaccactttcggcattcaaaaccgctctggctacagattgcggcttagatctgaggctcgttgactaccaggaacacgctgttgggactggcgctgacgctactgctgcggcctatgtagagattgaagctgcggatcgacgtgtctactggggcgtgggtatgaatcccaacatagtgacagctagttttcacgccctcttgtccgcaatcaatcggtccgaaagcagctaac

SEQ ID NO: 237219 - DNA, 568 bp, Unknown
  Bacterial polypeptide expressing nucleotide sequence isolated from the Sargasso Sea
atgacagataaaaatagaattataattttcgataccacaatgagagatggggagcagtccccaggtgcctcaatgagccttgaggaaaaaattcaaatctctagagtatttgacgaattaggaattgatgttattgaagcaggttttccaattgcctcaccaggtgactttgaggcggttagcgcaataagtaaaattttaaaaaaatcaattccagcaggtctagcaagacatacaaaaaaagatattgatgcttgtcacgaatctttaaaatctgctaaacaatttagaattcatacctttatttctacaagctctttacatatgaaacacaaattaaataaaacacctgatcaagtaatagaatcaattaaagaacatgttacttatgcaagaaaatttacagatgatgttgagtggtcatgtgaagacggtacgagaacagatatggattttatgtgtaaaactgttgagcttgctattaagtctggtgcaaaaactattaatattcctgatacagttggttacacagttccttcagaatttaaaaaaataatcgaaacactaa

SEQ ID NO: 237220 - DNA, 889 bp, Unknown
  Bacterial polypeptide expressing nucleotide sequence isolated from the Sargasso Sea
gcgggtgcggaccgggtggaaggcacgctgttgggcaatggcgagcgcacgggcaacatggacatcatgaccatggcgatgaatctctacagtcagggcgtggacccgctgttggatttcacgcacatggatgagatttgcacggtggctcgtgaatgcacgcagttgccggtccatccgcgccatccctacgcaggagagctcgtattcaccgctttctccggcagtcatcaggacgcgatccacaagtgcctgtccaaacgtgacgccgatgacgcctgggacgttgcctatctaccgattgatcctgccgacatcggtcgcacgtatcaggaagtgattcggatcaatagtcagtcgggcaagggcggtgttgcccatgtgctgcgtcgagactacgggctggagctgccgcgctggttgcaagtcgacttcagtacagccgtgcagggtctggcggaggacagcgaagccgaagtctacagcgacgatatctttgcgttgttcagcgagacttacctgagcacggctgaccgatggcagttgggcaattaccagctgtcgcggcgggacgagtccgatgggcttgaggtcatgttgcatggacctcaaggagaggtgacgttgactggccagggtaacggggtggtcgacgcctttgtgcaggccatggagacgttcactggccggcatatcgtagtggttgagtactctgagcacactctgggccagagtgccgacgcggaggcagtgtgttacgtgcaactcaatatcgatggcgagcgcccctgtggtgtcggccgcagccacgatatcgtgcaggcgtcgctggcagccattctctctgctctggatgggcgcggacaggtactcgccaacgcggcctaac

SEQ ID NO: 237221 - DNA, 1501 bp, Unknown
  Bacterial polypeptide expressing nucleotide sequence isolated from the Sargasso Sea
tatggcagataaaaatagaataataatttttgatacaacgatgcgtgatggagaacagtctccaggtgcatcaatgagtttagaagaaaaattacaaatctccagagtttttgatgagctgggagtagatatcatagaggctggttttccaatagcttcacccggtgactttgaagctgtaactgaaataagcaaaactctaaagcgatcaattcctgcaggattagctagagctactaaaaaagatatcgatgcatgtcatcaagctttaaagcacgcaaaaaattttagaattcacacttttatatctacaagtccgcttcatatgaagcataaattaaataaatcgccggaagaagttttagagtctataaaagaaagtgttacttacgctagaaaatttacagatgatgttgaatggtcatgtgaagacggaacacgaactgatatggactatatgtgcaagacagttgaactcgcaattaaatctggagcaaaaacaattaatatacctgacactgttggctacactgttccttcagaatttaaaaagattattgaaactttaataaataaagttccaaatattgataaagcaattctttctacacattgtcataatgatttaggactagcggtagctaattcattagcaggagtaatggctggtgcaagacaaatcgaatgtacaattaatggcataggagaaagagctggtaatgcagcattggaagaagtggtaatggctatgagaacaagacacgacttaatgccttacactacaaatattaatacaaaacttttaagcaaagcatcaaaagtggtttcaaatgctacaggttttccagtgcaatttaataaagcgatcgttggaaaaaatgcttttgcacatgagtcaggtatccatcaagatggaatgttaaaaaatagaaatacttatgaaataatgacaccagaaagtgttggagtaaaaaaaacttcattggtaatgggtaagcactcaggtcgtcacgcttttagagataaattatcagacatgggttatgtagatgtaactgatgatattatcaatacagcctttggtaaattcaaaattttagcagataagaaaaaacatatttacgacgaagatatcgcagcgcttgttgatgatagtttagtaactgaagacaatgtaattaaactaaagtctttgaaagtttatgcagggacaggtgaacctcaaaaagctgaaatgacattagaagtttttggagaagttaaaacagcttctgaaacaggagatggaccagtggacgctattttcaaatgtataaaaaaactttacgctcatgatgttaagcttttattatacaatgtacatgctgtaactgaaggcactgatgcccaagctacagtaagtgtgagaattgaggaaaaaggtaaaactacagtgggacaagctgctgatacagacacattagtagcttctgctaatgcatatttaaatgcattaaataaa

SEQ ID NO: 237222 - DNA, 1412 bp, Unknown
  Bacterial polypeptide expressing nucleotide sequence isolated from the Sargasso Sea
ttttgaggcggtcagtgccataagtaaaagtctaaagaattctattccgtgtggattagcgagagcaacaaaaaaagatatagacgcatgcaatgaatctttaaaatatgcaaaaaggtttaggatacatacttttatttcaactagcccagttcatatgaaacataaacttaatatgactgataatgaagttttgggagcaataaaagaaagtgtaacctatgcaagaaaatttactgatgatgtagaatggtcttgtgaagatggtacaagaacaaatttagattttatgtataaaacaattgaacttgcaatcaattgtggagcaaaaacaataaatattcccgataccgttggttattcaattccagaagaatttgctaaaacaattacattaataaaaaataatgtacctaatatcgataaagcaattatttctgcccattgtcataacgatcttggtttagcagtggctaatgccttatcaggtttgtcagctggtgtgagacaaattgagtgtacaataaatggtatcggagagagagcaggtaatgctgcccttgaagaaattgttatggcaataaaaactagagatgatttattaccttacgagactgggattaaaactgaattaattagtaaggcctctaaaattgtttcaaacgccacaggttttcctgttcaatttaataaagcaatagttggaaaaaatgcatttgctcatgaatcaggaattcatcaagatggaatgcttaaaaatagagaaacatatgaaattatgacaccagaaagtgtgggcgtaaaaaaaacatctttagtaatgggaaaacattcaggtaggcatgcttttaaagataaattaagtgatttaggttatactgacgtaacagatgatgttgttcaagctgcttttggaaaatttaaaattttggctgataaaaaaaaacatatctatgacgaagatatcgttgctttagtagacgatagtttaattattgataacaagattaatgctataaaccttaaatctttaaaagtatttgcgggaaccggagaaccacaaagagcagatatgacattggatgtttttggagatgtaaaaaaaacctcacaaacaggtgatggtccggttgatgcaatttttaaatgtattaaagatttatatccacataatgtgaaactttctctttatcaggttcatgctgtaacagagggtactgatgctcaagcaacagtaagtgtgaaaatagaagaaaatgacagaactactgtgggacaatcagcagacactgatactttagttgcatctgcaaatgcatatctaaatgctttaaataaaatgttaattaagagagagaaaaaatctatgtctcaaggtattcaacatcaaaaagtaaaaggaggagtataaa

SEQ ID NO: 237223 - DNA, 1543 bp, Unknown
  Bacterial polypeptide expressing nucleotide sequence isolated from the Sargasso Sea
tatggatacggtaaaaatatttgatactacccttagggatggcgagcaatctgccggagcggggttaactacagctgaaaaactacagatcgcaaagcaactagaattattaggtgtggatattatagaagctggttttgcggcaagctctccgggagattttgaggcagttgaagctatttcacgagaagttcggacaccggtaattgcctcactatctaggtgtaattttggagatattgatgcggcatggggggcaataaagaatgcagaaaacccaaggattcatacatttatttctagttcagatcttcaaataatgcatcagctgaggaaaaacccagaagaagttttagacttggccgttgcatcagttgaaagagcaaagaattactgtgatgatgtcgagttttctcctatggacgcatctaggactgacccgcaatacctttatcagttactagaggcagtaatcgccgctggagctacaaccgttaatatacctgatactgttggctattcaattccatctgaatttggatcacgaatcaaagatctaattcaatcagtacctaatattgggaaagctgtcatatcagtgcactgccataatgatctaggccttgctgcggcaaacagtgttgctgctatacaggctggtgcgcgtcaagtagaaggctgtatcaatggcctcggtgaaagagcgggcaatgcctctttagaagaggtcataatggcaattgagacccgtaaagacctgttggatgtatcgacaaatatcactactgagcatatctacaggacatctcgaatggtgtcagatattacaggctttccagtacaggcaaacaaagcggttgttggagcaaatgcttttcggcatgcatctggaatacaccaagatggagtattaaaagaaagaagtacatttgaaataatggacccaaaattagttggatggccatccaatgaattagttttaggtaaattaagtggacgagctggattgaggtcaagattagaagatcttggatatcatttaactaaaccagaacttgacggtgtttttgaacaattcaaggacttggctgatcgaaaacgtgaagtgacagataaggatttggagtctttaatggctggtcagcgacgaatggacacagagctacaaagttatattttagaacatgtgcaagttagctcaggaaaccatgacgtcccaaccgcgacagtttctttaactatgcaggatggcacaaaaatcacagatgctgccacaggcacaggtcccgttgatgcggtctatcaagcaattaaccgtatagtaaaggttccaaacaaactaacagaatatcgagttaacgcgattacagagggcatagatgcccagggaagcgtaacaattcgaattgaacaggatggcgagacctatgttggaagagggtcggatacagacattatagttgccagcgccaaagcttatatgcatgcgctaaatcgcatgctggatattacaggcaccgaagcttctcaaactactgcttag

SEQ ID NO: 237224 - DNA, 741 bp, Unknown
  Bacterial polypeptide expressing nucleotide sequence isolated from the Sargasso Sea
cctcgtgcttcaaacttgtatcttcagttacatcttttccagttcaatttaataaagccattgttggaaaaaatgcttttgcacatgaatctggtattcatcaagatggaatgctcaagaacaatgaaacatatgaaatcatgaccccagaaagtattggtttaaatgaatccactttagtgatgggtaagcattctggaagacatgcttttaaagaaaaagccaaagaacttggttatgtgctagctgacaatcaattaaatgatgcattttataggtttaaggatttagctgataagaaaaaagaagtctttgacgatgatattgttgctctaattgatgatgaattttctaaaggcttagatgttataaagctagtatctttatctatttatgctggtactgaaggcccacaatttgcagatctttcattagagatagatggagaagtaaaacaaaataaatctgagggcgatggaccggtagatgccttatttaattcaataagaactcttattccacatactgctagtttacagttatatcaggttcatgctgttacagaaggaactgatgctcaagcagaagttagtgtaagattacacgaatcaggtaagacagttataggaaggggtgcagatactgatactttagtagcttctgctcgggcgtatataagtgctttaaatcgtcttatggttaaaagagagaaaagtattcctgaggagatagctaattaat

SEQ ID NO: 237225 - DNA, 1003 bp, Unknown
  Bacterial polypeptide expressing nucleotide sequence isolated from the Sargasso Sea
ttgccagataaagtattaatatttgatacaacacttagagatggagaacagtctcctggggcttctatgaatcaagaggaaaaactctctattgcaagattattagaggagttaaaggttgatattattgaagctggttttcctatagcttctaaaggtgattttgactcagttcaagcaattgctaatgaaataaaggactgccagatagcaggattagcgagggcaaaacaggaagatattgaaacagcttgggatgctgtaaaaaaagcaaaaaatccaagaattcacacttttattgccacaagtccaattcatatgaagtttaaactcaaattaactgaagaagaggtcttagaaaaaatcaaaggcagtgtgtcttttgcaagaaatttatgctctaatattgagtggagttgtgaagatggtgggaggtcctcaattgattttctatataaatgtatagagttagcaattgaaagcggtgcatctacaataaatattcccgatacagttggttacaccttaccttttgaatttggagagattattaaaaaagtaaaaagtaatgttcccaatattgataaagcaataatttctgttcattgtcataatgacttgggattagcggttgcaaattctcttaacgcagttgaaaacggtgcaagacaaattgaatgcactataaatggactgggagaaagagcaggtaatgccgccctcgaggaagtagtaatggctatgaaagtcaggtcagatcttctaaaagtgcaatctaacatcaatacaagcgctatatcaaaaacatcaaaacttgtatcgtcaattacaggttttcctgttcagcctaataaagcaattgttggagcaaatgcttttgctcatgagtcaggaatccaccaagatggagtattaaaaaatgttcaaacttacgaaattatgtcacctgaaacgattggtttaaagaaatcaagtttggtgcttggcaaacactctggaaaac

SEQ ID NO: 237226 - DNA, 1153 bp, Unknown
  Bacterial polypeptide expressing nucleotide sequence isolated from the Sargasso Sea
gaattcagccctgaagacgcaactcgcagtaaccctaaatttctagtagaaatcctttcagaggtagtacgttctggagcaactactttaaacattcctgatactgttggttacacaactccagacgaaatgtttgagttaatcacaagattaagaaatgaggtttacaatgccgataaagtggttttttcagtgcattgccacaacgatttaggacttggagttgcaaactcactagcagcagtacgagctggtgcaagacaaattgaatgtacaatcaatggtataggagaacgtgcaggtaatgcttcgcttgaggaaatagtaatggcacttaaaatacgtcaggagtattttggttttgaaagcgatatagattcagaacagctttatccatcaagcaaactgctttcacaaattactggtgttgatgttcagccgaataaggctattgtgggtgcaaatgccttcgctcatgaagctggaattcaccagcatggtgtcctgaaaaaccccttaacatacgaaattatgacacctcagtctgttggaataaagtcaagcaatctagtaatgggaaagcattcaggtcgctttgctctcggtcagagaattcaggaacttggatttgatctaaatgatattgacctcaataatattttcaaggaatttaaacgtcttgctgacctgaaaaaacaggtttttgatgaggatattgaagctctggttacccatggaataggcagcaaatctgataaattcattttgaaggatctaatcattacatctggaacgactgcaataccaactgcaactatttcaatgaaaattgatgataaggttattaagaaagcaggttttggagatggaccggtggatgcagctttgaacacaataaagggaatcacagggattgattgtactctcacttcatacgttgtgaaagccataacaggcgggactgatgcacaaggtgaggtgagcgtcggtgtagaaaaagatggtgtgcgaataacaggacgtggagcacatacggatatagttgttgccagtgctcttgcgttcctaaatgccttaaacaggcttgaaattcggacaaagggcctcagccttgccaccccttcggaaaaagctgccctgggtggagtttgat

SEQ ID NO: 237227 - DNA, 542 bp, Unknown
  Bacterial polypeptide expressing nucleotide sequence isolated from the Sargasso Sea
tatgggcgataaagataaagtttttatatttgatactacaatgcgtgatggtgagcaatcaccaggagcatcaatgagtcttgaagaaaaaattcaaattgcaagagtttttgatgagttaggtattgatattattgaagcaggctttccaatcgcttccccaggagattttgagtcagtcaaggctataagtaaaattttaaaaaattcaatacccgctggtttatctagagcaaataaaaaagacattgatgcatgccatgaagctttaaaagctgcatcaagatttagaattcatacatttatttcaacaagcccacttcatatgaaacataagttaaataaaactccagagcaagttttagaggcaattaaagagagtgttacatacgcacgaaaattaactgatgatgttgagtggtcgtgtgaagatggaacaagaactgatatggactttatgtgtaaaatagttgaacttgctatttcttgtggagctaagactgttaatattcctgatacagttggatacacaactccatcag

SEQ ID NO: 237228 - DNA, 1002 bp, Unknown
  Bacterial polypeptide expressing nucleotide sequence isolated from the Sargasso Sea
ttgaaaataatttacatatgccagataaagacaaagtaataatttttgacacaacaatgagagatggtgaacaatcaccaggtgcctctatgagtgttgaggaaaaaattcaaatttctagagtttttgacgaaatgggaattgatattattgaagctggttttccaatatcatcaccaggtgattttgaggcagttagcgcaattagtaaaagtgtgaaaaattcaattccttgtggattagcacgtgcaactaaaaaagatattgatgcttgtcatgagtctttaaaatttgcaaaaagatttcgaattcatacttttatatctactagcccggttcacatgaaacataagcttaatatgaataacgagcaagttttagacgcaatcaaagagagtgtcacgtatgccagaaaatttacagatgatgttgagtggtcttgtgaggatggaacaagaacagatttagattttatgtacaaaacaattgaacttgcaattaattgtggtgcaaaaacaataaatattcctgatacagttggttattctataccagaagaatttgcaaaaactattacatctataaaaaataatgtgcctaatattgataaagcaattctctctgctcactgtcataatgatttaggacttgcggttgctaatgcattatctggactttctgccggtgttagacaaatagaatgtactattaacggtataggagaacgtgcgggaaacgctgctcttgaagaaattgtaatggcaattaaaacaagagaagatttattgccttatgaaacaggtattaaaacagaattaataagtaaagcatctaaaatagtatcaaatgcaacaggttttcctgttcaatttaataaagcaattgttggaaaaaatgcttttgcacatgagtctggaattcatcaagatggaatgcttaaaaatagagaaacatatgagataatgacacctgaaagtgtaggggtaagcaaacatcattagt

SEQ ID NO: 237229 - DNA, 682 bp, Unknown
  Bacterial polypeptide expressing nucleotide sequence isolated from the Sargasso Sea
atggctgataaaaatagaattataatttttgatactacaatgcgcgatggagaacagtctcccggcgcaacaatgagtttagaagaaaaacttcaaatctctagagtttttgatgaactcggtatcgacgttatagaagctggatttccgatagcctcaccaggtgacttcgaagctgtgactgagataagtaaaattttaaaaaattctatccctgctggtctttctcgagcaacaaaaaaagatatagatgcttgcaaagattcattatcacatgccaagagatttagaatacatacttttatttcaacaagtccacttcacatgaagcataagcttaataaaactcctgaagaagttttaaatgcaataaaagaaagtgtaacatatgcaagaaaatttactgacgatgtagagtggtcttgtgaagatggtactaggacagatttagattatatgtgcaaaacagttgaactagctattaaatgtggagcgaaaacaattaatattcctgatacagtaggttattcagttccatctgaatttaaaaaaattatagaaacattgattaataaagtaccaaatattgataaggcaatactttcaactcattgtcataacgatttaggtcttgctgttgcaaattatttggcgggtgttatggctggagcacgacaaattg

SEQ ID NO: 237230 - DNA, 832 bp, Unknown
  Bacterial polypeptide expressing nucleotide sequence isolated from the Sargasso Sea
aatgcctgaatttgatcccaaaaacaaatatactccttttgaaagaattaatttaaaggacagaaagtggccaaaccaaattattaataatgcgccaacttggtgtagcgttgatttgcgagatggaaatcagtcattaattgagccaatggatactcaaaaaaaattaaagctttttaaaactttagtatctatgggctttaaggaaatagagattggttttcctgctgcctcagaaactgattataacttctgtcgatatttaattgaaaataaactgatccctaatgatgttacaattcaagttttaactcaagctagagagcaccttatagataatacttttgaggctttgataggttgcaactcagctattgttcacctttataactcagtttctacacttcaacgaagggtagtatttaaacaagatagaataggtgtgaaaaatatagcattagatggtgcaaaatatattttaaataaacttaataaatttgatgaaggtgtaataaaattacaatattcgcctgaaagttttactggaactgagctcgactatgccttagacgtttgtgaggaagtattagattgctggaaggcaaatcaaaaaaatccagttattattaaccttcctgctactgttgaaatgtcgacgccaaatatttatgcagaccaaatagagtggatgagcaacaacttctctaatagagatagagtaattctatcactgcatcctcacaatgatagaggtactggagttgctgcaactgaattagctctcatggctggggctgatagagttgaagggacattattggaaacggagaga

SEQ ID NO: 237231 - DNA, 540 bp, Unknown
  Bacterial polypeptide expressing nucleotide sequence isolated from the Sargasso Sea
gttgtatatttcggacactaaaaatatttatatggctgagaaagataaagtatttattttcgacacaactatgagagatggtgaacaatcaccaggtgcttctatgagtgttgaggaaaaaattcagatttcaagagtttttgatgaaatgggaattgatataattgaggctggttttccaatatcatcacctggtgactttgaggctgtaagtgcaatcagtaaaagtgtaaagaattcaattccttgtggtttagctagagctacaaaaaaagacatagatgcttgtcacgagtctttaaagtttgcaaaaagatttcgtatacacacattcatttcgacaagcccagttcatatgaaacataaacttaatatgacagatgaacaagttttaggtgctataaaagaaagtgttacttatgctaaaaaatttacagatgacgttgagtggtcatgtgaggatggcacaagaacaaatttagaatttatgtacaaaacaatagagcttgctatcaaatgtggagcaacaacaattaaata

SEQ ID NO: 237232 - DNA, 1642 bp, Unknown
  Bacterial polypeptide expressing nucleotide sequence isolated from the Sargasso Sea
atgtcaaaagatcctggaagaattttgatatttgatacaactcttcgagatggagagcaatctcctggtgcaagtttaaatcttgaagaaaaacttgctatagcccatcaattagcaagattaggggtcgatgttatcgaggctggattccctttcgcaagtccaggagattttaaagctgttaataaaattgccaatgccgtagggaaagaaaatggacctacaatatgcggtttagctagagcgtctaaaggcgacataaaggtttgttatgaagcagtaagtccagctccaaaaaaaagaatacatacttttattgcgacaagtgatattcatcttaaacataaacttaaaaaatctagaaaagatgttcttcatatagttccagaaatggttaattatgcaaaatcattggtagatgatatcgagttttcttgtgaagatgcctcaaggagtgatcctgattttttatacgaagtgattcaactagcaatttctgcaggagctacaacaataaatatccccgatactgttggatttacaactcctagtgaatttggcaaactaattgccgatataaataaaaatgttccaaatattgatgaggcagtaatatcggttcatggtcataatgatttaggtctagcagtagccaattttctagaggcggtaaaaaatggagcaagacaactagaatgtaccattaatggaataggagaaagagcaggaaatgcctccttagaagaattagtaatggcgcttcatgttagaaaaagtttttttaatagtttttttaaaagaaatccagattcaccaacccctcttaccgctatcagaacagaagaaataacaaaaacctctagactggtttccaaccttactggaatgactgtacaacctaataaagcaattgtgggagctaacgcttttgcacatgaatcaggtattcatcaagatggggttttaaaaaatagactaacttacgaaattattgatgctaaaactgttggtttgagtgacaacaaaatatctttggggaaacttagtggaagaagtgcagtaagagcaagattagaagagatgggatatgatttgagtcgagaagatttaaatgatgcttttgcccgttttaaggatttagctgacaggaaaagagaaattactgatagagatttagaagcaattgttagtgaacaagttcaactcccagaagccaaatttcaactaagtcttgtacaagttagttgcggtaatgcatctaaacctactgctaccatttcgcttttaaacacagaagacaatactgaggatactgctgtatcaatagggactggacccgttgatgcagtatgcgaggctttaaataaattagctaaagtccccaatgaattaattgaattttctgttaagtccgtaacagaaggaattgatgctttgggcgaagtaactataagaataagaagggataataaaatatattcgggtcattctgctgatacggatgttgtagttgctgcagctaatgcttacgttaatgctttaaatagacttgtattttctgagaaaaaaaattcaattcatccacaatttgataatttagaaaattctgataaaacatttatatctaatcctgcaaattaaa

SEQ ID NO: 237233 - DNA, 1558 bp, Unknown
  Bacterial polypeptide expressing nucleotide sequence isolated from the Sargasso Sea
atgactgagaaaatttacatttttgataccactttaagagatggtgagcaatctccaggtgcttcaatgaatttagaagaaaaaattcaaatagctgaagttttggctgatttaaaagttgatattattgaagcaggttttccaatagcttctaatggagactttgaggctgtttctgaaattagtaaaaatattaaagggcctactattgccggattagctcgagcaaagttagctgatattgaaagagcttgggaagctgtaaaattttcagattctccaagaatacatactttcattgctacgagtccaattcatatgaaatataaattaatgaaatctgaaaatgaagttttagaagcaattaaacaaactgtaacttttgctagaaatttgtgcccgaatattgaatggagttgcgaagatgggggaagatcaaatttagattttttatatcaatgtgttgaattagccattaaatgtggtgctactacaattaatattcctgatactgttggttatacattgcctactgagtttggttcaatatttaaatcagtaaaaaataatgtaccaaatatagataaagcaattttatctactcatacccataatgacttaggtttagctgttgctaacagtatagccgcaattcaagaaggggcccgtcaagttgaatgtactataaatggattaggtgaaagagcaggaaatgctgctttagaagaaatcgtcatggctttaaaagttaaaaaagatcttatcccttttcatactgatattaaaactcaatctattacaaaagcatcaaggctagtatcatctataacaggtttttctgttcaacctaataaagccatagtaggtgcaaatgcttttgcacatgaagcaggaattcatcaagatggaatgttaaaaaatgcggaaacatatgaaattatgactccagaaacagtaggactaactgaatcttcattagttctaggcaaacattcaggtaaacatgcattttcagaaaaactaaaagaattaggatatgaattaggagataatgctttaatggaattatttggaagatttaaagatctcgcagatagaaaaaaagaaatttttgatgaagatttaattgccttagttggagatagagctgcttcatataatgaaaaaataaaatttgttaatctaactgttaatgctgggtcattagaaaaacatcaagctaaacttacaattttaattgaagataaaagcaaggatattgaaacagatggaaatgggcctgtagatgcaacatttaacgctattaaattattaactaacactaattataagcttaaattatatcaagttcacgcaataactgctggcacagatgcacaaggtgaagttactgttagattagaagatgatcaattaacttctcaagcaaaagggtcagatccagatattattgtggcttcagctaaagcatatataaatgcattaaataaattgatatataaaaaaacgcgatcaaaaaatgaacaaatttctgcattaaaaattgaaggtgtataaa

SEQ ID NO: 237234 - DNA, 1033 bp, Unknown
  Bacterial polypeptide expressing nucleotide sequence isolated from the Sargasso Sea
tggagcatcatttctggcctgtatgaacgcgtaccaaatatcgataaagccatcatctccgtacacacccatgatgatttaggtttgggcgtaggcaacgcactggcagccgttcacgccggagcgcgtcaggtggaaggcgcgatgaacggtatcggcgaacgtgccggtaactgctcactggaagaagtgatcatggcgatcaaggtgcgtaaagatatcctgaatgtacagacccgcatcaatcaccaggagatctggcgcaccagtcaattagtcagccaaatctgcaacatgcctattcctgctaacaaagccattgtcggtagcggcgcctttgcccactcttccggcatccatcaggacggcgtactgaaaaatcgtgaaaactacgaaatcatgacgcctgaatccatcggcctgaaccaggtacagctgaacctgacgtcccgttccggacgtgccgcggtgaaacaccgtatggacgagatgggatataaagaaaatgaatacagcctggacaacctgtacgacgcattcctgaaactggcggacaaaaaaggtcaggtatttgattacgacctggaagcgctggccttcatcaataaacagcaggaagaaccggagcatttccgtctggattacttcaacgtgcagtccggctcaaacgacatcgccaccgcctccgtcaagctgggctgtggtgaagaagtcaaagccgaagcggcgaacggtaacggtccggtcgatgccatttatcaggcaatcaaccgtgtaactgagtacaacgtcgaactggtgaaatacagcctgaccgccaaagggcacggtaaagatgcgctgggtcaggtggatatcgttgccaactataacggtcgtcgtttccacggcgtcggtctggcgacagatatcgtcgaatcttccgctaaagcaatggttcatgtgctgaacaacatctggcgcgccgaagaagtcgaaaaagaattgcaacgcaaagctcagaacaaagagaacaacaaggaaaccgtggagt

SEQ ID NO: 237235 - DNA, 949 bp, Unknown
  Bacterial polypeptide expressing nucleotide sequence isolated from the Sargasso Sea
taacgatttaggtttagctgtagctaattcactcgctggagtcttagcaggagcacgacaagtagagtgtacaattaatggaattggggaaagagcaggcaatgcagctttagaagaaattgtcatggctatgaagacaagaaatgatttgatgccatttaaaactggaattaatactcaattaattagtaaggcttcaaaaacagtttcaaatgccactggttttccagttcaattcaataaagctatcgttgggaaaaatgcttttgctcatgagtcaggtattcaccaagatggaatgcttaaaaatagaaatacatatgaaataatgacgcccgaaagtgttggtgtaaaaaaaacttctcttgtaatgggaaaacattctggaaggcacgcatttaaagataaattatcagatcttggttacgcaggtgtaacagacgatgtaattcaaacggcttttggaaaatttaaaattttagctgataaaaagaaacacgtttacgacgaagatataatcgcattggtagatgatagtttgatcaaagaaagcaatgttattaatttaaaatctctaaaagtttttgcaggtacaggggaaccgcaaaaagctgagatgacactagaagtttatggagatgtaaaaaaagcaaacgaaactggagatggtccggtagatgcgatatttaaatgtattaaaaaattatatcctcatgatgttaaacttcaactatatcaagtacatgcagttacagaaggcacagatgctcaagcaactgtaagtgttagaattgaagaaaaaggtaaaacaaccgttggtcaagctgctgatacagatacacttgtagcttcagccaatgcttatttaaatgctttaaataagatgattattaaaagagaaaaaacagcacctgaacaatacgaacaagaaagaatgaaaggaatataa

SEQ ID NO: 237236 - DNA, 1576 bp, Unknown
  Bacterial polypeptide expressing nucleotide sequence isolated from the Sargasso Sea
atgtcagataaagaaaaattatacatatttgatacgacaatgcgtgatggagaacaatcaccaggtgcgtctatgagtgttgaggaaaaaatacaaatttcaagagtatttgacgaaatgggaatagacattgttgaagcaggatttccaattgcttcgccaggagactttgaggctgtatcggaaataagtaaaataatgaaaaactcgattccatgtggtctttcaagagcattaaaaaaagatattgatgcttgtcatgagtcgttgaagcatgctccaagatttagaattcatacttttatttccacaagcccattacatatgaaacataaacttgaaatgacaaacgagcaggttctagacgcaatcaaagaaagtgttacttacgcaagaaactttactgacgatgtagaatggtcctgtgaggatggtacaagaactgatatggatttcatgtgcaaaactgttgaacttgcaattaaatgtggggctaagactataaatattccagatacagttggatattctatacccgaggaatttgctaaaacaattaaacacttaaaaaataatgttccaaacatagataaagcaatattatctgcgcactgtcacaatgatctaggcttagcagtagcaaatgcattagctggagtatcagaaggtgttagacaaatagagtgcacaattaatggaataggtgaaagagcaggtaatgctgcattagaagaagtagttatggcaattaaaacaagaaatgatttaatgccatataatacaggaattaaaactgaattaattagcaaagcctctaaaatagtttcaaatgcaactggttttccagttcaatttaataaagcaatagttggaaaaaacgcatttgcacatgagtcgggaattcatcaagatggtatgttaaagaatagagaaacatatgaaattatgacaccagagagtgttggagttaaaaaaacgtcgcttgttatgggtaaacattcgggacgacatgcttttaaagataaattatctgacttaggttactcagatcttacagatgatattattcaagctgcttttggaaaattcaaagttttagctgataaaaagaaacatatatacgatgaagacatagttgcgttagttgatgatagtttaattgtagataataaaataaatgcaattaatttaaaatcgttaaaagtttttgcgggaacaggcgaaccacaaaaagccgaaatgacattggatgtctatggtgatattaagaatacaactgaaacaggagatggaccagttgatgcaatatttaaatgtataaaaaaattatatcctcacgacgtaaaattatctttatatcaagtacacgcagtaacagaaggtacagatgcacaggcaacagtcagcgttaaaattgaagaaaacgataggacaacagtaggtcaatccgcagacactgatactttagttgcatcagcaaatgcatatttaaatgcattaaataaaatgctcataaaacgtgagaaaaaagcaccatctcaaaatattaaacatcaaaaagtgaaaggaatataaa

SEQ ID NO: 237237 - DNA, 958 bp, Unknown
  Bacterial polypeptide expressing nucleotide sequence isolated from the Sargasso Sea
atgagtggtcaggacaaaatctggatttttgataccaccttaagagacggcgaacaggcgttgcgtgccagtttaagccataagcaaaaaattcagttggctcatgctattgcccgcttaaatgtcgatgtgatggaggtgggttttcctgtgtcatcgccaggtgattttgagtctgtgcaaagcatagcgacccaagtcaaaggccctattatttgtggtttagcccgggctgtcagcactgacattgaagcttgtggtcaggctttggctaatgctgagcgtcgccgtatccatacttttatcgccacctcgcctttgcatttgcagtacaaattacgccgcactttagaacaagccactgaacaggctgttgccgctattcagctggcgcgtcgttatacagacgatgtcgagttctcctgtgaagatgcaggccgcactcctattgatgatttatgccgtattgtcgaagccgctattaaagccggcgcccgcactattaatattccggacactgtgggttacaccattccgaatgaatttgcccgcatcattactgagttgcgccacaaagtaccgaatatcgatcaggccattttaagtgtgcactgccataacgatttaggtttggctgtcgcgaatagcatcacagcagttcaggccggtgcccgtcagattgaatgtacagtcaacggtatcggcgagcgcgccggtaattgttctttagaagaagtggcgatgattatcaaaacccgcccggacattctgccgttttacactgacattaaaagcactgagatttaccgcagcagccatttggtcagccagatttgccatatgccgattcagccaaacaaagctattgtcggtgaaaacgcttttgcccactcctcaggtattcaccaggatggtgtattaaaagcgcaaaacacttacgaaaattatgtctcctgaa

SEQ ID NO: 237238 - DNA, 1594 bp, Unknown
  Bacterial polypeptide expressing nucleotide sequence isolated from the Sargasso Sea
aatggataaccctatagataaatattcaccttttgtgcctattgatttaaagaatagaaaatggccaggtaaaacaattaaacaggctccaatttggtgttctgttgatttgcgtgatggcaatcaagcacttattgagccaatgggctctgagagaaaaaatagaatgtttgatttgttgtgtaaattaggttttaaagaaattgaggttggatttccttctgcttctcaaactgattttgattttgtaagagatctcatagaaaataaaaaaataccatcggatgtaagtatacaagttctaactcaagcaagagaagaattaattcataaaacctttgaatcgcttaaaggtgcatcaaaaggaattattcacttttataactcaacatcaactcttcaaagagaagtggtattcaataaggataaaggcggcataaaaaaaatagccacagatgctgctaggctaataaagtcgttggctaaagaaaatccagatactgattggagttttgagtattctcctgaaagtttcactggtactgaactagactatgcaagagatgtttgtgacgatgttgttgaaatacttaaacctgcaacaaagcataaaataataattaatttgcctgcaaccgtagaaatgtctactcctaatatttacggagatcaaattgaatggatgaatgacaatctcaagaatagaaaagatatctgcttaagtttgcatcctcataatgatagaggaactgctgttgctgcatctgaatttggattgatggcaggagcggacagaattgagggaacactttttggtaatggagaaagaactggaaacgtagatgttgtaacaatagcattaaatatgctcacacaaggtgtagatcctaaactagacttttcaaatattaattcagtaatgagagaggttgaatactgtaatcaacttcctgttcatcctagacatccttacgcaggagatcttgtttttactgctttttctggatctcatcaagatgcaataaaaaaaggttttaatgcgattaaaaaatcaaataatccaaaatgggaagtcccctatctaccaatagatcctgcagaccttggaagaaattatgaagcagtagttagaattaactctcaatcaggtaaaggtggtgtagcatttctattagaaaaagatcatggagtatctttaccaagaagacttcaaataagtatgagtcaaaaaattcaaaaattagctgatgagaccggaagagaaattgtaagctctcagttgtgggaagtttttgaaaaaaattatctcgagccaattaataacttttcatacattaaacacaactcttctacaaaagaagatattcacaacctggatttaactttacaaatgaatgacgagcaaatcattattaatggaactgggaatggtccaattgattcatttataaacgggttgtgtaacaagttagatattgatattaaagttgcagattatcatcagtcagccatctcttcaggttcagatgcaaaggcggctgcttatattgaacttgaaaaagatggtaaaactttttgggggtgtgggaattaa

SEQ ID NO: 237239 - DNA, 1576 bp, Unknown
  Bacterial polypeptide expressing nucleotide sequence isolated from the Sargasso Sea
catgtcagatcgggtcatcatattcgacaccaccctgcgcgatggtgagcaggctctggcggccagcttgacggtcaaggagaagctgcagatcgcccaggcgctggagcggctcggtgtcgacgtcatggaggtggggttcccggtctcctcccctggcgactttcaatcggtgcagaccatcgcccgccacatcaagcagagccgggtctgtgccctcgcccgcgccctgcccaaggacatcgacgccgccggcgaagccctgcgggtcgccgaagcctttcgcatccacaccttcatctccacctcctccatccacgtcgagagcaagctgaagaagagcttcgaagacgtgctggagatgggggtcaacgccatcaagcatgcccgccgctacacagacgacgtggagttctcctgcgaggatgcgggccgcaccccgatagacaacctgtgccgcatggtggaggccgccatcaaggccggtgcccgcaccatcaatattccggataccgtcggctacacggtaccgaccgagttctccggcatcatccagaccctgttcaaccgggtacccaacatcgatcaggccatcatctcggtacactgccacgacgatctgggcctctcggtggccaactccatcggcgccgtgcagatgggggcccgccagatcgagtgcaccatcaacggtatcggcgagcgggccggcaactgctcgctggaagaggtagcgatgatcctgaagacccgcgccgatctgctcggggtgcacaccaacatccgccacagcgaaattcatcgcaccagcgccctggtcagccagctctgcaacatgccggtgcagcccaacaaggccatcgtcggggccaacgccttctcccacagctccggcatccatcaggacggtgtgctcaaggcgaaaaacacctacgaaatcatcaccccagagagcatcggcctcacccagaacaacctcaacatgacttcccgctccggccgccacgtcatcaagcaccggatggagtccatgggctacgccgagagcagttacgacctcgacgatctctacggcaagttcctcaccctggccgacaagaaggggcaggtgttcgattacgatctggaggcgctcgccttcttcagccagatccacgaagagccggagcacttcaagctggagtacctcggtgtgcagagcggcagctcggtgatggccaccgcctcggtgaaattgaaggtgggccaggagatcgtcagcgaagccgccaccggcaacggcccggtggacgcggtctatcagtgcatcaaccgcatcaccggctacgaaatcagcatcgacaagtacgaactcaagggcaagggggaaggcaagaacgccctcggccaggtcgacatagtcgcacagtacaagggccgaaaattccatggcatgggcctggccaccgacatcatagagtcttccgcccaggcgttgatccacgtgatcaacagcatctggcgtgccgatcaggtggccgaacagatggaacgcaacgtcgcaaaaacagacaagatcaatacggagagcgtgtga

SEQ ID NO: 237240 - DNA, 1570 bp, Unknown
  Bacterial polypeptide expressing nucleotide sequence isolated from the Sargasso Sea
atgtctaacagagtaattatatttgataccaccttacgtgatggcgagcaggcgttagcggcaagcctgtcggtcaaagaaaagttacagatcgccatggcgttggaacgtctcggtgtggatgtaatggaagtcgggtttcccgtgtcttcccccggtgattttgagtcggtgcagaccattgcccgtaccatcaaaaatagccgtgtgtgcgccttatcccgcgccttggaaaaagatatcgatgccgccgcccaagcattatcggttgccgaacagttccgtattcatacctttatctccacctcgactatccatgtggagagcaagttaaagcgctcattcgagcaagtgttggagatggcggtgggggcggtgaaatatgcccgtcggtttaccgatgatgtggaattttcctgtgaagatgcgggccgcacgccaatcgataacctgtgccgtatggtagaagcggcgattcacgcaggggctcgtaccatcaatatccccgataccgtgggctacacagtgccaagcgagtttgggggtattattcaaaccttgtttaatcgcgtaccgaatatcgaccaagccattatctcggttcactgccatgacgacttaggcatgtcggtggctaattcgattaccgccgtacagtatggtgcccgccaaatcgaatgtaccatgaacggcattggtgagcgtgcgggtaactgctccctagaagaaatcgctatgatcttagcgacacgtaagaatctgttgggagttgaaaccgggatcaatgccaaggagatccaccgcacgtcgaatctggtcagccagttatgcaatatgcctattcagtcgaataaggcgattgtgggcgcgaatgcctttacccactcttcggggattcaccaagatggcatgttaaaagcgcaaaacacctatgaaatcatgacgccagagagtatcggcctaaaccgtaacaacctgaatatgacctcgcgctcaggtcgccatgtgattaagcatcgcatggaggaaatgggctacagtgagcaggatttcaatctggatgccctgtacgaacagtttttacatttggccgataaaaagggtcaagtcttcgattatgacttagaagccttagcctttatggaagctcaagcggcggaagataacttctatcaattacagcagttagtggtgcagtccgactccaccgaaggcgtggccacggctactgtacgcatcgatgtcggcggagagattaaaaccgaagctgcgaccggtaatggtcccgtcgatgccgcctataacgccattgcccgtgcgacggaccgtcgtatcgatatcatcagctacaaattgggtgctaagggcgaggggcaaaatgcgcttggccaggtcgacattaccgcggtttaccatgaacaaaatttccacggtgttgggttagcgaccgatgtggttgaggcatcagcccgtgcgttagtgcatgtgatgaacctgacttgccgtgccgataaagtcgcagattacaaacagaatatgcataaaaacagagagctgggtggcgtctaac

SEQ ID NO: 237241 - DNA, 1549 bp, Unknown
  Bacterial polypeptide expressing nucleotide sequence isolated from the Sargasso Sea
aatgaatagtaaagataattatattaaaatttttgatacaacattaagagatggcgaacaatctcctggtgcatccatgtcacttgaagaaaaaatacagattgctgaaatttttgatgaaatgggtgtggatattattgaggcaggatttccaattgcatcaaatggcgattttgaatcagttaaagaagtttcaaaaataattaaaaatgttcaagtctgtggattatcaagagctggacagaaagatattgatagagcggccgaagctctaaagtatgcaaaaaacccaaggattcatactttcatatcaactagccctgtacacatgcaatacaaattacaaatgaatgaagaacaggttttagatgcgataaatttctcggtatcaagagcaagaaatttagtagatgatgtacaatggtcagcggaagatgccacaagaacagatagagattttttgttcaaatgtgttgatatggcaatttcttctggagccaccacaattaatattcctgatacagtgggatatacaactcctgatgaatattttgaaataattagctcattgataaataatattcctaattctgataaagtggttttctcaacccactgccataatgatttaggtttggcagttgcaaactcattatcgggtgtaagagcgggagcaagacaaattgaatgtactatgaatggaatcggagaaagagccggtaatgctgctcttgaagaggtcgttatgtcaatgaaggtaagaaatgatattttagattacaattcaggcgtagagacaactctttttacacgtgcttcaaaattggtgtcttcagtaacttcttttcctgttcaatttaataaagcaatcgttggaaaaaatgcctttgcacatgagtcaggaattcatcaggatggaatgttaaagaataacgaaacttatgaaattatgactccagaaagcattggtttaaatgaatccacattagttatgggaaagcattcaggaagacatgcctttaaagaaaaagctaaggagcttggttatattttagctgataatcaattgaatgatgcattttacagattcaaagatttagcagataagaaaaaagaagtttttgatgatgatattatagctttgattgatgatgaattctcaaagggtttagatgttataaagttgatatcgttatcaattcatgcaggcactgagggacctcaatttgctgatctgaagcttgagatagatggagaagtaaaacaaaatagatctgagggcgatggtccagtagacgctttattcaattcgataagaactttaattccacatacggctaaattacaactatatcaagttcatgctgtgacagagggtaccgatgctcaagcagaagttagtgtaagattacacgaatcaggtaagacagtaataggaagaggtgcagatactgatactttagttgcatctgctcgggcttatattagtgctttaaatcgtcttatggttaaaagagaaaaaaatattcctgaggagttagcaaattaa

SEQ ID NO: 237242 - DNA, 1660 bp, Unknown
  Bacterial polypeptide expressing nucleotide sequence isolated from the Sargasso Sea
aatggataatccaacagacaaatattctgcttttcagccaattagtcttcaaaataggaaatggcctgaaaaagtattaaaagaagcacctatttggtgctctgtagacttgcgtgatggcaatcaggcattgatcgagccgatgggatcagagcgaaaaaatagaatgtttgctttactttgtaaactaggttttaaggaaattgaagttggttttccgtcagcgtcacaaactgactttgattttgttagagatctaatcgagaacaaaaaaattcctagtgatgtaaaaatacaggttttaactcaagctagagaagaattaattagaaaaacttttgaatctctccgtgggtcaaaacaagctattgttcatttctataattcaacctcaactttacagagaagagtagtgtttgaccaagataaagaaggtataaaaaaaattgcacttgatgcggcaatattaattaaagatttagctgaggaaaatcctgatactgaatggacatttgagtactcacctgaaagctttacaggaacagaattagattatgcaagagatgtttgtgatgaagttgtcgatatattaaagacagcatctaaaaataaaattattataaatcttccagcaactgtcgaaatgtctactccaaatatatatggcgatcaaattgaatggatgaatgaaaatcttaaaaatagaaaaaatatttgtttaagtcttcatcctcataatgatagaggaactgcagtagcagcatctgaatttggacttatggccggtgcagataggattgaaggtacactttttgggaatggtgagagaactggaaatgttgacgttgttactattgcattaaatatgcttactcaaggcatagatccaaaattagacttctctaacattaattcagttatgagagaggttgaatattgtaatcaacttccagttcatccaagacatccctatgcaggagacttagtttttactgcattttctggttctcaccaagatgctatcaagaaaggttttaatgctatgaaaagctcaaatgatcctaaatggcaggttccatatttacctatagacccagcagacttgggcagaaattatgaagcagtcgtaagaattaattctcaatcgggcaaaggtggcgtagcttttcttttggaaaaagatcacggagtctcattgccaagaagattacaaattagtttaagtcaaaagatacaaaaacttgctgatgatactggtaaagaaatatctagtactcaaatatgggatatatttgaaaacaattatcttaaagctaaaaataattactcatatattaaacatgaatcttcaacgaaagatgatattcattctttatctttgatcatgaagatgggaagttcaaaagaggaaatttcaggatctggaaatggtcccatagattcttttataaatggtttatctaagaagatcggaataaatataaaggtagctgattatcatcaatctgcaatatcttcaggttcagacgcaaaagcagctgcttatatcgagttagaacaagacggaaaaacattttggggcgttggtattcatccaaatacaacgagagcgtcatttgatgcaataattgtaggtcttagtaagcttttgaatacttaa

SEQ ID NO: 237243 - DNA, 1537 bp, Unknown
  Bacterial polypeptide expressing nucleotide sequence isolated from the Sargasso Sea
catgaaagaatctagagaaattattatatttgacacaacactccgtgatggtgagcaagcacctggatgtagtatgactatgggtgaaaaattaaagattgctcacgctttaaaagaattgaatgttgatgtgattgaagcaggttttgctgctgcatctcctggtgattttgatgctgtaaatgcaattgcatccgagattgatggtccaactatatgttcgcttgcgagatgcaatgagagtgatatagaaaaggcttacgaagccctgaaggtaaataaaaatagaagagttcatgtctttgtagctacgagtgaaattcatctcaaacataaactaaatatggcaaaagatgaggttctcaaagctgcttacgaaggtgtaaaaatggcgaagtcattctgtgaaaatgttgagttttctcctgaggatgcttccagaactgatcatggttttctaactgaagttgtgaatgctgcaattgaagcaggtgcgacaacaatcaatgttccagatactgtgggatacactatcccctatgagtttggtgaactatttaaacacttgatttcaaactgcaatgatgctgagaatgtgatcttcagtgtccattgtcacgatgaccttggcctttctgtggcgaatagcttggctgcagttgaatctggagcaagacaaattgagtgcacaattaacggcattggagagcgagctggaaatacctcacttgaggaagtatgcatggcaatcaggacaagagaagagtatttcgattttaaaacatcgatcgattcaacaaagctatatcccaccagtcgattggtctcttcgattacgggtatgcatgtcccaagaaataaagccatcgttggcgacaatgcctttgcacatgaagcaggcattcatcaacacggcatgcttagagattcatctacatatgaaatcatgaagcctcaggatgttggtattgcaagatcaaacctcgtgcttggaaaacacagtggaagacatgcttttttagataggattaatgagctcggatttgcactcgagaaagatgagattgatccggcttttcaggaattcaagaaattggctgatagaaaaaaggaaatattcgatacagacatagaagcaatcgttctaaatgcggatattgccaatatgagccggtggacccttatggacctagagacaacttcaggctcatcatggggatctacagcatcactgaaattgaaagattctggagaagagataatcgagagggacaataatagcaatcctgccagtggacccattgaagctgttttcaatatcataagcgatatcacaggatataaacttgaattgacaaattttgagattcacagtgtcagtgttggagacgacgcacagggagaagtaactgtcacagtaagctataacggacaaaattatagagggcatggcattagtactgatattatcgaatcaggtgctttggcttatcttgaagtcataaacagaattgaaagaaatcaggcaaaacattag

SEQ ID NO: 237244 - DNA, 1039 bp, Unknown
  Bacterial polypeptide expressing nucleotide sequence isolated from the Sargasso Sea
catgttgcgcaatcccgctgagaaataccgccccttccccgctgtgcgcctcaccggccgtaaatggccgagccgcacgatcaaccaggcaccgatctggatgagcaccgatctgcgcgacggcaatcaggccttgatcgaaccgatgaatgccgcgcaaaagctcgaactcttcgaaatgctggtggcgatcggcttcaaggagatcgaagccggtttcccgtcggcctcgcaaaccgactttgatttcgtccgcaaactgatcgaagaaaagcgcattcccgacgacgtgacgatcgaagtgttcgtgccctcgcgcgctgaactgatcgcgcgcacgttcgaagcgctcgaaggcgcaccgcgcgccatcgtgcatctgtacaacgcgatctgcccgtcgtttcgcaagatcgtcttcaaccagtcgaagcagcagatcaaggcgctcgcggtagaaggcacgcgcatcgtcaaggagcacgcccaggcgcggcccgatacgcactggaccttccagtattcgcccgaaaccttcaacacgaccgaactcccctacgcccgtgaagtatgcgacgcggtcgcgcagacatggcggcccacgcgcgatcacaagatgatcatcaacctgcctgcgagcgtcgaggccgcgacgcccaacgtgttcgccgaccagatcgaatggatggaccgcaatctcagctaccgcgacagcatcgtattgtcggtgcatccgcataacgaccgcggcaccgccgtggccgctacggaattggcgctgctggcgggcgcggatcgcgttgaaggatgtctgttcggcaatggcgagcgcaccggcaacgtggacctcgttacggttgcgatgaaccttcacgcgcagggcgtcgattcaggcctcgacttctccgatcttggcgcggtgcggcgcgtggtcgagcgctgcaaccagattccggtgcatccgcgacacccgtacgcgggggatgcggcgcataggccggtatggagcgatgaggatctgcaacgcgcagccgcctga

SEQ ID NO: 237245 - DNA, 932 bp, Unknown
  Bacterial polypeptide expressing nucleotide sequence isolated from the Sargasso Sea
aatggctaacgaaaaagtaaaaatattagatacgacattaagagacggagaacaatctgctggcatagggatgacagtcgaagagaagatggaaattgctaagcagctggaaaaacttcaagttgacattatcgaagcaggctttgcggctagttctccaggagatttccaggcagttgaaaacatagcgagagaagttagaagctctgtcatttgctctttatccagagctcatcctaacgacgtggatcaagcatggggagccattaaacaagctgaatcaccaagaatacatgtattcctatcttcgtcagagattcaagttttacaccaactcagaaaaaaccgtgaagaagttatggatatggctgtagcaatggtcacaagagcaaagtcatattgcgatgatgttgaattctcaccgatggatgcgactagaaccaatccagaatatttatacaagatgcttgaagcagtaataaaagcaggtgccactactataaatattgctgataccgtgggatacgcaataccttcggatttcgcagaattaattaccgacatacgtaataaaatcccaggaatagagaacactaccttaagcgtacattgccacaatgacctggggttagcagtgtcaaatactcttgcggctattcaggctggagtacgtcaagtagagggatgtatcaatgggttaggagagcgtgcaggcaacgcctcattagaagaaataataatgggattggacactcgcaaagatctatttaatattgactgcaatattgataccactcaattatatccaacaagcagactagtaagcagaataacaggcatggcagtacaggcgaacaaagctatagttggagaaaatgcattcagacatgcttctggcatacaccaagacggagttttgaaagacagatcta

SEQ ID NO: 237246 - DNA, 1336 bp, Unknown
  Bacterial polypeptide expressing nucleotide sequence isolated from the Sargasso Sea
atggaagataaaaatagaattataatatttgatacgaccatgcgggacggtgaacaatctcctggcgcatcaatgagtcttgaggaaaaaattcaaatatcaagagtatttgatgaacttggtattgatattatagaggcaggatttccaatagcatctccaggagactttgaagctgttacagctataagtaaaattttaaaaaaatcagttcctgctggtcttgcaagacatacaaaaaaagatattgatgcttgtcacgaagcattaaaatctgccaaaagatttagaatacatacttttatttcaacaagttcacttcacatgaaacataaattgaataaaacacctgaacaagtaattgattcaattaaagagcacgttacttacgctagaaaatttactgacgatgtagaatggtcttgtgaggatggtacaagaaccgacatggattttatgtgtaagacagtcgaactagcaattaaatgtggtgccaaaactataaatatacctgatacagttggttataccgtcccctcagaatttaaaaagattattgaaactttaaaaaacaaagttccaaatattgataaagcaattttatcagttcattgccacaacgatttaggcctagcagtagcaaactctcttgcaggagtttcagctggagcaagacaagtagagtgtacaatcaatggtattggtgaaagagcaggaaatgcagcattagaggaaattgttatggcgatgaaaactagaagtgatctaatgccattcaaaactggaataaatacaaaattaataagtaaagcatccaaaactgtttcaaatgcaactggttttccagttcaatttaataaagctattgttggaaaaaatgcttttgctcacgagtcaggtatccaccaagatggaatgcttaaaaatagaaatacatatgagataatgacgcctgagagtgtaggggttaagaaaacttctttagtaatgggaaaacactctggaagacatgcttttaaagataaattaagcgatcttggatatgcaggggtgactgacgatgtaattcaaactgcatttggaaagttcaaaattttagctgacaagaaaaaacatgtttatgatgaagacattattgcgttagtagatgacagtttaattaaagaaagcaatgtaattaatttaaaatccttgaaagtatttgcaggaactggagaacctcaaaaagcagagatgactctggaagtctatggtgagcttaaaaaagctaacgaaacaggagacggtccagttgatgcaatttttaaatgtattaaaaaattatatccgcatgatg

SEQ ID NO: 237247 - DNA, 1516 bp, Unknown
  Bacterial polypeptide expressing nucleotide sequence isolated from the Sargasso Sea
atgaacattagaatttttgatactaccttacgtgatggtgaacaatctcctggtgtttcattatctcctgaaaaaaaattaaacattgcaaaaaaacttgatcagttaggcgttgatgcaattgaaacaggttttcctgtaatatctgatggagaaaaagaaggtgtaaaattaattgttggagaggggttaaaagcagaattatgtggattagcaagaactaacaaaaaagatattgatgctgcagtagactgtggattaaattacatccacacattcatcgcaacatctgatattcatttagaacataaattaaaaatgactcgtgatgaagcattagaaaaagctattgaggctgttgaatatggaaaatcacgtggattacaagtagaattttctgcagaagatgcaactagaactgatcgtgaattcttgaaaaaagtttttggtgctgttgccaatgcaggtgctgatagaattgatattcctgatacagttggttattcaacaccacaatacattggtgaaataactaaggatgcaattgaggtatcaaaattaccaattagtgtacattgtcataatgactttggtttagctgttgcaaacgcaatatctggagtacaagcaggtgcatcttgtgcacatgttaccataaatggaattggagaacgtgcaggtaatgcttctttggaagaatttgttatggcgttacatagtttagaatttgaaaacaaatgggaaacaaacatcaatacaaaattaatttatgaaacctctaggtacatctctaaattagcaggaatgtctgtacaaccaaacaaagcaattgttggtgaaaatgcatttggtcatgaatctggaattcacactcacggtgtattgaataatcctttgacatacgagccaattagtcctgaaattgtaggcagaacccgttggttacaggtaggaaaacatgcaggaattcacggtatgaatgcaatgctcaaagagtatggcattgagccaaatgaagaccaaacaaagcaaatcttggataaagtaaaggcattaggtgatcaaggaaaacaggtaaccgaagttgaattattatctatggctaatgaagtaattggtgaaaataaattaaaacgaattgtccagttagcaggattttcagtatctactggtgttggaacaatgccatatgcatttgttaaattgaatgttgatggtcaagaattttctgcaactgattacggtgtcggtcctgtggatgctgcattaaatgcaattcaaaaaattacaagtcaagttactgatgaagttcgattaaaagaatacaagttagattccatatctggtggcgctaatgcattatgtgaagtaactgtaaaagttgaagatgcacgtggtaatattatttcatcgaaatctgttggagaagatattgttacaacaagtgttcaagcaatggttgatggaattaatcgcatcatgttgaaaaatcttctaaaggaaaagaagatttaat

SEQ ID NO: 237248 - DNA, 1048 bp, Unknown
  Bacterial polypeptide expressing nucleotide sequence isolated from the Sargasso Sea
tatactattccatccgagttcacaaaaattattcaaacattgttaaacaaagttcctaatattgataaagcaattttatccactcactgtcataatgacttaggcttagcagttgcaaattctttggcaggagttcaggctggtgctagacaaattgaatgtacaataaatggtttaggagaaagagctggaaatgcagcgttagaagaagttgtaatggcaattaaaacaagaccagatttgatgccttatgaaacaggaattaatacaacacttttaaataaagcttctaaaattgtgtcaaatgcaacaggttttccagtgcagtataataaagcaattgttggaaaaaatgcttttgctcatgaagcgggcatccatcaagatggtatgcttaaaaatagacagacttatgaaattatgacacctgaaagtgttggtgttaaacaaacctcattggtaatgggtaaacattctggcaaacacgcatttaaggacaaattaaatagtttagggtaccctgatttaactgatgacgttgttggtaatgcttttgctaagtttaaggtattagcagataagaaaaaacatgtttatgatgaagatataattgcacttatagatgatagtttaattatcgataataaagtaaatgcaattagtcttaaatctcttaaagtttttgctggaacaggtgaacctcaaagagcagaaatgactttagatgtatacggtgatgttaaacaagcatcagaaactggcgatggtccagttgatgcaatttttaaatgcattaaaacactatttccacatgatgttaacttacaattataccaagtgcatgctgtaactgagggaactgatgctcaagctacagtaagtgtcaaaattgaggaaaaaggaaaaactactgttgggcaagctgcagatacggatacactagtagcatcagcaaatgcatatattaattcattaaataaaatgattattaaacgagataaaacagctccaatggagcaagaaagtaaaaaggtaaggggtatataga

SEQ ID NO: 237249 - DNA, 1537 bp, Unknown
  Bacterial polypeptide expressing nucleotide sequence isolated from the Sargasso Sea
ctgcattggagcgtgaagaacacgaacattagaatttttgatacaactttacgtgacggtgaacaatctcctggtgtttcattatctcctgaaaaaaaattaaacattgcaagaaaacttgacgagttaggtgttgatgcaattgaaactggttttcctgtaatatctgaaggagaacgtgaaggagtaaaattaattgttggagatggattaaaagcagaattatgtggattagcaagaactaacaaaaaagacatcgatgctgcagtagactgtggattaaactacattcatacattcattgcaacatctgacatccatttagaacataaattaaaaatgtctcgtgatgaggccttggaaaaagcaattgaagctgtagagtatggtaaatctcgtggattacaagtagaattttctgcagaagatgcaactagaactgatcgagaatttttgaaaaaagtttttggtgctgttgcaagtgcaggtgccgatagaatcgatattcctgatacagttggttattcaactccacagtacatcggtgaaattactaaagatgcaattgaggtatcaaagttacctatcagtgtacattgtcataatgattttggtttagctgttgcaaacgcaatatctggtgtacaggcaggtgcatcatgtgcacatgtaaccattaatggaattggtgaacgtgcaggtaatgcttctttagaagaatttgttatggcattacatagtttagaatttgaaaacaaatgggaaacaaacatcaatacaaaattaatttatgaaacttcacgatacatctctaaattagcaggaatgtctgtacaaccaaacaaagcaattgtcggcgaaaatgcatttggtcatgaatctggaatccacactcatggtgtattgaataacccattaacatacgagccaattagtcctgaaattgtaggtagaactcgttggttacaggtaggaaaacatgcaggaattcatggcatgaatgcaatgctcaaagagtatggtattgagccaaatgatgatcaaacaaaacaaattttggataaagtcaaggcattaggtgatcaaggaaaacaggtaaccgaagttgaattactatctatggctaatgaagtaattggcgaaaataaattaaaacgaattgtccagttagcaggattctctgtatctactggtgttggaacaatgccatatgcatttgtaaaattgaatgttgatggtcaggaattttctgcaactgattatggcgtaggtcctgtagatgcagcattaaatgcaattcaaaaaattacaagccaagttactgatgaagttcgattaaaagaatacaaattggattctatctctggtggtgctaatgcattatgtgaagtaaccgtaaaagttgaagatgcacgtggtaatattatttcatccaaatctgttggagaagatattgttacaacaagtgttcaagcaatggttgatggaattaatcgtatcatgttgaaaaatcttctaaaggaaaagaagatttaat

SEQ ID NO: 237250 - DNA, 820 bp, Unknown
  Bacterial polypeptide expressing nucleotide sequence isolated from the Sargasso Sea
aatgagcgataaaaataaagtatttatatttgatacaacgatgcgtgatggagagcagtctccaggtgcatctatgagtttggaagaaaaaattcaaattgcaagagtttttgatgagctcggagtagatataattgaagctggttttccaattgcatccccaggagattttgaagcagtaacagaagttagtaaaattttaaaagtttctattccagcaggattagcaagacattcaaaaaaagatattgatagatgttacgaagctttaaagcatgctccaagatttagaattcatacatttatttcaactagccccttacacatgaaacataagttaaacaaaacaccagaacaagtttatgattcaattaaagaacacgtaacatatgccagaaaatttacagatgatgttgaatggtcgtgtgaagatggaacaagaacagatatagattatatgtgtaaaacagtcgaactagcaatcaaatgtggagctaaaactataaatattcctgacacagtcggttacacagttccatcagaattcactcaaattattcaaactttattaaataaagttcccaacatagacaaagctattctttccacacattgtcataatgatttaggtttagcagttgcaaattctttagcaggtgtccaagccggtgcgagacaaattgaatgtacgattaatggaattggggaaagagctggaaatgctgcgcttgaagaagttgtaatggcaatgaaaactagacctgatcttatgccctatgaaactggaattaatactaaactattaagtaaggcttcaaaa

SEQ ID NO: 237251 - DNA, 1471 bp, Unknown
  Bacterial polypeptide expressing nucleotide sequence isolated from the Sargasso Sea
tgcagtatgacaattggtgaaaagttaaaaattgcacatgcacttaaagaattaaatgttgatgtaattgaggctggttttgcagcagcatcaccaggtgattatgaagctgtgaatgcaattgcctctgagattgatggaccaaccatctgctcacttgcaagatgcaatgaaagcgatatagaaaaagcatatgaggcacttaatgttaataaaaacagaagaatccatgtttttgtcgccaccagtgaaatacatctcaagcacaaactcaatatggctaaagatgaagtgcttaaagccgcttatgaaggcgttaaaatggcaaagtcattttgtgataatgttgagttttcacccgaagatgcttcaagaactgatcatggttttctcacagaagtggtcaacgctgcaattgaagcaggcgccacaacaattaatgttcctgatacagttggttacacaatcccttatgaatttggtgaattatttaaacacttgatttcaaattgcacaaatgcagagaatgttgttttcagtgttcactgtcacgatgatcttggtctttcagttgcgaatagtttgtcagcagttgagtctggagcgagacaaattgaatgtacgatcaatggtattggagaaagagctggtaatacctcacttgaagaggtttgcatggcgattagaacaagggaagagtattttgactttaaaacatcaatagattcaacaaaattataccccacgagtagattggtttcctctatcacggggatgcatgttcctagaaacaaagcaattgttggcgataacgcatttgctcatgaagctggtatccatcaacatggaatgcttagagattcttcgacatatgaaattatgaagcctcaagatgttggtattgctagatcaaatctcgttcttggtaagcatagcggcagacatgcttttttggacagaatcaatgatttggggtttaagctcgaaaaggatgagattgatccagcttttcgagaattcaagaaattggctgacaaaaagaaggagatttttgatacagacatagaagcaattgttttaaatgcagatattgcaaatatgagtcgatggtcgctggaagatcttgaaacaaattctggctcctcatggggttctactgcatcattaaaattagtagattcaggtgaaaacatcattgaaagagacaataaggagaatccagccagtggaccgattgaggctgtttttaatatcatcagtgatattacgggatatcagcttgaattgactaactttgaaattcacagcgtcagtgttggtgatgatgctcaaggtgaagtcactgtcacagtcagctatgatggacagaattatagagggcatggcatcagtactgatatcattgagtctggcgctttggcttatcttgaggtcattaaccgaatagaaagaaatcaagcaaaacattagg

SEQ ID NO: 237252 - DNA, 658 bp, Unknown
  Bacterial polypeptide expressing nucleotide sequence isolated from the Sargasso Sea
attgtctgataaagtattaatatttgatactacccttagagacggagagcagtctcctggggcttcgatgaatcaagaagaaaagctctctattgctagactattagaggagttaaaggttgacataattgaggctggttttcccatagcatcaaaaggtgactttaactcagtacaagcaattgcaggtgaaattaaggactgccagatagctggattagctagggcaaaacatgaggatattgaaacagcttggaatgctgtaaaaaaagcaaaaaatccaagaattcacacttttattgccacaagtccaattcatatgaagtttaaactcaagttaactgaagaggaggtcttagaaaaaattaaagatagcgtatcattcgcgagaaatttatgtcctaatattgagtggagttgtgaagatggtgggagatcctcaattgattttctatataaatgcatagaattagctattgaaagcggggcaacaacaataaatattcctgacacagttggttataccttaccatttgaattcggagagattattaaaaaagttaaaaataatgttcctaatattgataaagcaataatttctgttcattgtcataatgatttggggttagcggttgcaaattctcttaaatgcagttga

SEQ ID NO: 237253 - DNA, 1249 bp, Unknown
  Bacterial polypeptide expressing nucleotide sequence isolated from the Sargasso Sea
ctgcattggagcgtgaagaacacgaacattagaatttttgatacaactttacgtgacggtgagcaatctcctggcgtttcattatctcctgaaaaaaaattaaacattgcaagaaaacttgacgagttaggtgtagatgcaattgaaaccggattccctgtaatttctgaaggagaacgtgaaggagtaaaagcaattgttggtgatggattaaaggcagaattatgtggattagcacgaactaataaaaaagatattgatgctgctgtagactgtggattaaactatattcatacattcattgcaacttctgatatccaccttgaacataaattgaaaatgtctcgagatgaagctttagaaaaagcaattgaagccgttgaatatggaaaatcacgtgggttacaagtagaattttctgcagaagatgcaacaagaactgatagggaatttttgaaaaaagtttttggtgctgttgctagcgctggtgctgatagaattgatattcctgatactgttggctattcaactcctcaatacattggtgaaataactaaagatgcaattgaagtatcaaagttaccaattagtgttcactgtcacaatgattttggattagccgtggcaaatgcaatatctggtgtacaggcaggcgcatcatgtgcacatgtaactatcaatggaattggtgaacgtgcaggaaacgcatctttagaagaatttgttatggcattacacagtttacaatttgaaaatacttgggaaaccaatatcaatacaaaattaatctatgaaacttcaagatacatctccaaattagcaggaatgtctgtacaaccaaacaaagcaattgttggagaaaacgcctttggacatgaatctggaatacatactcatggtgtattgaataatccgttaacatatgagccaattagtcctgaaattgtaggtaggactcgctggttacaggtaggaaaacatgctggaattcatggcatgaatgcaatgctcaaagaatatggcattgaaccaaatgatgaacaaacaaaacaaatcttggataaagtcaaagcattaggtgatcaaggcaaacaagtaactgaagttgaattattatctatggcaaacgaggtaattggtgaaaataaattaaaacgaattgttcagttggcaggattttctgtttctactggtgttggaacaatgccttatgcatttgtaaaattaaatgtcgatggccaagaatttt

SEQ ID NO: 237254 - DNA, 1129 bp, Unknown
  Bacterial polypeptide expressing nucleotide sequence isolated from the Sargasso Sea
aatgaaagatattgcaaaaaaatacaaacccttttcttcagttgagctgagggacaggacatggccagacaaaaaaattactaaagctccaatttggtgctcagttgacttaagagatggcaatcaagctctgattgaacctatggggcatgaaaaaaaagtcaaaatgtttgaactactatgctcccttggctttaaagaaattgaaattggttttccagcagcatctcaaactgattatgattttgtaagatacttaattgaagagaaaaaaatccctaatgacgtcactattcaagtactgactcagtctaggcagcacatcattgagaaaacatttgagtcattgattgggattgataaagcaattgtgcatttttataactctacatcagcacttcaacgaaaagtggtgtttgatgatgataaggaaggcatcaaaaaaattgctatagatggagcccttcttatcaaagaactatcaaaaaaatataataaaactaattggcgttttgagtattcacctgaaagctttactggtactgaggtagattttgcagctgaagtttgtaacgaggttgtaaatatccttaagccctgtagtgatgaaaaaattattattaatttgccagctacggtagagatgtctagccccaacgtttatggagatcaaattgagtggatgattagaaatctaaataatagagaggatgtaattgtctctctgcatcctcataatgatagaggaactgctgttggtgcagctgaaattggtgtcatggctggtgccgatagagttgaaggaactttgtttggtaacggcgaaagaacaggtaatgtagatattgttacattagctctaaatttactaactcagggagttgatcctgagctagaaattaacaatatcaaccatgtgattcgtgaagttgaatactgtaatcaattaccggtccatccaagacacccatatgctggagatttggtttttacagctttctctggttcacatcaggacgcaataaaaaaaggcctttcagccatcactcaatcaaataatccacattgggaagtgccttatctgcccattgatccctcggatttaggaagaacttatgaagcagttgtg

SEQ ID NO: 237255 - DNA, 1651 bp, Unknown
  Bacterial polypeptide expressing nucleotide sequence isolated from the Sargasso Sea
catgccgtttacaaaatatcaggcttttagaccgatagaattgccagacaggcaatggcctaatcgcgtgatcgatagagcaccgagatggtgcagtgtggacttgagagatggtaaccaggcgctaatcgatccgatgaacgtcgatgagaagctgagattatgggatctcttattgaaaattggattctcggagatcgaagtagggttccccgcggcttcccagcctgattttgattttatcaggaagctcgttgatgaagatagaattcccgacgatgtgatagtgcaagtgctttgccaggctcgtagggaactcattgaaaagacggtcgatgcgctagatggtgcgccaaatgtaatatttcatctttataattcgacctcagaattacaaagacgtgtggtttttgatctcgatagacaaggtattacagatctagcggttaaaggaacggaaatcgtaaaggaaggactaaagaatttttcttctaacgtgacctttgaatactctccggaaagttttacgggaactgaattggacttcgctgtagatatatgcagtgcggttgccgagacatggggtgcatcgcccgaagaccctattattatcaacttgccgtctactgtcgaaatggctacacctaatgtctacgctgatcagattgagtggtttgtgcggaattttccctatagaggcagttcggtaatcagtcttcatacgcacaatgatcgaggtactggtgtggcggcaaccgaactggccattatggctggtgctgatcgcgtcgagggctgtttgtttggtaacggtgaaagaacagggaattgtgatttggtgacagttgcaatgaacctattcagccaaggtgtggaccccactttagattttcgtgccatgccggaaatcagggaggccgttgagtcaataaacaagattccggtacatgagaggcatccttatgcaggagatttggtattcactgctttttctggatctcatcaagatgcgatcaagaaaggcatgtccaaagtggagaaaggactatgggaagttccttatctccctattgaccccggtgatgttggcagttcctacaaagaagctattcgagtaaatagtcagtctggaaagggaggggtcggcttcttgctagaagagcattatggcattagtttacctagagagctgttggtagagtttgcgacgatggtacaacagttgaccgagcagctagatcgagaggtgaagacggatgaaatatatgactctttgatttccaattacattgtagagagtgggccatataaattggtcgattacgatctgctgaatggtaaagatcagggccagcgttgcgtggctcgtgtggaaatatcaaataacttggtgacaatagacggagaaggcagcggaccaatagaggcctttgtaaatgcaatggccgatactttgaatgaaccaatagttgtccttgattatagggagcactcgctgggaacggggacagatgctcaagcgatctgtgtgttagcaatcgaggataacgttaataaaaaacgtttttatggaattgggttgagcaggaatacaataactgcaagcttgactgcaattgtgtccgcacttaaccgaaggtggaacgcttag

SEQ ID NO: 237256 - DNA, 1093 bp, Unknown
  Bacterial polypeptide expressing nucleotide sequence isolated from the Sargasso Sea
aaatggtggagctacaacgataaatataccagatacagtaggctactcaatacctgaggagtttgcaaaaacaataactcaaattaaaaataaagtaccaaatatagacaaagctattatatctgcccattgtcataatgacttaggacttgctgttgcgaatgctttagctggactatcagcaggtgtaagacaaattgaatgtacaattaatggtattggtgagagggctggaaatgcagcacttgaagaaattgtaatggcaatcaaaacaagaaatgacttaatgccatatgaaacaggtattaagactgaacttattagcaaagcatctaagattgtatcaaatgctactggtttcccagttcaatttaataaagcgattgttggtaaaaatgcttttgcacacgagtcaggtattcatcaagatggcatgctaaagaacagagagacttacgaaatcatgacaccagaaagtgttggtgttaagaaaacttctttagtaatgggtaaacactcaggaagacatgcttttaaagataagttaagtgatcttggttatacagatttaactgatgatgtaattcaaaatgcatttggaaaatttaaaattttagccgataaaaaaaaacatatttacgatgaggatatacttgctttggtagatgatagcttaattgttgacaacaaaataaacggaataaacttaaaatcacttaaagttttcgctgggactggtgagcctcaaaaagcagatatgacacttgatgtttttggtgaaataaaaaaaacatcacaaactggagatgggcctgtcgatgcaacattcaaatgtataaaagctttgtatccacacgaaatgaaattactactatatcaagttcatgctgtaacagagggtactgatgcacaagccacagtgagtgtgaaaattgaggaaaacgatagaacaacagttggtcaatctgcagatacagatacacttgttgcttcagctaacgcatatttgaatgcattaaataaaatgataattaaacgagagaagaaatcaatgaatgacagtattaaacaccaaaaagtgaaaggaatataa

SEQ ID NO: 237257 - DNA, 1114 bp, Unknown
  Bacterial polypeptide expressing nucleotide sequence isolated from the Sargasso Sea
tatgaatatagcgagagaagtatgtgacgaagttgttgagatactaaaacctgtatctaaaaataaaataattattaatcttcctgcaactgtagagatgtcaacaccaaatatatacggtgatcaaatagaatggatgaacaacaatctaaagaatagaaaagatatatgtttaagtcttcatcctcataatgacagaggtactgctgttgctgcatcagagtttggacttatggctggagcagatagagttgaaggaacattatttggaaatggtgaaagaactggtaatgtcgatatagtaacaatagcattaaacatgcttactcaaggaattgaaccagaattagatttttctaatatcaactctgttatgagagaggttgaatattgcaatcagcttcctgttcatccaaggcatccttatgcaggagacttagttttcacagcattctctggttctcaccaagatgcaattaaaaaaggctttcaagctatcaagaaatctaatgacccaaaatgggaagttccatatcttccaattgatccagcagatttaggaagaaattatgaagcagtcgttcgtattaactctcagtcaggtaaaggtggagttgcttttcttttagaaaaagaccacggggtatctcttccaagaagacttcaaataagcttaagtcaaaaaattcaaaaattagcagatgagtctggtaaagagataagcagctcagaaatatgggatatttttgaaaaaagctatttgcaacctgttaataatttttcttatataaagcatgcatcttcttcgaaacaagaaatgcattcactagaactcacaatgaatatgaatgatagagagacaataatacaaggttctggaaatggtcctattgattcatttattaatggtttatcaaatgaagttggagtgaatataaaggtagcagattatcatcaatcagcaatatcatcagggtctgatgcaaaagcagcagcttacatagagcttgaaaataatggagaaaccttttggggtgtaggaatccaccctaatacaacgagagcttctttcgacgcaataatagttggtctaagtaaattgcttaaagattaa

SEQ ID NO: 237258 - DNA, 1546 bp, Unknown
  Bacterial polypeptide expressing nucleotide sequence isolated from the Sargasso Sea
catgacagacaagctgatcattttcgatacgacgttgcgtgacggcgaacaatcgcccggtgcgtcgatgacgaaggaagagaaaatccgcatcgcgaagcacctcgagcggatgaaggtggacgtgatcgaggccggcttcgccgccagctcgaacggcgatttcgacgcgatccacacgatcgccggtctcgtgaaggacagcacgatctgctcgctggcgcgcgccaacgacaaggacatccagcgcgccgctgacgcgctgaagccggccaacagcgcgcggatccacacgttcatcgcgacgtcgccgctgcacatggagaagaagctgcggatgacgccggaccaggtgttcgagcaggcgcgtctcgcggtgcgtttcgcgcgcaagttcaccgacaacgtcgaattctcgccggaagacggcagccgctcggatctcgacttcctgtgccgtgtgctggaagccgtgatcgcggaaggtgcgacgacgatcaacatcgccgacacggtcggctacggcgtgccggagctgtacggcaacctggtgaagacgctgcgggagcgcattccgaactcggacaaggcgatcttctcggtgcattgccacaacgacctcgggatggcggtggcgaactcgctcgccggcgtgaagatcggcggtgcgcgccagatcgagtgcacgatcaacggcctcggcgagcgcgcgggcaacacgtcgctcgaagaaatcgtgatggccgtgaagacccgcaaggactacttcggcctcgacgtcggcatcgacacgacgcagatcgtgccgacgtcgaagctcgtgtcgcagatcaccggcttcgtcgtgcagccgaacaaggcggtggtcggcgcgaacgcgttcgcgcatgcgtcgggcattcaccaggacggcgtgctgaaggcgcgcgacacctacgagatcatgcgcgcggaagacgtgggctggaccgcgaacaagatcgtgctcggcaagctgtcgggccgcaacgcgttcaagcagcgcctgcaggagctcggcgtggcgctcgacagcgagagcgaactcaatgccgcgttcatgcgcttcaaggatctggccgaccgcaaggccgagatcttcgacgaagacatcatcgcgatcgtgtccgaggagtcggcgctcgcgcacgagcaggagcacttcaagttcgtgtcgctgtcgcagcgttcggagacgggcgagcaaccgcaggcgaaaatcgtgttcgcggtcgaaggcaaggaagtgaccggtgaagcgcgcggcaacggcccggtcgacgcgacgttcaatgcgatcgagggcgaagtcggcagcgggtcggagctgctgctgtactcggtgaacgcgatcacgaccggcacgcaggcgcagggcgaagtgaccgtccggctgtcgaagagcggacggatcgtcaacggcgtcggcaccgatccggacatcgtcgccgcatccgcgaaggcgtacatctccgcactgaacaagctgcattcgaaggatgacaaggtcaatccgcagcgcgcataa

SEQ ID NO: 237259 - DNA, 601 bp, Unknown
  Bacterial polypeptide expressing nucleotide sequence isolated from the Sargasso Sea
tatgagcaataaagataaagtctttatatttgatactactatgcgtgatggtgagcaatcgccaggcgcgtctatgagtttagaagaaaaaattcaaatcgctagagtgtttgatgaattaggaatagatataattgaagcaggttttcctatagcttcaccaggggattttgaagctgtttcagaggtaagtaaaattttaaaaaactctattcctgcaggactttcaagacactcagtaaaagatattgatagagcttatgaagctctaaaacatgcaccaagatttagaatacatacatttatttctacaagccctttacacatgaagcataaattaaatatgtctccagaagatgtttatgaatcaattggaaaacatgttgcttacgcaagaaagtttactgatgacgttgagtggtcatgcgaagatggaacaagaaccgatatggattacatgtgtaaaactgtagagcttgcaattaaaaatggagctacaacaattaatattcctgatacagttggttacacaataccatctgaatttacaacaattatagaaactttattaaataaagttccaaatattgataaagcaatt

SEQ ID NO: 237260 - DNA, 1358 bp, Unknown
  Bacterial polypeptide expressing nucleotide sequence isolated from the Sargasso Sea
tatgcctaaaaaagataaagtatacattttcgatacaacgatgagagatggtgaacaatcaccaggtgcctctatgagtgttgaagaaaaaattcaaatttcaagagtttttgatgagatgggaatagatattattgaagctggttttccaatatcatccccaggtgattttgaagctgttagcgcaattagtaaaagtgttaaaaattcaattccctgcggattagcacgagctactaaaaaagatattgatgcatgtcatgaatcgttaaagtttgcaaaaaaatttcgtattcatactttcatttcaactagtcctgttcatatgaagcataaactcaatatgaccaacgaacaagtattaggggccattaaggaaagcgtcacttatgcaaggaaatttactgatgatgtagaatggtcgtgcgaggatggaacaagaacagatttagactttatgtacaaaactatagaattagcaattaattgtggtgcaaccactattaatattccagacactgtgggttattctatacctgaagaatttgcaaaaaaaattaagtcaataaaaaataatgttccaaacattgataaagcaattatctcagcccattgtcataatgatcttggattagcagttgctaatgcattatcaggtttatcagcaggggttcgtcaaattgagtgtacaataaatggaattggtgaaagagctggtaatgcagcacttgaagaaattgtaatggcaattaaaacaagagatgatttattaccctatgaaactggaataaaaacagaattaattagcaaagcttcaaaaatagtttctaatgctactggttttccagtccaatataacaaagcaatagttggaaaaaatgcatttgcacatgagtctggcatacatcaagatggaatgcttaaaaatcgagaaacttatgaaataatgactccagagagtgtaggtgttaaaaaaacatctttagttatgggtaagcactctggtagacacgcatttaaagataaattgagcgatcttgggtatgctgacgttacagatgatgtcgtccaagcagcatttgggaagtttaaaatactagcagataaaaaaaaacatatctatgatgaagacattgttgctttagttgatgatagtttaattattgataacaagattaatgcaattaatcttaaatctttaaaggtatttgctggaactggtgagcctcaaagagcagagatgactttagatgtttttggcgatattaaagaaacatctcaaactggagatggaccagtagatgctatttttaaatgtattaaagatttatatcctcatgatgtaaaattatctcttt

SEQ ID NO: 237261 - DNA, 1588 bp, Unknown
  Bacterial polypeptide expressing nucleotide sequence isolated from the Sargasso Sea
atgagaaacaaagatagagtttttatatttgatactactatgcgagatggtgagcaatcaccaggtgcctctatgagtttggaagaaaaaattcagatagctagagtatttgatgaattaggaattgatattattgaggcaggttttccaattgcttcacctggagattttgaagcagtttcagaagtaagtaaaattttgaaaaactcaattcctgcaggactttctagacactctgttaaagatattgatagagcttatgaggcattaaaacatgctccaagatttagaattcatacttttatttcaacaagtccattacacatgaagcacaaacttaatatgtcacctgaggatgtttatgagtcaattggaaaacatgttacttatgcaagaaagtttactgatgatgttgagtggtcttgtgaagatggaacaagaacagacattgattacatgtgtaaaactgttgaattagcaattaaaaatggagcaaagacaattaatattccagatacagttggttacacaataccatcagagtttacaacaattattgaaactttgttaaataaagttccaaacatagataaagctattttgtctacccattgtcataatgatttaggtttagcagttgcaaactctttagctggagtgcaagcaggtgccagacaagtagaatgtacaataaatggtttaggtgagagagcaggaaatgcggctttagaagaaattgtaatggcaattaaaacaaggccagatttaatgccatatgaaactggaataaatacaaaacttttgagtaaagcttcaaaaattgtttcaaacgcaactgggtttcctgttcaatataataaagcaatagttggaaaaaatgcttttgcacatgaagccggtattcaccaagatggaatgttaaaaaatagacaaacatatgaaatcatgacaccagaaagtgtaggagtaaaacaaacctcattagttatgggtaaacattcaggaagacatgcttttaaggacaaattaaacagcttaggttaccctgatttaactgatgatgtaatcagtaacgcttttgcaaagtttaaagttttagcagataaaaaaaaacatgtgtatgatgaagatattattgcattaatagatgacagtctgattattgataacaaagttagtgcaattaatctaaaatcattaaaggtttatgctggaactggagaacctcaaaaagcagaaatgactttagatgtttatggagatgtaaagcaagcaacagaaacaggagatggtccagttgatgctatttttaaatgtataaaaattctttaccctcatgatgtgaatttacaactttaccaagttcacgcagtgactgagggaaccgacgcacaagctactgtgagtgttaaaattgaggaaaatggtaaaacaactgttggtcaagctgctgatacagatacattagttgcttctgcgaatgcatatatcaatgcgttaaataaaatgattattaaacgagaaaaaacagctccaatggatcaatctcctatggagggcaaaaatcaaaaaatgagaggaatataaa

SEQ ID NO: 237262 - DNA, 1162 bp, Unknown
  Bacterial polypeptide expressing nucleotide sequence isolated from the Sargasso Sea
gatgaaagatctagtaaaaatatttgatacaacattaagagatggagaacaagtaccaggttgtaaacttgatactaaagataaattaaagttagctatacatcttgataatcttggagtagatatacttgaagcaggttttccaatttctagtcctggtgattttgaatctgtggtagaaatttcaaaaaatattaaaaacgcatcagtgtgtgctttgagtagagcaaatgaaaaagatattgaagtagctgctgaatctcttaagcatgcagtaaaacctagaattcatacaggaatagggacttcggatattcatataaaatacaaatttaactcaaacaaagattcaataattgaattagcaaaaaaatcagtttcttatgctaaaagatttgtagaagatatagagttctatgctgaagatgcaggtagaactgaaaatgaatttcttgcaaaagtctgtgaagaggttattaaatcaggtgcaacagtacttaacatacctgatacaactggctactgtttaccaagtgagtatggggagaagattaaatttttaaaagaaaatgtagaagggattaatgatgtaaccatttcatgtcattgtcacaatgatcttggactggctactgcaaattcaatctctggagtaatcaatggtgcgcgacaaatagagtgtacaattaatggtattggagaaagagcgggtaatacttctttagaagaggttgtaatgataatgagacaacatcctgatctaaatctggatactaatataaattcaaaattactttatagcacaagtcaaaaagtttcagaattaatgggcatgccagttcaacccaacaaggctgttgttggttctaatgcttttgctcatagttctgggattcatcaagatggagttataaagaaaagggagacatatgaaattatcgatcctaaagatgttggtgttgataaatcttctattatactaactgcgagaagtggaagagcagccctagcatataagatgagagagattggtgtagaattaactaaggttcaactcgactctgtttatcaagaattccttactttagctgacattcaaaaagaaatttcagaaaaagatttaccaattattttagaaaaacaaaatattaagtatgggtaa

SEQ ID NO: 237263 - DNA, 1234 bp, Unknown
  Bacterial polypeptide expressing nucleotide sequence isolated from the Sargasso Sea
atgaaagatttaattaaaaaatacaaaccttttgagcctattccattgaaaggaaggcagtggccaaatacagttattcaaacagcaccacgttggtgctcagtggatcttcgcgatggaaatcaagctcttattgaacccatgggtcatgagagaaaaaaacgaatgtttaaacttttatgtgatcttggattcaaagaaattgaagtaggttttccagctgcatctgaaactgactttgaatttgttagatggttaattgaagaaaagcaaattccttcagatgtcacaatacaagttttaactcaagcaagggatcacatcatagaaagaacttttgaatcacttgagggtgcatcacaagctatagttcatttttataactcgacctccacgttacaaagaaaagttgtttttgatcaagataaatctggaataaaaaaaatagcaaccgatggtgcagagcttgtaaaaaaacttgcattgggtcaaagggaaacaaaatggtcttttgaatactctccagaaagctttacaggtactgagcttgattatgctgcagaggtttgtgattctgtagtcgatattttaaaagatgcttcatccgaaaaaatcattatcaatctgccagcaacagttgagatggcaacaccaaatgtatacggcgaccaaattgaatggatgaatgaaaatttaaaaaatcgtgaaagtatttgtctctctttacatcctcataatgatcgtggaactgcagttgcagcctctgaatttggattgatggcaggagctgatagagttgagggtacattatttggtaatggagaaagaactggcaacgttgatattgttactattgcacttaacctgcttactcagggcattgatcctaagcttgatttttcagatattaactctgtaattagggaggttgagtactgcaatcaacttcctgttcatccaagacatccatatgccggtgacttagtttttacagccttttcgggatctcatcaagatgcaattaaaaaaggtctaggtgctctaaaaaagtcaaatcagttagaatgggaagtaccttatctcccaattgatcctgcagaccttggaagatcatacgaagcagttgtaagaataaattctcaatcaggaaaaggtggagtttcttttatccttgaaaaggatcatggtgtctctcttccacgaagactacaaatcaacctgagtcaaaaagtac

SEQ ID NO: 237264 - DNA, 1020 bp, Unknown
  Bacterial polypeptide expressing nucleotide sequence isolated from the Sargasso Sea
ttgctgtagaagagggtgcaacaacaataaatgttcctgatactgtaggttatgcaacacctcaagattatttagaccttcttaaggcagtttatgacgaagttaaagggggtaatgaagatgtcattatttcaacacactgtcacaatgacttgggattagctgtagctaactcacttacagctataacagctggggctagacaaattgagggtgcaattaacggaattggggaacgtgcaggaaatacatcaacagaagaaataatcatggcagtaaaaactcgtcaagatcagttcggagttgaaatccaagctgaaacacaagaaatttttgaaacttcaaggttagtctcaaaactaactggatatcctgttcaatataataaagccgtcgtaggtaaaaatgcttttagccacgaatcaggaatacatcaacacggatatttaagaaacacaactacctatgaaataatgtcaccagactcagttggtcaagaagcaaaaattatacttggtaagcattctggtagggctggctttaaagatgcccttgataagttaagtatctctttagacgatgatgcattcaataatgcttttgatacctttaaaaagattgcagacagaaaaggtgaaattgtagaaaacgaacttagagcaattgtaggacaggtagaatcaagtagcgatagtgcaaaacttgtgtctgtctcagttaatagtaaagatgaatttgcgtctgcaagcgttacactaaaagttggaaatgacgaaataacagaagaagcaactggagatggaatgattcatgcagcatttactgcagttaaatcaattctcaaatcagacgctacattaatagattatagagttgagagtattacaaaaggtgctgatgcaacagctgaaattgtaacaataattaacgatggacacctaatgaaacaaggaagagctgtttctacagatgtcgttcagggttcagtagaatcctttttgaatgcgttgaacaaatgag

SEQ ID NO: 237265 - DNA, 1660 bp, Unknown
  Bacterial polypeptide expressing nucleotide sequence isolated from the Sargasso Sea
atggacaacccaatagacaaatattcagcttttaagcccattgaattaaaaaatagaaaatggccaagcaaaattattaaaaatgcccctatttggtgttctgtagatttacgtgatggtaatcaggccttaatagagcctatgggctctgaaagaaaaaatagaatgtttaatctattatgcaaacttggttttaaagaaatagaggttggatttccatcagcatcccaaaccgattttgattttgttagagaccttattgaaaataaaaaaattccatcagatgtaaatattcaagttcttactcaagcaagagaagaactaataattaaaacttttgaatccttaaatgacgcacctaaagcaatagtccatttttataattcaacctcaacacttcaaagaaaagttgtttttgatcaagatcaaaaaggtattaaagaaattgcgaccaatgctgcaaaattaataaaaaatttagcagaaaaaaatacaaacacagattggacttttgaatattcaccagaaagttttactggtacggaattggaatatgctagagaagtttgcgatgaagttgttgagattcttaagcctgtaactaagaacaagattattattaatcttcctgcaactgtagagatgtcaactccaaatatttatggtgatcaaattgaatggatgaatgataatcttaagaacagagaagatatttgtttaagtcttcatccccataatgacaggggtactgctgtagcagcatctgaatttggtcttatggcgggagcggatagagttgaaggaaccttatttggaaacggtgaaagaaccggaaatgttgatgtggtcacaatagcattaaatatgctcacacaaggtattgaccctaaattagacttttcaaatataaattctgtaatgagagaggtcgagtactgtaatcagttaccagtccacccaagacatccatacgctggggatctagtatttacagctttttcaggctcacatcaggatgcaattaaaaagggcttcaatgctataaagaaatccaatgatccaaaatgggaggttccatatcttcctattgatccagctgatctgggaagaagctacgaagctgttgtaagaattaattcgcaatctggcaaaggaggcgttgccttcctattagaaaaagatcatggggtttctttaccaagacgacttcaaataagcttaagccaaaaaatacaaaaattagctgataaatcaggaaaagaaattagtagttcgcaaatatgggatatctttgaaaaaaattatttaaaccctattgataatttctcttatatcaagcattcatcatcttcaaaagaagaaattcattcccttgaattgacaatgaatatgaataataaagaaacagtcattaaagggtctggaaatggacctatagattcatttataaatggattatgtaataaagttggtgttgaaataaaagtagcagactaccaccaatcagcgatttcatctggttcggatgcaaaggctgcagcttatatagagctagaaaaagataacaagacattctggggggttggaattcatccaaataccacaagagcttcttttgatgcaattattgttggattaagtaagcttttaaaaaattaat

SEQ ID NO: 237266 - DNA, 1288 bp, Unknown
  Bacterial polypeptide expressing nucleotide sequence isolated from the Sargasso Sea
tacttttatttctacaagcccacttcacatgaaacataacttaaataaatctcctgaagaagtttatgaagcaataaaagaacacgtaacttatgcaagaaattatactgatgatgttgaatggtcttgcgaagatggaacaagaaccgacatggactatatgtgtaagacagttgagcttgcaattaaatgtggagctaaaactataaatattccagataccgttggatatactattccttcagaattcactacaattatagaaacattattaaataaagttccaaacattgataaagcaattttatcaactcattgtcataatgatctaggattagctgttgcaaattctttagcaggagtacaagctggagctagacaaatcgaatgcacgataaatggcttaggagaaagagcaggtaatgcagctcttgaagaagttgtgatggcaataaaaacaagaccagatcttatgccttacgaaacaggaattaatacaacactattgagcaaagcatcaaaaattgtttcaaatgcaacaggatttcctgttcagtacaataaagcaatagttggaaaaaatgcattcgcacatgaagcaggaattcaccaggatggaatgttaaaaaacagacaaacttatgaaatcatgactccagaaagcgttggagtaaaacaaacatctttagtaatgggcaaacattcaggaagacatgctttcaaagataaattgaacagcttaggctatccagatttaacagatgatgttgttagtaatgcatttgcaaaatttaaagttttagccgataagaaaaaacatgtatatgatgaagatataattgctttagtggatgatagtttaatagttgataataaagttaatgcaataaatttaaaatcattaaaagtttttgcaggtactggtgaaccccaaagagcagaaatgactttagatgtttatggtgaagtaaaagaagcatctgaaacaggagatggaccagtagatgcaatatttaaatgtataaaaaaactttatcctcatgatgtaaatttacaactttatcaagttcatgcggtaaccgagggaactgatgcccaagctactgtaagtgtaaaaatagaagaaaatggaaaaactactgtaggacaagcagctgatactgatactttagtagcctcagcaaatgcctatattagctcactaaataaaatgattataaaaagagaaaaaactgcacctgagccacaacaacagaattatgaatcgcaaaaaatgaaagggatataa

SEQ ID NO: 237267 - DNA, 1027 bp, Unknown
  Bacterial polypeptide expressing nucleotide sequence isolated from the Sargasso Sea
tatgagtgacaaaaacagaattataattttcgatacaacaatgcgtgatggtgaacaatcaccaggcgcaacgatgagcttagaggaaaaaattcaaatagctagatgttttgatgaactaggaattgatgtgatcgaggcaggttttcctattgcttctcctggagattttgaagcagttacagagataagcaaagttttaaaaaaatcaattcccgcaggactttcacgagctacaaaaaaagatatagatgcttgcaaagactcacttaaacacgcgaagagattcagaatccatacttttatttccacaagcccactacatatgaagcataaacttaataaatcccctgaagaagttttaggactaattaaagaaagtgttacgtatgctagtaagtttacagatgatgttgagtggtcatgtgaagatggaacaagaacagatctagattttatgtgtaaatctgtagagcttgctataaaatgtggagctaaaacaattaatattcctgatacagttggctattcagtaccttctgaattcaaaaagataattgaaactctaattaacaaagttccaaatattgataaagctattttatctactcattgccataatgatctaggattagctgtagctaattctttagctggagtgatggcgggggctcgacaaattgagtgtacaattaatggaataggtgaacgagcaggtaacgcagctttagaagaagttgtaatggcaatgagaactagaaatgatttaatgccttacactacaggaataaatactcagcttttaagcaaagcgtcaaaaatagtttcgaatgcaactggctttcctgtgcagtttaataaagcagtagttggaaaaaatgcatttgcccacgagtcaggaatacaccaggatggaatgttaaaaaatagaaatacttatgagataatgactccggagagcgttggagttaagaaaacatcattagtaatgggaaaacactctggtagacacgcttttagagataaa

SEQ ID NO: 237268 - DNA, 1429 bp, Unknown
  Bacterial polypeptide expressing nucleotide sequence isolated from the Sargasso Sea
tatgagtgataaaaatagaattataatttttgatactacaatgcgagatggtgaacaatcaccaggcgcgtcaatgagtttagaggaaaagttacaaatctctagagtatttgatgaacttggtgttgatatcatcgaagcaggttttccaatagcttcaccaggtgattatgaagctgttacagaaataagcaaaaccctaaaaaaatctatacctgcaggcctagctcgtgcaacaaaaaaagatattgatgcttgtcatgaagctttgagacacgcaaaaaattttagaatacatacttttatttctactagtccattacatatgaagcataagttaaataaatctcccgaagaagttttagggtccattaaagagagcgttacttatgcaagaaaatttactgatgatgttgaatggtcatgtgaagatggaacacgaacagatatggattatatgtgcaaaacagttgaacttgcgatcaaatgtggagcaaaaactattaatattcctgacactgtaggctacacggttccatcagaatttaaaaaaattattgaaacactgttaaataaagtacctaatattgataaagctattctctctactcactgccataatgatctaggtttagcagtagcaaattcattagcaggagtgatggctggggcaagacaaattgaatgtactatcaatggaattggtgagagagccggcaacgctgctctagaagaagttgtaatggcaatgcgaactcgacatgatttaatgcctttcacaacaaatataaatacaaaacttttaagtaaagcttctaaagtagtttcaaatgccacaggttttcctgttcaatttaataaagcaatagttgggaagaatgcttttgcacatgaatcaggaattcaccaagatggaatgttaaaaaatagaaacacttatgaaattatgactccagagagcgtaggagttaaaaaaacttctttggtaatgggaaaacattctggccgacatgcttttagagataaattatctgatatgggttacgtagatataactgatgatattattgatacagcatttggaaaatttaaaatcttagcagataaaaaaaagcatgtttatgacgaagatattgcagctataattgatgatagcttagtaacagaagataacgtaattaaattaaaatctttaaaagtattcgccggtactggtgaacctcaaaaagcagaaatgacattagaagtttatggagaaataaaaagcgcctctgaaacaggagatggtccagttgatgcgatttttaaatgtataaaaaatctttatcctcatgatgtaaatttacttttatacaatgttcatgcagtcactgaaggaaccgatgctcaagcaacagtgagtgtaagaattgaggaacaaggcaaaaca

SEQ ID NO: 237269 - DNA, 1023 bp, Unknown
  Bacterial polypeptide expressing nucleotide sequence isolated from the Sargasso Sea
tattaaataaagtaccaaacatagataaagcaattttgtctacacattgtcataatgatttaggtttagctgttgcaaattcactagctggagtacaagcaggagctagacaaatagaatgtactattaatggaattggagaaagagcaggtaatgctgcgcttgaagaagtagtaatggcaatgaaaacaagaagtgatttaatgccttacacaactggaattaatacaactttactaagcaaagcttctaaaatagtttcaaatgcaactggttttccagttcaattcaataaagctattgttggaaaaaatgcttttgcacacgagtcaggaattcatcaagatggtatgcttaaaaacagaaatacatatgaaataatgactccagaaagtgtaggggtaaaacaaacatctttagttatgggcaaacattctggacgacatgcatttaaagacaaattaataagccttggatatgtaaatgtaacagatgatgtaatagaaaatgctttcggaaaatttaaagttttagcagataaaaaaaaacatgtttatgatgaagatattgtagctcttgtagatgatagtttgatcaaagaggataatgtcatctcacttaaatctttgaaagtttttgcgggtacaggagagcctcaaaaagctgaaatgacattagaagtttatggagaaattaaaaaagctgtagaaacaggggatggacctgtagatgcaatatttaaatctataaaaaaactttatccacatgaagttaacttacaactttatcaagttcatgctgtaacagaaggaactgatgcgcaagcaacagtaagtgtaagaattgaagaagaggggaaaactacggtaggtcaggcagctgatacagatactttggttgcttctgctaatgcatatattaacgctttaaacaaaatgataattaaaagaaaaagaaattttgcacctgaaaatatggaaagcagtaagaattttaaaaatgaaaaaatgaaaggaatataaa

SEQ ID NO: 237270 - DNA, 1165 bp, Unknown
  Bacterial polypeptide expressing nucleotide sequence isolated from the Sargasso Sea
atgacccatgacgaaaaacttgaaattgctgagctattggatgaaatgggtgtcgatatcatagaggctgggttcccgattgcctcagaaggagactttaaagcagtcagtgaaatcgctcgacgctcaaaaaattctacgatatgtggtttagctcgggctaattacaaagatattgaccggtgttgggaagctgtgaaaaattctagtgcacctcggatacacacgtttattggaacgtcgccattacaccgcgccattccaaatcttgataaagaccagatggctgagctaattcacgatacagttacacatgctcgaaacttatgcgacaatgttcaatggtctcctatggatgcaactcgaacagaacatgattacttgatgcgcgtggtagaaatagcaataaaggccggcgctgcaaccataaacattcctgacactgtaggctatactgcaccagtcgaatccgcagatttaattcgtatgctaatcgagaaagtcccaggggcagatgaggtcgtatttgcaactcactgtcacaatgatttaggcatggccacggccaatgctcttgcagcggtagaaggaggggctcggcaaatagagtgcacaattaatggacttggggaacgagctggcaatactgcactcgaagaagttgtaatggcactcaaagtgagaggcgatataatgccttaccacacaagaatagatgcaactaaattaatgaatctctcaaggagagttgcaacagtttcaggttttccggtccaatttaataaagcaattgttggcaaaaatgcatttgcccatgaaagtggcatacaccaagacggaatgctaaaaaactctgaaacttttgaaataatgcgccctgaagatataggtttgtctgaaacaaatcttgtcttaggaaaacactcagggcgggcggctctgagagctaaattagaagatttgggttatcagttggcagataatcaattaaaagatgtgtttgtgcgtttcaaagaattagccgatagaaaaaaagaggtttatgacgaagaccttatagcgcttatgcgtgctggagaagacacagaaaatgatcacatagttttaaaatctttagaggttatatgtggaactaatgggccacaaagtgccaaaatgatcttag

SEQ ID NO: 237271 - DNA, 1096 bp, Unknown
  Bacterial polypeptide expressing nucleotide sequence isolated from the Sargasso Sea
tatgactgataaaaacagagtttatatttttgatacgaccatgcgtgatggtgaacagtcgcctggcgcatcaatgagtttggaagaaaaaattcaaatagctagagtatttgatgaactaggagtggatattattgaggcaggatttccaatagcttctccaggtgactttgagtcagttacagaagttagtaaagttcttaaaaattctatacctgctggtctagccaggcattcaaaaaaagatattgatagatgttatgaagcactaaaacactctccaagatttagaattcatacttttatttcaacaagtccacttcatatgaagcataaattaaataaaacaccagaacaagtttatgagtcaattaaagaacatgtaacacatgcaagaaaatatacagatgatgtagagtggtcttgcgaagatggaacaagaactgatatggattacatgtgtaagacagttgaacttgccattaaatgtggagctaaaactataaatattcctgatacagttggatatactgttccatcagaatttacaaaaattattcaaacattgataaacaaagttccaaatattgataaagctatattgtctactcattgtcacaatgatttaggactggctgttgcaaattctttggcaggcgttcaagcaggcgcaagacaaattgaatgtactattaacggaatcggtgaaagagctggaaatgcagctcttgaagaagttgtgatggcgatgaaaactagaccagacctcatgccttacaaaacaggaattaacacaaaacttttaagtaaagcatcaaaaatagtttcaaatgcaacaggttttccagttcaatacaacaaagctatcgttgggaaaaatgcatttgcacatgaatcaggaattcaccaagatgggatgcttaaaaatagacaaacatatgaaattatgactcccgaaagcgttggtgttaaacaaacatcattagtaatgggaaaacattctggaagacatgcatttaaagataaattaacaagcttaggctatgtagatgtaactgatgatattgttgaaaatgcatttggaaaatttaaagtt

SEQ ID NO: 237272 - DNA, 607 bp, Unknown
  Bacterial polypeptide expressing nucleotide sequence isolated from the Sargasso Sea
gttgcaaattctcttaaatgcagttgaaaatggtgcaagacaaattgaatgtacaattaatggattaggagaaagagcgggtaatgctgcattagaagaagtagtaatggctatgaaagtcagatcagatcttttaaaagtccaatctaatatcaatacgagtgccatttcaaaaacatcaaaacttgtttcatcaattacaggttttcctgttcagcctaataaagcaattgttggcgctaatgcttttgctcatgagtcaggaattcatcaagatggagtcttaaaaaatgttcaaacttatgaaattatgtcgccggaaacgattggtttaaagaaatcaagtttggtgcttggtaagcattccggaaagcatgcattcaaagaaaaattaaaaattttaggatatgaagtaggtgataattatatcaatgagattttcgaaaaattcaagcttttggctgataagaagaaagatgtttatgatgaggatattatagctttggtagatgatactcattttaataaatcaaatactttaaaacttaaaaatttaagcataatgtcaggcacaaactctaagcatgttgcttctctagagttaaac

SEQ ID NO: 237273 - DNA, 396 bp, Unknown
  Bacterial polypeptide expressing nucleotide sequence isolated from the Sargasso Sea
aatgaaaaatcaggtcaaaatatttgacacaaccttaagagacggagaacaggtaccagggtgcaagctggacaccaaaagtaaattaattttagctgaaaaaattgatatacttggggtagatattattgaggctggttttcctgtttctagtccaggtgattttaaatcggtagttgaaatttcaaaaattataaagaatgcatctgtttgtgcattaagtcgtgctaatgaaaaagacattgatgttgcagctgaatcactcaaaaatgcaaaaaaacctagaattcatactggaattggaacatctgaaatacatattaaacataaatttaattcaaataaagattcaatcattgatcttgctaaaagagcagtttctcatgctaaaaatat

SEQ ID NO: 237274 - DNA, 900 bp, Unknown
  Bacterial polypeptide expressing nucleotide sequence isolated from the Sargasso Sea
gagcgagacaagtagagtgtactataaatggaattggtgaaagagccggaaacgcagctctggaggaaattgttatggccatgaagacgcgaagcgatttgatgccatttaaaactggaattaatacaaaattaataagcaaagcctctaaaactgtctctaatgctactggctttccagtacaattcaataaggcaattgttggaaaaaatgcatttgcacatgagtcaggtattcatcaagatggaatgctaaaaaacagaaatacatatgagataatgaccccagagagcgttggtgtaaaaaaaacttctttggtaatgggaaaacactcaggaagacatgcttttaaagataaacttagcgatctaggttatgcaggagttacagacgatgtaatccaaacagcatttggaaaatttaaaattttagcagataagaaaaagcatgtttacgatgaagatattattgctttagttgacgacagtttaattaaagagagtaatgttatcaatcttaaatctctcaaagtatttgctggcacaggtgaacctcaaaaggctgaaatgactttagaagtttatggcgatgttaagaaagccaatgaaacaggtgacggtccggttgatgcgatatttaaatgtattaagaaattatacccacatgaagtaaaacttcagttgtatcaagtgcatgctgtaacagaaggaacagatgctcaagctacggtgagtgtaagaattgaagaaaaaggcaaaacaactgtcggccaagcagccgatacagatactcttgttgcttcagccaacgcttatttaaatgcactaaataagatgataatcaaaagagaaaaaactgctccagaagagtatgagcaagataaaatgagaggaatataat

SEQ ID NO: 237275 - DNA, 1294 bp, Unknown
  Bacterial polypeptide expressing nucleotide sequence isolated from the Sargasso Sea
gcagcacctggttgtagtatgaatgaaaatgaaaaacttaaagtcgctttgaatcttgagaagcttggagtcaacataatagaggctggttttcctattgcttcagagggagactttaattcagttaaattaatcgcagaaaatatcaaggattgtgaagttgctggactgtctagagcgaatttgaaagatatagatcgagcatgggaagcaattaaaaatgctgctaatccaagaattcatacatttatagccacatctgatattcatttgaaatataaattaaaaaaaactaaggatgaagttctatctattattgaagaatctgtttctcactcagtgaaatatacaaaaaatgttgaattttcatgtgaagatgcaactagaacagacttagattttctatatagagctgtagaagtagcaattaaagctggtgcaacaactattaatattcctgatactgttggatacagtgttccttcagagtttggtgggataattagaaagctccatgaaaatgtagataatgtttctaatataactattagcgttcattgtcataacgatcttggtttagctgtagcaaattccttggcagctgttcacgaaggggctagacaagttgaatgtacgattaatggtttgggcgaaagggctggcaatgcatcattggaagaacttgtaatggctttgaaagttagaaatgacttaaatccttttgttactcgtcttgatacaaaacaaatatatccttgcagtaagttagtaagtagcgttacaggagtttctgttcaacctaataaggcaattgtaggcgctaatgctttcgctcatgaagccggaattcatcaagatggtgttttaaaggaaagtatgacatatgagataatggaccctggggaagtaggaatcccttctaatcatattgtccttggtaaacattcaggaagacatgcatttagagataggttaaatcagtttggctacgaactaagtgaagataattttgaaatagcttttttaaaatttaaagaattgtgtgataaaaaaaagtatgtatttgatgaagatattttctctttggtgaatgaggagtttatgagattgtcagatttttatcaactaggaacgattgagtgctcatctgggtcagaaattaaaccaattgcaaaaattcagatgattattgatggggagtcagttgaagtagaagagtctggggatggacctatggattcggtattcaaggcaatttccactggcgctaaagtttatcccactttggattcat

SEQ ID NO: 237276 - DNA, 961 bp, Unknown
  Bacterial polypeptide expressing nucleotide sequence isolated from the Sargasso Sea
atgaaaacaacaacagacaaagaacgtgtagtagtttttgacaccacgctgagagacggcgaacagtcaccaggagcaaccatgacccatgaggaaaaattagaaatcgcagagctcctcgatgatatgggagttgatattattgaagctgggtttcctattgcatcagaaggtgacttcaaagccgtaagtgaaattgccgagcgtagtaaaacagccatcatatgtggcttagcacgggctaattttggggatatcgatcgttgttgggatgcagtgaaaaacgcagagaaaccaagaattcatacatttattggaacttcgccattacaccgcgcgataccgaatttagataaagatcagatggcgcaaaaaattcacgatacagtaacccatgccagaaacttatgtggcaatatccagtggtcaccaatggacgcaaccaggaccgaacatgattatttatgtcgcgttgtagaaatagctattaaagctggagcatcaacgatcaatattccagatacggtaggctacacggcgccacttgagtcagctgatcttatcaaaatgttaatagagaaagtaccaggagcagacgaagttgtctttgcaacccactgtcacaatgatttaggcatggctactgcaaactctctagcggctgtagagggtggtgccagacaaattgagtgtacaataaacggattaggtgagcgcgccgggaacacggctcttgaagaagtagttatggcattgaaagtacgcggcgacatcatgccattttataccaatataaatacttcaaaaatcatgaatatatctagacgcgtagcctctgtttcaggttttccagttcagtttaataaggcaatagtaggaaaaaatgcgtttgcacatgaaagcggtattcatcaagatggtatgttaaaaaattctgaaacatttgagattatgcgccctg

SEQ ID NO: 237277 - DNA, 1711 bp, Unknown
  Bacterial polypeptide expressing nucleotide sequence isolated from the Sargasso Sea
atgctgaagaaccccgcgacgaagtaccgaccgttcacgcccgtcaacctgccgaaccgcgtatggccgacgcgcacgatcacgcaggcgccgatctggatgagcaccgacctgcgcgacggcaaccagtcgctgttcgagccgatggacgccgcgcgcaagatgcggatgttcaagatgctggtcgcgatcggtttcaaggagatcgaggttgcgttcccgtcggcgtccgagaccgacttcaacttcgtgcgcgagctgatcgaaggcggccacattcccgatgacgtgacgatcgaggtgctcacacaggcgcgcgacgacctgatcgagcgcaccttcgactcgctgcgcggcgcgaagcgcgcgatcgtgcacctgtacaacgcgaccgcgccggaatttcgcaagatcgtgttcggcctcgaccgcgacggcgtgaagaccctcgcggtgaacgccgcgcgcacgatcaagcgcttcgccgacgccgcgaccgatacgcatttcacgctgcaatacagcccggaaaccttcacggcgaccgagctcgatttcgcgaaggaagtgtgcgacgccgtgttcgacgtgtggcagccgacgccggagcacaaggcgatcgtgaacctgccggccaccgtcgaagtcggcacgccgaacttctacgcggaccagatcgaatggatgcaccgcaacctcgcgcgccgcgatgcgctgatcgtgtccgtgcatccgcacaacgaccgcggcacggcggtcgcggcggccgagctcgcggtgatggccggcgcggaccggatcgagggctgcctgttcggcaacggcgagcgcaccggtaacgtcgatctcgtcacgcttgcgctgaacctgtactcgcagggtgtcgatccgggcctcgatttctcgcagatcaacgaagtcgcgcgcacggccgaggaatgcacgcagttgccgatccatccgcgccatccgtacgtcggcgacctggtgttcactgcgttctccggctcgcaccaggacgcgatcaagaagggcttcgcggtgcagcgccccgatgccgtgtgggaaatgccgtacctgccgatcgatccgagcgatgtcggccgcacgtacgactcgatcattcgcgtgaacagccagtcgggcaagggcggtatcgcgtacctgctcgagcagagctatggcgtcgtgctgccgcgccgcctgcaggtcgacttcagcgcggccgtgcagcgcctgaccgacgacagcgggctcgaggtgacgagcacgcagatctggtcgctgttccagcaggaatatgtggaaggcgatgcgccgttgcgttacgtcggccatgagctgaccgagcgcgacggccgcgagacgatcgtgctgaccgccgacgtgcacggcgagcgccgcgtgttgcgtggtgaaggcaacggcccgctcgacgcgctgatgcatgcgttgcgtacgccgctgcggatccagcattacgaggagcgcgcgttgtcacaaggcgccgatgcgaaggcgatcgcgatcgcggaactggccggcacgggcgtgcgcggcagcgcgtttggcgtcggcatcgacgcgaacctgacgaccgcgtcgatccgcgcggtgatcagcgggatcaaccgcgcgtatgcgcgcgcggacgaagcggtgcaggcgacgttttttggggtgcagtcggcggtgaaggccgtcgcgtaac

SEQ ID NO: 237278 - DNA, 1492 bp, Unknown
  Bacterial polypeptide expressing nucleotide sequence isolated from the Sargasso Sea
atgagttcagatcaattagtaatttttgatactactttaagagatggtgaacaaagtccgggaattgctttaacaccctctgaaaaacttctcattgctcaacaattagaaaaacttaaggtagatgtgattgaggctggatttgcagcttcctcccctggcgactgggagggagttaatctaattgcgaaaaatataaaaaattcaaccattgcttctctagctcgttgcgtacaagaagatattgaacaagcttatgaagctattaaaccagccaataattcaagaatacatgtctttacatctacttctgatatacatatggaacatatgcttaggaaaactaaggatgaggttttaaaagatgcaaaagaatcagtaaggtttgcaaaaaaactatgtgatgacgtagagttttctgcacaagatgctacaagaacagatcatgattttttgattgaaatattaaaaattgctgtcgaagaaggtgcaacaacaataaacgttccagatactgtaggttatgcgacaccaaacgattatttagaactactcaaaaaagtttacagcaaagttaaagggaaaaatgaagacgtaataatttcaacccattgtcataacgatttagggctagctgttgcaaattctttgacagctatcgatgctggagccagacaaatagagggtgcaattaatggaattggagaaagagcaggtaatacatctacagaagaaataataatggctatcaagacaagacaagatcaatatggagttgaaatcaaagctgagacaacagaaatctctgagacttctaggcttgtatctaaattaactggttacccagttcaatacaataaagcggtagtaggtagaaacgcatttagtcatgaatcaggaattcatcaacatggatatttgagaaatacaatgacatatgaaattatgactcctgactccgtgggacaagaatcaaaaatagttttaggcaaacattcaggtagagcaggctttaaagatgctttggaaaaacttaacattgtattagaagaagagttatttaatctaagctttgaaaaatttaaacaactagctgatagaaaaggtgaaattgttgaaaatgaattgcgagcaattattggtcaagtagaaattaatgaagctccagtaaaattagtatccgtatctgtaaacagtaaagatcaatttgcctccgcaaaagttactctcaacgttaatggagtggatcaaactaaagaagctgagggtgatggtatgatacatgctgcgtttaaagctgtaaaaaatattttgcaatctgatgcggtacttattgattatcgagttgaaagtattacaaaaggtgctgacgcgactgcagaaattgtaactataattaacgatggacaaaatttaaaacaaggaagatctgtgtcaacggatgttgtacaaggctctgtagaatcctttttaaatgcattaaacaaataat

SEQ ID NO: 237279 - DNA, 364 bp, Unknown
  Bacterial polypeptide expressing nucleotide sequence isolated from the Sargasso Sea
catgtctgcttatcaatcagtccgaatttttgatacgacgcttcgagacggagagcagtctcccggtgcaagcatgaatctcaccgaaaaaattgaggtggcgcatgcattatctcagttaggtgttgacattattgaggccggtttcccaattgcttctcccggtgacttcgaatcggttcgcgaaatcgctcgtgctgtgcgcgaaccgataatttgtggcctcgctcggtgtaatgacagtgatatagaccgcgcctgggaagcgcttgccgaagcagcccgcccccgaattcatgtattcttagcaacaagtgctattcatcgtgagttcaagctacggatggatgaagatgaggtcgtt

SEQ ID NO: 237280 - DNA, 1487 bp, Unknown
  Bacterial polypeptide expressing nucleotide sequence isolated from the Sargasso Sea
attgactaaaataattaatgattcagcttctaaataccggcctttcaagtctattaatttagatcatagaacttggccttcaaatacaattactcaatcacctatatggtgcagtgtcgacttgagggatggtaatcaggctcttatagagcccatgggcgaagaaagaaagcttaggatgtttagtctcttaattgagattggtttcaaagagattgaagtgggtttcccttctgcgtctcaaacagacttcgattttgtaagaaaaattattacagaaaacctcataccaaatgatgtgactatccaagctttaactcaagcaaggcctgagttaattaagaaaacttttgaggcgttaaagggggcaaagaaggctattgttcatgtctacaattctacttccactttacagcgtaaagttgtttttaagagtgatgaggcaggcataaagaaaattgcaactgatggtgctaaatgggtaaaagaagagtcagaactatatgatgaaactgattggtcatttgaatatagtccagagagctttacgggtacagaactcccttatgcagttgaggtgtgtaatgcggtcaatgaaatttggcaaccgaatgatcaaaagaaaacaatcatgaatctacctgccacagtggaaatggcttctccaaatacttatgcagatcaaatagagtggatgtgtagaaatctgcaggatagaaaaaatgtaatagttagtcttcatccacataatgatagaggaacagcggtggcagcaactgaactaggagttatggctggtgctgataggatagaagggacactttttggaaatggagaaagaactggtaatgttgatttagttactctggctttaaatatgcttacacaaggtgttgatcctcatctagatttttctaatataaatccaataatgagagaagcggaatattgtaatcaattgccagttcatccaagacatccttatgcaggtgatcttgtttttacagctttttctggctctcatcaggacgctataaagaagggccttgctgagatgagaaattctaatcaggagctttgggaagtgccctatcttccaattgatccgagtgatgtaggaagatcttatgaggcagtaataagaattaatagtcaatctggtaaaggaggtgttgcttatcttcttgaaaaagatcatggattaagtatgcctaggaggttgcagattgaatttagtcaggtgatacaaaaaatagcagacgaatctggaaaagaaatatctccttcagacatttgggataattttcaagaaacttatcttaatagctcaggaagctacgaattcattgaacatcatataaattcaagttctaacaaagacggcacacaatctgacgaaataactataggacttaaacataacactgatgtcgtcagtatagagggccgcggaaatggtccgatagatgcgatgattgatgctatca

SEQ ID NO: 237281 - DNA, 802 bp, Unknown
  Bacterial polypeptide expressing nucleotide sequence isolated from the Sargasso Sea
atgaatagtaaagataattatattaaaatttttgatacaaccttaagagatggtgagcaatctccaggagcttcaatgtctcttgaggaaaaaatacaaattgctgaaatttttgatgaaatgggcgtagacattattgaagccggatttccgattgcatcaaatggtgattttgagtcagttaaagaagtctctagaatagtaaaaaatgttcaagtttgtgggttatctagggcaggacaaaaggatattgatagagctgctgaagcattaaagtatgcaaaaaaccctagaattcatacttttatttcaaccagccctgttcatatgcagtacaaattacaaatgaatgagcaagaagttcttgatgctattaatttctctgtatcaagagcaagaaatttagtagaagatgttcaatggtctgcagaagatgccacaagaacagatagagattttttatttaaatgtgttgatatggctatatcatctggagctaccacaattaatattcctgatacagtaggttatacaactccagatgaatattatgaaataattgactctttaataaaaaatataccagattcagataaagttattttctcaacacattgccataatgatttaggtttagcagttgctaattctttgtctggtgtcagagcgggcgcaagacaaattgagtgtactatgaatggaattggtgagagagctggtaatgctgctcttgaagaaattgtcatgtctatgaaagtaagaaatgatatattagattatgactcaggagtgaaacaaagct

SEQ ID NO: 237282 - DNA, 1570 bp, Unknown
  Bacterial polypeptide expressing nucleotide sequence isolated from the Sargasso Sea
gatgtctaacagagtcattatatttgataccaccttacgtgatggcgagcaggcgttagcggcaagcttgtcggtcaaagaaaagttacagatcgccatggcgttggaacgtctcggtgtcgatgtgatggaagtcggttttcccgtatcttcccccggtgattttgagtcggtgcaaaccattgctcgcaccattaaaaatagccgagtgtgcgcattatcccgcgccttggaaaaagatattgatgctgccgctcaagcattatcggtggctgatcagttccgcattcatacgtttatctccacctcgaccatccatgttgagagcaaattaaaacgttcattcgagcaagtgttggaaatggcggtcggtgcagtgaaatatgcccgtcgttttaccgatgatgttgaattttcatgcgaagatgcggggcgtacgccgattgataatttgtgccgtatggtggaagcggcgattcacgcgggggctcgcaccatcaatatcccagatactgtgggctacacagtgccaagcgagtttggcagcattattcaaactttgtttaatcgcgtaccgaatatcgaccaagccattatttcggttcactgccacgatgacttaggtctgtcggtcgccaattcgattactgctgtgcagcatggcgcgcgccaaatcgaatgtaccatgaatgggattggtgagcgtgcgggtaactgctctttagaagagatcgccatgatcttagcgacccgtaagaacctgctagggtttgaaacggggatcaatgcgaaggaaattcaccgaacctcaaatttagtcagccagttgtgcaatatgccaatccagtcgaataaggcgattgttggcgctaatgcctttacccattcgtcggggattcaccaagatggcatgttaaaagcgcaaaacacttatgaaattatgacgccagagagcatcggcctgaatcgtaacaatctgaatatgacctcgcgctccggccgtcatgtgattaagcatcgcatggaggaaatgggctacagcgagcaggattacaacttggatgccctgtatgaacagtttttaaaattggcggataaaaagggccaagtcttcgattatgacttagaagccttagccttcatggagacacaagccgcagaagataacttttatcaattacagcagttagtggtgcaatctgactcaaccgaaggcgtggccacggcgacggtgcgtattgatgtcggcggtgagattaaaactgaggccgctacaggaaatggccctgttgatgctgcctataatgctatcgcccgcgcgactgaccgccgtatcgatatcatcagctacaaattgggggctaagggcgtaggacaaaatgcgctcggccaagttgatattaccgcggtttaccatgagcaaaatttccacggtgtcgggttagcgaccgacgtggttgaggcatcagcccgtgcattagtgcacgtgatgaacctgacatgccgcgccgataaggttgcagattacaaacagaatatgcataaaaacaaagagctgggcggcgtatag

SEQ ID NO: 237283 - DNA, 1558 bp, Unknown
  Bacterial polypeptide expressing nucleotide sequence isolated from the Sargasso Sea
atgactgataaaatttatatatttgatacaacgttaagagatggtgaacaatcaccaggagcatctatgaatttagatgaaaaacttcaaatagctgaagttttagattctatgaaagtagatattattgaagctggatttcctattgcatcgaatggagactttgaagctgttagagaggtaagcaaaaatgttaaaaattctacaattgcgggtcttgcaagagctagtttgaaagatattgatagagcttgggaagctgtccagcatgcaaaatcacctcgaatacatacttttatagcaactagcccccttcatatgaagtataaactaaaaaaaacagaagaagaagtattggaagcaattaatcagactgtatctcatgcaagaaatttatgtgaaaatattgagtggagttgtgaagatggtggtagatcagaattagaatttctttataaatgcattgaacttgcaattaattgtggtgcatccacaattaatattccagatactgtaggatatactttaccagaagagtttggtaaaatttttaaaaatgtaaaaaataatgtgccaaatatagacaaggcaattttatcaactcatactcataatgatcttgggttagccacagcaaataatgtagctgctattaaagagggtgcaaggcaagttgaatgtacaataaacggtatgggagaaagagcaggtaattcatctctggaagaaatagttatgactttaaaagtaaaaaaagatttgatgccttatcatacaaatataaaaactgatcttattatgaaagcatctagattagtttcttcaattactggatttcctgtacagccaaataaagcaattgtgggagctaatgcttttgcccatgaagctggtattcatcaagacggaatgcttaaacatgctggtacatatgaaattatgactcctgagtctattggactaaataaatcttcattagtattaggaaaacattcaggaaagcatgctttttcagaaaaattaaaagaattaggctatgaacctggagataatgcattaatggaattgtttggaaggtttaaagatttagctgataagaaaaaagaaatttttgaagaagatcttattgccttagctgaagatcgatcagcatcttatgatgaacacataaaatttgtatctttagatgttaatgcaggctctgtaaaaaaacatgaagctaacttaaaaatagaaatgaatgaagaggtaaaatttattaaagattttggtaatggtcctgtcgatgctacatttaatgcaataaaaaaacttacctctactaattttaaattaaagctttatcaagttaatgctattacagcaggtactgatgcccaaggagaggtaacagttcgtttagaggatgatgatttatcttctcaagctaaaggaagtgaccctgatattatcgttgcttctgctaaagcttatataagtgcattaaatagattattatttaaaaaaactaaatcaattgtaaaaaaatctgcagaaatcaaaatagaaggagtatagg

SEQ ID NO: 237284 - DNA, 1684 bp, Unknown
  Bacterial polypeptide expressing nucleotide sequence isolated from the Sargasso Sea
ttgactaaaataattaataaatcagcttctaaatacaaaccctttgaacctattaatatagagaatagagcttggcctaacaaaagtataaaagaagctcctatgtggtgcagtgttgatttaagagatggtaatcaagctttaattgagcctatgggagaggaaagaaagttaagaatgtttaatatgctgcttgaaataggcttcaaagagattgaagttggtttcccttctgcttcccagacagattttaattttgtaagaaaaattattaatgagaatttaatacctgaagatgtttctattcaagcgcttactcaagcaagacctgaactaatcaaaagaacttttgaagctttagaaggcgcttcaagagcaatagtccatgtttacaactccacttctactttacaaagaagagtagtattcaaaagtgatgaaaaaggtattaagaaaattgctactgacggagctaaagaggttaaagaatattctgaaaaataccataaaacagactgggtgtttgaatatagtccagaaagttttacaggtactgaacttccctatgctgttgaagtgtgtaacgctgttaatgaaatatgggaaccttctaaagagaaaaaatcaataattaacctccctgccactgttgagatggcttcacccaatatttatgccgaccagatagagtgggtcagtaataatattgataatagagaaaatattataataagtctccatcctcataatgatagaggaactgcggtcgcagcaactgaactgggagtaatggctggggctgatagaatagaaggaactctgtttggtaatggtgaacgcacaggaaatgttgatctagttaccttagcattaaatatgctaactcaaggagttgatcctgaactggatttttcaaatattaatccaataatgagagaagcagaatattgtaatcaactgcccgttcaccctagacatccttatgctggagatctagtatttacagccttttcagggtcacatcaggatgctataaaaaaaggattagctgaattaagaaattcaaatcaagagacttgggaggtcccttatctacctattgatcctaaagacgtaggaagatcttatgaagcagttattagaataaatagtcaatcaggaaaaggaggtgtggcttaccttttagaaaaagaccatggactcagcatgcctagaaggctacagatagaatttagccaagtaattcagaagataactgatgaaacgggaaaagagatttctgcttcagatatttgggaaacctttcaagaaacatatttcaatgaaaatggaagatttaaattcttagaacaccatatcaattcaagagcgaataaagaaggtctccaagaagatgaaatagaaataaaaattaatgatcgaaatatatctaaaaccataaaaggactaggtaatggaccgatagatgcaatgatagatgcattaagtgctggtttaaatcttgaaatcaaaatagctgattatcatcaacacgcaatcagttcaggatctgatgcaaaagcggttgcttattctgagatttcttaccaagatcaatctgtttggggggttggaattcatcagaatacagtaattgctggtctagaggctgtaataaatggtttaaatcgtttgtctatgtaag

SEQ ID NO: 237285 - DNA, 1543 bp, Unknown
  Bacterial polypeptide expressing nucleotide sequence isolated from the Sargasso Sea
atgaataaagatcatttaataatatttgataccacattgagagacggtgagcaaagccccggggcatcaatggacattgaagagaaaatacaaattgctaacgcattgagtgatcttaacgttgatgttattgaggctggctttccaattgcaagtaatggagattatagtgctgttaaagaaatagctgacagcatatctaattcaaggatttgtgcacttgcaagggctttagagaaggatattctgagggcagccgatgcattaaaaaatgccaaatactcaagaatacatactttcatcgcaacttctccgatacatatggagatgaaactaaaaatgtctccagaagaagttgttaagaatgccgttaatgcagttaaaatggctaaggaccatgttgaagatgttgaattttctcccgaagacgctgggagatcagattttgattttctttgtaaaattatagagaaagttattgatgcaggagcatctacaattaatatacccgacactgtgggttacaatcttccacatcagtttggcgatctcatatcaaggattattgataatgttccaaattcaaatagcgctattttttcagtacattgtcacaatgatcttggattagcagtttcaaattctctatcatcggtattaaatggtgcaaggcaggttgaatgtactatcaacggattaggtgaaagagccggtaatgctgcactagaggagatagtcatgactgtgaaaactcgcagggatatcttctcatgtgatacgaggattaatacaaaaaaaattatgaattgctctaggcttgtatcaagcataacgggttttcctgtccagccaaataaagcaattgttggtaaaaatgcttttgctcatgaatcaggaattcatcaagatgggataattaaatcaagagaaacttatgaaattatgaaagctgaagatattggcttactaagcaattcattagtcttgggcaaacactcaggtcgtaatgctttcaaacagaaacttgatgaacttaacatccaaaatgcatctgatgatgcattcaatgatttattctctaggttcaaggagcttgcagataaaaaacatgaaatatacgatgaggacatagtacgcttgtccaataatattacattaacaggtgacgatatacagttgagctacatgtcggttatttgtgattcaaacaaaaaaccaagtgctaagatcatgttaaacatcaaaggcgaagaaaaagaagctacagctgagggtgacggtgcagtggacgctgcttttaatgcaatcaaagaaattattgatcttaaagtggatcttagattatattcagtgaataatataacctcaggaactgacgctcaaggtgaagtaacagtcagagttgtaaaagatgagcttattgttaatgggcatggcgctgatacagatattgtgaaagcatctgttttagcttatctgaatgcaataaataaaatttttcagaatcctgatcttgtaactaaaaaattatcaggtatctaat

SEQ ID NO: 237286 - DNA, 788 bp, Unknown
  Bacterial polypeptide expressing nucleotide sequence isolated from the Sargasso Sea
aatgaccgaaaaaatctatatttttgatactactctaagagacggtgagcaatctccaggcgcatctatgaatttggatgaaaaaattcaaatagctgaagttttagattccatgaatgtagatataattgaagcaggctttccaattgcttcaaacggagattttgaagcagtaagtgaagtaagcaaaaatgttaaaagctcaactgttgctgggttagccagagcaaactataaggatatagatagagcttgggatgcagtaaaacatgctaattcacctcgtattcatacctttattgcaacaagtccacttcatatgaaatataaattaaaaaaaactgaagatgaggttttagaagcaataaaaaaaacagtaacctactcaaggaatttgtgtgacaatgttgaatggagctgcgaagatggtggaagatctgaattagaatttttatataagtgtattgaattagcaataagttgtggtgcaacaacaataaatattcctgatacagtcggatatacacttcctgaagaatttggaaaaatatttaaaaatgttaaaaataatgttctaaatattgataaagcaatattatcaacacatacacataatgatcttggtctggcaactgctaataacgttgcagcaataaaagagggagcaaggcaagttgaatgtacaatcaatggaatgggtgaaagagcaggaaattcttctctcgaagaaatagttatgaccttaaaagtcaaaaaagatttaatgccttatcatacagatattaaaa

SEQ ID NO: 237287 - DNA, 835 bp, Unknown
  Bacterial polypeptide expressing nucleotide sequence isolated from the Sargasso Sea
gttgatttagttaccctggctttaaacatgcttacacaaggtgttgatcctcatctggatttttctaatataaatccgataatgagagaggcagaatattgcaatcaattaccagtccatccaaggcatccttatgcaggtgatctcgtctttacagccttttccggctctcaccaagacgcgattaagaaaggtcttgctgaattaagaaattctaatcaggagctttgggaagtaccctatcttccaattgatccaagtgatgtaggaagatcttatgaggcagtaataagaataaatagtcaatctggcaaaggaggtgttgcttatcttcttgaaaaagatcatggattaagtatgccgaggaggttgcagattgaatttagtcaggtgatacaaaaaatagcagacgaatctggaaaagaaatctctccttcagacatttgggataacttccaagaaacttatcttaacagctcaggaaactacgaattcattgagcatcatataaattcaagttccaacaaagacggcacgcaatctgatgaaataacgataggactaaaacataacacagatatcgtcagtataattggccgtggaaatggtccaatagatgcgatgatagatgccatcaaaaagagcttcaatcttgaaattaagatatctgattatcatcaacatgccatcagttccggctcagatgctaaagcagttgcatattctgaattagtgttaggaaacaaatctgtatggggagttggtatgcatcaaaatactgttattgctggattactttctgtaataagcggcctaaatagattgtctaaataac

SEQ ID NO: 237288 - DNA, 847 bp, Unknown
  Bacterial polypeptide expressing nucleotide sequence isolated from the Sargasso Sea
tatgggagcctaccaaggaaaaaaaactataataaaccttccagccactgttgaaatggcctctcctaatatttatgcggatcaaatagagtgggtctgtaaaaatattgataatagagaaaatattatcgtcagccttcatccacataatgatcgtggaactgctgtagcagcaacagagttaggtgtaatggcgggagctgacaggattgaaggcactttatttggtaatggggaaagaactgggaatgtagatttagttacattagccttaaatatgcttactcaaggagtggatcctgaactagatttttctgatataaatccgattatgcgagaaactgagtattgcaatcaacttcctgttcaccccagacacccttacgctggggatcttgtatttacagctttctctggatcacaccaagacgcaatcaaaaaaggattaaatgaattaagaaattcaaatcaagagacttgggaagtgccctatcttccaattgatcctaaagatgttggcagatcttacgaagctgttataagaataaatagccagtcgggtaaaggcggtgttgcttatctcttagaaaaagatcatggcttaagtatgcctagaagactccaaatagagttcagtcaagttatccaaaagattaccgacgaaactggaaaagaaatctccgcctctgatatttgggaaacgtttcaagaaacttattttaatgaaaatggtacttttaaatttctggaacatcatattaattcaagagccaataaagaaggtcttcaggaggatgaaatagaaatcaagatcaaaaaaggaaatgagactaaaactataaaaggt

SEQ ID NO: 237289 - DNA, 1447 bp, Unknown
  Bacterial polypeptide expressing nucleotide sequence isolated from the Sargasso Sea
ttccggctgctcacaaactgattttgatttcacaagatatttaattaacgaaaaagttatcccctctgatgtaactattcaagttcttactcaagctagacccgaaattataaagagaactttcgaagctcttgatggagctcctaatgcaattcttcatttttataattcgacttcaactcttcaaagaaaagttgtttttgataaagataaagaaggagttaaaaaaattgcaacggatgctgcaaaattaatcaaagagttatcaagtgaatataaaaacactaattggtcatttgaatactctcctgaaagtttcactggaactgagctagattatgcagtaaaggtttgcgatgacgttgttgatatattaaaagagtcttcaaataataaaattattattaatcttcctgcaacagttgaaatgtcaacggcaaatatatatggagatcaaatagaatggatgagtgagaactttaaaaatagggaaaatatatgtctttcacttcatccgcataatgataggggtacagcaatagctgcttctgagtttggcttaatggcaggtgcagatagggttgagggaacgttatttggtaatggtgaaagaacaggaaatgtagatatcgtaaccttagctctaaatatgtatagccaaggtataaatcctaatttagatttttcacaaattaataatgttatgagagaagttgaatactgtaatcagctacccgtccatcccagacatccctatgccggagatttggtctttactgctttctcgggatcgcaccaagatgccatcaaaaaaggtttaaatgcattaagaagctctaatgacccgcaatgggaagtgccttatttaccaattgatcctgcagacctggggagaacttatgaggccgttgtaagaattaattcacaatctggaaaaggaggcgttgcttttctattggaaaaagatcacggcgtgtctctccctagaaggcttcaaataagcatgagtcagaagatacaaaaaattgctgatgagactggtaaagaaatttcaacatcagagatttgggaaatctttcatacaaactttgttatgccaaaatctgggcatagttttaaaaactattccttaaaaacttcagatgcaactgatttaactgatcatattaaagctgagattgaaattgatggtaaaaaccatgaaatatctggttcaggtaatggtccaattgacgcatttgttaatgcactgaatcaaaaactatcaattgatataaaagtatctgattatcatcagagtgcaatttcatctggctctgacgctcaagctgctgcttatattgaactccaaaaaggtgacaaaacaagttggggtgttggtataaatcctaatactacaaaagcttcatttgaagccattattgttggagtagctaaactaatctaa

SEQ ID NO: 237290 - DNA, 1541 bp, Unknown
  Bacterial polypeptide expressing nucleotide sequence isolated from the Sargasso Sea
tataatttttgatactacgatgcgtgatggagaacagtctcctggcgcttcaatgagtttggaggagaaattacaaatctctagagtctttgatgaattaggagttgatgttattgaagcaggttttcccatagcatctcccggagattttgaagctgtcacagaaattagtaaaactctaaaaaaatcaattcctgcaggtttagctagagctacaaaaaaagatattgatgcttgtcatcaagctctaaagcatgcaaaaaattttagaattcatacttttatttctacaagtccgcttcacatgaaacataagttaaataaatcgcctgaagaggttctagattcaattcaagaaagcgttacttatgctagaaagtttactgacgatgttgagtggtcatgcgaggatggaacacgaacggatatggactatatgtgcaagacagtagaacttgctatcaaatgtggagccaaaactattaatattccagacacagtcggctacacagtcccatctgagtttaaaaaaattatagagacattaattaataaagttccaaatattgataaagcaattctttctactcattgtcataacgacttgggattagcagtagctaattctttagcaggggttatggctggagcaagacaaattgagtgtacaattaatgggattggtgaaagagctggtaatgctgcccttgaagaagttgtcatggctatgagaacaagacacgatttaatgccttacactacaaatataaatacaaaacttttaagcaaagcttcaaaagttgtttcaaatgcaacaggttttcctgttcaatttaataaagcggtcgtaggtaagaatgcatttgcccatgaatcaggcatacatcaagatggaatgttgaagaatagaaatacttacgaaataatgacaccagagagtgttggagtaaaaaaaacatcattagtgatgggaaaacattcaggccgacatgcctttagagacaaattatctgatatgggttatgtagatgtcactgacgatattataaacactgcttttggtaaatttaaaatcttagcagataagaaaaaacatatttatgacgaggatattgctgcgttagttgatgatagcttagtgactgaagataatgtaattaaattaaaatctttaaaggtttttgccggaactggtgaacctcaaaaagcagaaatgactttagaaatttttggagaagtaaaaagtgcaacagatacaggagatggtcctgtagatgcaatttttaaatgtattaaaaaactttatgctcatgatgttaaacttttactatataacgtgcatgcagttactgaaggcactgatgctcaggcaacagtaagtgtaagaatagaagaaaaaggtaaaactacagtaggccaagctgcagataccgatacactagttgcatcagctaatgcttatttaagtgctttaaataaattaattataaaaagaaaaaaaacagcgccagatgatgaaaatctaagcgctcaaatataga

SEQ ID NO: 237291 - DNA, 775 bp, Unknown
  Bacterial polypeptide expressing nucleotide sequence isolated from the Sargasso Sea
ttttcagacattaattctgtgattagggaagttgagtattgcaatcaactgcctgttcatccaagacatccatatgctggtgacttagtttttactgccttttcgggatcgcatcaagatgctattaaaaaaggtcttagtgctctagaaaagtcaaatcaaccagaatgggaagtaccttatctccctattgatcctgctgatcttgggagatcatatgaagctgttgtaagaataaattcacaatcaggaaaaggtggagtctcttttatccttgaaaaggatcatggagtgtctcttccacgaagattgcaaatcaatctaagtcaaaaagtacaaaaagtagctgatgacactggcaaggaagttatgtctagagacatatggaaagtatttgaagaaaactatatttctgtttctggtagactcaagctaattaattatgcgttatcatcaactgaagactcttctggtaatacttcagatcagattgagatatctttagaagataagaataataaggttagtctaaatggtatcggtggaggccccattgaggcttttgtatcttcaataaataattatttttcaacatccatcactgtttcagactatcaccagcaatcagttacttctggcgctgacgcaaaagctgcagcatttattgagcttacaatggatggaaaaaatgaatggggtgcaggtattgatgggaatacaacaaaggcttcttttcaagcaattgtctctggtctgaacaagctaattacttaaa

SEQ ID NO: 237292 - DNA, 512 bp, Unknown
  Bacterial polypeptide expressing nucleotide sequence isolated from the Sargasso Sea
aatgtcaaaagatcctggaagaattttgatatttgatacaactcttcgagatggagagcaatctcctggtgccagtttaaatcttgaagaaaaacttgctatcgcccatcaactagcaagattaggggtagatgtgattgaagctggattccctttcgcaagtccaggagattttaaagctgttaataaaattgctaatgtcgtagggaaagaaaatggccctataatatgcggcttagctagagcatctaaaggagatataaaagcatgttacgaagcggtaagtccagctcccaaaagaagaatacatacttttattgcgacaagtgatattcatcttaaacataaacttaaaaaatccagaaaagatgttcttcaaatagttccagaaatggttaattatgcgaaatccttagttgatgatattgagttttcttgtgaagatgcctcaaggagtgatcctgaatttttatacgaagtgattcaactagcaattgctgcaggagctacga

SEQ ID NO: 237293 - DNA, 865 bp, Unknown
  Bacterial polypeptide expressing nucleotide sequence isolated from the Sargasso Sea
tatgggtgataaaaacagaataataatcttcgatactacaatgcgtgatggtgaacaatcaccaggagcgacaatgagtttagaagaaaaaattcaaatttcaagagtatttgacgagcttggtattgacgttattgaagctggttttccaattgcttctcctggagatttcgaagcagtaactgaaataagcaaaattttaaaaaattcaattcctgcaggactatcacgagcgacaaaaaaagatatcgatgcttgtaaagactctttatgtcacgcaaaacgatttagaatacacacttttatttcaaccagtcctttgcatatgaagcataagctaaataaatctccagaacaggttttagatgcaattaaagaaagtgtaacttatgcaagaaaatttacagacgatgttgagtggtcttgcgaagacggcactagaactaacatggactatatgtgcaaagctgttgaattagctataaagtgtggagcaaaaacaataaatattccagacactgtaggttactcagcgccatcagaatttaaaaagataatagaaacattaattaacaaagttccaaacattgacaaagctatactatcaacacattgtcataatgatttaggcttagcagttgcgaattctcttgctggagtcatggcgggcgccagacaaatagagtgtacaattaatggaattggagaaagagcaggaaatgctgccttggaagaagttgtgatggcaatgcgaacaaggaatgatttaatgccatatagcactggaataaacacaaaacttttaagcaaagcttctaaaattgtttcaaatgcaacaggattttcagttcaatttaataaagca

SEQ ID NO: 237294 - DNA, 1573 bp, Unknown
  Bacterial polypeptide expressing nucleotide sequence isolated from the Sargasso Sea
tatgagcgataaagatagagtctttatattcgatacaactatgcgtgatggtgagcaatcaccaggtgcctctatgagtttggaagaaaaaattcaaattgccagagtatttgatgagttaggaattgatattattgaagcgggttttcctattgcatcacctggagattttgaagctgtttctgaagttagtaaaattttaaaaaattcaattcctgcaggactatctagacattctgtaaaagatattgatagagcttatgaagctttaaagcatgctccaagatttagaatacatacttttatttctacaagcccactacatatgaaacataaactaaatatgtcacccgaggatgtttatgagtcaattggtaaacatgtttcttatgcaagaaaatttactgatgatgttgagtggtcatgcgaagatggcacaagaacagatatggattatatgtgcaaaacagttgagcttgcaataaaaaatggagcatcaacaattaatattcctgatactgttggttacacaataccatctgagtttacttcaataattgaaacactattaaataaagttcctaacattgataaagcaattttatctactcattgccacaatgatttaggtttagctgtagctaattcattagccggcgttcaagcaggagcaagacaaattgaatgtacaataaatggtttaggtgaaagagcaggaaatgctgcattagaagaagttgttatggcaattaaaacaagaccagatttaatgccatacgaaactggaattaatacaactttgttaagtaaagcatcaaaaatagtttcaaatgcaactgggtttccagttcaatataataaagcaattgtaggaaaaaatgcattcgcgcatgaggcaggcattcatcaggatggaatgttaaaaaatagacagacttatgaaattatgactcctgaaagtgttggagttaaacaaacttcattagtcatgggtaaacattctggaagacatgcttttaaagataaattaaatagtttgggttatccagatttaacagacgacgtagtaggaaatgcgtttgcaaaattcaaggttttagcagacaagaaaaaacatgtttatgatgaagatattattgctctagtagatgatagtttaataactgataacaaagttagtgctattagtttgaaatcattaaaggtttttgcaggaacaggtgaaccacaaagagcagagatgactttagatgtttatggtgacgtaaaacaagcttcagaaactggagatggaccagttgatgcaatatttaaatgtataaaaactctttatcctcatgatgtaaatttacagctttaccaggttcatgctgttactgaaggaacagacgctcaagctactgtaagtgtaaaaatagaggaaaatggaaaaacaacagtgggtcaagcagcagatactgatactttggttgcttctgcaaatgcttacataaatgcattaaataaaatgataattaaacgagataaaacagctccaatggagcaagatagtcaaaaagtaaggggaatataa

SEQ ID NO: 237295 - DNA, 1543 bp, Unknown
  Bacterial polypeptide expressing nucleotide sequence isolated from the Sargasso Sea
atggttgaaaataataaaaatgacaaactattagtttttgatacaacacttcgtgatggagaacaatcagcaggtgcatccttaactgcccaagataaatttagaattgctacccagttgcaaaagctaaatgttgacatcatagaggctggttttgcagctagttcacctggtgattttgctgcagtaagaaaaattgctctagaaattgaaggaccaactattgctacattagcaagagcagtaccttctgatatagactctgctattgcttgtttgaaaggtgcttcaaagcctaggattcatacatttttatcggtttcagatatacacatgcttcatcaaatgaagaaagatagagaatctataatgtcaatggctatagatgctgtaaagagagctagagattcagtacaagatgttgagttttctccaatggatgcctcaagatctgatccagactatttatacatgatgttagaaaatgctatagcagcaggagctactactgttaatattccagatacagttggatatacaaatcctcaagaatttggagaattaattgctggagtttttaataatgtatctaatatagataaggctattgttagcgttcattgccataatgatttagggatggctgttgcaaatagtctatcagctcttgaaaatggtgctagacaaattgaaggctgtatcaatggtttgggagagagagctgggaatgctgctttagaagaggttattatggcagtaaaaacacgccctgatcattatggagtagagactgatataaatactccagaaataggaccatcgagtagactgatttctaatatatttggtttccctatacagtttaacaaagctgtcacaggtcaaaatgcatttagacactcttctggaattcatcaggatgcatttcttaaagaaagaacaacttttgaaataatgcttccagaagaagtaggttggaagggtgatgcgattgttctgactaaggtttcaggtagagcaggtttgaagtccagattagaatatttaggatataaggtagacgataaagaattactagagatttttaatagctttaagaatttagctgatcagaaaaaagaaattactgataaagatcttgaatctttaatgagtgaatttcacagagaattagatacaacagaaagattcaaggttttagatttggatgtagtatgtgggaacaaaagagatcctgtagcttcaattactttggaactgcctaatggggactcagaaagtgtttctaagtcaggaacagggccagtggatgctgtatgtaattcgattgattctataactaaacaagatgtaaatcttactgaattttcagtttcttcagtaaccgagggaattgatgcacttggagaagtaactataagaattgaaaaagatgggacaatttattcaggacaaggatctgatacagatataatttttgctagtgcaaaggcgtacgttaatgcaattaacagatatttgattattaagtcttcaaattaat

SEQ ID NO: 237296 - DNA, 1684 bp, Unknown
  Bacterial polypeptide expressing nucleotide sequence isolated from the Sargasso Sea
attgactaaaataattaatgattctgcttccaaatatcgtggcttcaaacctataaatttaacagataggacctggccatctaaaactattgaagaatcccctgcttggtgcagcgtagaccttagagatggtaatcaagctctcatagagcctatgggagaagagcgaaaacttagaatgtttaagctcctcttagagataggtttcaaagaaattgaagttggatttccctcagcctcacaaactgatttcgattttgtaagaaaaattattcaagataatttgatccctagtgatgtcactattcaagcattaactcaggcaaggccagagttaattaaaagaacattcgaagctctcgagggtgctaataaagctatagttcatgtgtataactcaacttccaccatacaaagaagagtagtttttaaaagtgatgaagaaggaataaagaaaatagccactgatggtgcgaaatgggtgaaggaatactcagagaaatatagcgaaactgattggacatttgagtatagtccagaaagttttactggaacagagctaccctatgcagttgaagtttgtaatgcggtcaatgaggtctggaagccaaataaagataagaaaaccataataaatcttcctgctacagttgagatggcttctccaaatatctatgccgatcaaattgagtggatgtgcagaaacctagaaaatagggaaaatataattgtaagcctgcatcctcataatgatagaggaactgcagttgcagccacagagcttggagttatggctggagcagataggatagaaggtacattattcggtaacggtgaaagaactggaaatgtagatcttgtaactttagctcttaatatgcttactcaaggtgtagatccccatttagatttctcaaatatcaatccaatcatgagagaagcggagtactgcaatcaattacctgttcatcccagacacccttatgcaggtgatctagtcttcactgccttttctggatctcatcaagatgctattaaaaaaggcctttctgaattaagaaatacaaatgaggcaatatgggaagtaccttatcttcctatcgatcccaaagacgttggaagatcttatgaggcggttatacgcatcaatagccaatcaggaaaaggtggagtagcttatcttttggaaaaagaccatggcctgagtatgcctagaagattgcaaatagagttcagtcaagtgattcaaaaaattactgatgagaccggtaaagaaatttccccatctgatatttgggataattttcaaaaaacctatcttacagatactggttattatcaatttgtagagcatcatataaattcaagctcaaataaagatggctctcaatcagataaaattcacgtcttactaaattgcaactctaaagaagtttcaatagagggttccggaaatggacccatagatgcaatgatagatgcaattaagaaaagttttgatatcgaaatcaagatatctgattatcatcaacatgcaataagttctggatcggatgccaaagcagtagcgtattcagagttaattcttggagaagaatctgtttggggtgtaggaatgcatcaaaacacagtaattgctggtttgctgtctgtaattagcggcttaaatagattgtctaaataa

SEQ ID NO: 237297 - DNA, 877 bp, Unknown
  Bacterial polypeptide expressing nucleotide sequence isolated from the Sargasso Sea
aatggataaaacaaataaaaaatataagccatataagcctgtaagcaaagagaacaggtcatggccttcaaaagttatagaaaatgctcctatttggtgttctgtagacctgcgagatggaaaccaagctcttattgagccaatgggagatgaaagaaaaaaaagaatgtttaatctattgtgcaaaattggttttaaacagattgagattggatttccggctgcatcacaaactgattttgatttcacaagatatttaattaatgaaaaagttatccccactgatgtaactattcaagttcttacgcaagctagacccgaaattataaagagaactttcgaagctcttgatggagctcctaatgcaattcttcatttttataattcgacttcaactcttcaaagaaaagttgtttttgataaagataaagaaggggttaaaaaaattgcaacggatgctgcaaaattaatcaaagagttatcaagtgaatataaaaacactaattggtcatttgaatactctcctgaaagtttcactggaactgagctagattatgcagtagaggtttgcgatgacgttgttgatatattaaaagagtcttcaaataataaaattattattaatcttccagcaacagttgagatgtcaacggcaaatatatatggagatcaaatagaatggatgagtgagaactttagaaatagggaaaatatatgtctttcacttcatccgcataatgataggggtacagcaatagctgcttctgagttcggcttaatggcaggtgcagatagggttgagggaacgttatttggtaatggtgaaagaacaggaaatgtagatatcgtaaccttagctctaaatagtatagccaag

SEQ ID NO: 237298 - DNA, 1672 bp, Unknown
  Bacterial polypeptide expressing nucleotide sequence isolated from the Sargasso Sea
attgaaaaaaattacaaatacaaatacctcaaagtacttaccgtttgaaaggatcgacctaagcgatcgtaaatggccaggaaatattatttctaaaaaacctatttggtgtagtgtcgatttaagagatggcaatcaagctttgattgaacctatggggtctgaaaaaaagcatagattttttcaattattattagagactggatttaaagaaattgaagttggatttccatctgcttcaaaaactgattttgattttgttagagacttaattgaaaaagatttaattcctgatgatgtcactattcaggttttaacgcaggctagagatcatttaattgaggataccttcaaagctgttaaaggagcaaaaaatgtttgtattcatgtttacaactccacttctacccttcaacgcgaggtagtattcaaagaaagtaaagatggggtcaaaaaaattgctttgaacggtgcctccttagttaaagaattagcagataaaaataatgagactaattgggtgtttcaatatagtccagaaagcttcactggcacagaattgagttatgcggttgaagtttgtaatgaggtgaatgagatatggaatccttccagcgataataaatcaataatgaatcttcctgctaccgttgagatgtctactcctaatatatatgcagatcaaattgagtggatgtcacgaaatttaaacaaccgggaaagtgtaatattaagtcttcatccccataacgatagagggactgccgtagctgcagccgaattaggattaatggcaggagcggatagaatcgagggttgtcttttcggcaatggagagagaactggtaacgttgacatagtaacacttgcgctaaatcaacttacacaaggtttagacccagaattagatttttccaatatcaatcatgtaatgcgagaagttgaatattgtaatcaattacctgtgcatcctaggcatccttatgctggggacttagttttcactgcgttttcagggtcgcatcaagatgcaatcaaaaaaggttttgattcaatgagagaatccaacgacccgctttggaaagttccatatcttccaatagatcctgaagatctaggaagaacatatgaagctgtgattaggataaacagtcagtcaggaaaaggtggtattgcgtacattctagaaaaagatcatggattatcaatgcccagaaggcttcaaattgattttagtcaggttattcaagaagttactgatgagactggaaaagaattagagagtgaagatatttggactaaatttagggaaacttatttggaaggaaataagtacagatatgtttctcataaaatttcttctggtcctgacgataaaggaatacaaaaagataacattgaagttactctgtctaaggaaggtaaagaatttgacataaagggggaagggaatgggcctatagatgcatttatgagtgcattcaataactacaataaatcatcattttcaatttctgattatcatcaacacgcaatctcgtctggggcagatgcccaggcagttgcgtacatagaagtacaaaaagataagaaaagcctttcttggggggctggtattcatgccaacacgttagttgcatctattatctctgtattaaacgccctggattag

SEQ ID NO: 237299 - DNA, 760 bp, Unknown
  Bacterial polypeptide expressing nucleotide sequence isolated from the Sargasso Sea
aatggaagataaaaacagaataataatatttgatacgaccatgcgagatggcgaacaatctcctggcgcatcaatgagtcttgaggagaaaattcaaatatcaagagtctttgatgaacttggtattgatattatagaggctggtttcccaatcgcatctccaggagacttcgaggctgttacagctataagcaaaattttaaaaaaatcagttcccgctggtcttgcaagacatacaaaaaaagatattgatgcttgtcaccaagcccttaaatcagcaaaaagatttagaatacatacttttatttcaacaagctcacttcatatgaaacataagttgaataaaacacctgagcaagtaattgattcaattaaagaacacgttacttatgctagaaaatttactgacgatgtagaatggtcgtgtgaggatggaactagaaccgatatggattttatgtgcaagacagtagagctagcaattaagtgtggtgccaaaacaataaacattcctgatacagttggttatacagttccttcagaatttaaaaagattattgaaactttaaaaaataaagttccaaatattgataaagcaattttatcagtacattgtcataatgatttaggcttagcagttgcaaattctcttgcaggagtttcagcaggagcaagacaagtagaatgtacaattaatggtattggtgaaagagctggaaatgcagcattagaggaaattgtaatggcaatgaaaactaga

SEQ ID NO: 237300 - DNA, 1168 bp, Unknown
  Bacterial polypeptide expressing nucleotide sequence isolated from the Sargasso Sea
cattgatagagcttatgaagcattaaaacatgcaccaagatttagaattcacacttttatttcaacaagtccattacatatgaagcataaacttaatatgtcaccagatgatgtttatgagtcaattggtaaacacgttgcttatgcaagaaatcttacagatgatgttgaatggtcttgtgaagatggaacacgaactgatatggattatatgtgtaaaacagttgagcttgcgataaaaaatggagctacaacaataaatattcccgatacagtcggttatacaattccatctgagtttactacaattattgaaaccttattaaataaagttcctaatatagataaagcaattttatctactcattgtcataatgacctaggtttagcagttgcaaactctttagctggagttcaagcaggagcaagacaaattgaatgtacaataaatggtttaggagaaagagcaggtaatgcagcattggaagaagtggtaatggcaattaaaacacgacctgatttgatgccatatgaaactggaattaatacaactcttttaagtaaagcatcaaaaattgtttcaaacgcaactggttttccagttcaatataacaaagcaattgttggaaaaaatgcttttgctcatgaagcaggaatccatcaagatggaatgttaaaaaatagacagacttacgaaattatgacgccagaaagtgttggagtaaaacaaacatcattaattatgggtaagcactctggaagacatgcatttaaagataaattaaatagcttaggttatcctgatcttacagatgatatagtaggaaatgcctttgcaaaatttaaagttttagcagataagaaaaaacatgtttatgatgaagatattattgcactaattgatgatagcttaattatcgataataaggttaatgcgataagtttaaaatctttaaaagtttttgctggaactggagaaccacaacgagcagaaatgactttagatgtttatggagatataaaacaagcatctgaagtaggtgatggtcctgttgatgcaatatttaagtgtataaaaacactttatcctcacaatgtaaatttacagctttatcaagtgcatgcagttaaaagaaggtacagacgcacaagctactgtaagtgttaa

SEQ ID NO: 237301 - DNA, 805 bp, Unknown
  Bacterial polypeptide expressing nucleotide sequence isolated from the Sargasso Sea
tggtattaatacaaaattattaagcaaagcttcaaaaatagtttctaacgctacaggttttcctgttcaatttaataaagcaattgtggggaaaaatgcatttgctcatgagtcaggaattcaccaagatggaatgttaaaaaatagaaatacttatgaaataatgacaccagaaagcgtcggagtcaaaaaaacatcacttgtaatgggtaaacattctgggagacatgcttttagagataaactttcagatatgggatatgttgatgttactgatgacataatagatattgcttttggaaaatttaaagttttagccgataaaaagaaacatgtttatgatgaagatattgcagctcttgtggacgatagtttaataaaagaagataatgtaattaaattaaagtctttaaaagtttatgctggaactggagagcctcaaaaagcagtaatgaaattagaggtaatgggagatgttaaagaagcaactgaaactggagatggcccagttgatgcaatatttaaatgtattaaaaaattatatccgcatgaagttaacttacaattatataatgttcatgcagtcacagaaggaactgatgcacaagcaactgtgagtattagaattgaggaaaacggaaaaacaacggtcgggcaagctgctaacacagatacattggttgcatcggcagacgcatatttgaatgcgctcaataaactaataattaaaagaaaaaagactgctcctgaaccaatggacatgagcagttctaaatatataagggaaaaagatggcactatttaa

SEQ ID NO: 237302 - DNA, 348 bp, Unknown
  Bacterial polypeptide expressing nucleotide sequence isolated from the Sargasso Sea
gatgcaagataatttaataatttttgatacaactttgcgtgatggggaacaaagccctggtgcttcaatgacaaaagaagaaaaacttcgtatcgctaaagcactagagaaaatgagagttgatataatagaagctggatttcccattgcaagccctggagattttgaggccgttaaagcagtatcgggcatgatcaaagatagtacaatttgtggtttagccagagcgttatataaagatatagattgtgctgcagaagcacttgaaccagcaaaatcttcacgtattcatacttttatagcaacgtctccgatacatatgcgtgacaaattacgaatggagcccaa

SEQ ID NO: 237303 - DNA, 1145 bp, Unknown
  Bacterial polypeptide expressing nucleotide sequence isolated from the Sargasso Sea
aactgatatggattatatgtgtaaaactgttgagcttgcaattaagtgtggagcaaaaactataaatattccagacactgttggttatacagtgccatcagaatttacaaaaattattgaaactcttaaaaacaaagtcccaaatattgataaagcaattttatcaacacattgtcacaacgatttaggtttagctgttgcaaattcactagcaggtgtccaagcgggtgcaagacaaatagaatgtactataaacgggataggagaaagagcagggaatgctgctctagaagaagtagtaatggcaatgaaaacaaggcccgatttgatgccttatgaaactggaattaatacaactttactaagtaaagcgtcaaaaatagtttcaaatgcaacaggatttccagttcaatttaataaagcgatagtaggaaaaaatgcttttgcgcatgaatctggcattcatcaagacggaatgttaaaaaatagacaaacgtatgaaattatgactccagagagtgtcggagtaaaacaaacttctttagtaatgggtaaacactcaggaagacatgcatttaaagataaattaattagtttaggctatgtagatgttacagacgatgtaatagaaaatgcatttggtaaatttaaaattttagcagataagaaaaaacatgtttatgatgaagatataatagccctagttgatgatagcttaatagtagataataaagttaatgcaattaatttaaaatcactaaaagtatttgctggaactggagaaccacaaagagctgaaatgactttagatgtttttggtgaagtcaaaagtgcatctgaaacaggagatggacctgtagatgcaatctttaaatgtataaaaaaactatatcctcataatgtaaatttacaattataccaagttcatgctgtaaccgaaggaactgatgctcaagctacagtaagtgttcggattgaggaaaatggaaaaacaacagtagggcaagcagccgatactgatacattagttgcatctgctaatgcatacataaatgctttaaataaaatgataatcaaaagaaacaaaactgctcctggatatgctccagagcaaaaaaaagaagagaaagtgagaggaatttaaa

SEQ ID NO: 237304 - DNA, 1180 bp, Unknown
  Bacterial polypeptide expressing nucleotide sequence isolated from the Sargasso Sea
tatgagggataaagatagaataattatttttgacacaacgatgcgggatggagaacagtctccaggggcatcaatgagtcttgaagaaaaaattcagatatcaagaatttttgacgaactaggaatcgatattattgaggcaggttttccaatagcctcaccaggggactttgaggcagttacagcaattagtaaaattttaaaaaattctattcctgctggattagctaggcataccaaaaaagatattgacgcatgcaatgagtcattaaaaagcgcaaagagatttagaattcatacttttatttctactagcgcacttcatatgaagcataaattaaacaaatcacccgaagaagtaattgactcaataaaagaacatgtaacatatgctagaaaatttacagatgatgtagagtggtcatgtgaagacggcactagaactgatattgattttatgtgtaaaacagttgaactagctatcaaatgtggagcaaaaacaattaatatccctgatacagtaggttatacagttccatctgaatatactaaaattatttctactctaattaataaagttcccaatatagataaagcaattctatcaactcatactcacaacgatttaggtttagcggtagcaaactcattggcaggtgtctctgctggagctaggcaagttgagtgtactataaacggcataggtgaaagagcaggtaatgctgcacttgaagaaattgtcatggctatgaaaactagacctgacttaatgcctttcaaaactggaattaataccaaactattaagcaaagcctctaaagttgtttctaacgctacaggttttccagttcaatttaataaagcaatcgttggaaagaatgcattcgctcatgagtcgggaatacatcaagatggcatgttaaaaaataggaacacctatgaaattatgacgccagaaagtgtaggggttaaaaaaacatctttagtaatgggaaaacattcaggaagacatgctttcaaagataaattaagtgatcttggctataccggtattacggatgatgttattcaaactgcttttggaaaatttaaaattttagctgacaaaaaaaagcacgtttatgacgaggatatagatgcattggtagatgatagtttaataactgaagataacgaaata

SEQ ID NO: 237305 - DNA, 1390 bp, Unknown
  Bacterial polypeptide expressing nucleotide sequence isolated from the Sargasso Sea
agttttaaaaaactctatacctgcaggtctttcaagacattcaaaaaaagatattgataggtgttatgaagcattaaaacatgctcctagatttagaattcatacttttatatctaccagccctcttcacatgaagcataaattaaacatgactaaagaacaggtatatgaatctgttaaagaacatgttgcttacgcaagaaaatttacagatgatgttgagtggtcttgtgaggatggtaccagaacagatatagattatatgtgtaagacagtagaactagcaattaaatgtggagctaaaacaataaatattcctgatacagttggttatacagtgccatccgagtttactaaaattattcaaactttgttaaataaagtacctaatatcgataaagcgattttatctactcactgccataatgatcttggtttagcagtagcaaattctttagcaggtgttcaggcaggtgctcgacaaatcgagtgtacaataaacggaattggagaaagagctggtaatgctgctttggaagaagtggtaatggcaatgaagacaaggcctgatttaatgccttatgagaccggtattaacacaactcttttaagtaaagcatcaaaaattgtttctaatgcaactggttttcctgttcaatttaacaaagcaatagttggaaaaaatgcttttgcacatgaagcaggaatacatcaagatggaattcttaaaaatagaaatacttacgaaataatgacacctgaaagtgttggagttaaacaaacatctttagtaatgggaaaacattctggcagacatgcatttaaagataaattaaatagtctaggctataaagatgttacagatgatgtaattgaaaatgcttttggtaaatttaaagttttagcagataagaaaaaacatgtttatgatgaggatataattgctttggttgatgatagtttaattgttgataacaaagtaaatgctataaatttaaaatcattaaaagtctttgctgggacaggtgaacctcaaagagcagatatgaccttagatgtttttggagatataaaaaaagcttcagaaataggtgatggtccagtcgatgcaatatttaaatgtattaaaaaactttatcctcatgatgttagtttgcaactttaccaagttcatgctgttaccgaaggaactgatgctcaagcaactgttagtgtaagaatagaagaaaatggaaaaactactgtaggacaagcagctgatacagatactttggttgcatctgctaatgcctatataaatgctttaaataaaatgattattaaaagagataaaactgctccaggtcattcaacagagcaaaaatatgaacaaaaaatgagaggaatataa

SEQ ID NO: 237306 - DNA, 1552 bp, Unknown
  Bacterial polypeptide expressing nucleotide sequence isolated from the Sargasso Sea
atggaaaaaatccagatatttgacacaacccttcgtgacggtgagcaatcaccaggatgttccatgtctgcaggtgaaaaactgcttcttgcccgtcaattggaaaaactaggagtggatacgatcgaagccggttttgctgcatcgtctcccggagattttgagagtgtcaggagcattggtcaggaaatccgtgaatcaatggtggtctctctctgccgaatggtagaaaacgatgtggaccgtggagccgaggcattgaaagacgctcataattggggacttcacacatttatagcttcaagtccgcttcacatgaaacacaagttacagatggaacccgatgaggtgcttaaagcaactacaaaatgtgtggaacgagcaaaaaaatacaccgacaatgttgaattcagtgcggaagatgcaacccgaagtgaaccagaatttttggtacaactgttctcagaagctgtgagagcaggtgctgtcgttttgaatgtccctgataccgtgggatacaccaccccggatgagatgtatgaactgatcaccaggctcatgaatgaagtctaccaggctgatcaagtggtattttcggtccattgtcataatgatcttgggatggcagttgccaattctatggcggctgtgagggcaggggcacgtcaaattgaatgtactatcaatggtattggtgaacgtgcaggtaatgcctcgttggaagaattggtgatggcaatcaatacccggcagcagtactaccagtatgaaactggaatcacaacggagcagatctttccatcaagcaaacttctttcacaaattacgggagtcagtgttcagccgaataaggcgattgttggtgccaatgcctttgcacacgaagctggaatccaccagcacggagtgctgaaaaattccctgacctacgaaatcatgacccctcagtcggtggggatcaaagccagcaacctggtgttgggaaaacattctggtcgtcatgcgctttcggaccggatcaaggaacttggttttgagttgaatgatgttgagttgaatcaggtttttaaggaattcaaaaggctggcagatattaaaaaacagattttcgatgaagatcttgaggctttggttacccatgggatccgaaagcacacggatcgattccaactggaacagttgaatatcacctcaggaacatcggtgattccaactgcgacagtgatcatgaagatcgatggtgaacaggtcaaaaaggcaggctttggtgacggtccggtggatgcagctttaaataccatccgtgacatgaccggtatcgactgcagacttacttcctacgtggtaaaagccatcaccggagggacagatgcacaaggtgaagttagtgtaggagttgatcaggatggaatgcaattgaccggaagaggagcgcacaccgatatcgtagtggcgagtgcgatggcttttatcaatgccctcaaccgtctccaggcacgggccaatgcgatcagtcctcagaccccgatgaaacaggttgcgggtatttgaa

SEQ ID NO: 237307 - DNA, 1033 bp, Unknown
  Bacterial polypeptide expressing nucleotide sequence isolated from the Sargasso Sea
ttgccatccgaatttggatctatttttaaatctgtgaaaaataatgttccaaatattgataaagctattttatcaacccatactcataatgatttgggattagcagtagcaaatagtattgccgcaatacaagaaggtgcacgtcaagttgagtgcaccataaatggattaggtgagagagctggtaatgctgctcttgaagaagtagtcatgacattaaaagtaaaaaaagatttagtaccatttcatacaaatgttaaatctgaatatattactaaagcatcaagacttgtttcatcaattactggatttagtgttcaacctaataaagctatagttggagctaatgcctttgcacatgaagcaggtattcatcaagatggtatgttaaaaaatgctgaaacgtatgaaataatgacccctgagtctgtaggtctaaacaaatcttctttagttttaggtaaacactcaggaaaacatgctttctcagaaaagctaaaagagttaggttatgattttggtgacaatactcttatggaactttttggaagatttaaagatttagcagacaagaaaaaagaaatatttgaagaagatttaatcgctttagcgggggaaagatctttgacatatgatgaacacattaaatttgtatcactagaagttaatgcaggatccttatctaaacataaagctagcttaactctaattatgaataatgataagttatcaaatataagtgaaggcaatggaccggttgatgctacttttaatgctataaaagaaatcactaaaacagattttcgtttaaagctgtatcaagtacatgcaattactgctggcacagatgcgcaaggtgaagtcactgttcgtcttgaagatgatgatttgtcgtcacaggcaaaaggtagcgatcctgatattatagtggcttcagctaaggcatacataagtgctttaaacagattgttatttaaaaaaactaagtctattgtaaaaaaatctgccgaaattaaaatagaaggggtataaa

SEQ ID NO: 237308 - DNA, 1144 bp, Unknown
  Bacterial polypeptide expressing nucleotide sequence isolated from the Sargasso Sea
aatggaagataaaaatagaataataatttttgacactacgatgcgtgatggagaacagtcaccaggtgcatctatgtctcttgaagaaaaaattcaaatttctagagtctttgatgagttaggaattgatgtaatcgaagcaggttttccgattgcttcaccaggtgattttgaggcagtaacagcaattagcaaaattttaaaaaaatcagtcccagctggattagcacgacatacaaaaaaagatatagacgcatgttatgagtcattaagatctgcaaaaagatttaggattcatacatttatttctacaagcgctctacatatgaagcacaaattaaataaaacgcctgaacaagttattgactctattaaagagcatgtaacctacgcaagaaaatttacggatgatgtcgagtggtcctgtgaagatggtacaagaacagatatggattttatgtgtaaaacagttgagcttgctattaagtctggtgctaaaacaattaatattcccgacactgttggttatacagttccatcagaatataaaaaaattattgaaacactaaaaaataaagttcctaatattgataaagctattctttcagtacactgtcataatgatttgggtttagcagttgctaactctttagctggagtgactgcaggtgcaagacaagtagagtgcacaatcaatggaattggcgagagagctggtaatgctgcactagaggaaattgtgatggctatgaaaactagaagtgatttaatgccatacaaaactggtattaacacaaaacttataagcaaagcatcaaaaacagtttcaaatgctactggttttccagtgcaatttaataaagcaattgttggcaaaaacgcttttgcccatgagtcaggaattcaccaagatggaatgcttaaaaatagaaatacttatgagattatgactccagaaagtgtcggtgttaaaaaaacttcattagtaatgggtaaacactctggaagacacgcttttaaagataaactttctgatcttggttatgctggagttacagatgatgttattcaaactgcttttggtaatttaaaatttttggcgataaaaagaaacacgtttatgatgaagatattatcgcattag

SEQ ID NO: 237309 - DNA, 896 bp, Unknown
  Bacterial polypeptide expressing nucleotide sequence isolated from the Sargasso Sea
tatgagcgacaaagaaaaagtttatatttttgacacgacaatgagagacggtgagcaatcacctggggcttcaatgagtgttgaagaaaaaattcaaatttcaagggtatttgacgagatgggaattgatataattgaggcaggatttccaatttcgtctcctggtgattttgaagcagtttcggaaataagtaaaagtgtgaagaattctataccgtgcggtttatcaagagcattaaaaaaagatatagatgcttgtcatgagtcacttaagtttgcaaaaagatttagaattcatacttttatctccactagtccagttcatatgaagcataaacttgatatgactaacgaccaagttttagacgcaatcaaagaaagtgtaacttacgcaagaaagtttactaacgatgtagagtggtcttgtgaagatggaactagaacagatttagattttatgtgtaaaactatcgagctagcaattaaatgtggtgcgactacaattaatatacctgataccgttgggtattcaattcctgaggaatttgcgcgaacaataacacatataaaaaacaacgtaccaaacattgataaagcaattatatcagcgcattgccataatgatttaggtttagcagttgcaaatgctttagcaggattgtcagcaggcgtaagacaaattgaatgtactatcaatggaattggagaaagagcaggtaacgctgctttggaagaaattgtaatggctatcaaaacaagaaatgatttaatgccttatgaaacaggaattaaaacagaacttataagcaaagcttcaaagatagtttcaaacgcaactggatttccagttcaatttaataaagcgatagttggtaaaaatgctttcgcgcatgagt

SEQ ID NO: 237310 - DNA, 859 bp, Unknown
  Bacterial polypeptide expressing nucleotide sequence isolated from the Sargasso Sea
aatgactgaaaaaatatatatttttgatacaactcttcgtgacggagaacagtccccaggagcatcaatgaatttggatgaaaaacttcaaatagctgaagtattagattcaatgaatgtagatataatcgaagctggttttcctattgcatctaacggagattttgaagcagttcaagaagttagcaaatatgtaaagaattctacgattgctggtttagctagagctagtctgaaagatatcgatagagcttgggaagcagttcagcatgccaaatctccaagaatacatacatttattgctaccagcccacttcacatgaaatataaattaaagaaaacagaagatgaggttttagaagctattgagaagacagttacacacgcaagaaatctttgtgataatattgagtggagttgtgaagatggtggaagatcagaactagaatttctatacaaatgtattgagcttgctattaattctggtgcatcaacaattaatattcctgacactgttggttatacattgccggaagaatttggtgcaatttttaagcatgttaaaaataatgtacctaatatagataaagctattctttcaacacatacacacaatgatcttggtttagctacagctaacaatgttgctgcaattaaagagggcgcaagacaagttgaatgtaccattaatggtatgggtgaaagagctggaaattcatcactagaagaaattgtcatgacactcaaagttaaaaaggatcttatgccttatcatactgatattaaaacagagttaattatgaaatcatcaagattagtttcttcaataacaggatttcctgttcaaccaaacaaagca

SEQ ID NO: 237311 - DNA, 778 bp, Unknown
  Bacterial polypeptide expressing nucleotide sequence isolated from the Sargasso Sea
aatggataatccaatagacaaatattcagcttttaagccgattgatttagccaatagaaaatggcctaacaatatcctaaaagaatcgcctgtctggtgctctgttgatttgcgtgatggaaatcaagcattgatagagccgatgggctctgagcgaaaagataggatgtttgcattattatgtaaacttggattcaaagaaatcgaaattggatttccttcagcctctcaaactgactatgattttgtaagagatcttatagaaaataaaaaaataccctcagacgtaaacatacaggtactcacacaatcaagagaagaattaataaaaaaaacctttgaatcattaaaaggagcatctaaagctataattcatttctataattcaacctcaactcttcaaagaaaagttgtttttgatcaagacaaggatgggatcaaagaaattgctactaatgctgcattattgataaaagatttagctgaaaaaaatcaagaaacagaatggagttttgaatactcacctgagagttttactggcactgagcttgaatacgccaaagaggtttgtgatgaggttgtagaaattcttaaacctgtgtcaaaaaataaaatcattatcaatctgcctgcaactgtagagatgtctacgccaaatatttatggcgatcaaattgagtggatgaatgaaaatcttaaaaatagaagtgatatatgtttaagtcttcatcctcataatgatcgtggtactgcagtggctgcatccgaatttggtctt

SEQ ID NO: 237312 - DNA, 1579 bp, Unknown
  Bacterial polypeptide expressing nucleotide sequence isolated from the Sargasso Sea
atggctgagaaagataaagtattcattttcgatacaacgatgagagatggtgagcaatcacctggagcttcaatgagtgttgaggaaaaaattcaaatctcaagagtttttgatgaaatgggtattgatattatagaagcaggttttccaatatcatctcctggtgattttgaggctgtcagtgcaataagcaaaagtgttaaaaattccattccttgtggtctggcaagagcaactaaaaaagatattgatgcttgtcatgagtctttaaaatttgcgaaaagatttaggatacatacttttatttcaacaagcccagttcatatgaagcataaattaaatatgactaacgaacaagttttgggagctattaaagagagtgttacttatgcaaaaaaattcacagatgatgttgaatggtcttgtgaagatggcacaagaacagacttagattttatgtacaagacaatcgagcttgcaattaaatgtggtgctacgacgataaatattccagatacagttggatattcaataccagaagaatttgcaaaaactattaaacttataaaaaataatgtaccaaatattgataaagcaattatctcagctcattgtcataatgatttaggcttagcagttgcaaatgcattgtcaggattgtcagccggagtaagacaaattgaatgcacaattaatggaattggtgaaagagcaggtaatgcagccttagaggaaatagttatggcgattaaaacacgagatgatttgttaccctatgagacaggtataaaaacagagttaattagcaaagcttcaaaaattgtttcaaatgctacaggatttccagtccaatttaataaagcgattgttggaaaaaatgctttcgcacatgagtcaggtatacatcaagatggaatgcttaaaaatagggaaacatatgaaatcatgacaccagaaagtgttggggtaaaaaaaacatcattagttatgggaaaacattctggcagacatgcttttaaagataagttaagtgatttaggctatgccgatgtaactgatgatgttgttcaagcggcatttggaaaatttaaaattttagctgataaaaaaaagcatatctatgatgaagatatagttgctctcgttgatgatagcttgattatcgacaacaaaattaatgcaataaatttaaagtctttaaaagtttttgctggcaccggtgagccacaaagagctgaaatgacattagatgtttttggcgatataaaacatactactcaaacaggagatggtcctgttgatgcaatatttaaatgcattaaggagctttatccgcatgatgtaaaattatctttatatcaagttcatgcagtaacggagggaacagatgcacaggctacagtcagtgttaaaattgaggagaacgacagaaccactgttgggcaatcggctgatacagatactttagtagcatcggctaatgcttatctaaatgcattaaataaaatgttaattaaaagagaaaagaaatctctttataaaaatatagaacctaaaaaagtaaaaggagtgttttaat

SEQ ID NO: 237313 - DNA, 757 bp, Unknown
  Bacterial polypeptide expressing nucleotide sequence isolated from the Sargasso Sea
aatggcaacaggttttcctgttcagtataataaagcaatcgttggaaaaaatgcatttgcacatgaatcaggaattcatcaagatggaatgttaaaaaatagacaaacttatgaaattatgactccagaaagtgttggtgtaaaacaaacatctttagtaatgggcaagcactctggtagacatgctttcaaagataaattgacaagtttaggatatgcagatgttacagatgatgtaatagaaaatgcttttggtaaatttaaagttttagctgataaaaaaaaacatgtttatgatgaagatattatagcattagtggatgatagtttaattgtagataataaagtcaatgcaattaacttaaaatcactaaaagtatttgctggtactggcgaacctcaaagagcagatatgactttagatgtttatggagaaattaaaaaagctactgaaacaggagatggaccagtagacgcaatatttaaatgcataaaacagttatatcctcatgacgtaaatttacagctttaccaagtccatgcagtcacagaaggaactgacgcgcaggcaacagttagtgttcgaattgaggaaaatggcaaaacaactgttggtcaagcagcagacactgatacattagttgcttccgctaatgcatatataaatgcattgaataaaatgattattaaaagagataaaactgcacctggatatactccagagcaaacaaaaagtgaaaaagtgagaggaatttaa

SEQ ID NO: 237314 - DNA, 1573 bp, Unknown
  Bacterial polypeptide expressing nucleotide sequence isolated from the Sargasso Sea
tatgagcgaaaaagataaagtctttatatttgatactacaatgcgtgacggtgaacaatcaccaggtgcatctatgagtttagaagaaaaaattcaaattgctagggtatttgatgaattagggattgatattattgaagcaggttttccaattgcatctccaggagattttgaagcagtatcagaaataagtaaaattttaaaaaattctattccagcaggtttatcaaggcattctaaaaaagatatcgatagatgtcacgaagctttaagacatgcaccaagatttagaattcatacttttatttcgacaagtccattacacatgaaacataaacttaataaatcaccagaagaagtttatgaatcaattaaagaacatgtgacttacgcaagaaaatttactgatgatgttgaatggtcatgcgaagatggaacaagaacagatatggactatatgtgtaagacagttgaacttgcaattaaatgtggagcaaaaactataaatattccagatacagtcggttatactattccatctgagtttactacaattatagaaactttattaaataaagttccaaatatagataaagcaattttgtctacacattgtcataatgatttaggtttagcggttgcaaattctttagctggtgttcaagcaggcgcaagacaaattgaatgtacaataaatggtttaggagaaagagcgggtaatgctgctttagaagaagtggtaatggcaattaaaacaagaccagatttgatgccatatgaaactggaattaatacaactcttttaagtaaagcttcaaaaattgtatcaaatgcaactggttttcctgttcaatataataaagcaattgtaggtaaaaatgcatttgctcatgaagcaggtattcatcaagatggaatgttaaagaataggcagacttatgaaattatgactccagaaagtgttggtgtaaaacaaacatcattagttatgggtaaacattctggaagacacgcattcaaagataaattaaatagtttaggttatcctaatcttacagacgatgtagtaggaaatgcttttgcaaaatttaaagttttagcagataagaaaaaacatgtttatgatgaagatattattgcactaatagacgatagtttgattattgataataaggttaatgcaatcagtttaaaatctttaaaagtttttgcaggaacaggcgaaccacaaagagcagaaatgactttagatgtttatggtgaaataaagcaagcatctgaaactggtgatggccctgttgactccatatttaagtgtataaaaatactttatcctcacaatgtaaatttacaactttatcaagtacatgcagtaactgaaggaacagatgctcaagctacagtaagtgtaaaaattgaagaaaaaggcaaaacaacagttggtcaagcagctgatactgatacattagtggcatcagctaatgcatatattaatgctttaaataaaatgataattaaacgaactaaaactgctccgatggagcaagaaagtcagaaggtgagaggtatataa

SEQ ID NO: 237315 - DNA, 1408 bp, Unknown
  Bacterial polypeptide expressing nucleotide sequence isolated from the Sargasso Sea
tttgaggcagtttctgaaataagtaaaataatgaaaaactcaatcccgtgtggtctttcaagagcattaaaaaaagatattgatgcatgtcatgagtcgttgaaacatgctccaagatttagaattcatacttttatttccacaagtcctttgcacatgaagcacaaacttgaaatgacaaacgagcaagttttagatgcaattaaagagagcgttacttatgcaagaaactttactgatgatgtagaatggtcatgcgaagatggaacaagaacggatatggattttatgtgtaaaacagtcgaactggcaattaattgtggagctaaaacaataaatattccagatactgttggttattctattcctgaagaatttgctaaaacaataaaacacttaaaaaataatgttccaaatatagataaagcaatattatctgcacattgtcacaatgatcttggcttagctgtagcgaatgcattagctggagtttcagaaggtgtaagacaaatagaatgcacaattaatggaataggtgaaagagcaggaaatgctgcattagaagaagtagttatggcaattaaaacaagaaatgatttaatgccatataatactgggatcaaaacagaattgataagcaaagcctctaaaattgtttcaaatgcaactggttttcctgttcaatttaataaagcaatagttggaaaaaacgcttttgctcatgagtctggaattcatcaagatggaatgttaaaaaatagagaaacttatgaaattatgactcctgagagtgtaggtgttaagaaaacttcgcttgttatgggtaaacattcaggacgacatgcttttaaagacaaattatccgatttaggttattcagatcttacagatgatattatccaagctgcttttggaaaatttaaagttttagctgataaaaaaaaacatatttatgatgaggatatagtggctctagttgatgacagtttaattgtagataataaaataaatgcaattaatttaaaatctttaaaagtatttgctggtacaggagaaccacaaaaagctgaaatgacattagatgtttatggtgatattaaaaatacaactgaaacaggagatggaccagttgacgcaatatttaaatgtataaaaaaattatttcctcacgatgtaaaattatctctttatcaagtacatgcagtaacagaaggtacagatgctcaagcaactgttagtgtaaaaattgaagaaaatgacaggactacagtaggtcaatcagccgacacagacactttagttgcatcagcaaacgcatatttaaatgcattgaataaaatgcttataaaacgggagaaaaaagcaccatctcaaaatattaaacatcaaaaagtgaaaggaatatagt

SEQ ID NO: 237316 - DNA, 1162 bp, Unknown
  Bacterial polypeptide expressing nucleotide sequence isolated from the Sargasso Sea
atgaaaaatcaagttaaaatttttgatacaacacttagagatggcgaacaagttccaggatgtaagcttgacactaaaagtaaacttatcctagctgaaaaacttgatttactaggtgttgatataattgaagctggatttccaatttcaagccctggtgattttaaatctgtagttgaaatatcaaaaattataaaaaatgcatctgtttgtgccctgagtagagcaaatgaaaaggatattgatattgctgcagaatcattaaaaagtgcaaagaatccaaggattcatactggaataggcacatctgaagttcatattaaatataagtttaattcaaataaggactctatcatagatacagcaaaaaaatcggtagctcatgcaaggaaatatgtagatgatgttgaattttatgctgaagatgcaggtagaacagaaaatgaatttcttgcaaaagtatgcgaggaagtaattaaatctggtgctactgtattaaatataccagatacaactggctactgccttccaaatgaatatggggataaaattaagtttttaattaataatgttaacggtattgaaaatgttacagtttcatgtcattgtcataatgaccttggtctagctactgcaaactctatacatggtgttctcaatggtgcaaggcagattgaatgcacaatcaatggtattggagagagagcaggaaatacttccttagaggaagtcgtaatgattttaagacaacactctgatttaaatctagatactaacattaattcaaagcttcttaatgaaacaagtcaaaaagtatcagaattaatgggaatgcctgttcaaccaaataaggcaattgtaggatcaaatgcatttgctcatagctctggaattcatcaagatggtgttatcaagaaaagagaaacatatgaaattattgatccacttgatgttggtgtagataaatcttcaatagtattgaccgccaggagtggaagagctgcattagcgtttagaatgaaagaatttggagttaatcttacaaaaaatgaactagatgaagtatatgatgaattcttaacattggcagataaaaagaaagaagtaacagatgttgatttcccaataattcttaaaaataaaaaaattaagtatggctaaa

SEQ ID NO: 237317 - DNA, 886 bp, Unknown
  Bacterial polypeptide expressing nucleotide sequence isolated from the Sargasso Sea
atgtcaaaagatcctggaagaattttgatatttgacacaactcttcgagacggagagcaatctcctggtgcaagtttaaatcttgaagaaaagcttgctatcgcccatcaattagcaagattaggagtagatgttattgaagctggattccctttcgcaagcccaggagattttaaagctgttaataaaattgctaatgtcgtaggtaaagaaaatggcccaataatatgcggtttagcaagggcgtctaaaggagacataaaagcatgttacgaagcagtaagtccagctcccaagaaaagaatacatacttttattgctacaagtgatattcatcttaaacataaactaaaaaaatccagaaaagatgttcttcaaatagttccagaaatggttaattatgcgaaatccttagttgatgatattgagttttcttgtgaagatgcctcaaggagtgatcctgaatttttatacgaagttattcagctagcaattactgcaggagcgacaacaataaatatccctgatactgttggttttacaactcctagtgaatttggcaacctaattgccgatataaataaaaatgttccaaatattgatgaggcagtaatctcggttcatggtcataatgatttgggtttagcagtagccaattttcttgaagcagtaaaaaatggagcaaggcaattagaatgtactattaatggaattggagaaagagccgggaatgcctctctagaagaattagtaatggcacttcatgttaggaaaagtttttttaatagtttttttaaaagaaatccagattccccaactcctcttacagctataagaacagaagaaataacaaaaacctctagacttgtttctaacctaactggaa

SEQ ID NO: 237318 - DNA, 1299 bp, Unknown
  Bacterial polypeptide expressing nucleotide sequence isolated from the Sargasso Sea
aatggaagatatttcaaaaaaatacaaacctttcaagccaattaatttggttgataggtcgtggccaaataatttgctcactgaggctccaagatggtgttcagttgacctcagagatggaaatcaagctctcattgagcctatgagtgttgaaaaaaaaatcagaatgttcgagttgctttgtaatatcggatttaaagaaattgaagttggatttcctgctgcctcacagactgattatgattttgtaagaatccttattaaagaagaaaagatacccgatgatgtgaccattcaggtacttactcaatcaagagatcacatcattaaaaaaacttttgaatctcttgaaggtgtcaaacgagcaatagtacatttttataattcgacatcaactcttcaaagaaaagttgtttttaataaagataagatgggcattaaaaaaatagcaactgatggagcaaccttaataaaagaattgtcatctgcaaatcaacaaacagaatggttatttgagtactctccagaaagctttactgcaacagaattagatttttctttagaagtgtgcaacgaagtcgtagatattctttcgccctactcaaaagagaaaattattatcaatctacctgctacagttgaaatgtcgtctcctaatatttatggagaccaaatagaatggatgattagcaatatacaaaacagagaaaatatttgtatttcattacatcctcataatgatagaggaactgcagttgccgcggctgagattggggtgatggctggtgcggataggattgaaggcacattatttggtaatggtgaaagaactggaaatgttgatttagtaactctaagcttgaatttgctaacacaaggagtaaatcctaaattagattttacaaagattaatcacattgtgagggaagtagagttttgtaaccagttacctgttcatccaagacatccgtatgctggagatcttgtttttactgcattttctggctcacatcaagatgcgataaaaaaaggtttagatgcaataaaaaaatctaacgagcctcattgggaagttccatatttaccaattgatccttcggatctcggaagatcttacgaagcagttgttagaataaactctcagtcaggaaaaggtggagttgcgtatatcctagaaaaggatcatggtgtatctttaccaagacgcctccaaataagcttatcttccaaaattcaagatgttgcagaccagtcaggtaaagaactactatcccatgaaatttggagtatttttgaatc

SEQ ID NO: 237319 - DNA, 1642 bp, Unknown
  Bacterial polypeptide expressing nucleotide sequence isolated from the Sargasso Sea
gatgtcaaaagatactggaagaattttgatatttgatacaactcttcgagatggagagcaatctcctggtgccagtttaaatctcgaagaaaaacttgctatcgcccatcaattagcaagattaggagtagatgttattgaagctggattccctttcgcaagtccaggagattttaaagctgttaataaaattgctaatgctgtagggaaagaaaatggtcctataatatgcggtttagctagagcgtctaaaggagatataaaagcatgtttcgaagcagtaagtccagctcccaagaaaagaatacatacttttattgcaacaagtgatattcatcttaaacataaacttaaaaaatccagaaaagatgttcttcaaatagttccagaaatggttaattatgcaaaatcattagtagatgatattgagttttcttgtgaagatgcctcaaggagtgatcctgaatttttatacgaagtgattcaactggcaatttctgcaggagcgacaacaataaatatccctgatactgttggatttaccactcctagtgaatttggcaaactaattgccgatataaataaaaatgttccaaatattgatgaggcagtaatctcggttcatggtcataatgatttaggtttagcagtagctaattttcttgatgcagtaaaaaatggagcaagacaactggaatgtactattaatggaattggtgaaagagcagggaatgcctctctagaagaattagtaatggcacttcatgtaagaaaaagtttttttaatagttttttcaaaagaaatccagattccccaactcctcttacagctataagaacagaagaaataacaaaaacctctagacttgtttctaacctaactggaatgactgtacaacctaataaagcaattgtgggagctaacgcttttgcacatgagtcaggcattcatcaggatggggttttaaaaaatagactaacttacgaaattatcgatgcaaaaactgttggtttgagtgacaacaaaatatctttagggaaacttagtggtagaagtgcggtaagagcaagattagaagagatgggatatgacttgagccgagaagatttaaatgatgcttttgctcgttttaaggatttagctgacagaaaaagagaaattactgatagagacttagaagcaattgttagtgaacaagttcagctcccagaagctaaatttcaattaagtcttgtacaagtaagttgtggtaacgcctctaaacctactgccaccatttcgcttctaaacacggaagataatagtgaggatactgctgtatcaatagggactggacccgttgatgctgtatgcgaggctttaaataagttagctaaagttcccaatgaattaattgaattttctgttaagtcggtaacagaaggtattgatgctttgggggaagtaacaataagaataagaagggataacaaaatatattctggtcattctgctgatacagacgttgtagttgctgcagcgaatgcttacgttaatgctttaaatagacttgtattttctgagaaaaaaaattcaattcatccacaatttgataatttagaaaatactgataatcaatttctatctaatactgcaaattaa

SEQ ID NO: 237320 - DNA, 979 bp, Unknown
  Bacterial polypeptide expressing nucleotide sequence isolated from the Sargasso Sea
tatagataaagctatcttatcaactcatactcataatgatcttggattagcaactgctaacaatgtagctgctataaaagaaggtgcaagacaagttgaatgtactattaatggtatgggggaaagagctggcaattcatctcttgaagaaatagttatgactttgaaagtgaaaaaggatttgatgccttatcatacagatataaaaactgaatctattatgaaagcttcaagattagtttcttcaattacaggttttccagttcagcctaataaagctattgtaggtgctaatgcctttgctcatgaagcgggaattcatcaagatggtatgcttaaacatgctggaacttatgaaattatgactccagagtccattggtttaaataaatcatcattagttttgggaaaacactcaggaaaacatgcattttctgaaaaattaaaagaacttggatacgaacctggagacaatgcattgatggagttatttggaagatttaaggatttggcagataagaaaaaggaaatttttgaagaagacttaatagctttagctgaagataggtctgcgtcttatgatgaacacattaagtttgtatctttagaggtaaatgcaggttctattgaaagacctgaagcaaacttaaaaattgaaatgaatgataaaattaagtcagcaaaaattaatggcaatggtccagttgatgcaactttcaatgctattaaaaaacttacatcaactgattttaaattaaagttgtatcaagtaaatgcaattacagcaggtactgatgctcaaggagaagttaccgtaagacttgaagatgatgatttgtcttctcaagctaaaggaagcgaccctgatataatagttgcatctgcaaaagcttatattaacgctcttaaccgattaatctttaaaaaatctaaatctattaaagagaattcatctaacttacaaatacaaggggtttaa

SEQ ID NO: 237321 - DNA, 1018 bp, Unknown
  Bacterial polypeptide expressing nucleotide sequence isolated from the Sargasso Sea
aaagttccaaacatagataaagcgattctttcaactcattgccataacgatttaggtttggcagttgctaattctttggcaggtgttcaagcaggagctagacaaattgaatgtactataaatggtctaggagaaagagctggaaatgcagctcttgaagaagttgtgatggccatgaaaacaagacctgatttaatgccatatgaaactggaattgaaactactcttctaagtaaagcatccaagatagtgtcaaatgccacaggttttcctgtacaatataataaagctattgttggaaaaaatgcttttgctcatgaagcaggcattcatcaagatggaatgttaaaaaataggcaaacatatgaaattatgacaccggagagtgtaggcgttaaacaaacatctcttgtgatgggcaaacattcaggaagacacgcatttaaagataaattaactagtttaggatatccagatcttactgatgatgttgtagataatgcatttgcaaaatttaaaatcttagcagataaaaagaaacatgtttatgatgaagatataatcgctttaatagatgatagtttaataacagacaataaagtaagtgcagtcaatttaaaatctttaaaagtatttgctggtacaggagaacctcaaagagcagaaatgacattagatgtttttggtgaagttaaaaaagcatcagaaacaggcgacggaccagttgatgcaatttttaaatgtataaaaaaactttatccacatgaggtgaatttacaactataccaagtgcatgctgttacagagggaacagatgctcaagccacagtaagcgttaaaattgaagaaaatggaaaaacaactgtaggacaagctgcagatactgacactttagttgcatctgcaaatgcttatataaattcacttaataaaatgattataaaaagagacaaaacagctccagggacaaatatagaaaatcaaaattttgagaatcaaaagatgaaaggtatataaa

SEQ ID NO: 237322 - DNA, 566 bp, Unknown
  Bacterial polypeptide expressing nucleotide sequence isolated from the Sargasso Sea
gatgactgacaaaaatagagtatacatatttgacacaacaatgagagatggtgaacaatctcctggagcctcaatgagtcttgaggaaaaattacagatagcaagagtttttgatgatcttggagtagacataatagaggcaggatttccaattgcatcaccaggtgattttgaagcaacaactgaagttagtaaaattctaaaaaaatcaataccagctggtttatcaaggcattctaaaaaagatatcgatagatgttatgaggctttaaaacatgctcctagatttagaatacatacctttatatcaactagccctcttcacatgaagcataaattaaatatgtctgctgatcaggtttatgattcaattaaggaacacgtaacttatgcgagaaactacacagatgatgtggagtggtcttgtgaggatggaacaagaacagatatggattttatgtgtaagactgttgaattagcaattaaaagtggtgcaaaaacaataaatatacctgatactgttgggtatactgtgccatcagaatttacaaaaatttattcaaacc

SEQ ID NO: 237323 - DNA, 1171 bp, Unknown
  Bacterial polypeptide expressing nucleotide sequence isolated from the Sargasso Sea
gccgtggtggaggcgggcgcgacgacgctgaacattccggatacggttgggatttgcttgccggaggagttcggccagctcatcgcgggcatcaaggcgaacgtgaagggtatcgagggtgcggttatttcgacgcactgtcaaaatgatttaggattgtcgacggcgaactctttagcgggcgtcgccaacggcgcgcgccaagtggagtgcaccattaatggtatcggcgagcgcgccggtaacgcgtccttggaagaagttgccatgtctatttacatgcgcggacagtcgcgattgatgggcgcgtacacgggcatcaacccggtgcacatttaccccatctctcagatggtgaagacgtacagcggcatggcgatccagccgcacaaggccatcgtcggtgccaacgccttcgcgcacgaatccggcattcaccaagacggcatgttgaagaacaagctcacgtatgagatcatcgctccggaacagattggttacttccgcggtgaggatgattgcggtgtggtcatgggtaagcactctggtcgtcacgcgttgtcgtccaagttgaaccaactgggcattccgttggagggcgcgcagctcgacgacgttttcaaccgcttcaaattggtggctgaaaccaagctcggtggcgtgaatgatgacgagcttttggcgatcgttcgtgatggtgagtccgtgcaagatccggcgtggtctttggagactgttcaagtcgtgtgcggaaccaccggtttgccgacggcgacggtgcgaatgcaatccgccgacggcacgacgcacgtctccgccgtcgtcggcacgggcccggtcgacgccgccttcaaggccatcgacgcggtggttggcttggacgtggtcttgaccgagtacagagtcacggcggtcaccaagggcatcaactccttggctgagaccaccatcaacatcaaaccgagagagggtgcggaacaaaagctcggctcggatgtcttcaagaccaacttgcaaaccggtgaaaccgccgtccgctcgttcaccgcgaccggcgcggacaccgatatcgtggtctcctccgctcgtgcttacgtcatcgctttgaaccgaatcgtcgagtacgtcaccaagtcgtacatccacgaagaagccgtcgtctctcgatgag

SEQ ID NO: 237324 - DNA, 813 bp, Unknown
  Bacterial polypeptide expressing nucleotide sequence isolated from the Sargasso Sea
catggccaaggaccccggtcgtgtcttgattttcgacaccaccctgcgggatggtgagcagtctcccggggccagcctcaacctggaggaaaagctggccatcgctcagcagcttgcccgtcttggcgtggatgtcattgaggccggattcccctttgccagtgcaggggacttcgcggctgtgcagcggattgcccagcaggtcgggggcgagaacggtcccatcatctgtgggctggcccgtgcatcgcagaaggacatcaaggcttgcgcagaggccgtcgcaccggcaccgcgtcgccggatccacaccttcatcgccaccagcgacatccatctcgagcataaattgcgtaaaagccgcagtgaggttcttgagatcgttcccgagatggtcagctatgcccgctccctggtggacgacattgaattttcctgtgaagacgccggccgcagcgacccggagttcctctacgaggtgatcgaggcggccattgccgctggagctaccacgatcaacattccagacaccgttgggtacaccactccaagcgaatttggcgatctgattgctggcatcaatcgtcatgtccccaacattggagaagcggttctctccgtacatggccacaacgatctgggcctggctgtggcgaacttcctggaggcggtcaagaacggcgcccgtcagctggagtgcaccatcaacggcatcggcgagcgggcgggcaatgcctctctcgaggaattggtgatggctttgcacgtgcgccgtcgttacttcaatccgtttttcgaccgtgatcaggacag

SEQ ID NO: 237325 - DNA, 1133 bp, Unknown
  Bacterial polypeptide expressing nucleotide sequence isolated from the Sargasso Sea
aacaataaatatccctgatactgttgggtttacaactcctagtgaatttggcaacctaattgccgatataaataaaaatgttccaaatattgatgaggcagtaatctcggttcatggtcataatgatttgggtttagcagtagccaattttcttgaggcagtaaaaaatggagcaagacaattagaatgtactattaatggaattggagaaagagccgggaatgcctctctagaagaattagtaatggcacttcatgttaggaaaagtttttttaatagttttttcaaaagaaatccagattccccaactcctcttacggctataagaacagaagaaataacaaaaacctctagacttgtttctaacctaactggaatgactgtacaacctaataaagcaattgtgggagctaacgcttttgctcatgagtcaggcattcatcaggatggggttttaaaaaatagactaacttacgaaattatcgatgcaaaaactgttggtttgagtgacaacaaaatatctttagggaaactgagtggaagaagtgcggtaagagcaagattagaagaaatgggatatgacttaagccgagaagatctaaatgatgcttttgctcgttttaaggatttagctgacaggaaaagagaaattactgatagagacttagaagcaattgttagtgaacaagttcagctaccagaagctaaatttcaattaagtcttgtacaagtaagttgtggtaacgcctctaaacctactgcaaccatttcacttctaaacacagaagataatagtgaggatactgctgtatcaatagggactgggccagttgatgctgtatgcgaggctttaaataaattagctaaagttcctaatgaattaattgaattttctgttaagtcggtaacagaagggattgatgctttgggcgaagtaacaattagaataagaagggataataaaatatattctgggcattctgctgacactgacgttgtagttgctgcagccaatgcttacgttaatgctttaaatagacttgtattttctgagaaaaaaaattcaattcatccacaatttgatagtttagagaattctgatagtaaatttctatctaatactacaaattaaa

SEQ ID NO: 237326 - DNA, 1321 bp, Unknown
  Bacterial polypeptide expressing nucleotide sequence isolated from the Sargasso Sea
tgaggcagtctctgaaataagtaaaataatgaaaaactcaattccatgtggtctttcaagagcattaaaaaaggatattgatgcatgtcatgagtcattgaaacatgcaccaagatttagaatccatacttttatttctacaagtccattgcatatgaaacacaaacttgaaatgacaaacgagcaggttctagatgcaattaaagaaagtgttacttatgcaagaaactttactgatgatgtcgagtggtcatgcgaagatggaactagaactgatatggattttatgtgtaaaacagttgaacttgcaattaactgtggagccaaaactataaatattccagatacagttggatattctattccagaagaatttgcaaaaacaatcaaacatttaaagaataatgttccaaatatagacaaagcaatattatctgcacactgtcacaatgatcttggcttagcagtagcaaatgcattggctggagtctcagaaggtgtaagacaaatagagtgtacaattaatggaataggtgaaagagcaggtaatgctgcattagaagaagtagttatggcaattaaaactagaaatgatttgatgccttataatacaggcattaaaacggaattaataagtaaagcctctaaaatagtttcaaacgcaactggtttcccagttcaatttaataaagcaatagttggaaaaaacgcttttgcacatgagtcgggaattcatcaggatggaatgctaaaaaatagagaaacctatgaaattatgactccagaaagtgttggagtaaagaaaacatctttagtaatgggtaaacattcaggacgacatgcttttaaagataaattatctgatttaggctattcagatcttacagacgatattatccaagctgcatttggaaaatttaaagttttagctgataaaaaaaagcatatatatgacgaggatatagttgcgctagttgacgatagcctaattgtagataataaaataaatgcaattaatttaaaatctttaaaagtttttgctggcacaggagaaccacaaaaagccgaaatgacattagatgtatatggcgatattaagaatactacagaagcaggggatggaccggttgatgcaatatttaaatgtataaaaaaattatttcctcacgatgtaaaattatctctttatcaagtacacgcagtaacagaaggtacagatgctcaagcgactgttagtgtaaaaattgaggaaaatgataggactacggttggtcaatcagctgacacagatactttagttgcatcagctaacgcatattta

SEQ ID NO: 237327 - DNA, 1561 bp, Unknown
  Bacterial polypeptide expressing nucleotide sequence isolated from the Sargasso Sea
atgacagataaaaacagaattataatttttgacacaacgatgcgagatggcgaacagtctccaggtgcatcaatgagtttagaggaaaaattacaaatctccagagtttttgatgagcttggagttgatatcatagaggctggttttccaatcgcttcacctggtgactttgaagcagtaactgaaataagtaaaaccctaaagcgatcaataccggcaggattagctagagctactaaaaaagatattgatgcatgtcatcaagctttaaagcatgcaaaaaattttagaattcacacttttatttctacaagtccgcttcatatgaagcataaattgaataaatcaccagaagaagttttagaatctataaaagaaagtgttacatacgctagaaaatttactgacgatgttgagtggtcttgtgaagatggaacacgaacagacatggattacatgtgcaagacagttgaaatcgcaataaaatcaggagcaaaaacaattaatattccagatactgtgggttataccgtaccttcggagtttaaaaagattattgaaactttaataaataaagttccaaatattgataaagcaattctttctacacattgtcacaatgatttgggacttgcggtagccaattcattagcgggagtgatggctggagctagacaaattgaatgtacaattaatggtataggagaaagagctggaaatgcagcattggaagaagttgtcatggccatgagaacaagacatgacttgatgccttacactacaaatattaatacaaaacttttaagcaaagcatctaaagtggtttcaaatgctacaggatttcctgtgcaatttaataaagcaattgttggcaaaaacgcttttgcacacgagtcaggtatccaccaagatggaatgttaaaaaatagaaacacttatgaaattatgacacccgaaagtgttggagttaaaaaaacttcattagtaatgggcaaacactcaggccgtcacgcttttagagataaattatcagatatgggttatgtggatgtaactgatgatattataaacacagcatttgggaaattcaaaatattagcagacaagaaaaaacatatatacgatgaagacattgcggcattagtagatgacagtttagtaaccgaggataacgtaataaaattaaaatctctgaaagtttatgcaggaactggtgaaccacaaaaagctgaaatgacattagaagtttttggagaggttaaaacagcgtctgaaacaggagatggaccagtggatgctattttcaaatgtataaaaaaactttatgcccatgatgttaagcttttattatataatgtacacgctgtcacagagggcactgacgcccaagctactgtaagtgtaagaattgaggagaaaggtaaaactactgtagggcaggctgctgatactgacacactagtagcttctgcaaatgcatatttaaatgcattaaataaactaattattaaaagaaaaaagacagcaccagatgatgaaaatctaagcgtgcaaatataga

SEQ ID NO: 237328 - DNA, 1294 bp, Unknown
  Bacterial polypeptide expressing nucleotide sequence isolated from the Sargasso Sea
gattattcatttttacaattcaacttctacacttcaaagaaaagttgtttttaatcaaaataaggatggtgttaaaaaaatagcaactgatgccgctgagttaattaaaaaattggcgcttgaaaattctgacactgaatggacatttgaatattctcctgaaagttttacaggaacagaattagattatgcaagagaagtttgtgatgacgttgtagaaattctaaagcctgtctcaaaaaacaaaattattataaatcttcctgctactgtagaaatgtcaactccaaatatttatggtgatcaaattgaatggatgaacaaaaatttaaaaaatagaaatgacatatgcctgagcctgcatcctcacaatgatagaggcacagctgttgcagcttctgagtttggaatcatggctggtgctgatagagttgaaggaacattatttggaaatggagaaagaactggcaatgttgatatagtaacaattgctttaaatatgctcactcaaggcgttgaaccaaatttagatttttctaatatcaattctgtaatgagagaggtggagtactgcaatcaactgccagttcatccaagacatccttatgcaggagatcttgtttttacagccttttcaggctctcaccaagatgcaattaaaaaaggttttcaagctattaaaaaatctaatgatccaaagtgggaagtgccctatcttccaatcgatccagctgatctaggtagaaattatgaagcagtagtaagaattaattctcagtctggtaaaggaggagttgcatttttattagaaaaagatcatggggtctctttgccaagaagacttcagattagcctaagtcaaagaattcaaaagttagcagatgatactggtaaagagattagtagctcacaaatatgggatatttttgaaaaaaaataccttcaacctgttaataattactcgtacataaaacactcatcatcatctaaagacgatcttcataaattagaactgacaatgaatatgaataatgaggaaacaacaatacagggctcaggaaatggtccaattgactcatttgtgaatggtctttcagaaaaaattggagttgaaataaaagttgctgattatcatcaaacagctatctcctctgggtctgatgcaaaagcagcagcatatatagaacttgagaaggatggaaaaacattttggggagttggaatacatccaaacactactagagcatcatttgatgcaattattgttggacttagtaagttattagaaagctaa

SEQ ID NO: 237329 - DNA, 943 bp, Unknown
  Bacterial polypeptide expressing nucleotide sequence isolated from the Sargasso Sea
ttgcaattctttagctggtgttcaggctggtgctagacaagttgaatgtactataaatggtttaggtgaacgagctggtaatgcagcattagaagaaattgtaatggcaatcaagacaagaccagaccttatgccttatcagacaggtattaatacaacattattaagcaaagcatcaaaaattgtttcaaatgcaacaggatttcctgttcagtacaataaagcaattgttggaaaaaatgcttttgcacatgaagcaggtattcatcaagatggaatgttaaaaaatagacaaacttatgaaattatgactccagaaagcgttggggtaaaacaaacttctttagttatgggtaaacactcaggaagacatgcgtttaaagataaattaaatagtcttggatatcctgatttaacagatgatgttgttagtaacgcatttgcaaaatttaaagttttagcggataaaaaaaaacatgtttacgatgaagatataattgcattagtagatgatagtttaattgttgataataaagttaatgctataaatttaaaatcattaaaagtttttgctggaacaggtgagccacaaagagctgaaatgactttagatgtttatggtgaaataaaaaaggcatctgaaacaggagatggtccagttgatgcaatatttaaatgtataaaaacactttatccccatgacgtgaatttacaactttatcaagtacatgcggttacagaaggaactgatgctcaagctacagtaagtgtaaaaatagaagaaaatggtaaaacaacagtaggacaggctgcagatacagatactttagtagcttctgcaaatgcatatattaactcattaaataaaatgattataaaaagagaaaaaacagcaccagaacaacaacatatttatgaaacacaaaaaatgaaaggtatataa

SEQ ID NO: 237330 - DNA, 913 bp, Unknown
  Bacterial polypeptide expressing nucleotide sequence isolated from the Sargasso Sea
aatgagctctaaagaaaaagtatttatttttgacacaacaatgcgagatggtgagcaatcacctggagcatcgatgagtgttgaagaaaagattcaaatctcaagagtatttgatgagatgggagtcgatattattgaggcaggttttccaatttcatctccaggagattttgaggctgttagtgcaataagcaaaagtcttaaaaattctataccctgtggactatctagagctatgaaaaaagatatagatgcatgttatgaatcattaaaatatgcacctagattcagaattcatacatttatttcaacgagtcctgtacacatgaaacataaattagatatgaccaatgatcaggttttagatgcaattaaagaaagcgtaacctatgcaagaaaatttacagatgatgttgaatggtcttgtgaagatggaactagaacagatttagatttcatgtgtaaatctgttgaattagcaattaattgtggagcaaaaacaattaatattccagatacggttggttattcgatacctgaagaatttgctaaaactattactcacttaaaaaacaaagtcccaaatatagataaggctatactctctgctcattgtcataatgatttaggtttagcagtcgcaaacgcattagctggattatccgcaggtgttagacaaattgaatgtacaataaatggtattggtgagagagcaggaaatgctgctttggaagaaatagttatggctttaaaaactagaaatgatttaatgccatatgaaacaggaattaaaactgaactaattagtaaagcatcaaaaatagtttctaatgcaacaggtttccccgttcaattcaataaagcgatagtaggaaaaaatgcatttgcacatgagtcaggtattcatcaagat

SEQ ID NO: 237331 - DNA, 1173 bp, Unknown
  Bacterial polypeptide expressing nucleotide sequence isolated from the Sargasso Sea
caaaggctattattctagccaagaaatttacagatgatgttgaattttctccagaagatgcaggtagatctgaattcgatttcctttgtgaggttatagaggctgctatagattcgggtgctagaactatcaatatacctgatacggttgggtataatatgccccatcaatttgggttattaataaattcattaataaaaaaagttagtaactcagataaagctatattttctgtgcattgtcacaatgaccttggtttagctgtagcgaattctctttctgcagtgttaaatggtgcaagacagattgaatgcacaataaatggccttggagagcgggctggtaatgctgcacttgaagaaattgtgatgacagttaaaactagacgagatatcttcgattgtaatacaaatatagactcaacaaagattatgaaagcatctagattagtatcaggaattacgggatttccagtacagcctaataaagctattgtaggtaaaaatgcttttgcgcatgagtctggcattcatcaagatggagtcattaaatctagagagacttatgaaataatgagagcagaagatattgggcttgttagcaataagcttgttctaggaaaacactctggcagaaatgcatttaagcaaaaagttattgatttaaatatatatccaaagaacactcaggaatttgatgagttattctacagatttaagaatttagccgataagaagcatgaaatttttgatgaggacattatacaattagcaactaatattgagtttaaagctcataatatttctttcaaatacatgagtgttatttctgaaactggaaaaaaaccatctgctaacatcactttagaaataaacggtgaacaaaaaagcgcaaaatcttcaggagatggagctgttgatgctgcttataatgcaattgagaaaattgtaaatagcaagaccgaattacaattatattctgttaataatattacatctggtacagatgctcagggcgaagttacagtaagaattaaaaaagataatagtatttataatggtcatggcgctgatacggacattgtcaaagcatcagttttagcgctcattaatgcactaaataaatatattcaaaatcctaatcttgatatttcaaaaaaaagaggagtttgaa

SEQ ID NO: 237332 - DNA, 613 bp, Unknown
  Bacterial polypeptide expressing nucleotide sequence isolated from the Sargasso Sea
tctgagcgacaaccgaatttcattgggcaagctcagtggtcgcagcgcggtgagggcaagactcgaggagctcgggtatgacctgacccgggaggacctggatgaggcctttgcccgtttcaaggatctggctgatcgcaagcgggagatcaccgatcgggatcttgaggcgattgtcagcgaacaggttcagcagcccgaggcgcgctatcagcttcagctggtgcaggtgagttgtggaacgcgtctgaagccaacggccaccgtcaccctggcggaggagaacggtcaggaacaaaccgtttctgcagtgggtacagggccggtggacgcggtgtgccgtgccctcaatcaactggctggcgtccccaacgagctcatggagttctcggtgaaatcggtgacggagggaattgatgccataggggaagtcacgattcggcttcgccgcaatggctctctgtactcaggccatgctgccgacacggacgttgtggtcgccgccgccatggccttcatcaatgctctcaatcgtctcgtggcagcccaggagcatcagcccttgcatccccagcgggatgccgttgatcttgaaacgcgtccgaccctctga

SEQ ID NO: 237333 - DNA, 1302 bp, Unknown
  Bacterial polypeptide expressing nucleotide sequence isolated from the Sargasso Sea
ttagaattcatacttttatttcaactagcccacttcatatgaagcataaattgaataaaactcctgaacaagtttacgagtcaattaaagaacatgtaacttacgcaagaaaacttactgatgatgtagaatggtcttgtgaagatggcacgagaactgatatggattatatgtgcaagactgttgaacttgcaattaagtgtggagctaaaacaataaatattcctgatacagttggatatactgttccatcagagtttactcaaattataaaaaatttattaaacaaagttccaaacattgataaagctatactttccactcattgtcataatgatttaggtttagcagtagcaaattctcttgctggagtacaagctggagcaagacaaatagaatgtacaattaatggtattggagagagagcaggaaatgctgcgctagaagaagttgttatggcaatgaaaactagaccagatcttatgccttacgaaacaggaataaatactaaacttttaagcaaagcatcaaaaatagtatcaaatgcaacaggttttcctgttcaatataataaagcaattgttggaaaaaatgcatttgcacatgaagcgggaattcaccaagatggtatgcttaaaaatagacagacctatgaaattatgacccctgaaagtgtaggagttaaacaaacatcattagtaatgggcaaacactctggaagacatgcatttaaagataaattaactagcttaggttatgttgatgtaactgatgatattgttgagaacgcatttggtaaatttaaagtcttagctgataagaaaaaacatgtttacgatgaagatatcatagcattagttgatgatagtttaataattgataataaagtaaatgctatttctttaaaatcattaaaagtatttgctggaactggtgaaccacaaagagcagatatgacattagatgtttatggtgaagtaaaaaaagcttctgaaactggcgatggaccagtagatgcaatatttaaatgtattaaaactttataccctcataatgtaaatctgcaattataccaagttcatgcagttactgaaggaactgatgctcaagcaacagtaagtgtgaggatagaagaaaaagaaaaaactactgtaggccaagcagcagataccgatacactagttgcttctgcaaacgcttacattaatgctttaaataaaatgattattaaaagagataaaacagctccagataacccgcaagtaactggagaatacgatagaaaggttagaggaatataaa

SEQ ID NO: 237334 - DNA, 1396 bp, Unknown
  Bacterial polypeptide expressing nucleotide sequence isolated from the Sargasso Sea
aattttaaagaaatcaatacctgcaggtttagcaagacattcaaaaaaagatattgatagatgttatgaggctcttaaacacgctccaagatttagaattcatacgtttatttcaacaagtccattacatatgaagcataaacttaataagtcaccggatgaagtttatgaggcaattaaagaaaatgttacttatgcaagaaatttcactgatgatgtagaatggtcatgtgaggatgggacaagaaccgatatggactatatgtgtaagacagttgaacttgcaataaaatgtggtgctaaaacaataaatattccagatacagttggatacactataccatctgaatttacaaagattatcgaaactttattaaacaaagtaccaaacatagataaagcaatcctgtcaacacattgtcataatgacttaggattggcagttgctaattctctagctggtgttcaagcaggagcaagacaaattgaatgtactattaatggattaggagaaagagcaggtaatgcagctcttgaagaagttgttatggcaatgaaaacaagaccagacttaatgccttttgaaacaggaattgaaactactcttttaagtaaagcttctaaaattgtatcaaatgctacaggatttcctgtccaatataataaggctattgtaggaaaaaatgcttttgctcacgaagcaggtatacaccaagacggaatgttaaaaaatagacaaacttatgaaattatgactcctgaaagtgttggcgttaaacagacatcattagtaatgggaaaacattcaggaagacatgcgtttaaggataaactaactagtttaggatatccagatttaactgatgatattgttgataatgcgtttgcaaaatttaaaattttagcagataaaaagaaacatgtttatgatgaagatataattgctctgatagatgatagccttatagttgataacaaagttagcgctataaatctaaaatctttaaaagtatttgcaggaacaggagaaccacagagagcagagatgactttagatgtttttggagaaattaaaaaagcctcagaaactggggatggtccagttgatgcaatttttaaatgtataaaaaaactttatcctcacgatgtaaatttacaactttatcaagtacatgctgtaactgagggaacagatgcacaggcaacagtaagtgtaaaaattgaggaaaacggcaaaaccacagttgggcaagcagcagatacagacactttagttgcatcagcaaatgcttatattaattctctaaataagatgattattaaaagagataaaactgcaccaggcgaaagcttagaaaatcaaaactacgaaaatcaaaaaatgagaggtatataa

SEQ ID NO: 237335 - DNA, 653 bp, Unknown
  Bacterial polypeptide expressing nucleotide sequence isolated from the Sargasso Sea
tatggcgcgcgacccgggccgggtgttgatcttcgacaccaccctcagggatggggaacagtcgcctggggccagcctcaacctggatgaaaagctggccattgctcagcaattggctcgtctgcgcgtcgacatcattgaggcgggctttccttttgccagccccggtgatttcaatgcggtgcaaaccattgcccgtcaagttggtcgccctgatggccctgtgatctgtgggctggctagggcaacccgtggcgatatcaaagcctgtgcggatgcggtggcaccagctgctcgccagcgcatccacacctttttggccaccagcgacattcatctggagcacaagctgcgcaagagccgagctgaggtgctgcagatcgttccggagatggtggcctatgcacgctcattggtggaggacattgagttctcctgtgaagacgctggccgcagtgatccggagttcatgtacgaggtcatcgaggcagccatcgctgcgggtgccaccactgtcaacattcccgacacggtcggctacgccacgccagctgaatttggcgcgttaattgccggcattgatgcccacgtgccgaacatcaaccaagcggtgatctccgttcatggccacaacgacttaagggctggctgtg

SEQ ID NO: 237336 - DNA, 1264 bp, Unknown
  Bacterial polypeptide expressing nucleotide sequence isolated from the Sargasso Sea
atgagcggtcaggataaaatctggatttttgatactaccttaagagacggcgaacaggcgttgcgtgccagtttaagccataagcaaaaaattcagctggctcatgctattgcccgcttaaatgtagatgtgatggaagtgggttttcctgtgtcatcgccaggtgactttgaatcagtacaaagcatagcaacacaagtcaaaggccctattatttgtggtttagcccgggctgtcagcgctgacattgaagcttgtggccaggcgctggcgaatgctgaacgtcgccgtattcacacttttatcgctacctcgcctttacatttacaatacaaattacgtcgtactctagaacaagccactgaacaggcggttgccgctattcagctggcgcgccgttataccgatgatgtcgagttctcctgtgaagatgccggccgcacccctattgatgatttatgccgtattgtcgaggccgctataaaagccggcgcccgcactattaatattccggacactgtcggctacaccattccgaatgaatttgcccgcatcatcaccgacctgcgtcacaaggtaccaaatattgatcaggccattttaagtgtgcactgccataacgatttgggattggctgtggccaatagtatcagcgcagttcaggccggtgcccgtcagatcgaatgcacagtcaacggtattggcgaacgtgctggtaactgttcgttagaggaagtggcgatgattatcaaaacccgccccgacgttctgccgttttataccgacattaagagcacagaaatttaccgatccagtcatttagttagccaaatttgccatatgccaattcagcccaataaagctattgtcggcgagaacgcttttgcgcattcttcaggtatacatcaggatggcgtgttaaaagcacaaaacacctacgaaattatgtcgccagaacaagtaggcatccgtcagaacgaattaaacctgacgtcacgttctggccgcgcagtgatccagcatcgcttaagcgagatgggttacacccaggaagattacaacctggatgacatttataaagcctttgtgaccttggccgaccagaagggccgggtttttgattacgatttagaagcactggtgtttttccagaatttgcaggataccaacgagccgtacaagctggagtttttaagttcctccactcataccggtcatgttgccagcgccactgtgggcatcagcattaatggtgaaacccgta

SEQ ID NO: 237337 - DNA, 1025 bp, Unknown
  Bacterial polypeptide expressing nucleotide sequence isolated from the Sargasso Sea
catgagctttgatcatcgcaaataccagccttttcctgtcatcgacaaacccgaccgtcgctggcccagccagcgtatcgagaaagccccgctgtgggcggcggtggacctgcgtgatggcaaccaggcgctgatcaagcccatgtccgtggcccagaaacgccgcttcttccagatgctggtggagctgggcttcaaggaaatcgaggtgggcttcccgtctgccagccagattgactatgacttctgccgggccctgatcgaggaagacctggtgccggatgacgtgcacatccaggtgctcacccaggcccgggaagacttgatcgcccgtacctttgaatccctcaagggtgccaggaacgccattgtgcatatctacaatgccacctcgcccaccttccgcgagcaggtgttcaacgtggacaaggccggctgcaaggccatcgcggtgcgcgctgccgaatgggtacgtgattgtgccgcgcagcagccggaaacccactggagcttccagtattccccggaaaccttcagcgccacggaaaccgattttgccattgaggtgatcgatgcggtgaatgcggtatggcgcccggatcaggggcagcgggtgatcatcaacctgccggccaccgtggaagtgagcacgcccaatgtgtttgccgaccaggtggagctggtgcatgacaacattcatcaccgcgagcatgtgatcatcagcgtgcacacccatgatgatcgtggctgtggcgtggcggcggcggaactggcagtgatggccggcgccgaccgggtggaaggcaccctgctcggcaatggcgagcgcaccggcaacatggatctggtcaccgccggcatgaacctgtacagccagggcatcgacccggaaatcgacttctcgcgcatgaaagacatcgtcgcgctggtggaagagatcaccgacatccagacccacccgcgtcacccctatgccggtgacctggtgttcagcgctttttccggcagccaccaggatgccatcc

SEQ ID NO: 237338 - DNA, 607 bp, Unknown
  Bacterial polypeptide expressing nucleotide sequence isolated from the Sargasso Sea
gatgaataaagaaaataattacataaagatttttgacactacattaagagatggtgagcagtctcctggcgcttcaatgaacattgaagaaaaattaaaaattgcagaagccttagaagatttgaaagttgatattattgaagcaggatttcctgccgcatcaaagggagactatgaagcagtttctgaaatatcaaaaaagattaaaaattcatcaatatgcgctttgagtagagcttcaaaaaatgacattcagacagctgcggatgctcttaaaaatgcaacagctccaagaatacatacatttatttcaacaagcgaacttcacatgaaacacaaattacagttgaattccgatgaggtttaccagaaggtaattgatagtgtatcttttgcgcggaatttatgtgatgacgttgagtggtcttgtgaagatggaactaggacagatttagactttatgtgtaaaactgttgaagcggcgattaagaacggcgcgtctacaataaatattccagatactgttggatactcaattcctgatgaatttacaaacattattaatcatttgatgaataacgttactaatattgataaggttacaatt

SEQ ID NO: 237339 - DNA, 1410 bp, Unknown
  Bacterial polypeptide expressing nucleotide sequence isolated from the Sargasso Sea
attttgaggctgtaacagcaattagtaaaatagttaaaaactctgttccatgtggtttatctagagctttaaaaaaagatatagatgcttgtcacgaatcccttcaatacgccaaaagatttagaattcatacgttcatctctacaagcccagttcatatgaaacataaattagacatgtcaaaagatcaggtgcttgaagctataaaagagagtgtctcttatgctagaaaatttactgatgatgtagaatggtcatgtgaagatggaactagaacagatttagatttcatgtgcaaaacaattgagcttgcaattaattgtggtgcctcaacaattaatattccagatacagtaggttattccatccctgaggagtttgcaaaaaccattacacatattaagaattcagtaccaaatatagataaagcaattatctcagcacattgtcataatgatttaggtttagctgttgctaatgcattggcaggtttatctgcaggcgttagacaaattgaatgtacaataaatggtattggtgaaagagcaggtaatgcagcattagaagaaattgtaatggcaattaaaactagaaatgatttaatgccatacgaaacaggaataaaaactgagctaataagtaaagcatcaaaaattgtctctaacgcaacaggtttcccagtacaatttaataaagcaattgttggaaaaaatgcttttgcacatgaatcgggaattcatcaggacggaatgttaaagaacagagaaacttatgaaattatgacaccagaaagtgttggagttaaaaaaacatctttagtaatgggaaaacattcaggaagacatgcgttcaaagataaattaagtgatctaggctatgcagatgtaacagatgatgtaattcaaaatgcttttggaaaatttaagatattggctgataagaagaaacatatttatgatgaagatattgttgctttagttgatgatagcctaatattcgacaataaattaaatgcaatcaatttaaaatctttaaaagtttttgctggaactggggaaccacaaagagcagaaatgacattagatgtatttggcgaaattaaaagtacagtacaaactggtgatggaccagttgatgcaacattcaaatgtataaaagagctttatccacatgagatgaagcttttattatatcaagtgcatgcagtaacagaaggaactgatgcgcaagcaacagtcagtgtaaaaattgaggaaaataatagaacaacagttggtcaatctgctgataccgatactttagttgcatctgcaaatgcttatctaggtgcattaaataaaatgctaataaaaagagagaaaaaagcaccttctcaacaaattaaacatcaaaaagtaaggggaatataaa

SEQ ID NO: 237340 - DNA, 952 bp, Unknown
  Bacterial polypeptide expressing nucleotide sequence isolated from the Sargasso Sea
ttaggtttagcagttgcaaactcccttgcaggtgttcaagcaggagctagacaaattgagtgtacaattaatggattaggtgaaagagctggtaatgctgctttagaggaagtggtgatggcaattaaaacaaggccagatttgatgccttatgatacaggaattaacacaactcttttaagtaaagcatctaaaattgtttcaaatgcaacaggttttccagttcaatacaacaaagcaattgttgggaaaaatgcatttgcgcacgaagcaggaattcatcaagatggaatgttaaagaacagacaaacttatgaaattatgacacccgaaagtgttggggttaaacaaacatcacttgtgatgggaaaacattcagggcgtcatgcatttaaagataaattaaactcattgggttacccagatttaaccgatgatgttgtaagtaatgcgtttgcaaaatttaaagttttagctgataagaaaaagcatgtttatgatgaagacattattgcactgatagatgatagtttgattattgataataaagtaaatgctataaacctaaaatcattaaaagtatttgctgggactggtgagcctcaaaaagcagagatgactttagatgtatttggagatgttaaaaaaacttcagaaactggagacggtccggtagatgcaatatttaaatgcattaagaaactttatcctcatgatgttaatttacaactttaccaagttcatgcagttacagagggaacagatgctcaagcaactgttagtgtgaaaattgaagaaaatggtaagacaactgttggtcaagcagcagatactgacaccttagttgcatctgccaatgcatacattaattcattaaacaaaatgattattaaaagagataaaactgctcctgaagagcaatttgaaaataaacaaatgaaaggaatataat

SEQ ID NO: 237341 - DNA, 1662 bp, Unknown
  Bacterial polypeptide expressing nucleotide sequence isolated from the Sargasso Sea
aatgtctgaatttgatccaaaacacaaatatactccttttcaaagaattaatttaaaggacagaaagtggccaaaccaaattattaataatgcaccaacttggtgtagcgttgatttgcgagatggaaatcagtcattaattgagccaatggatactccaaaaaaattaaagctttttaaaactttagtatctatgggctttaaggaaatagagattggttttcctgctgcatcagaaactgattataacttttgtcgacatttaattgaaaataaactgatccctaatgacgttacaattcaagttttaactcaagctagagagcaccttatagataatacttttgaggccttgacaggttgcaattcagctattgttcacctctataactcagtttcaacgcttcaacgtagggtagtatttaaacaagacagaataggcgtaaaaaatatagcgttagatggtgcaaaatatattttaaataaactggataaatttaatgaaggtgtaataaagttgcaatattcacctgagagttttactggaactgagctcgattatgctttagaagtttgtgaggaagtattagattgctggaaggcaaatcaaaacaatccagttattattaaccttcctgccactgttgaaatgtcgacaccaaatatttatgcagaccaaatagagtggatgagtaaaaacttctctaatagagatagagtaattctatcactgcatcctcacaatgatagaggcacaggagttgctgcaactgaattagctcttatggctggagctgatagagttgaagggacattatttggaaacggagagagaacaggcaacgtagacattgttacacttggactaaatatgtttactcagggtgtcgatcctaaactagattttaaagacttaaacaaattaattgaaaccgcagaattttgtacacaattaccagtccatcaaagacacccttatgctggatctttagttcatacagctttttctggcagtcaccaagatgcaatcagaaaaggtatggaagctatttcaaaatcaaatcaagaaaagtgggaggttccatacttgccaattgaccctagtgacattggaaaaacctatgaagcaatcatccgagtaaattcacaatcagggaaagctggctcagcttggttacttgaacaagatcataatatttttctacctagaggagctcaaattcagtttagtcaaacagtacaaaagttagcagatagttcgggtaaagaaataacttcgcaaattatttgggatatttttgaaaaagagtatttatttgaaggtaagtataaattagttaatttcagtagtaaaaaactttcaagaaataatagtaaagagctagttgaagctaccatttcttataataatgaagatatagacatctcagcctctggaaatggtccaataagtgcattcgtaacagccatgagagaaaaatttaatttaatatttaggcttagtgattttagccaaaatacacgaagttcaggttcaactgcagaagctgctgcatatgttgaaatcagagttccagatgaaaatggcagaagtgtattcggtgttggaaatgatacatcaattacgcttgcaccaataaaagctgttataagtgctattaa

SEQ ID NO: 237342 - DNA, 956 bp, Unknown
  Bacterial polypeptide expressing nucleotide sequence isolated from the Sargasso Sea
tttgggattagctgttgcaaatgcattatctggactatcagctggtgtaagacaaattgaatgcacgattaatggtattggtgagagagctggcaatgcagcacttgaggaaatagttatggcaataaaaacgagagatgatctattaccttatcaaaccggtattaaaacagaattaatcagcaaagcatcaaaaattgtttcaaatgctacaggatttccagttcagtttaataaagctattgttggaaaaaatgcctttgctcatgagtcaggaattcaccaagatggaatgctcaaaaatagagaaacatatgaaataatgactccagaaagtgtaggggttaaaaaaacttcactagtaatgggtaagcactcgggtagacatgcatttaaagataaattaagtgatctaggatatacagatgttaccgatgatgttgtccaagcagcttttggtaaatttaagattctagctgataagaaaaaacatatttatgatgaagatattgtcgctttagttgatgatagtttaataattgataataaaattaatgccattaatcttaaatctttaaaagtttttgcgggtacaggagagccacaaagagctgatatgaccttagatgtttttggggatatcaagaaaactactcaaacgggggatggtcctgttgatgcaatttttaaatgtataaaagaactttatccacatgatgtaaaattatctttatatcaagttcatgctgttacagaaggaacggatgcacaagcaactgtaagtgtaaaaattgaggaaaacgatcgtactacagtaggtcagtctgctgatactgacactttggtagcatcagcaaatgcatacttaaatgcgttaaacaaaatgttaatcaaaagagaaaaaaaatcactttataaaaatattgaacatcaaaaaattaaaggaggagtataat

SEQ ID NO: 237343 - DNA, 1537 bp, Unknown
  Bacterial polypeptide expressing nucleotide sequence isolated from the Sargasso Sea
atgaaagaatctagagaaattattatatttgacacaacactccgtgatggtgagcaagcacctggatgtagtatgactatgggtgaaaaattaaagattgctcacgctttaaaagaattgaatgttgatgtgattgaagcaggttttgctgctgcatctcctggtgattttgatgctgtaaatgcaattgcatccgagattgatggtccaactatatgttcgcttgcaagatgcaatgagagcgatatagaaaaggcttacgaagccctgaaggtaaataaaaatagaagagttcatgtctttgtagctacgagtgaaattcatctcaaacacaaactaaatatggcaaaagatgaggttctcaaagctgcttacgaaggtgtgaagatggcgaagtcattctgtgaaaatgttgagttttctcctgaggacgcttccagaactgatcatggttttctaactgaagttgtgaatgctgcaattgaagcaggtgcgacaacaatcaatgttccagatacggtgggatacactatcccctatgagtttggtgaactatttaagcacttgatttcaaactgcaatgatgctgagaatgtgatcttcagtgtccattgtcacgatgaccttggcctttctgtagcgaatagcttggctgcagttgaatctggagcaagacaaattgaatgcacaatcaatggcattggagagcgagctggaaatacctcactcgaggaagtatgcatggcaatcagaactagagaagagtatttcgattttaaaacatcgattgattcaacaaagctatatcccaccagtcgattggtctcttcgattacgggtatgcatgttccaagaaataaagccatcgttggcgacaatgcttttgcacatgaagcaggcattcatcaacacggcatgcttagggattcttctacatatgaaatcatgaagcctcaggatgttggtattgctagatcaaacctcgtccttgggaaacacagtggcagacatgcttttttagataggattgatgaactaggatttgcactcgagaaagatgagattgatccggcttttcaggaattcaagaaattggctgatcgaaaaaaggaaatattcgatacagacatagaagcaatcgttctaaatgcggatattgccaatatgagccgttggactcttatggacctagagacaacctcaggctcatcatggggatctacagcatcactgaaattgaaagattctggagaagagataattgagagggataataatagcaaccctgccagtggaccgattgaagctgttttcaatatcataagtgatatcacaggatataaacttgaattgacaaattttgagattcacagcgtcagtgttggagacgacgcacagggagaagtaactgtcacagtaagttataacggacaaaattatagagggcatggcattagtactgatattatcgaatcaggtgctttggcttatcttgaagtcataaacagaattgaaagaaatcaagcaaaacattagg

SEQ ID NO: 237344 - DNA, 1299 bp, Unknown
  Bacterial polypeptide expressing nucleotide sequence isolated from the Sargasso Sea
gttgtatatttcgagcactaaaaatatttatatggctgagaaagataaagtatttattttcgatacaactatgagggatggtgaacagtcaccaggtgcctctatgagtgttgaagaaaaaattcagatttcaagagttttcgatgaaatgggaattgatataatcgaggctggttttccaatatcatcgccaggtgactttgaggccgtaagcgcaatcagtaaaagtgtaaaaaattccattccatgtggtttagcaagagctacaaaaaaggatatagacgcatgtcatgagtctttaaaatttgcaaaaagatttcgtatccacacatttatttcaacaagtccagttcatatgaaacacaaacttaatatgacggatgaacaagttttaggcgctataaaagaaagtgttacttatgctaaaaaatttacagatgacgttgagtggtcatgtgaggatggcacaagaacaaatttagaatttatgtataaaactatagaacttgccattaaatgtggtgcaacaacaattaatattcctgatactgttggttattcaatacctgaagaatttgcaaaaactataacatcaataaaaaacaatgtaccaaatattgataaggctattctttctgcgcactgtcataatgatttaggattagcggttgcaaatgctttatcaggtttatcagcaggagttaggcaaattgaatgtactataaatggaataggtgaaagagcaggtaatgcagcacttgaagaaattgtaatggccataaaaacacgtgatgacttattaccttatgaaacaggaattaaaactgaactaattagcaaagcatctaaaattgtatctaatgctacaggttttcctgttcaatttaataaagcgatcgttggaaagaatgcttttgctcatgagtcgggaattcatcaagatggaatgttaaaaaatagagaaacttatgaaataatgacaccagaaagtgttggtgtgaaaaaaacatctttagtaatgggaaaacactctggacgtcatgcatttaaggataaattaagtgatttaggttatgccgatgtcacagatgatgttgtacaagcagcctttggaaaatttaaaattttagcagataagaaaaaacatatctacgatgaggatattgttgcattagtcgatgatagtttaattattgataataagataaatgcaattaacttaaaatcattaaaagtatttgctggaactggtgagccccaaagagctgatatgactttagatgtttttggagaagttaa

SEQ ID NO: 237345 - DNA, 1573 bp, Unknown
  Bacterial polypeptide expressing nucleotide sequence isolated from the Sargasso Sea
tatgagcaataaagatagagtctttatatttgatactactatgcgtgatggtgagcaatcgccaggtgcatctatgagtttagaggaaaaaattcaaatcgccagagtatttgatgaattaggtatcgatattatcgaagcaggttttccaatagcttctccaggggattttgaagccgtttcagaagtaagtaaaattttaaaaaattctattcctgcaggactttcaagacactcagtaaaagatattgatagagcttatgaagctctaaaacatgcaccaagatttagaatacatacatttatttctacaagccccttacacatgaagcataaattaaatatgtctccagaagatgtttatgaatcaattggaaaacatgttgcttatgcaagaaagtttactgatgatgttgagtggtcttgtgaagatggaacaagaactgatatggattacatgtgtaaaactgtagagcttgcaattaaaaatggagccacaacaattaatattcctgatactgttggttacacaataccatctgagtttactacaattatagaaactttactaaataaagttccaaatattgataaagcaattttatcaactcattgtcataatgatttaggtttagcagtagctaactcattagctggagttcaagctggtgcaagacaaattgagtgtaccattaatggtttaggagagagagctggaaatgctgcacttgaagaagttgtaatggcaattaaaacaagacctgatttaatgccatacgaaactggcattaatacaacacttttaagcaaagcttcaaaaattgtttcaaacgccacaggttttcctgttcaatataataaagctatcgttggaaaaaatgcttttgctcatgaagcaggaattcaccaggatggaatgttaaaaaatagacaaacatatgagataatgacacctgaaagcgtaggggttaaacaaacatcgttagtgatgggaaagcattctggtcgacatgcatttaaagacaagttaaatagcttaggctatccagatttaactgacgatgtagtaggaaatgcatttgcaaaattcaaagtcttagcagataagaaaaaacatgtttacgatgaagatattattgctttagtagatgatagtttaatcgtagataataaagtaaatgcaataactcttaaatctttaaaagtttttgctggaacaggagaaccacaaaaagcagaaatgactttggatgtttacggtgatgttaaaaatgcaacagaaactggagatggtccagtggatgcaatattcaaatgcattaaaactttatatcctcacgatgttaacttacagctttatcaagttcatgctgttacagaaggaacagacgcacaagcaacagtaagtgtaaaaatagaggaaaagggtaaaacaacagtaggtcaagcagctgatacagatactttagttgcatcagcaaatgcttacataaatgcattaaataaaatgataattaaacgagataaaacagctcctatggagcaagaaagtcagaaagtaagagggatataa

SEQ ID NO: 237346 - DNA, 934 bp, Unknown
  Bacterial polypeptide expressing nucleotide sequence isolated from the Sargasso Sea
aattctttagctggaatacaagctggagcaagacagatagaatgtacaattaatggaataggtgaaagagctggaaatgcagctttagaagaagttgtaatggcaataaggaccagaaacgatctaatgccatatgaaacaggaattaacactacattattgagtaaagcgtcaaaattagtgtcaaatgttactggttttccggttcagtataataaagcaatagttggtaaaaatgcttttgctcatgaatcaggtattcaccaagatggaatgttaaaaaatagaaatacatatgaaataatgacaccagaaagtgtcggagttaaacagacttcacttgtaatgggtaaacattctggaagacatgcattcaaagataaacttataagcttaggttatgctgacttaacagatgatgtaatcgaaaatgcttttggaaaatttaaagttttagctgataaaaagaaacatatatatgatgaagatattattgctttagtagatgatagcctagtaacagacaataaagcaaatattattgttttaaaatctttaaaagtattcgcaggaactggagagccccaaagagcagaaatgacacttgatgtaagtggccaaattaaatctgcatcagagacgggagacgggccagtagatgcgatttttaaatgtataaagaatttgtatccacatgatgttaatcttcaattatatcaagttcatgcagtgacagaaggaacagatgctcaagcaactgtaagtgttcgaattgaggaaaatggcaaaacaacagttggtcaagctgcagatacagatacattggtcgcttcagctaatgcttatattgctgctttaaataaaatgatttttaaaagagaaaaaactgctcctgaaatggatcatgaaaaagaaaaaatgagaggtatttaaa

SEQ ID NO: 237347 - DNA, 769 bp, Unknown
  Bacterial polypeptide expressing nucleotide sequence isolated from the Sargasso Sea
aatagtttcaaatgcaacaggttttcctgttcagtacaataaagcaattgttggaaaaaacgcatttgcacatgaatcagggattcaccaagatggaatgttaaaaaatagacaaacatatgagattatgactccagaaagcgtaggagttaagcagacatctttagtaatgggaaaacattcaggaagacatgcatttaaagataaattaacaagtcttggctatgtagacgtaacagatgatattgttgaaaatgcatttggtaaatttaaaattttagctgacaagaaaaaacatgtttatgatgaagatatcattgctttagttgatgatagtttaatcgttgacaataaacttaatgcaataaatttaaaatctttgaaagtatttgctggaacaggcgaaccacaaagagcagacatgacattagatgtatttggtgaagtaaagaaagcaactgaaacaggagatggtcctgttgatgcaatatttaaatgtattaaaaccttatatcctcacgatattaagttgcagctatatcaagtacatgctgtaacagaggggacagacgcacaggcaactgtgagtgtccgaattgaagaaaatggcaaaacaactgttggtcaagcagcagacactgacacattagttgcttcagcaaatgcttacattaatgctttaaataaaatgataattaaaagagataaaactgctccggatagcattcaagttacttcagagtatgataataaagtgagaggaatataa

SEQ ID NO: 237348 - DNA, 1078 bp, Unknown
  Bacterial polypeptide expressing nucleotide sequence isolated from the Sargasso Sea
acaaagaaagttaaaaatagctgaaaagcttgatagcttaggtgttgatattattgaagcaggcttccctgtatcaagtcctggagattttaaatcagtagtagaaatttcaaaagttgttaaaaatgcaagtgtctgtggcttaactcgtgctgtaaaaaatgatattgatgttgcggtagatgctttaaaatatgccaaaaaacctagattacacacgggaattggtacttctagatctcacatacttcacaaatttaattcaactcctgaaaaaattttagagagagctgtagaggctgttaaatattctaaaaaatttattgaagatgtggagttttatgctgaagatgcaggaagaactgacaatgatttcttggctttaatttgcgaaaaagtaattgatgcaggtgcaactgttcttaatattccagatacaactggctattgtctaccttatgaatatggggaaaaaattagttttttggtaaataatgtaaaaaacatagataaggcaataatttcctgtcattgtcataatgatttagggcttgcaactgccaattccatccaaggtgtcataagtggtgcaagacaaattgaatgtacaataaatggtattggagaaagagcaggaaatacttctttagaggaagtagtcatgattcttaaacaacatgatgaattaagtttagatactaatattaatacaaaactattacttgaaactagtcaaatggtttcggaactcatgggtatggtagttcaacccaacaaagcaatagttggtgcaaatgcttttgctcacagttctggaattcatcaagatggagtgataaaaaaaagagagacatatgagataattgatcctaatgatgttggagttaatgaatcttctattgttttaactgcaagaagtggaagagctgctttagcatatagagcaaaaaatattggttttgatttaactaaaattcagcttgataaagtttacagtcaatttttggaatttgctgataaaaataaagaggttactgactctgacctacctaacataattcaacttgcaaaaatttaa

SEQ ID NO: 237349 - DNA, 1270 bp, Unknown
  Bacterial polypeptide expressing nucleotide sequence isolated from the Sargasso Sea
catactttttattgcaactagcccacttcatatgaagtataaacttaaaaaaaaagaagaagaagtattggaagcaattactcagactgtatctcatgcaagaaatttatgtgaaaatattgagtggagttgtgaagatggtggtagatcagaattagattttctttataaatgcattgaacttgcaattaattgtggtgcatccacaattaatattccagatactgtaggatatactttaccagaagagtttggtaaaatttttaaaaatgtaaaaaataacgttccaaatatagataaggcaattttatcaactcatactcataatgatcttggattagccacagcaaataatgtagctgctattaaagaaggtgcaaggcaagttgaatgcacaataaacggtatgggagaaagagcaggtaactcatctctggaagaaatagtaatgactttaaaagttaaaaaagatttgatgccctatcatacagatataaaaactgatcttattatgaaagcgtcaagattagtttcttcaattactggatttccagtacagccaaataaagcaattgtgggagcgaatgcttttgctcatgaagctggaattcatcaagatggaatgctaaaacatgctggcacatatgaaataatgacacctgagtctattggcctaaataaatcttcattagtattaggaaaacattcaggaaaacacgctttttcagaaaaattaaaagaattaggatatgaacctggagataatgcattaatggaattgtttggtagatttaaagatttagctgataagaaaaaagaaatttttgaagaggatcttattgccctagcggaggatcgctcagcatcttatgatgaacacataaaatttgtatccttagatgttaatgcgggttctgtaaaaaaacatgaagcaaacttaaaaatagaaatggatgaagaagtaaaagtaattaaagattttggtaatggtcctgttgacgctacatttaatgcaataaaaaaacttacttctactaattttaaattaaagctttatcaagttaatgctattacagcaggtactgatgcccaaggagaggtaacagttcgtttagaggatgatgatttatcttctcaagctaaaggaagtgaccctgatattatcgttgcttctgctaaagcttatataagtgcattaaatagattattatttaaaaaaactaaatcaattgtaaaaaaatctgcagaaatcaaaatagaaggagtatag

SEQ ID NO: 237350 - DNA, 760 bp, Unknown
  Bacterial polypeptide expressing nucleotide sequence isolated from the Sargasso Sea
tatgaaagcctcgaggttagtttcttctattacaggttttcctgttcaaccaaataaagctattgtaggtgcaaatgcttttgctcatgaagctggtattcatcaagatggtatgcttaaacattcaggaacatatgaaattatgactcctgaatctattggtttaaataaatcatctttagtattaggtaaacattcaggtaagcatgctttctctgaaaaattaaaagaacttggctatgaaccaggtgataatgcattaatggaactgtttggaagatttaaagatttagctgataagaaaaaagaaatttttgaagaagatttaattgccttagctgaagatagatctgcatcttatgatgaacacattaaatttgtatcattggaagtaaatgcaggttctgtagaaaaaccagaggctaaattaaaaattaatatggatgaaaaaattaaatctataaaaattaatggtaatggaccagttgatgcaacttttaatgctataaagaaacttacatcaactgattttaaattaaaattatatcaagtaaatgcaattactgcaggaactgatgctcaaggagaagtaactgtaagattagaagatgaagatttatcttctcaagcaaaaggaagtgatccagatataattgttgcatcagctaaagcttatattaatgcattaaatagattaatatttaaaaaatctaaatctattaaggaaaattcatctaatttacaaatacgaggagtataa

SEQ ID NO: 237351 - DNA, 688 bp, Unknown
  Bacterial polypeptide expressing nucleotide sequence isolated from the Sargasso Sea
taataaagcaattgttggcgctaatgcttttgcacacgaatctggtattcatcaagatggtgttctcaaaagtcgcgagacatacgaaataatgcgagctgaagatgttggttggaacgctaataagatggttttaggcaaacattcaggccgtaatgcttttcgttcaagattagaggagcttggtattaccttcgaaaatgaggaggaattaaataaaattttttctcagtttaaagagttagccgataaaaaacacgaagtttacgatgaagacttacaggcattggtaagcgatacggttcaaggcagagaggagagaattaaacttctttcacttaaagttggtagtgaaacaggagtcatgcctgaagcagaggtcgttctaaaaattgatgggcaacaaaagtcagccaatgccaagggaggcggtcctgtagacgctacttacaaagctattgaggaaatggtaaagagtgggtgtaatttgcaactatattcagtcaacaacataacagatggaactgattcacaaggtgaagtgacagttcgcatagataaagagggaagaatagtcaatggtttaggggcggatactgatattgttatcgcgtctgcaaaagcatatattaatgcattgaataaagttttagacaagcgtcaacgtgagcatccgcagcaaatttaa

SEQ ID NO: 237352 - DNA, 1471 bp, Unknown
  Bacterial polypeptide expressing nucleotide sequence isolated from the Sargasso Sea
aatggataaccctatagataaatattcaccatttgtgcctattgatttaaagaatagaaaatggccaggtaaaacaattaaacagtcaccaatttggtgttctgttgatttgcgtgatggcaatcaagcacttattgagccaatgggttctgaaagaaaaaatagaatgtttgatttattatgtaagttaggcttcaaagaaattgaagttggatttccctcagcttctcaaactgattttgattttgtaagagatctcatagaaaataaaaaaattccatcagatgtaagtatacaagttctaactcaagcaagagaagaattaattcataagacttttgaatcacttaaaggtgcgtcaaaaggaattattcacttttataactcaacctcaactcttcagagagaagtggtatttaatcaagataaaggtggcataaaaaaaatagccacgaacgctgctatgcttataaagtcattggctaaaaaaaatacagatactgattggagttttgagtattcccctgaaagttttactggaactgaactagaatatgcaagagaagtttgtgatgaagttgttgaaatacttaaaccggcaacaaaacacaagataataattaatttacctgctaccgtagaaatgtccacgcctaatatttacggcgatcaaattgaatggatgaatgacaatcttaaaaataggcaggacatttgcttaagtttgcatcctcataatgatagaggaactgctgttgctgcgtctgaatttggactgatggcaggagcggacagaattgagggaacactttttggtaatggagaaagaactggaaacgtagatgttgtaacaatagcattaaatatgctcacacaaggtgtggatcctaaactagacttttcaaatattaattcagtaatgagagaggttgaatactgtaatcaacttccagttcatcccagacatccttacgctggagatctagtttttactgctttttctggatctcatcaagatgcaataaaaaaaggttttaatgcaattaaaaaatcaaataacccaaaatgggaagtcccctatctaccgatagaccctgcagaccttggaagaaattatgaagcagtagttagaattaactctcaatcaggtaaaggtggtgtagcgtttctgttagaaaaagatcatggagtatctttaccaagaaggcttcaaataagtatgagtcaaaaaattcaaaaattagctgatgagacaggaagagaaattgtaagctctcaattgtgggaagtttttgaaaaaaattatctcgtgccaattaataacttttcatacattaagcatacctcctcaacaaaagaagatattcacaacctggatttgactttgcagatgaatgacgatcaaatcattattaatgaaactggaaatggtccaatcgattcatttataaacggattaaaagcaagttag

SEQ ID NO: 237353 - DNA, 566 bp, Unknown
  Bacterial polypeptide expressing nucleotide sequence isolated from the Sargasso Sea
tatgactgaaaagatttacatttttgataccactttaagagatggtgagcaatctcctggcgcttcaatgaatttagaagaaaaaattcaaatagctgaagttttagctgatttaaaagttgatattattgaagctggttttccaatagcttctaatggagattttgaggctgtttctgaaattagtaaaaatatcaagggaccgactattgcgggattagctcgagcaaagttaggtgacatcgaaagagcatgggaagcagtaaaattttcagattctccaagaattcatacttttattgctacgagtcccattcatatgaaatataaattaatgaaatcagaaaatgaagttttagaagcaattaaacaaactgtaacttttgctagaaatttatgcccaaatattgaatggagttgtgaggatggaggaagatcaaatttagattttttatataaatgtattgaattagccattaaatgtggagctactacaattaatattcctgatactgttggctatactttacctactgagtttggttcaatatttaaatcagtaaaaa

SEQ ID NO: 237354 - DNA, 343 bp, Unknown
  Bacterial polypeptide expressing nucleotide sequence isolated from the Sargasso Sea
atgaacaaagaaaataattacataaagatttttgatactaccttaagagatggtgagcagtctcctggcgcttcaatgaacattgaagaaaaattaaaaattgcagaagctttagaagatttgaaagttgatattattgaagcaggatttcctgccgcttcaaagggagactatgaagcagtttctgaaatatcaaaaaagattaaaaattcatcaatatgcgctttgagcagagcttcaaaaaatgacattcaaacagctgcggatgctctcaaaaatgcaacggctccaagaatacatacatttatctcaacaagcgaacttcacatgaaacataagtaac

SEQ ID NO: 237355 - DNA, 836 bp, Unknown
  Bacterial polypeptide expressing nucleotide sequence isolated from the Sargasso Sea
catgaaagattctagagaaataattatatttgataccactttgagagacggtgagcaggctcccggctgcagtatgacaattggtgaaaagctaaaaattgcacatgcacttaaagaattaaatgttgatgtaattgaggctggttttgcagcagcatcaccaggtgattatgaagctgtgaatgcaattgcctctgagattgatggaccaactatctgctcacttgcaagatgcaatgaaagcgatatagaaaaagcatatgaggcacttaaggttaataaaaacagaagaatacatgtttttgtcgccaccagtgaaatacatctcaagcacaaactaaatatggctaaagatgaagtgcttaaagccgcttatgaaggcgttaaaatggcaaagtcattttgtgataatgttgagttttcacccgaagatgcttcaagaactgatcatggttttctcacagaagtggtcaatgctgcaattgaagcaggcgccacaacaattaatgttcctgatacagttggttacacaatcccttatgaatttggtgaattatttaaacacttgatttcaaattgtacacatgcagagaatgttgtttttagtgttcactgtcacgatgaccttggtctttcagttgcaaatagcttggcagctgttgagtctggagcaagacaaattgaatgtacgataaatggtatcggagaaagagctggaaatacctcacttgaagaagtatgcatggcaattagaacaagggaagagtattttgattttaaaacatcaatagattcaaacaaaattatacccaacaagcaggattggtttcctctat

SEQ ID NO: 237356 - DNA, 748 bp, Unknown
  Bacterial polypeptide expressing nucleotide sequence isolated from the Sargasso Sea
attagtatcatcaataacagggttttcctggtccaaccaaataaagcaattgttggagctaatgcctttgctcatgaagctggaatacatcaagatggaatgcttaagcatgcaggtacatatgaaattatgactcctgagtctattggtttaaataaatcgtcattagttttaggaaaacattctggtaaacatgccttttcagaaaaacttaaagagcttggttatgaaccaggagataacgccttgatggagttatttggaaggtttaaagatttagctgacaagaaaaaagaaatatttgaagaagatttaattgctttagcagaagatagatcagcttcatacgatgaacacataaaatttgtatcattagaagtaaatgcaggttcagttgaaaaaccagaagctaaattaaaaattgatatggaaggtaaaatcaaatcaataaaaattaatggtaatggtcctgtagatgcaactttcaatgctattaaaaaccttacatcaagtaattttaaattaaaactataccaagtaaatgctattactgctggaactgatgctcaaggagaggtaaccgttagacttgaagatgatgatttatcttctcaagcaaaagggagcgatcccgatataattgtagcttctgcaaaagcttatattaatgctcttaatagattgatatttaaaaaatctaaatcaataaaagagaattcatctaacttacaaatacgaggagtttaaa

SEQ ID NO: 237357 - DNA, 1051 bp, Unknown
  Bacterial polypeptide expressing nucleotide sequence isolated from the Sargasso Sea
tctatacctgaagagtttgcaaaaacgattactcatataaaaaacaatgtaccaaatattgataaagcaattatttctgcacactgtcataatgatttaggattagcagttgctaatgcacttgctggattatctgcaggtgtaagacaaatagaatgtactataaatggaattggagaaagagctggaaatgcagcgcttgaagaaattgtaatggcaattaaaacaagaaatgatttaatgccatacgatactggtattaaaacagagcttataagtaaagcatcaaaaattgtatcaaatgccacaggatttcctgttcagtttaataaagcaatcgttggtaaaaatgctttttcacacgagtcaggaattcatcaagatggtatgttaaaaaatagagaaacctatgagattatgtcgccagagagtgttggagtaaaacaaacatctttggttatgggtaaacattcaggaagacacgcctttaaagataaattaactgacttaggttatacagatatgactgatgatgttatccaagaagcttttggtaaatttaaggttttagctgataaaaaaaaacatatatatgatgaggatataattgctttagtagatgaaagcttaattgttgataataaaattaatgctattaatttaaaatcactaaaagtttatgctggtactggcgagcctcagagagctgaaatgacattagatgtctttggtgatattaaacaaactactcaaactggagatggaccagttgatgcaatatttaaatgtattaaaaagctttatgaacatgaagtaaaactatcattgtatcaagtgcatgcagttactgaaggaacagatgctcaagcgacagtaagtgtgaaaattgaagaaaatgatagaacaacagttggacaatctgctgatacagatactttggttgcatctgcaaaagcttatttaaatgcattaaataaaatgttgattaaaagggagaaaaagtcccttactggaaatattgaacatcaaaaagttaaagggggagtttaat

SEQ ID NO: 237358 - DNA, 813 bp, Unknown
  Bacterial polypeptide expressing nucleotide sequence isolated from the Sargasso Sea
tacttccatatgaaactggtattaaaacagaattgataagtaaagcttctaaaatagtttcaaatgcaacaggttttccagtccaatttaataaagcgattgttggaaaaaatgcttttgctcacgagtcaggcattcatcaagatggaatgttaaaaaatagagaaacctacgaaataatgactccagaaagtgttggagttaaaaaaacatcattagtaatgggaaaacattcaggaagacacgcatttaaggataaattaaatgatttaggttatacagatgtcacagacgatgtagttcaagctgcttttggaaaatttaaaattttggctgacaaaaaaaaacatgtttatgacgaagatattgttgcattagtagacgatagtctaataattgataataagataaatgcgataaacctaaaatctctgaaagtatttgctggaactggtgaaccacaacgagctgatatgacattagatgtttttggggatataaaaaaaacttctcagacaggagatgggccagtggacgcaatttttaaatgtattaaagaattatatccacatgatgttaagttatctctatatcaagtccatgctgttacagagggcactgatgctcaagctactgtaagtgtaaaaattgaggaaaacgacaggacaactgttggacaatcggcggatacagatactttagttgcatcagcaaatgcatatttaaatgcattaaataaaatgttaattaaaagagaaaaaaaatctctttataaaaatctagaacctaaaaaagtaaaaggagtattttaat

SEQ ID NO: 237359 - DNA, 937 bp, Unknown
  Bacterial polypeptide expressing nucleotide sequence isolated from the Sargasso Sea
ttgcaatgctttagcaggtttatctgcgggtgttagacaaattgaatgcactattaatggaattggagaaagggcaggtaacgccgctctggaagaaattgtaatggctatcaaaacaagaaatgatttaatgccttatgaaacaggaattaaaacagaacttataagcaaagcctcaaagatagtttcaaacgcaactggatttccagttcaatttaataaagcgatagttggcaaaaatgcttttgcacatgagtcaggaattcatcaagatggaatgttaaaaaatagagaaacatatgaaattatgacaccagaaagtgttggtgttaaaaaaacatctttggtaatgggtaaacactctggaagacatgcatttaaagataagttaagtgatttgggatattcagaattaacagatgacgttgtgcaagcagcatttggaaaatttaaagttttagctgataagaaaaaacatgtttatgatgaagatatcattgctttagtagatgatagcttaataattgataataaaataaatgcgatcaatcttaaatctttgaaagtttttgcaggaacaggggaaccccaaaaagccgagatgacactggatgtctttggtgaaataaaaaaaacttcacagaccggagatggcccagttgatgcgacatttaagtgtatcaaagcattatatcctcatgacatgaagcttttgttatatcaagttcatgctgtaacagaaggtactgacgctcaggcaacagtaagtgtcaagattgaggaaaatgacagatctaccgttggacaatctgcagatactgatacactagttgcctcagcaaatgcttacttgaatgcattgaataaaatgttaataaagcgagagaaaaaagctatgaacgaaagtattaaacaccaaaaagtaaaaggaatttaa

SEQ ID NO: 237360 - DNA, 1497 bp, Unknown
  Bacterial polypeptide expressing nucleotide sequence isolated from the Sargasso Sea
caaattactactaccccaatttggtgcagtgttgatctaagagatggcaatcaagcattaattgaacctatgggcgaagaaagaaagctaagaatgttcaaattattgttagatattggctttaaagaaattgaagtaggttttccgtcagcttcacaaacagattttgattttgtaagaaaaatcattaatgatggcctaattcctgatgacgtaacaattcaagttttaactcaatccagaaaagaattaattgataggactttcgagtcattaaaaggtgcaaaaaacgcgatagtgcacttttataattccacctcaacaatacaaagaagagttgttttcaaaggaaataaagaagaaataaaaaaaatagcgactgatggagctaattgggttatggaaaatgcagaaaaaaattcagataccaattggagatttgaatatagccctgaaagttttacaggaactgaactagagtatgctgcagaggtttgtaatgaggtaaatcaaatcctaaaacctacctcagatagaaaaaccattattaatttaccagcgactgttgaattggcttcgccaaatgtatatgcagatcaaatcgaatggatgtctagaaatatagataatagagaggacgtggttatcagtcttcatcctcataacgatagaggatctgcagtagctgcaactgaacttggtgtattggcgggagcagataggattgaaggaaccctttttggtaatggagaaagaactggaaatgtggatatcgtttctttagctttaaatatgttaactcaaggagttgatcctcatcttgatttttcagatattaatccaattatgagagaggtagaatattgtaatcaactgccagttcacccaagacatccttatgctggagaccttgttttcacagccttttctggatcacatcaggatgctatcaacaaggggtttaatgcaatgcgatcatctaacagtcctctttgggaagtcccttatctcccaatagaccctgctgatgtaggtaggacttatgaagcagttataagaattaacagtcaatcagggaaaggaggtatagcctatctacttgaaaaagaccacggtttgagtatgcccaggaggttacaagttgagtttagtcaggtcattcaaagaataacagatgaaacaggcaaagaaatatcaccttctgatatttgggaaacttttcaaaaaacctacttaaacacaaatggtaattatgaatttatagaacatagtattgaatctataaaggaagaagatcttctgaaagcaaaactaaaaattaatggacaggaaatcgaaatagagggaaagggaaatggtccaatcgatgcatttacaaatgcccttcaatctcagaatatagatataaagattcaagactatcatcaacatgcaataagctcaggttctgatgctaaagctgtggcttatatcgagataaaatctggtgactcctat

SEQ ID NO: 237361 - DNA, 1195 bp, Unknown
  Bacterial polypeptide expressing nucleotide sequence isolated from the Sargasso Sea
tatttttgatactacaatgcgtgatggagagcaatctccaggcgcatctatgagcgttgaagaaaaaatccaaatctcaagagtatttgatgaaatgggaattgatattattgaagctggctttccaatttcttcacccggagattttgaggctgtctctgcaataagtagaggtattaaaaattcaattccttgtggtttagcaagagcaatgaaaaaggatattgatgcttgtcatgaatctttaaaatacgcaaaaagatttagaatacatacatttatttctaccagccctgttcacatgaaacataaattaaatatgactgacgaccaagtgatagatgcaattaaagaaagtgtgacttatgcaagaaaattcactgatgacgttgagtggtcttgtgaagatggcacaagaacaaatctagacttcatgtgtaaaacaattgaacttgcaattaaatgtggtgcaaaaactattaatattccagatactgttggatattcaatacctgaagaatttgctagaaccattacacatataaagaataatgtaccaaacatcgataaagctattatttctgcgcactgtcacaatgatcttgggttagcagtagcaaatgctttagcaggtttgtccgcaggagtaagacaaatagagtgtacaattaatggaattggagaaagagctggaaatgctgctttagaagaaattgtaatggctattaaaactagaaatgatttaatgccatatgaaacagggattaaaactgaattaataagtaaagcatcgaaaatagtttctaatgcaacaggatttccagttcaatttaataaagcaattgttggaaaaaatgcatttgcgcacgagtctgggatacatcaagatgggatgcttaaaaatagagaaacttacgaaattatgacgcctgaaagcgttggagttaaaaaaacatctttagttatgggtaagcactcaggtagacatgcgtttaaagataaacttaacgatcttggttatactgatgtgacagacgatgtgatacaagcagcttttggaaagtttaaaattttagcagataagaaaaaacacatttatgatgaagatatagttgcgttagttgatgacagtttaataattgataataaaattaatgcaataaatttaaaatcgctaaaagtttttgctggtact

SEQ ID NO: 237362 - DNA, 725 bp, Unknown
  Bacterial polypeptide expressing nucleotide sequence isolated from the Sargasso Sea
tccagttcaatttaataaagctattgtaggaaaaaatgctttcgctcatgagtccggtattcaccaggatggtatgctaaaaaatagaaatacatacgaaataatgactcctgaaagtgttggagttaaaaagacctctttggtgatgggaaaacactctggaagacatgcgttcaaagataaattgagcgatcttgggtacgccggagtaactgacgatgtaattcaaacagcttttgggaaatttaaaattttggctgataaaaaaaaacatgtttatgacgaagatattattgccttagtagacgatagtttaattaaagaaagtaatgttattaatttaaaatctctaaaagtatttgctggaaccggagaacctcaaaaagcagaaatgacattagaagtttatggtgagcttaaaaaagctaacgaaactggagatggtccagtcgatgcaatttttaaatgtataaaaaaactatacccgcatgatgtaaaactacaattgtaccaagttcatgcagtgactgaaggaactgacgctcaagcaaccgtgagtgtaaggattgaagaaaaaggcaaaacaactgtaggccaggctgccgacacagatactcttgttgcttctgccaatgcttatttaaatgcattaaataagatgattattaaaagagaaaaaactgctcctgaagagtttgagcaagaaagaatgaaaggtatataaa

SEQ ID NO: 237363 - DNA, 891 bp, Unknown
  Bacterial polypeptide expressing nucleotide sequence isolated from the Sargasso Sea
caggagcagacagaatagaagggactctatttggtaatggtgaaagaacaggtaatgtagatctagttactttagctttaaatatgcttacccaaggagttgatcctgaattagatttttcaaatataaatccaatcatgagagaaactgaatattgtaatcaacttcctgtacatccaaggcatccttatgctggtgacttagtatttactgctttttcaggttctcaccaagatgccataaaaaagggattaaatgaattaaggaattccaatcaagaaacatgggaagttccttatctgccaattgatccaaaagatgtagggaggtcttacgaagctgtaattagaatcaatagtcaatcaggtaaggggggagttgcttacttacttgagaaagatcatggattaagtatgcctagaaggcttcaaatagagtttagccaagttatccagaagataactgatgagactggaaaagaaatatcagcttcagatatttgggaaacattccagcaaacttattttcatgaagatggtaaatttaaattcatagaacatcatataaactcgcgtgcaaataaagacggtcttcaagaggatgcaattgaaataaaaataaaagaagaagataagactaaggtaattaatggaataggtaacggtcctatagatgcaatgatagatgcactaagtaaggatttagatcttgaaatcaaaattgctgattatcatcagcatgctattagttcaggttcagatgcaaaagctgtagcttattctgagatttcttataaaaatcaatctgtttggggagttggaatacatcagaacacagttattgcaggtttaggatccgtaattaatggtttaaatcgtttgtctatataag

SEQ ID NO: 237364 - DNA, 1550 bp, Unknown
  Bacterial polypeptide expressing nucleotide sequence isolated from the Sargasso Sea
attgtattatagattttctaaaaatttagttatgagcaataaagatagagtctttatatttgatactactatgcgtgatggtgagcaatcgccaggcgcatctatgagtttagaagaaaaaattcaaatcgctagagtgtttgatgaattaggtatcgatataattgaagcaggttttcctatagcttcaccaggggattttgaagccgtttcagaagtaagtaaaattttaaaaaattctattcctgcagggctttcaagacactcagtaaaagatattgatcgagcttatgaagctctaaaacattcaccaagatttagaatacatacatttatttctacaagtccattacacatgaaacataaattaaatatgtctccagaagatgtttatgaatcaattggaaaacatgttgcttatgcaagaaagtttactgacgacgttgagtggtcttgtgaagatggtacaagaactgatatggattatatgtgtaaaactgtagaacttgcaattaaaaatggagctacaacaattaacattcctgatacagtcggttatactataccatctgagtttactacaatcatagaaactttattaaataaagttccaaatattgataaagcaattttatcaactcattgtcataatgatttaggtttagcggtagctaactcattagctggagttcaagctggagcaagacaaattgaatgtacaataaatggattaggagaaagagcgggaaatgctgctcttgaggaagttgttatggcaattaaaactagacctgatttaatgccatatgaaactggaatcaacacgaaacttttaagcaaagcttcaaaaattgtttcaaacgcaacaggatttcctgttcaatataataaagcaatagttggaaaaaatgcttttgctcatgaagcaggaattcaccaggatggaatgttaaaaaacagacaaacatatgagataatgacacctgaaagtgtaggggttaaacaaacatctttagtgatgggaaaacattctgggcgacatgcatttaaagataaattaaacagtttaggttatccagatttaacagacgatgtagtaggaaatgcatttgcaaaattcaaagtcttagcagataagaaaaaacatgtttacgatgaagatattattgcattaatagatgatagtttaattatagataataaagtgaatgcaattactcttaaatctttaaaagtttttgcaggaacaggagaaccacaaaaagcagaaatgactttggatgtttacggtgatgttaaaaatgcaactgaaactggagatggtccagtggatgcaatattcaaatgtattaaaactttatatcctcacgatgttaacctacagctttatcaagttcatgctgttacagagggtacagatgcacaagcgactgtgagtgtaaaaattgaggagaaaggtaaaacaaccgtaggtcaagctgctgatacagatactttagttgcatcagcaaatgcttacataaatgcattaaataaaatgataataaaag

SEQ ID NO: 237365 - skipped
  Bacterial polypeptide expressing nucleotide sequence isolated from the Sargasso Sea

SEQ ID NO: 237366 - DNA, 583 bp, Unknown
  Bacterial polypeptide expressing nucleotide sequence isolated from the Sargasso Sea
attgtattatagattttctaaaattttagttatgagcggtaaagatagagtctttatatttgacacaactatgcgtgatggtgagcaatcgccaggagcatctatgagcttggaagaaaaaatccaaatcgccagagtgtttgatgaattgggtatcgatattattgaggcaggttttccaatagcttcaccaggggattttgaagctgtttcagaagtaagtaaaattttaaaaaattctattcctgcaggactttcaagacactcagtaaaggatattgatagagcttatgaagctctaaaacatgcaccaagatttagaatacatacatttatttctacaagtccattacacatgaagcataaattaaatatgtctccagaggatgtttatgagtcaattggaaaacacgttgcttatgcaagaaagtttactgatgacgttgagtggtcatgtgaagatggaacaagaactgatatggattacatgtgcaaaactgtagagcttgcaattaaaaatggagccacaacaattaatattcctgacactgttggttacacaataccatcagagtttactaca

SEQ ID NO: 237367 - DNA, 334 bp, Unknown
  Bacterial polypeptide expressing nucleotide sequence isolated from the Sargasso Sea
ttggttgttcaaaaagttcctgatatcagtaatacattccttatggaagatcgagccactcttcgaatttcatctcaacatattgcaaattggttgcatcatgggattactacaaaaattcaagttatggaaataatgaaacaaatggctaaaattgtagataaacaaaacaagggtgacaggaaatatgtaaaaatgagtgatgattttgacaattcaatcgcatttaaagccgcttgtgatttaatttttaaaggcaaagaacagccatcaggatacactgagcctctactccatttaaatagattagaaaaaaaagctagtcagaattaga

SEQ ID NO: 237368 - DNA, 817 bp, Unknown
  Bacterial polypeptide expressing nucleotide sequence isolated from the Sargasso Sea
atggaaaactacattaaacgcggcagtcttaatatccataatgctcttgataggtttctcagtgatgagatgttatcagggcttgatttaacctcagatgagttttggaaaaagtttgaaggtcttttagaggaattccatcaaagaaataaagatttattagcaaaaagatctttgttacaagatcaaatctcaacttggcataagaacaatgattttaatataaatgaatataaaaagtttttacaagagataggttacttagaggaagtacctgaagattttacaataacaacaaggaatacagatcctgaaatctcgaatattccaggacctcagcttgttgttcctattatgaatgcaagatttgctttgaatgcaacaaatgcaaggtggggtagtctttatgatgcactatacgggactgatgttatttcagaagatggaggtgcatcaaaagagggtgcatacaatgaaataagaggaaataaggttattgatttttcaaaacaatttttagatgactgcttcccaatcactgatcttagttataaagatattacaaatatttcaattaaggaccaaagattactttttcatgctgagcaaaataaaattacttatctaaaaaatgaaaatcaatttaaaggatttaacggatctcctgaaaatccttctgaggttttactagttaacaacaatctccatttagaaattcaaatagatcccaatcatcctgttggtaagactgataaagcaaatattaaagatattgttttggagtctgcagtttcaacaattcaagattgtgaggatt

SEQ ID NO: 237369 - DNA, 587 bp, Unknown
  Bacterial polypeptide expressing nucleotide sequence isolated from the Sargasso Sea
tatggaaaattacattaaacgcggaagtcttaatatccataatgctcttgatagatttcttaatgatgaggtactctcggaacttgatataacctcagatgagttttgggcaaagtttgaaggtcttttagatgaattccatcaaagaaataaagatttattagcaaaaagatccttgttacaagatcaaatctcaacttggcataagaataatgattttaatttaagtgaatataaaaagtttttagaagaaataggctacttagaagaagtacctgaagattttacaatcaaaacaaggaatacagatcctgaaatttccagtattccaggacctcagcttgttgttcctattatgaatgcaagatttgctttaaatgcaacaaatgcaaggtggggtagcctttatgacgcactatacgggacggatgttatttcagaagatggaggtgcatcaaaagagggcgcatataatgaaataagaggaaataaggttattgatttttcaaaacaatttttagatgattgtttcccaattactgatcttaattataaagatataacaaatatttcaattaaggatcaaa

SEQ ID NO: 237370 - DNA, 957 bp, Unknown
  Bacterial polypeptide expressing nucleotide sequence isolated from the Sargasso Sea
gcggtaaccaaggacaatattatgacaacaagcatcagccgtgccggattatccatcaatgcgcctttgacggccgaatacgacgccattttaactgaacaggcctgcgctttgctggtggagctgacacgtgagttccggccggcgcttaagcaattgcttgcaaagcgccagcaagtacaacaacgatatgacgccggtgagttgccggattttctggctgataccgccaatattcgccgctcggattggcgtgttgctgcaatacccgctgatttgcaggacagaagggttgagatcacggggccggtagaccgcaaaatgatcatcaatgcattaaatgctgatgtaaaagtatttatggccgactttgaagactcgcaggcaccaagctgggccggcgtaattgaaggccagattaacctgcgtgatgccaatctgggtacgatcagttataccgatccgcaaaatggtaaacagtatgctttaaaagacgatccggcgctgttaatagcacgcgtgcgtggtttacatctgtgggaaaaacatttgctggtagatggcgagcaaattcccggaggcttgatggatttcgcgctgtatttcctgcacaactatcaaacccggctaaataacggcacaggagtgtattactacgtgcctaagctgcaaagccatctggaagcgaaatggtgggatgatgtgttccgctacactgagctgaagtttgctcagcctgtcggcaccgtgcgggcaacggtgctgattgaaactctgccggctgtgtttgagatggatgaaattctctacatgctacgtgaccacatcgtggcgctaaattgtggccgctgggattatatttttagttatatcaaaacgttaaagaatcatgctgatcgcgtgctacctgaccgccaggtggtaacgatgaaacagccgttcttaaatgcctattcc

SEQ ID NO: 237371 - DNA, 820 bp, Unknown
  Bacterial polypeptide expressing nucleotide sequence isolated from the Sargasso Sea
gagccgctgctcaaccagcgcccgaacggcaacaagggagaatgcaaaactaagattagataacggcattggtacgtacttctatataccaaagcttgaaaatagtaaagaatcacaactctgggatgacatattttctttttctgaagatgaattagatctacccagaggaacaataagagctactgttctccttgaaacaatttcggcttcatttgaaattgaagagatgctttattctttaaaagagcactctcttggtatgaatgcaggcagatgggattatatttttagtgcaataaaaaaacatagggacctagaagaaatcaattttccagatagatcacaaattaccatgactgttccatttatgaaagcatatactgaactgctcgtacaaagttgtcacaaaagaggagctcatgcaataggaggtatgtctgcatttattccaaatagaagagatacagatgttactgagaaagcattagaaaatgttaagaaagataaagagcgagaagtttctatggggtttgatggttcttgggtagctcatccagatttagtaaaagtatgtaaagatgtgttccaaaattccttaggtacaaaagaaaaccaaattgactatgtacctaacgaaccaattatatctgaagagatgctccaagattttaacattcccaattcaacaattaccgaagaagggataagaacaaacatacgtgtaggcatcttgtatatccaatcatggcttctaggacaaggagcagctgcattatttaatcttatggaggatgctgctacagctgagatttcaaga

SEQ ID NO: 237372 - DNA, 488 bp, Unknown
  Bacterial polypeptide expressing nucleotide sequence isolated from the Sargasso Sea
tatgccaaccaactataaaaatgttaataatttaaaaatttctgaggaattactctcttttgtaaataatgagttgttgaaaggtttagaaatttctcctgaaaaattctggtcaggttttgacaatgcagtacacgaactagcaccaaaaaataaagaattaatccaaataagagaagatttacaaaaaaaaattgatgactggcatattaaaaataaaggaaacgaaatcaatatagaggaatacaaaaaatttttaaaagagataggttatttaaaagatgaaggacccgattttaaaattgagacaaaaaatgttgacgatgaaatttcaaaaatagctggcccccaattagttgttcccataatgaatgcgagatacgccctgaatgcagcaaatgcaagatgggttagtttatatgatagtttgtatggcactgatattattgagtctgaggaaggtggaagtgaaagatatgatccaaatc

SEQ ID NO: 237373 - DNA, 331 bp, Unknown
  Bacterial polypeptide expressing nucleotide sequence isolated from the Sargasso Sea
attggggtgttcaaaagttcctgacattaataatataggtttaatggaagatagagctacttgtagaatttcctctcaagcgttagctaattggctcaaacatgaaattatttctgaaaaacaagttattaatgctcttataaaaatgtcaaaaatagtagataatcaaaatgttaatgatccaaattataaatctatgtcagaaaattttgactccttatcttttaaagctgcaaaagaattaatttttgatggaacagagcaaccttcaggatatactgaacccatacttcatgaaaaaagattagaatataaaaaaaataataactaa

SEQ ID NO: 237374 - DNA, 244 bp, Unknown
  Bacterial polypeptide expressing nucleotide sequence isolated from the Sargasso Sea
tacggtttaaaaaaatattctatacattttgggatcatggatgaagaaagacgtacaacagtaaatcttaaagaatgtattagaaaagtaaaaaatagagtagtttttattaatacaggttttctagatagaaccggagatgagatgcacacttctttcgaagctggtccaatgatttttaagggagaaatgaaaaaatcaacctggcttaatacttatgagaattggaatgtagatacaggtt

SEQ ID NO: 237375 - DNA, 559 bp, Unknown
  Bacterial polypeptide expressing nucleotide sequence isolated from the Sargasso Sea
tatgagagaacaatatatcaaaatccacaacttatctgtagcaaaagaactggctgattttgtcaaaaatgagcttttactggatactgatgttggtcctgacgagttctggaaaggttttgacaaagtggtgcatgaattagcacctaaaaataaaaaattactcgaaatcagagaaacattacaacaagaaatagatctgtggcataaaaaaaatagagaccacgagattgactataataaatataaaaaatttttggaggaaataggttatttaaaaaaagaaggtgaagattttaaaataacaactaaaaatttagatgtagaaatatctaatatagcaggaccacaattagttgttccaataatgaactctagatatagcttgaatgctgctaatgcaagatgggtaagcttatatgacagtctttatggatcaaatataatagagtctgaagaaagtggaagtgaaaaatatgatcctttaagaggacaagaagtaattaaatacactagaaactttttgaataaatattttccaataaatgatcttgactgg

SEQ ID NO: 237376 - DNA, 328 bp, Unknown
  Bacterial polypeptide expressing nucleotide sequence isolated from the Sargasso Sea
gggtgttcaattgcaggaatgaatatttctgcaaaattggtcaatagcagacacaacagcatatatattgtgaaaccaaaattacatggccccgaggagtgtgcattttttaatagcttgttagacgatgtagagtctatgtttaatcttcctaatcacacaatcaaggtcggattgatggatgaggaaaggagaacgagctgtaatttaaagaaatgtatatatgagcttaaggacataattgtatttcttaatacaggttttctcgatagaacgggagatgaaattcatacaaatatgaaattagggcccgtgaattacaaaaaaa

SEQ ID NO: 237377 - DNA, 379 bp, Unknown
  Bacterial polypeptide expressing nucleotide sequence isolated from the Sargasso Sea
ggcatgtacgatgcaacagcttacagatgctctacatgtgtacagggagcatggcgatgagcgaggcctgaggaggataatatgccccatagaaagattacttattcatcttcccaaggttattgtaaaagatggtgctgccgccgctttatcacatggggcaactctcgcaagacctggaattgtcaaagcttcagcaggtactaaggccggctcaactgtactaattgagaccctaaaaggagaagcagtttctatcgctgagttgacagtagattctgatgcacttccagagatagattctggagaaatcgcaatcccaaaatctgttttgatgagtccagggacctaccctcagacatggatcaaatcgaactaa

SEQ ID NO: 237378 - DNA, 637 bp, Unknown
  Bacterial polypeptide expressing nucleotide sequence isolated from the Sargasso Sea
atgaccaaccgtatggagaaaaatgggctgaatgtggccaaggaactcgtggattttactgaacaagtgttgctgcccgacagcggtattgagccccgtgatttctggtttggtcttgctaaaattattaacgatttggccccacagaacaaagagcttcttctgaagcgtgaagctatccaagccaaaattgacgcttggcatctcgaacgtaaggggcaagagcatgacaaatcagcttacaaatcttttttgatggagattggttacttggtgccggaaggcgaggccttccagattgagacggccggtgttgacccggaaattgcatcgattgccggtgcgcaattggtggttccggtttccaatgctcgatttgccttaaacgcggccaatgccaggtggggaagcctctatgacgctctttatggtacggatgtcatcgacgaggccaacggcaaggagcggtccggaggctataatcccgtgcgcggggcggctgtggttgactatgccgcagacatgctcgatgacgcgctaccactcgcgaatggcagccacgccaatgtgacacattatgccatcgaggatggtgggttgaacaccaaccagggaggtctgcaggacgccagccaat

SEQ ID NO: 237379 - DNA, 289 bp, Unknown
  Bacterial polypeptide expressing nucleotide sequence isolated from the Sargasso Sea
gctacttgccgaataagcagtcaacacattgctaattggctacaccatggcatatgtagtaagaaacacgttttagaaattatgaaaaaaatggctacagttgtcgacaatcaaaacctcaaagatccaagcatgaaaggacattctccttacataccaatgtcgaatgactttgccaagtcaactgcttttaaagctgcttgcgaacttgtctttcacggaaaaacccagccttcaggttatactgaaccaattcttcatcttaacagacttcttaaaaaaaattaat

SEQ ID NO: 237380 - DNA, 677 bp, Unknown
  Bacterial polypeptide expressing nucleotide sequence isolated from the Sargasso Sea
tatgttaaaaaattatataaataccgaaaacttgtctgtttctgaaaaactatataactttataaatactgaagcgattcctggaacagatatttcaaaagatagtttttggaaaggtttaagcaatgtgagtcatgaacttactccaaaaaataaaaagttacttaatgttagaaaaaaattacaactagatatagatagatggcacctagaaaataatgaaaaagaatttaatcttaatgaatataaatcttatcttaaaacaattggctatttaaaaaaagaaggtcctgattttaaaattaaaacagaaaatatagataaagaaatatcaagtattgcaggcccacaactcgttgtgccaataatgaatgcaagatatgctttaaatgctgcaaatgcgagatggatgagtttatatgacagtttatacggaactgatgttatatcttcggatgaatcgacaagtgagaggtatgatccagaaagaggagctaaagtaattgaatatactaaaaaatttttagataaaaattttatactcaaaaattcaaaatggaaaaatgtaaatacaatatcaattaaaaatcataaattagaattacatacagacaaaggagtaaccggacttgctgatgatgataaatatgtcggatatagacttagtaaagagaaaa

SEQ ID NO: 237381 - DNA, 486 bp, Unknown
  Bacterial polypeptide expressing nucleotide sequence isolated from the Sargasso Sea
tatgaagtcaaaatatgtaactgttaataatttaaaagtttcggagcaattactatcttttgttaatgatgagctattggtagatacaaatattacccctgaaaaattttggttaggttttgacaaagttgttcatgaattagagcctaaaaacagagagctcattaattttagagagagtttacaaaaaaaaattgacgcctggcatattaagaaaaaaggtatgaaaattgaggttgaagaatataaaaaatttttaaaagagataggttatcttaaaggtagtggacctgattttaaaatagaaactgataatgttgataatgaaatatctcatattgctggtccccaattagttgttccagtaatgaatgcaagatatactttaaatgctgcaaatgctagatgggtaagtttatatgatagcttatatggaacaaatataattaaatctgaagagggaggaagcgaaagatatgatcccaa

SEQ ID NO: 237382 - DNA, 271 bp, Unknown
  Bacterial polypeptide expressing nucleotide sequence isolated from the Sargasso Sea
atcacaacatattgctaattggctacatcatggtatttgcagtaaaaaacaagtactagaaactatgaaaaaaatggcaagaattgtagacaatcaaaatattaaagatcctgcattaaaaggtcatgcaccatatcaagccatgtctggaaattttgataaatctattgcatttaaagctgcttgcgaacttgtttttcatggcaaaacacagccatctggatacactgaaccaatcttacatctcaatagattgcttaagaaaaattaa

SEQ ID NO: 237383 - DNA, 343 bp, Unknown
  Bacterial polypeptide expressing nucleotide sequence isolated from the Sargasso Sea
ataggttgttctaaagtcccagatataaatgatataggtttaatggaagatcgtgctacctgcagaatatcatctcaaatattatcaaactggattaagcacgaacttataaatgaagaggaagtcatatctataatgaaaaagatggcaattaaagtagatgcccaaaattcaaatgagataggttataatccgatgtctaaagattataaagattccattgcttttaatgccgcgttaaagctagtgttagaaggtgcaagccaaccatcaggttacacggagcctattttgcatgatatgagattaaagttgaaactattagaacaaaatagtttataga

SEQ ID NO: 237384 - DNA, 811 bp, Unknown
  Bacterial polypeptide expressing nucleotide sequence isolated from the Sargasso Sea
atgactaaaacaaaaatagcaaatatagccatagataataaattatttgattttgtaaataatgaggtgattcccggaattgacattgataagactgagttctggaacaaattcagtgaagctgctaatgaattatcagttgaaaactcagaacttatcaaaaagagagaagctattcaaagtaagattgatgattggcacagaaaaaacaaaaattttaataaaagagattatcaaaaatttttaaaagagattggatacatagttgaagagggtgaagattttaggattttaacagataacgtagatgaagaaatagctaaaatagcaggccctcaacttgttgttccagtagataatgctagatacgcactaaatgctgttaatgcaagatggggcagtttgtacaactcattatacggtactgatgccattccaggagaaaaaggtaaggcagacaatgaggagagaaaatatttagttattaatcatgtgaaagaattttttgataaagtcattcctatttcaaatgctaaatggaaacaagtttcaaaatttgatatagaggataataaactcgttttaaaagataaaaatcttaaatattacctacaaaatgcggatcaatttattggcttccaaggtgagaagaataatttaagatcagttttatttaaaaataataaccttcatattgatattataattgatccctctagtcctattggaaaaatcgatattgcaaatataagtgatgttgttattgagtcggctatttctactatagtagataatgaagattctgtgctgc

SEQ ID NO: 237385 - DNA, 401 bp, Unknown
  Bacterial polypeptide expressing nucleotide sequence isolated from the Sargasso Sea
tatgcaagaaaaatacattaaaattaataatcttcaagtatctgaaaagctatcaaacttcgtaaatgatgaattgttaaaaaatacaaatgtatcttcagaaaatttttggttaggtctagaaaaaactcttgatgacttagtaccaaaaaataaacaattaattaaattaagggaagatttacagaagaaaatagatgattggcatatcaaaaataaaagtaaagaatttaatttagatgagtacaaaaaatttttattagaaattggttatttaaaaaatgaaggacctgattttaaaatagaaactgaaaatgttgatgaagaaattgcaagtatagctggacctcagctagttgtacctgtcatgaatgcgaggtatgcattaaatgctgcgaatg

SEQ ID NO: 237386 - DNA, 725 bp, Unknown
  Bacterial polypeptide expressing nucleotide sequence isolated from the Sargasso Sea
tatgaattatgttaaaaaagaaaggctatctgtagcagaagatttattaaaatttatagataatgaacttttgccaggaactgatgttgaacctgctgaattttggtcgggtttcgacaatgctgttcatcaactagctccggaaaataaaaaacttattaatataagagataaaattcaaaaaaaaatagataagtggcatttggataataaagaaaaagaatttgatccttcaaattatttaagttttttgaaagaaattggatatttggttaatgatgggccagattttaaaatagaaactaaaaatgtcgacctagaaatttcaactatagctggaccccaattagtagttcctgtgatgaaccctaggtatgcattaaatgccgctaacgcgagatggggaagtttttatgatgctctttatggaacagatataatttcggaaaaagatggtgcagaacgccaggctaaatttaatccggttagagcgaaaaaagttattaattattctagaaattttcttgatgaacatgttccgttgctagaaggtagttggaaaaatattacagaaacccctaaagtgtttgatggtattttaaatctaaaattaaaaaatcaaaaacaatttgttggatattcaaaaaatgccaatggtctttgttctattttactaaaaaataataatcttcatattgacattataatagatccaaatggatcaa

SEQ ID NO: 237387 - DNA, 673 bp, Unknown
  Bacterial polypeptide expressing nucleotide sequence isolated from the Sargasso Sea
atgaatataaattacattgatataggaaatcttaaagtttctgaaaatttagtaaaatttgtaaacgaagaattattagtagagacaaatataaacccagaaagattctggtctggctttgataggtcagtgcatgaacttgcaccaaaaaataaagaattactggaaaaaagaaaagatttacaaaaaaaaattgatgattggcacattcaaaataaaggcaaagaaattaacattaatgaatataaaaaatttcttaaaaaaataggctatttagttgatactggatcaaattttaaaattgaaacgaataatgtagatgatgaaataacaaaaattgctggaccacaattagtagttccaataatgaacgcaagatatgcattaaatgcagctaacgcccgttgggtgagtttatatgacagtttgtatgggacagatataatagagtccgaagaaggtggaagtgaaagatacgatccaaatcgtggtcaagaggtaatcaaatatgtaagagaatttttagataaatatattccaattgatgggactagttggaagaacattactggtttaaaaatagtaaatggagatttgataatcttaaaaggggactatgagtacaaattaaaagatacacataaatttataggtcatagaggtgatgtaaata

SEQ ID NO: 237388 - DNA, 358 bp, Unknown
  Bacterial polypeptide expressing nucleotide sequence isolated from the Sargasso Sea
gatgacggatcgtactgcgagcggtagccttgacgttgctaccgtgctttatcggtttattactgatgaggcggtcccaggcactggcattgatgctcgtgaattttggactgcgatagacgccctaattcatgagcttgctcccattaatcgcgaacttgttgctaaacgagacgtgttgcaagaaaaaatagattcctaccataagtctcgcaacggtcagccccacaatgctactgaatataaagcgttcctcgaagaaatcggttatctgttgcctgaaccacagaacgtatctgtaacaacagaaaatgttgaccccgaagttgcaaccacggcaggacctcagctggtcgtt

SEQ ID NO: 237389 - DNA, 490 bp, Unknown
  Bacterial polypeptide expressing nucleotide sequence isolated from the Sargasso Sea
tatgcaagaaaaatacataaaaattaataatttaaaagtatcagaaaaactatcaaaatttgtaaatggtgaattactgaaaaatacaaatgtatctcctgaaaatttttggttaggttttgaaaaaactcttgatgagcttgcaccaaaaaacagagaattaattaagtttagagaagatttacaaaagaaaatagataattggcatatcaaaaataaaggtaaagaattcaatttagtggagtataaaaaatttttgttagaaattggttatttaaaaaacgaagggcctgattttaaaatagaaactaaaaatgttgatgaagaaattgcgaatatagctggacctcaattagtagtacccatcatgaatgcaaggtatgcgttaaatgctgcgaatgcaagatggatgagtttatatgatagtctttatggaacggatgtaattgaagagtctgaagacagcgtatctgaaaggtatgacccttta

SEQ ID NO: 237390 - DNA, 514 bp, Unknown
  Bacterial polypeptide expressing nucleotide sequence isolated from the Sargasso Sea
gatgaaaaatgaatatcttaaaattaataatcttgaagtttcaattgaattatcaaaatttattaatgaggaattattaacaggtaccaacatttctccagaaaagttttggttaggattagataaatcagttcatgaattggcaccaaagaatgaggaattattaaaaaaaagaaatgatttacaaaagaaaattaatgaatggcatattaaaaataaaggtaaagatataaatattgatcaatataaaaaatttttaaaagaaattgggtatttattagatgaaggatcaaactttaaaattaaaaccgaaaatgtggatgatgaaataacaagtattgctggaccacaactagtagtacccatcatgaatgcaagatatgctctcaacgctgcaaatgcacgttgggtaagtttatatgatagtttatatggaacagacataattgagtctgaggaaggaggaagtgaaagatatgatccaaatcgagggcaagaagtaataaatatgtaa

SEQ ID NO: 237391 - DNA, 781 bp, Unknown
  Bacterial polypeptide expressing nucleotide sequence isolated from the Sargasso Sea
tatgggtgaaaaatatacaaatgttcaaaatttatcagtctcagaaactctatacaaattcattaatgatgaggcaattccaggaaccaatataaataaattaaaattttggaaaggttttgataaagctttacataaacttacaagtagaaataaagaattaatcaaaatccgagaaaaaatacaaattgatataaacagctggcatttaaacaatagagataaaactttttatcagaaaaattactataattttttaaaaaaaataggctatttaaaaaaagttggtaacaaattcaaaattaaaacaaaaaatattgatgatgaaatatctaaaatagcaggacctcaattagttgttcctgttatgaatgctagatatgtgcttaatgctgcaaatgctagatggatgagtttatatgatagcttgtacggaacagatgtaattgaatcggaagattctgccagtgaaagatatgatcctgaaagaggtttggaagttagaaactatgcaaaaaaatttttagataataattttactcttgtaaatgatagttggaaaaatcttactcaaataacaatagatgataagaatttaaatttaatatgtggaaaaaatatttcaaaactaaaagaaaaaacaaaatttattggatatagaggagataaaaaaaaaccaactacagtgattcttaaaaataataatctgcatgtagaaattataattaatccaaatgcttttagtgctaaagctgatctagcaggtatatcagacattatt

SEQ ID NO: 237392 - DNA, 359 bp, Unknown
  Bacterial polypeptide expressing nucleotide sequence isolated from the Sargasso Sea
agatggattgatcaaggtgtaggttgttctaaagtaccatacataaacaatgttgggttgatggaagacagggcaactttaagaatttcttctcaacatattgctaactgggtacatcacggagttacaacaaagttacaagtcatacaaataatgaaagaaatggcaaagattgttgatagacaaaatgaaaatgatctaaattacgaaaaaatgagtgctgattatgacaggtccatagcatttcaaactgcatgcgaacttatttttaagggaaaagatcaaccttcaagatacacagagccactattacatttaaatcgattaaaaaaaaaaattaacttgaattatagtttaat

SEQ ID NO: 237393 - DNA, 475 bp, Unknown
  Bacterial polypeptide expressing nucleotide sequence isolated from the Sargasso Sea
atgagagagcaatacatcaaaatccacaacttatctgtagcaaaagaactagctgattttgtcaaaaatgagcttttactagatactaatgttggtcctgaagagttctggaaaggttttgacaaagaggtgcatgaattagcgcctaaaaataaaaaattactcgaaatcagagaaacattacaacaagaaatagatctgtggcataaaaaaaatagagatcacgagattgactataataaatataaaaattttttggaagaaataggttatttaaaaaaagaaggtaaagattttaaaataacaactaaaaatttagatgaagaaatatctaatatagcaggaccacaattagttgttccaataatgaactcaagatatagcttgaatgctgctaatgcaagatgggtaagcttatatgacagtctttacggatcaaatataatagagtctgaagaaagtggaagtgaaaaat

SEQ ID NO: 237394 - DNA, 380 bp, Unknown
  Bacterial polypeptide expressing nucleotide sequence isolated from the Sargasso Sea
tatgaatataatagataaatatgggttgaagataagtttaactttgtttgatttcattaataacgaggttttacctaatactggtattgatatagagaacttttggagtaaattttcagatactgctcatgaacttgcacctataaataaagctttaattaggaaaagagaggatattcaaaaaaaaattgatgattggcacaaatcaaatcatggcgaagaatttgataaattaaaatatatcaaatttttaaaatctattgggtatttagttgatgtaggtgatgactttaagatagaaacagaaggagttgataaagaaatatcctcagttgctggacctcagcttgttgtgccagttgataatgctcgatatgcac

SEQ ID NO: 237395 - DNA, 255 bp, Unknown
  Bacterial polypeptide expressing nucleotide sequence isolated from the Sargasso Sea
tatctagtcagcatatagctaattggctccatcataatttagtcaccaatgatgaggttgtatctgcaatgaaaaaaatggcacttgttgtagatgagcaaaatgctatagacccattataccaacctatggggccttcatactctggattagcatttaaagcagcatgtaatcttgctattaaaggcagaatccagccaagcggttacacagagccaattcttcaccaaactagattgaaatataagtcatagc

SEQ ID NO: 237396 - DNA, 703 bp, Unknown
  Bacterial polypeptide expressing nucleotide sequence isolated from the Sargasso Sea
tatgcaagaaaaatacacaaatattaaaagtttgaaagtatcaagcgatcttgttcaatttgttaaggatgagctgctaaaagaaacagaaatatcaccagaaaatttttgggaaggtttcgaaaacactgtcaatgaattagcacctaaaaataaagaattaattaaaattagaaaagatttacaaaataaaattgacgattggcatatcagaaataagggattagaatttaatattaaagactataaaaaatttttaactgaaataggttatttaaaaaatgaaggtcctgattttaaaattgaaacagaaaatgttgatgatgagataacaaatattgcaggaccacaactggtagtgccagttatgaacgcaagatatgctcttaatgctgcaaatgctagatggatgagtttgtatgacagtctttatggaacagatattatagaacaatcagaagatagtgtgtccgaaagatatgaccctttaagaggtgaaatggtaataaaatatggacgtgatttcttagataaatattttcctctagctggtttaagctggacaaaaataacaagctttgcgattaaatttgggaaatttaaggctttaaaaggtgcagatatttttgatttagttgatgaagataaatttataggacacagaggtgaaaatgataatcctacagcaattattttaaaaaat

SEQ ID NO: 237397 - DNA, 637 bp, Unknown
  Bacterial polypeptide expressing nucleotide sequence isolated from the Sargasso Sea
actcgaaatcagagaaacattacaacaagaaatagatctgtggcataaaaaaaatagagatcacgagattgactataataaatataaaaattttttggaagaaataggttatttaaaaaaagaaggtgaagattttaaaattgcaactaaaaatttagatgaagaaatatctaatatagcaggaccacaattagttgttccaataatgaactctagatataccttgaatgctgcaaatgcaagatgggtaagcttatatgacagtctttatggatcaaatataatagagtctgaagaaagtggaagtgaaaaatatgatcctttaagaggacaagaagtaattaaatacactagaaattttctgaacaaatattttccaataaatgatcttgactggaaagatattactggtttagcagtaaataataaaaaactcataatatataaggaaaataaagaatataatttatcagatttagagaagtttattggtcatagaggggatgcagacaaaccaaatgctataatcttaaaaaataataatcttcatcttgaaataattattaatcctagagcatttagtgctgcaagagatgctgctggtataagcgatattatagttgagtctgctgtatca

SEQ ID NO: 237398 - DNA, 764 bp, Unknown
  Bacterial polypeptide expressing nucleotide sequence isolated from the Sargasso Sea
tatgcaagaaaaatacattaacattaataacttaaaagtatctgaaaaacttttaaagtttgtaaatgatgagttattaaaaaatacaaatatatctcctgaaaatttttggttgggtcttgaaaaaactctagatgagcttgcaccaaaaaacaaagaattaattaaaattagagaagatttacaaaagaaaatagatgattggcatatcaaaaacaaaggtaaagaatttaatttagtagagtataaaaaatttttattggaaattggttacttaaaaaacgaggggcctgattttaaaatagaaactaaaaatgttgatgaagaaattgcaaatatagctggacctcagttagtagtgccagtcatgaatgcaagatatgctttaaatgctgcaaatgcgagatggatgagtttatatgatagtctttatggtacggatataattgagcagtctgaggatagcgtatctgaaagatatgaccctctaagaggtgaaatggttatcaaatatggtagagaatttttagataagtactttccactagctggattaagttggagtcaaattacaagttttgctgtaaaacagggcaaattgaaagttttaaaaggtgctgatatttttgatttagaagatgaaagtaaatttattggacacagaggtgaaggcgatagtccatctgcaattattttaaaaaataatagtttacatgttgaagttctaaaaaaatctagagcttttgctgctcagcaagaccatg

SEQ ID NO: 237399 - DNA, 601 bp, Unknown
  Bacterial polypeptide expressing nucleotide sequence isolated from the Sargasso Sea
atgcaggaaaaatatataaatataaatactttaaaagtatctgaaaaactttctcaatttattagcgacgagctattaaaagacacagatctgtctgttgataatttttggtcaggttttgagaaaacagttaatgaattagcgcctaaaaataaagaattaataaagtttagagaagaattacaaaaacaaatagataattggcatataaaaaataagggaaatgaatttaatttgtcagaatataaaaaatttctaacagaaattggttatttaaaagaagagggtgatgactttgaaataacaactcaaaatgttgatgaggaaataactaatatcgctggacctcaacttgtggtaccggtaatgaatgcaagatacgcattaaatgcagctaatgcaagatggatgagcctgtatgatagtctttatggaacagatgtaattgaacaatcagaagatagtgtatctgaaagatacgacccattaagaggtgaaatggtaattaagtatggaagagactttttagataaatattttccattagcaggattgagttggcaaaaaattactagttttgcagttaagtatgaaaattaaa

SEQ ID NO: 237400 - DNA, 478 bp, Unknown
  Bacterial polypeptide expressing nucleotide sequence isolated from the Sargasso Sea
tatgaaacatataaaacaaggcaatttatctgttgagaaaatattattagaatttgttaataatgaacttcttcctggaacaaatattgaccaggtaaaattctggcttggatttgataaaactgtacatgaattagctccgataaataaaaaactcctttctactagagatgaaattcaaaaaaaaatagataagtggcatattgataaaaaagataaagaatttgatccaaaaatttatgaaaattttttaagagaaattggatatttagttaaagagggagaaaatttttcaatagaaacaaaaaatgtagattctgaaatttgtaatattgctggtccacaacttgttgtgccggttatgaatgcaagatattctcttaatgccgctaattcaagatgggggagtttgtacaatgccttatatggaacagacgtaatttcagaatcagacggcgcgacaagaggagaaaatata

SEQ ID NO: 237401 - DNA, 460 bp, Unknown
  Bacterial polypeptide expressing nucleotide sequence isolated from the Sargasso Sea
atgcaagaaaaatacataaatattaaaagtttgaaagtatcgagcgatcttgttcaatttgttaaggatgagttacttaaggaaacagatatatcaccagaaaatttttgggcaggtttcgaaaaaactgtaaatgaattagcacctaaaaatagagaattaataagcgttagaaaagatttacaaaataaaattgacgattggcatatcaaaaacaaaggatcagaatttgattttgaagagtataaaaaatttttaattgaaatcggctatttaaaaaatgaaggacctgattttcaaattgaaacaaaagatgttgatgaagagatagcaaagattgcggggcctcaactggtagtaccagttatgaacgcaagatatgctctgaatgctgcaaatgctagatggatgagtttatatgatagtctatacggaactgatattattgaacaatcagaag

SEQ ID NO: 237402 - DNA, 112 bp, Unknown
  Bacterial polypeptide expressing nucleotide sequence isolated from the Sargasso Sea
cgttggaaataattttacaattaaaactcaaaatgttgatcctgagttggctcttaaggcggggcctcagttagttgttcctgttacaaacgcaagatatgccctgaatgct

SEQ ID NO: 237403 - DNA, 808 bp, Unknown
  Bacterial polypeptide expressing nucleotide sequence isolated from the Sargasso Sea
atgaataacaaataccaaaacgtaaacaaccttaaagtttctaatgaattattatcatttgtaaatgatgagttgttaaaagaaacttcaatttccccaaaaaaattttggcaaggatttgataatatggtccatgaattatcaccacaaaacaaaaaattaattgaaaaaagagaaattttacaaaaaaaaatagatgattggcatattaaaaatagaggaactgaaattaaagttgaagaatataaaaaatttttaaaagagattgactatttaaaggatgaaggatctgacttcaaaattgaaacaaataatgtagatgatgaaattgctcaaatagctggaccgcaattagtagtgccaataatgaatgctaggtacaccctcaatgccgccaatgcaaggtgggtaagcttatatgatagtctttatggaacaaatataattgagtctgaagaaggtggaagtgaaagatatgatccgaatagaggacaagaagtaataaaatatgtaagagaattttttgataaatgtattccaattgaagggacaagctggaaaaatattgcagctttaaaaatagtcaacaaagaacttgttattttaaaagatgatcatgaatataaactaaaggataaaagtaaatttataggccacagaggtgatgcaaataaaccagaagcagtaataatcaaaaataataatcttcattttgaaataataattaatcctaaagcatttagtgctgctcatgatattgcaggaataagtgatgttattgctgagtcagctgtttcaacaatttgtg

SEQ ID NO: 237404 - DNA, 820 bp, Unknown
  Bacterial polypeptide expressing nucleotide sequence isolated from the Sargasso Sea
tatgagtgaaaagtatataaaaattgaaaacctatctgtttctgaagttttatacaattttatcaataaagatttaattccaggaacaaaaattaaagaaaaaaaattttggagtggttttagctctgttgttcataaattaaattcaaaaaataaagaacttttaaaaataagagaaaaattacaactagatatagatcgatggcatcatgatcacaaaaatgaaaaatttaaacaaggagattatgaaaaatttttaagaaaaattggttatatagtaaatgaaggttcaaactttaaaatcgaaacaaaaaatattgataaagaaatatctaaaattgctggtccacaattagttgttccaataatgaatgcaagatatgcattaaatgctgctaacgctagatggattagtttgtatgactcactatatggtacagatgttatacccgagacaaaaggagcggttcgcggaaagacatacaatccaataagaggagcaaaggtgatagagtatgctcgagaatttttggatcaatatatccccttaaaagaaaaaagctggaaagaccttaagaatgttccagaaattaataataacaaattaaatttaaaacttaaaaacccagaacaatttgttggatactctaaaagatcaaattttctttcttcacttttatttgtaaataacaaccttcacattgatattttatttgatcaagaaggtttgttagaaattaataatcctgatggtaaccaagatataatttcaatacatgacgttattttagaatctgcaatttcaactatatgtgatcac

SEQ ID NO: 237405 - DNA, 799 bp, Unknown
  Bacterial polypeptide expressing nucleotide sequence isolated from the Sargasso Sea
atgaatatgattcaaaagaaaaatattaaaattaatgaaaagctctataattttattaataatgaagcactaaagggtattgagattgatgaggagatcttttggaatggattttcagatattgtagatacttactatccaaaaaatgtcgctcttttagaaaagcgaaagaatttacaaaatcaaatcaacaattggcataaagaaaatagatctagagatactgatattgatgaatacaaaaattttttaaaagaaataaattatattgttgatgaaggacctgatttcaaaattactacatcaaatgttgatgaagaaatttcaacaatttgtggtccacaactagtagtacctatcacaaatgcaagatttgctattaatgcagtaaatgcaagatggggcagtctatatgatgctctttatggaacagatgctttgggagaagttccacaaggaaatagttatgatcctgaaagaggaaataaggttgtgggatttgctaaatcacatttagataaatttgctccactagaaaatataaaatggagtgaaattaataaaattgaattgcaagataataaaattattttaggaagtataaaggaaaattcagtaaactttgtaaataaaaatcagcttataggttggaggtcttctaaagacgataaactactagaattgattttattaaaaaataaccttcattgcagaatattaattaatgaaaatgatgcaattggaaaaaatgatcctgcaaatatctcagatatattgttagagtcatgcagtatctagt

SEQ ID NO: 237406 - DNA, 587 bp, Unknown
  Bacterial polypeptide expressing nucleotide sequence isolated from the Sargasso Sea
tatgagagaacaattcattaaaatccacaacttatctgttgcgaaagatcttgcagaatttgtcaaaaatgagcttttactggatacaaatcttcatactgatgaattttggaaagggttcgatagagtagtgcatgagttagcaccgagaaataaaaaattactcgaaattagagaaacattgcaacaggaaatagatctatggcataaaaaaaatagaggccaaaaatttgaatacaatgactataaaagttttttggaagatataggttacttaaaaaaagagggtgaagattttaagattacaactaaaaatttagacaaagaaatatcttatattgcaggaccacaattggttgttccagtaatgaactctaggtatgccttaaacgcagctaatgctaggtgggtaagcttatatgatagtctttatggatccaatatcatagaaactgaagaaagtggaagtgaaaaatatgatcctttaagaggacaagaagtaattaaatacactagaaactttttgaataaatattttccaatcaatgatctagactggaaagatattacaggattagcagttagta

SEQ ID NO: 237407 - DNA, 478 bp, Unknown
  Bacterial polypeptide expressing nucleotide sequence isolated from the Sargasso Sea
tatgagcgaaaaatatataaaaattgaaaacctatctgtttctgaagttttatacaattttatcaataaagatttaattccaggaacaaaaattaaagaaaaaaaattttggagtggttttagctctgttgttcataaattaaattcaaaaaataaagaacttttaaaaataagagaaaaattgcaactagatatagatcgatggcatcatgatcacaaaaatgaaaaatttaaacaagtagattatgaaaaatttttaagaaaaattgggtatatagtaaatgaaggttcaaactttaaaatcgaaacaaaaaatattgatgaagaaatatctaaaattgctggtccacaattagttgttccaataatgaatgctagatatgcattaaatgctgctaacgctagatggattagtttatatgactcattatatggtacggatgttataccccgagacaaaaggagcggttcgtggaaa

SEQ ID NO: 237408 - DNA, 712 bp, Unknown
  Bacterial polypeptide expressing nucleotide sequence isolated from the Sargasso Sea
gaaatacgagaatcagagtggaaggtgagaccaataccaaatgatcttcttgacaggagagtagagattacaggcccagtagatagaaagatgattatcaacgctttaaattcggatgtgaaggtatttatggcagattttgaagactcactaagtcccacttgggaaaacgtagctaatggacaaaaaaatctcttcgatgctgtaaggcgaacaatctctttcgaaaatcctgataatggcaaaaagtataaattgaatgatgacattgcaacattaatgtgtagggtcagaggaattcatttaaaagagaaaggcttgacaatcgatggctctcagccgtatggatgcttggtcgattttggatattatctttttcataatgctaaagaattgatgaacaaaaatactggaccttacttttacatcccaaaacttcaatcgcatttagaggccagactttggaatgatatcatttcttttgctgaggaaaatttaaatattccaaaggggactgtgagggtaacatgtttaattgaaacgcttccagcagtttttgaaatggaagaaattttgtatgaacttaaagatcacattgttggacttaactgcggaaggtgggattatatttttagttacataaaaaccttccaaaagcattcggataaattattacctgacagatatcaggtgggaatgaatcaaccctttt

SEQ ID NO: 237409 - DNA, 790 bp, Unknown
  Bacterial polypeptide expressing nucleotide sequence isolated from the Sargasso Sea
tatgagagagcaatacatcaaaatccacaacttatctgtagcaaaagaactagctgattttgtcaaaaatgagcttttactggatacaaatgttggccctgatgagttctggaaaggctttgacaaagtggtgcatgaattagcgcctaaaaataaaaaattactcgaaattagagaaacattacaacaagaaatagatctgtggcataaaaaaaatagagaccacgagattgactataataaatataaaaattttttggaagaaataggttatttaaaaaaagaaggtgaagattttaaaatagcaactaaaaatttagatgaagaaatatctaatatagcaggaccacaattagttgttccaattatgaactctagatatagcttgaatgctgcgaatgcaaggtgggtaagcttgtatgacagtctttatggatcaaatataatagagtctgaagaaagtgggagtgaaaaatatgatcctttaagagggcaagaagtaattaaatacactagaaactttttgaacaaatattttccaataaatgatcttgactggaaagatattactggtttagcagtaaataataaaaaactttcaatttataaggaaaataaagaatataatttatcagatttagagaagtttattggtcatagaggggatgcagccaaaccaaatgctataatcttaaaaaataataatcttcatcttgaaataattattaatcctagagcatttagtgctgcaagagatgcggctggtataagcgatattataattgagtct

SEQ ID NO: 237410 - DNA, 769 bp, Unknown
  Bacterial polypeptide expressing nucleotide sequence isolated from the Sargasso Sea
atgtcaggtagaatagaaaaaaatggtctaagtatagatgaaaaattagtaacttttattgagtcagaagctattccaggaactggagtggatattcaaaaattttggcagggttttgcagaaattgtagaaaagttaggtcctaaaaataaaacccttttacaaaaaagagaggatatacaatccaagattgatgaataccatatcacacatcgaggacaagacattgaaatagaagactataaggcatttttatatgatattggatatttagttccagaaggagaaaattttaaaattgatacgagtaatgttgatgaagaaattgcagatttatgtggacctcaattagtagtaccaattatgaatgcacgatatgcattaaatgctgctaatgcaaggtggggaagtctttacgatgctttttatggaacagacgctatgggtgatttacctccaaaaggcgggtatagcaatgatagaggagataaagtaatttctaatgctaaagcgcatttagataaagtagcgcctttagattcaaataattggtatgaaatttctgaaattaatgtggttgaaggacaattaatattatcagtaaatgaaaaagaggtttctttattaaataaaaaccaatttgttggatatattcaaaataataattctatcaatgaagtaattttattaaaaaatggtcttcatattcgtattttaatcgaccctgatcacgtaatggaaaaaatgataaagcaaaatatatcagaat

SEQ ID NO: 237411 - DNA, 496 bp, Unknown
  Bacterial polypeptide expressing nucleotide sequence isolated from the Sargasso Sea
atgcaagaaaaatatataaatataaatactttaaaagtatctgaaaaactttctcaatttattagcgacgagctattaaaagaaacagatctatctgttgataatttttggtcagggttcgagaaaacaataaatgaattagcacctaaaaataaagaattaataaaatttagagaagacttacaaaaacaaatagacaattggcatataaaaaataagggaaatgaatttaatttgtcagaatataaaaaatttctaacagaaattggttatttgaaagaagaaggtgatgattttgaaatttcaactcaaaatgttgatgaggaaataacaagtattgctggacctcaacttgtagtaccagtaatgaatgctagatacgcattaaatgctgctaatgctagatggatgagcttatacgatagtctgtatggaacagatgtaattgaacaatcagaagatagcgtatctgaaagatacgacccattaagaggag

SEQ ID NO: 237412 - DNA, 777 bp, Unknown
  Bacterial polypeptide expressing nucleotide sequence isolated from the Sargasso Sea
catgacatcaaaatatcattctgttaacagtcttaaggtatcagatgaactattgcattttgtaaataatgagttgtttaatggtactgatatttccccagaaaaattctggaaagattttgaaaaagcagttcatgaactgactcccaaaaataaagagctaattaattttagagaaacacttcaaaaaaaaattgataaatggcatgttgataataaaggaaaagatattcaaatagaagtatataaaaattttttaaaagaaattggatatttaaaagatgaaggtcctgattttaaaattgaaacaagtgatattgatgaagagatcgcctcaatagctggacctcaattagttgttccgattatgaatgctcgttatgctttgaacgctgctaacgcaagatggatgagtttatatgatagtttgtatggaacagatgtgattgaagagtctgaggatagcacttcagaaagatacgatccagaacgaggagagattgtaattaagtatggtagagaatttttagataaatattttactttaaaagattttagctggaaaaaaataactggatttgcaattcaagataaagatttgaaaattttaaaaggtattgatgtgacatctttgaaagatgcaaataaattcattggtcatcgaggtgaagcagacaacccatcagcaataatattaaaaaataataatcttcatgttgaaatacttaaaaatccgagagcttttagtgctcaacaggatcatgcaggcataagtga

SEQ ID NO: 237413 - DNA, 505 bp, Unknown
  Bacterial polypeptide expressing nucleotide sequence isolated from the Sargasso Sea
tcatcaaatagatatctttaaagtgcaccaaaaaattaaaaataggaaaagagctaaactttctgaattattaacaattcctattttaaggaaacctaattggaccaacgaagaaataaataatgaattatcaaattgtgcacaaggaattttaggatatgtggtgcgttggattgaccagggcattggttgtagttcagttcctgatattaataatattccacttatggaagatagagctacttgtagaattagctcacaattaatttcaaactggttacatcacggaatttgctcgagaaaacaagttttagaaataatgaaaaaaatggcaaaagtagttgatacacaaaataaagaagataaaaattatctaaaaatgtctcctgattttgaaaaatctattgcttttaaatcagcttgtgaattagtttttagcaaagactcgccaaatggttatacagaaccaattttacatttgaataggattataaaaaaaaactaa

SEQ ID NO: 237414 - DNA, 757 bp, Unknown
  Bacterial polypeptide expressing nucleotide sequence isolated from the Sargasso Sea
atgagagagcaatatatcaaaattcacaacttatctgtagcaaaagaaatagctgattttgtcaaaaatgagcttttactaaatactaatgttggtcctgaagagttctggaaaggttttgacaaagtggtgcatgaattagcgcctaaaaataaaaaattactcgaaatcagagagacattacaacaagaaatagatctgtggcataaaaaaaatagagaccacgagattgactataataaatataaaaattttttggaagaaataggttatttaaaaaaagaaggtgatgattttaaaataacaactaaaaatttagatgaagaaatatctaatatagcaggaccacaattagttgttccaataatgaactctagatatagcttgaatgctgctaatgcaagatgggtaagcttatatgacagtctttacggatcaaatataatagagtctgaggaaagtggaagtgaaaaatatgatcctttaagaggacaagaagtaattaaatatacaagaaactttttgaacaaatattttccaataaatgatcttgactggaaagatattactggtttagcagtaaataataaaaaactctcaatttataaagaaaataaagaatataatttatcagatttagagaagtttattggtcatagaggggatgcggccaaaccaaatgctataatcttaaaaaataataatcttcatcttgaaataattattaatcctagagcatttagtgctgcaagagatc

SEQ ID NO: 237415 - DNA, 784 bp, Unknown
  Bacterial polypeptide expressing nucleotide sequence isolated from the Sargasso Sea
tatgagagagcaatacatcaaaatctacagcttatctgtagcaaaagaactagctgattttgtcaaaaatgagcttttactggatactaaagttggtcctgacgagttctggaaaggttttgacaaagtggtgcatgaattagcgcctaaaaataaaaaattactcgaaatcagagagacattacaacaagaaatagatctgtggcataaaaaaaatagagaccacgagattgactataataaatataaaaattttttggaggaaataggttatttaaaaaaagaaggtgaagattttaaaataacaactaaaaatttagatgaagaaatatctaatatagcaggaccacaattggttgttccaataatgaactccagatatagtttgaatgctgctaatgcaagatgggtaagcttatatgacagtctttatggatcaaatataatagagtctgaagaaagtggaagtgaaaaatatgatcctttaagaggacaagaagtgatcaaatacactagaaactttttgaacaaatattttccaataaatgatcttgactggaaagatattactggtttagcggttaataataaaaaactcacaatatataaggaaaataaagaacataatttatcagatttagagaaatttgttggtcatagaggggatgcggccaaaccaaatgctataatcttaaaaaataataatcttcatcttgaaataattattaatcctagagcatttagtgctgcgagagatgctgctggtataagcgatattataatt

SEQ ID NO: 237416 - DNA, 451 bp, Unknown
  Bacterial polypeptide expressing nucleotide sequence isolated from the Sargasso Sea
atgcaagaaaaatacattaaaattaataatcttcaagtatctgaaaagctatcaaactttataaatgatgaattattaaagaatacaaatgtatcatcaaaagatttttggttaggtctagaaaaaacccttgatgagctagcaccaaaaaataaagaattaattaaattaagggaagatttacagaagaaaatagataattggcatatcaagaataaaagtaaagaatttaatttagaagattacaaaaaatttttattagaaattggttatttaaaaaatgaaggacctgattttaaaatagaaactgaaaatgttgatgaagaaattgcaagtatagctggacctcaactggttgtacctgttatgaatgctaggtatgcattaaatgctgcaaatgcaagatggatgagtttatatgatagtctttatggaacagaatgtaattgaa

SEQ ID NO: 237417 - DNA, 434 bp, Unknown
  Bacterial polypeptide expressing nucleotide sequence isolated from the Sargasso Sea
tatgcaagaaaaatacgtaaatattaaaagtttaaaagtatcgagtgatcttgttcagtttgttaaggatgagttacttaaagaaacagagatatcaccagaaaatttttgggcaggttttgaaaaaactgtaaatgaattagcacctaaaaatagagaattaataagcattagaaaagatttacagagcaaaattgatgattggcatatcaaaaataagggatcagaattcaattttgaggaatataaaaaatttttaattgaaataggctatttaaaaaatgaaggacctgattttcaaattgaaacaaaagatgttgatgacgagatagcaaaaattgcaggacctcaactggtagttccagttatgaacgcaagatatgctctgaatgctgcaaatgctagatggatgagtttatatgatagtctatatg

SEQ ID NO: 237418 - DNA, 667 bp, Unknown
  Bacterial polypeptide expressing nucleotide sequence isolated from the Sargasso Sea
atgcaagaaaaatatgtaaaaattaataagcttcaagtatctgagaaactatcaaactttgtaaatgatgaattattaaaaaatacaaatgtatctcctgaaaatttttggttaggtctcgaaaaaactcttgatgagctagcaccaaaaaacagagaattaattaagtttagagaagatttacaaaacaaaatagataattggcatatcaaaaacaaaggtaaagaatttaatttagttgagtataaaaaatttttagtggaaattggctatttaagaaatgaagggcctgattttaaaatagatactaaaaatgttgatgaagaaattgcaaatatagctggtcctcagttggtagtgcccatcatgaatgcaaggtatgcgttaaatgctgcaaatgcaagatggatgagtttatatgacagtctttatgggacagatgtaattgaacagtctgaagatagcgtatctgagagatacgaccctttaaggggtgaaatggttataaaatatggtagaaattttttagataagtacttcccgttagctggattgagttggaataaaataacaagttttgctgtaaaatatggcagattaaaaattttaaaaggcgctgatatttttgatctggaagatgaggataaatttgtggacacagagggaa

SEQ ID NO: 237419 - DNA, 657 bp, Unknown
  Bacterial polypeptide expressing nucleotide sequence isolated from the Sargasso Sea
tatgagtaattcatttatcaaaataaatacattgtccgtttctaagaatttagctgattttgtaaataatgaacttcttccaggattagatgttaacgaaaaagatttctgggatggatttgataaaagtattaatgaactttcaccgatcaataaaaagctattagaaactcgggaaactcttcaatccgaaattgatttatggttaaaaaaaaataaaaatggagagtttaatcatcaagagtataagaattttttaaaagaaattggatatttaaaggaagaaggaaacgattttaaaatagatacgaaaaagcttgatattgagatttccagtattgcaggtcctcaacttgtggtaccaataatgaattctagatatacattaaatgctgctaatgcaagatgggtaagtctttatgatagtttatatggtacagatttaattgagtctgaagaaacaggcagtcaaaagtatgaccctctcagaggacaagaggtaataaaatttgctcgtaattttctaaatgatcatttccctatcgatgaaattcattggaaagatataaatggatttaaaatagagggaagtaacttaaaaatattaaaagataacaaagagtttggattagttgataaaagtaaatttattggata

SEQ ID NO: 237420 - DNA, 797 bp, Unknown
  Bacterial polypeptide expressing nucleotide sequence isolated from the Sargasso Sea
catgtcatctaaatatcaaaaagtaaataatctcaaagtttctgaggacttgttatcttttgtaaataatgaattattaaaaggtacaaagatttcacctgaaaaattttggtcaggatttgatatagtagttcatgaactttcacctataaataaaaagctaatcgaaattagagaagatttacaaaaaaaaattgataaatggcatcttgataataagggaagagaaaccaatattgaagattataaaaaatttctaaaagagataggctatttaaaagatgaaggttcagatttcaaaattgaaactaacaatgttgatgatgaaatatctcaaattgctggtccacaactagtagtaccaataatgaatgcaagatatacattgaatgctgctaatgcaagatgggtaagtttatatgatagtttatatggaacagatataattgagtcagaggaaggtggaagtgaaaggtatgacccaaatcgagggcaggaagtaattaaatatgttagagagttctttgataaatttgttccaatagaaggcacaagctggaaaaatataactaagttaaaagtagcgaataaagatttgcttattttaaaagatgattatgaatataagcttaaagataaggacaaatttgtaggtcatagaggtgatgctaataatcctacagcaattataattaaaaataacaatttacattttgagattatcattaatccaaaagcatttagtgcagcccatgatattgcaggaataagtgatgtgatttcggaatcagctattt

SEQ ID NO: 237421 - DNA, 836 bp, Unknown
  Bacterial polypeptide expressing nucleotide sequence isolated from the Sargasso Sea
tgctgaagaagagttgaatttaccaataagtactataagagcaactgttcttcttgagacgatttctgcatcatttgaaatggatgaaatcttatatagtcttaaaaaccactctttaggcatgaatgctggcagatgggattatatttttagtgctataaagaggtacagagaagttgaaggcgtgctatttccagaccgttctcagataactatgaccgttccatttatgaagtcttacactgagttactagttcaaagtcttcataaacgtggtgcacatgcaattggaggtatgtcagcatttattcctgatagaaaaagtcctgatatcaccgaagaagcttttacaaaagtaaaaaatgacaaaattcgagaggctgaaatggggtttgacggttcttgggttgcacatccagatcttgtaaaaatctgcaaagatgttttttcagaacatcttggtgaagctgataaccaaattagttatgttcctgattacaaaatcacagatgatatgttgcaagactttaatatcaaagatggatcaattactgaagagggtattcgtacaaacgtaaaggttggaattttatatattcaatcatggctactcggtcaaggagctgctgctttatttaatttaatggaagatgctgcaactgctgaaatctcacgttcacaattatggcaatgggtacacaacaatgccttcaccgatagtggcattgaaataaatattgaattcataaaaaaattaattggtgaggaattaaaagaaattaagaatttaactccaacttataaaatgttggatgaagccaggtactctttttgaa

SEQ ID NO: 237422 - DNA, 403 bp, Unknown
  Bacterial polypeptide expressing nucleotide sequence isolated from the Sargasso Sea
catgacctatatagtaaaaccgaaaaatcatcatcctaatttagaaagaaacgaattaggacttacaagaagagattatgaaggagctatatctactctttgcgctggttgcggtcatgattcaattagtgcagcaattatagacgcctgcttccaactaagcataccttcctaccaggtagctaagctctcagggataggttgttcttctaaagctcctgcttatttcctaaatcaatctcatggctttaattcggtccatggaagaatgccttctatagcaacaggtgcaaatgttgctaatcatgaacttctatatttaggtgtatctggagatggtgatagtgcttcaattggaataggtcaatttatccatgcagcaagaagacaaccaaatatgatt

SEQ ID NO: 237423 - DNA, 814 bp, Unknown
  Bacterial polypeptide expressing nucleotide sequence isolated from the Sargasso Sea
attaaaaataaaggaaaagaatttgatattcataaatataaaaaatttttaaatgaaattggttatttaatagataatggacctgattttaaaattgatactaaaaatattgataatgaaatatctaaaattgctggaccacaattagtagttccaataatgaatgcgagatatactttaaatgcagctaatgctagatgggttagtttatatgacagtttatatggaacagacataattgaatcagaagagggtggaagtgaaagatatgatcctaatcgtggacaagaagttataaaatatgtaagagaattttttgataaaattattccaattgatggaactagttggaaaaatatagccagtttaaaggtagtcaatagtcaattaataatttctaaagataataatgaatataagctaatagacccaaataagtttataggtcatagaggtgatgcaaataaacccgaggctattattctgcaaaacaataaacttcattttgaaattataattaatcctagagcttttagtgcagctcatgacattgctgggataagtgatataattgctgagtctgcaatttcaactatttgtgataacgaggatagcgtagcagctgttgactctgaggataaagttgcatgctacaaaaattggctaggtttaatgaaaggtaatctaaaagttcaatttgaaaaaaaaggtaaaattctagagagaaaattaaatcctgacagaagctatatatcaaaagatggtgttggattaaaattacatggaagaagtttattactcataaggaatgttg

SEQ ID NO: 237424 - DNA, 421 bp, Unknown
  Bacterial polypeptide expressing nucleotide sequence isolated from the Sargasso Sea
tttaaaaaatagagtctgcttcattaatacgggcttccttgaccgaacaggtgatgagattcatacatccatggaagtaggcccaatggttaaaaaaggtgatatgaaatcttctaaatggatatctgcttatgaaaataacaatgttgatattggacttgcatgtggtttatctggtaaagcacaaataggtaagggtatgtgggctatgccagatttaatgaaagatatgatgaaacaaaaaattattcacccattagcaggagctaattgtgcttgggtgccatcaccaactgcagcggcattacatgctcttcactatcatgaaattaatgtatttgataaacaaaaagaattattaaaaagaaaacctgcgaagctatctgatcttttaactattccaagtagcaaaaaaacctaa

SEQ ID NO: 237425 - DNA, 520 bp, Unknown
  Bacterial polypeptide expressing nucleotide sequence isolated from the Sargasso Sea
atgagagagcaatacatcaaaatccacaacttatctgtagcaaaagaactagctgattttgtaaaaaatgagcttttactagatactaatattggtcctgacgagttctggaaaggctttgacaaagtagtccatgaattagcgcctaaaaataaaaaattacttgaaatcagagaaacattacaacaagaaatagatctttggcataaaaaaaatagagaccacgagattgactataataaatataaaaattttttggaagaaataggttatttaaaaaaagaaggtgaagattttaaaatagcaactaaaaatttagatgaagaaatatctaatatagcaggaccacaattagttgttccaataatgaactctagatataccttgaatgctgcgaatgcaagatgggtaagcttatatgacagtctttatggatcaaatataatagagtctgaagaaagtggaagtgaaaaatatgatcctttaagaggacaagaagtaattaaatatactagaaact

SEQ ID NO: 237426 - DNA, 640 bp, Unknown
  Bacterial polypeptide expressing nucleotide sequence isolated from the Sargasso Sea
atggaaaaatatactaatatatcaaatctaaaggtatctaaaaagttagaaaattttgttcaaaaagaattactgaaaaatttagacatttcacctaaaattttttggattaaatttgacaaagttgtacatgaactagctaaaattaatgctgaattaataaaaaaaagagaagtccttcaaaaaaaaatagatgaatggcataaaaaaagaaagggggaaaattttaacttaaatgaatataaaaaattcttaagagaaattggttatctagttaaggaaaaagataattttaaaatcaaaaccaaaaatttagactctgaaatatcaagtatagctggtccacaacttgtagtaccaattatgaatgaaagatatgctcttaatgctgcaaatgctaggtgggttagcctttacgacagtttatatggcacagatataattaagtcagaagaaggaggaagcgaaagatatgaccctgcaagaggtgaggaagttataaaatacgtaagaaaatttttagatgaatatattccagtgaatggcactagttggaaaaatatttcaaatttaattgtgaataagggtaatctgataatttataaagatgaaaataaatttaaattaaaagatactaaga

SEQ ID NO: 237427 - DNA, 790 bp, Unknown
  Bacterial polypeptide expressing nucleotide sequence isolated from the Sargasso Sea
atgcaagaaaaatatattaaaattaataatcttaaagtatctgaaaagctatcaaactttgtaaatgatgaattattaaaaaatacaaatgtatcttcagaaaatttttggttaggtcttgaaaaaacactagaagagcttgcaccaaaaaataaagaattaataaaatttagagaagaattgcagaaaaaaatagacaattggcatattaaaaataaaggtaaagaatttaatttagatgagtataaaaaatttttattagaaattggttatttaaaaaacgaaggacctgattttaaaatagaaactgaaaatgttgatcaagaaattgctaatatagctggacctcagttggttgtacctatcatgaatgctaggtatgcattaaacgctgcaaatgcaagatggatgagcttatatgatagtctttatggtacagatgtaattgagcagtctgaggacagcgtttctgaacggtatgaccctttaagaggtgaaatggttataaaatatggaagagattttttagataaatactttccattagctggattaagttggaataaaattacaagttttgctgtaaaatatggaaaattaaaagttttaaaaggtgttgatatttttgatttggaagacgaaaataaatttattgggcacagaggcgaaagcgataatccgtctgcaattattttaaaaaataataatttacatattgaaattctaaaagactcaagagcttttgctgcccaacaagatcatgcaggtattagtgatattatactagaat

SEQ ID NO: 237428 - DNA, 591 bp, Unknown
  Bacterial polypeptide expressing nucleotide sequence isolated from the Sargasso Sea
tatgaacttgcaatatattgatatcgaaaatataaaaatagcaaagccgttgtatgatttagttgagcaagaaattattccagaaacaggaataaatacaaatcatttttggtcttccttcgcatctatcattaatgatttagaacctaataatcgttccttgctaaataaacgaacagacatacaaaataatattaattcttggcatgaagatcaaaaaacaaaaaaattcgatgttgaagaatataaagcatttttgaaaactattggttatttagctccagatgctcccgattttcaaatcacgacaactgatgtagatgaagaaatttcatctattgcagggccacaacttgtggtacctgttgataatgctagatttgcaatcaatgctgccaatgctagatggtggagtttgtatgactcgttatatggtacagacattatctcagaagaaaataatggtcaaaaaggtgcaaactataaccctcatagaggtgcaaaagttgttgcttattgttcaattttgcttgacacaatatttggtttaaaaaattcaagttttgcacatgtttcaaacttttctctaaa

SEQ ID NO: 237429 - DNA, 793 bp, Unknown
  Bacterial polypeptide expressing nucleotide sequence isolated from the Sargasso Sea
caatacatcaaaatctacaacttatctgtagcaaaagaactagctgattttatcaaaaatgagcttttactggatactaatgttggtcctgacgagttctggaaaggttttgacaaagtggtgcatgaattagcgcctaaaaataaaaaattacttgaaatcagagagacattacaacaagaaatagatctgtggcataaaaaaaatagagaccacgagattgactataataaatataaaaattttttggaggaaataggttatttaaaaaaagaaggtgaggattttaaaataacaactaaaaatttagatgaagaaatatctaatatagcaggaccacaattggttgttccaataatgaactctagatatagcttgaatgctgctaatgcaagatgggtaagcttatatgatagtctttatggatcaaatataatagagtctgaagaaagtggaagtgaaaaatatgatcctttaagaggacaagaagtaattaaatacacaagaaactttttgaacaaatattttccaattaatgatcttgactggaaagatattactggtttagcagttaataataaaaaactcacaatatataaggaaaataaagaacataatttatcagatttagagaagtttattggtcatagaggggatgcaggcaaaccaaatgctataatcttaaaaaataataatcttcatcttgaaataattattaatcctagagcatttagtgctgcgagagatgctgctggtataagcgatattataattgagtctgccgtatcaacaa

SEQ ID NO: 237430 - DNA, 799 bp, Unknown
  Bacterial polypeptide expressing nucleotide sequence isolated from the Sargasso Sea
ccgtgctcatcgaacaattcttgctgcattcgaaatggatgaaatactttatgaactcaaagaccattccgcaggtttaaatgctgggagatgggattatattttcagcgttgctaagaagttttgttcagaccccgcttttgttttaccagatcgttctgatgtcactatgacagttccttttatgcgcgcttatacagaactaatggtttcaacatgtcataaacgaggagcgcatgcaattggtggcatgagtgcctttataccaaaccgcagagaccccgaagtgacagaggaagctcttgaaaaagttgcagcagataaaagtcgtgaagcgacagacggatgtgatggcacttgggtcgcacaccctgatctagttgaaatcgcaattgaagaatttaataaggttcttcaagacaaacctaatcaaatagaccgtctcagagaagatgtctctgtatcagctcaggacctactttcaatagatcaaacaggaggagcaataacgcttgagggtctgaggatcaacgtggaaataggtctgcgttacatcgcttcatggttagcaggtaccggtgctgctgcgatcaacaaccttatggaggatgctgccactgcagaaatcagtagagcacaagtatggcaatgggttaagcacaaaaaagaattagataatggcgaaactgtgactactgacctagtaaaaaacatcatccaagaagaaatagctgctatagaagaagatatgggaacagaacaattcaacacgtttccctttgatcaagcaaagaaaatt

SEQ ID NO: 237431 - DNA, 703 bp, Unknown
  Bacterial polypeptide expressing nucleotide sequence isolated from the Sargasso Sea
atgagagagcaatacatcaaaatccacaacttatctgtagcaaaagaattagctgattttgtcaaaaatgagcttttactggatactaacgttggtcctgacgagttctggaaaggttttgacaaagcagtgcatgaattatcgcctaaaaataaaaaattactcgaaatcagagaaacattacaacaagaaatagatctgtggcataaaaaaaatagagaccacgagattgactataataaatataaaaattttttggaagaaataggttatttaaaaaaagaaggtgaagattttaaaataacaactaaaaatttagatgaagaaatatcaaatatagcaggaccacaattagttgttccaataatgaattctagatatagcttgaatgctgctaatgcaagatgggtaagcttatatgacagtctttatggatcaaatataatagagtctgaagaaagtggaagtgaaaaatatgatcctttaagaggacaagaagtaattaaatacactagaaactttttgaacaaatattttccaataaatgatcttgactggaaggatattacaggtttatcagtaaataataaaaaactctcaatctataaggaaaataaagaatatactttatcagatttagagaagtttattggtcatagagggaatgcggccaaaccaaatgctataatcttaaaaaacaata

SEQ ID NO: 237432 - DNA, 362 bp, Unknown
  Bacterial polypeptide expressing nucleotide sequence isolated from the Sargasso Sea
gatgacagaacgcgttcaagttggcggcattcagatcgccaagaatctgtacgatttcgtaaacaacgaagcgatcccgggtaccggcgttgacgctgacaaattctgggccgagttcgacaagattgtgaacgagctggctccgcgcaaccgcgacctgctggtcaagcgcgacgagatccaggaaaaaatggacacctggaaccgtgatcataaaggccagaagctggacatggccgagtacaaggccttcctgaaagagatcggttacctggttgacgagccggcggatttcaaaatttctaccgccaacgtagacccggaaatcgccaccatggccggcccgcagctggttgtgccga

SEQ ID NO: 237433 - DNA, 656 bp, Unknown
  Bacterial polypeptide expressing nucleotide sequence isolated from the Sargasso Sea
agcgtatacagaactattagttgaaagctgtcataaaagaggtgcacacgcaattggtggtatgtctgcatttataccaaacagaaaagatcctgaggtaactgaaaaagcatttgaaaatgtaaaaaatgataagttaagagaagcaaatatgggttttgatgggtcttgggttgctcatccagatttagtaagcatatgtaaagatgtattcaatgatcatctcaatggagaagcaaatcaaatttcatttgtaccaagatatgatattgaggattcaatgctacataactttaagatagaaaactcatcaataacaatggaaggtattcacacaaatatcaaagtgggtattttatatatgcactcatggcttaatggacaaggtgcagcagcattatttaatttaatggaagatgctgctactgctgagatttcacgttcacagctttggcaatggcttcataactcagttgaaactaaaaacggagacactatcaatgaatcgtttatggaagaggcttttgagacagtcttttctgaaataaatgatatagagaatattgaaaaggcaagagacgaatttaaaaagttggtgtttgatgaagatttctcagactttttaactttacccgcttatcatttaataaattaag

SEQ ID NO: 237434 - DNA, 455 bp, Unknown
  Bacterial polypeptide expressing nucleotide sequence isolated from the Sargasso Sea
catgacatcaaagtatcattcagttaacggtcttaaagtatcagaagaattattacattttgtgaataatgaattatttgatggtactgatatttctccagaaaaattctggaaagattttgacaaagcagttcatgaacttgctcctaaaaataaagacctaattgattttagagaaacacttcaaaaaaaaattgacaaatggcacattgataacaaagaaaaaaatgttcaaattaaagaatacaaaaattttttaaaagaaattggttatttaatagatgaaggtcctgattttaaaattgaaacaagtgatattgatgaagagattgctacaatagctggacctcaattagttgttccaattatgaatgctcgttacgctttgaatgctgctaacgcaagatggatgagtttatacgatagtttgtatggaactgatgtaatcgaagcat

SEQ ID NO: 237435 - DNA, 571 bp, Unknown
  Bacterial polypeptide expressing nucleotide sequence isolated from the Sargasso Sea
tatgcaagaaaaatacattaaaattaataatcttcaagtatctgaaaagctatcaaactttgtaaatgatgaattattaaagaatacaaatgtatcttcagaaaatttttggttaggtctagaaaaaacgcttgatgagctcgcaccaaaaaataaagaattaattaaatttagagaagaattgcaggaaaaaatagacgactggcatatcaaaaataaaggtaaagaatttaatttagatgagtacaaaaaatttttattagaaattggttatttaaaaaatgtaggacctgattttaaaatagaaactgaaaatgttgatgaagaaattacgagtatagctgggcctcagttggttgtaccagtgatgaatgcgagatatgcattaaatgctgcaaatgcaagatggatgagtttatacgatagtctttatggtacagatgtaattgaacagtctgacgatagcgtatctgaaagatatgaccctttaaggggtgaaatggttataaaatatggtagagattttttagataagtatttcccgttagcaaaattaagttggaataaaatt

SEQ ID NO: 237436 - DNA, 887 bp, Unknown
  Bacterial polypeptide expressing nucleotide sequence isolated from the Sargasso Sea
tatgaagcaataaataatctcaaaatttcaagcgaattattaaggtttgttaatgatgaaatattaagagatacagatgtttcaccaaaaaaattttggtctgattttgatcaaatcgtccatgaacttgctccaataaatagaagtcttttagataaaagaaaaaatttacaaaaaaaaatagatgattggcacattaaaaataaaggagaagaatttgatattaataaatataaaaattttttaaacgagattggatatctagtaaatgagggacctgattttcaaattgaaactaaaaatattgataatgaaatatctacaattgctggaccacagttagtagttccaataatgaatgcgagatatactttaaacgcagccaatgccagatgggtaagtttatatgatagtttatatggaacagacataattgagtcagaggaaggtggaagtgaaagatatgatcctaatcgtggacaagaagttataaaatatgtaagagaattttttgataagattattccaattgatggtacgagttggaaaaatatagccagtttaaaggtagtgaatagtcaattagtaatttctaaagataacaatgaatataaactaatagacgcgagtaagtttataggtcatagaggtgatgcaaataaacctgaggctattattctacaaaataataaacttcattttgaaattataattaatcctagagcttttagtgcagctcatgacattgctgggataagtgatgtaattgctgagtctgcaatttcaactatttgtgataacgaggacagtgtagcagccgttgattctgaggataaagttgcatgctacaaaaattggctaggtttaatgaaaggtaatctaaaaat

SEQ ID NO: 237437 - DNA, 796 bp, Unknown
  Bacterial polypeptide expressing nucleotide sequence isolated from the Sargasso Sea
atggaaaactacattaaacgcggcaatcttaatatccacaatgctcttgataggtttctcagtgatgagatgctatctgggcttgatatagcttcagatgagttttggaaaaagtttgaaggtcttttagaggaattccatcaaagaaataaagatttattagcaaaaagatccttgttacaagatcaaatctcaacttggcataagaataatgattttaatataaatgaatacaaaaagtttttaaaagagataggttacttagaagaagtgcctgcagattttacaattacaacaaggaatacagatcctgaaatctcgagtattccgggacctcagcttgttgttcctatcatgaatgcaagatttgctttgaatgcaaccaatgcaaggtggggcagtctttatgatgcactatacgggacggatgttatttcagaagatggaggtgcatcaaaagatggcgcatataatgaaataagaggaaataaggttattgatttttcaaagcaatttttagataactgtttcccaatcactgatcttagttataaagatattacaaatatttcgattgtggaccaaagattactttttcatgctgaggaagatcaaattacatatctaaaaaatgaagatcaattcaaaggatttaacggatctcctgaaaatccttcagaagttttattagttaacaacaatcttcatttggaaattcaaatagactccgatcatcctgttggtaagactgataaagcaaatattaaagatattgttttggagtctgcagtttcaa

SEQ ID NO: 237438 - DNA, 517 bp, Unknown
  Bacterial polypeptide expressing nucleotide sequence isolated from the Sargasso Sea
tatgtcaaaaaaatacattaataaagaaaacctgtctatttctgaagatctctataaatttattaatgaagaggcaattcctggcacagaagtttccaaagaagaattctggaaaggattaagtaaaatatctcacgaattgaatccaaaaaatatagaactacttagaactagaaaaaaattgcagatagaaatagataaatggcacttagaaaattatgataaagaattcaatttaaatgaatataagtcatttcttgaacaaattggatatctaaaaaaagcaggacctgattttaaaataaaaacgaagaatattgatcaggaaatatcaaaaatagcaggcccacaactagttgtgccaattatgaatgctagatacgcattaaacgctgcaaatgcaagatggatgagtttatatgatagtttatacgggacagatgtaatttcatcagaggaatcaatctctgaaagatatgatcctgaaagaggacttcaggtaattaaatatacaaaa

SEQ ID NO: 237439 - DNA, 499 bp, Unknown
  Bacterial polypeptide expressing nucleotide sequence isolated from the Sargasso Sea
atgaaaattgttactaaaaacgacttaaaaataaaccagactttatttaattttataaatgaagaggtgctacctggtacaaacattaaaccagaagatttctggaatagatttgcaaaagtagttcatgaattggctccagtaaacaaaaaacttattgaaaaaagagaaaaaatacagaaacaaattgatgactggcacttaagtaactcaaaagaaaaatttgataaaaataaatacactcaatttcttaaatcaatttcttacattgtaaatgaaggagacaattttaaaattgatacttcaaatgttgacgaagaaattgcagaaattgcaggtccacaacttgttgttccagtagacaatgctagatacgcattaaatgcagctaatgctcgttggggaagcttgtatgactctctatatggaacagacgtaattcctggcgaaaagggtgatgcatttaataaagatcgtgcggaaaaagtaatagtatagt

SEQ ID NO: 237440 - DNA, 331 bp, Unknown
  Bacterial polypeptide expressing nucleotide sequence isolated from the Sargasso Sea
tctaaagttcctgatttttatggtgtaaatttaatggaagatagagcaacttgccgaatttccgcacagcacgtttccaactggctttaccataatgtggtaacggagtctgagataatagatgcgctcaacaaaatgactcttttggttaactcgcaaaacgctcaggatcccatgtatgaaccaatttctgcacaatcatcagatttttcttttaaggctgcgcatgatttgtgtatttatggtcggttccaaccgaatggatataccgaaccgatcttgcatgaaaatcgaattaaaaaaaaagcggccatcctatataaaaactaaa

SEQ ID NO: 237441 - DNA, 382 bp, Unknown
  Bacterial polypeptide expressing nucleotide sequence isolated from the Sargasso Sea
atgaaaataatagataaaaatgggctcaaaattagttcaactttatatcaatttgttaacgaagaggctattcctggaacaaaagtaaattctgaggatttttggagtaagttttcaaaaatagctcatgaactagctccgataaataagaatttaattgagaaaagagagactattcagaaaaaaatagatagctggcacaaattaaatattggcaaagcgtttgataaaaaagaatatattaattttttaaaatcgattggatatttagttgaagaaaaagaggattttaaaattgatacaacgaatgtggatgaagaaatatcctcaatagcaggtccacaacttgtggttccagtagataatgcaagatatgcttgaa

SEQ ID NO: 237442 - DNA, 512 bp, Unknown
  Bacterial polypeptide expressing nucleotide sequence isolated from the Sargasso Sea
aatgtcaggcagaatagaaaaaaatggtctaagtatagatgaaaaattagtaacttttattgagtcagaagctattccaggaactggagtagatactcaaaaattttggcaaggttttgcagaaattgtagaaaagctgggtgctaaaaataaaactcttatacaaaaacgagaggatatacaatccaagattgatgaataccatatcactcatagaggacaagatatagacatagaagactataagtcatttttatatgatattggatatttagttccagaaggagaaaattttaaaattgatacgagtaatgttgatgaagaaattgcagatttatgtggacctcagttagtagtaccaattatgaacgctcgatatgcattaaatgctgccaatgcaaggtggggaagtctttacgatgctttttacggaacagatgctatgggtgatttgcctccaaaaggtgggtatagcaatgatagaggagataaggtaatttctaatgctaaag

SEQ ID NO: 237443 - DNA, 533 bp, Unknown
  Bacterial polypeptide expressing nucleotide sequence isolated from the Sargasso Sea
tttgccaaatttgaaaaaatatgaccctaaaagaggtcaagacgtaattaaatatgctaaatcctatttagataattttgctccattaaaaaattctaattgggatcaggtaaaaagcataaatttagaaaataataaaatcacatttaaattattgtcaaatgattcaactgtttttaaaaatgaaaatcaaattgtaggaatttctaaaaatattcaaaataatcttggcgaactaatattagtaaaaaataatcttcattgtagaataataatcaacaataaagatgctattggcaaagtagattctgctggaatttctgatattatttttgaatcagcaatatcaactatacttgattgtgaagacagtgttgcaacagtagatgctgatgataaagtgactgcatatagaaattggttaggattgatgaaaggagatttagaatctacttttactaaaaatgaaaaaaaaataaaaagggtattaaatgaaaatataactattaagactttaagtggggaaaataaaa

SEQ ID NO: 237444 - DNA, 550 bp, Unknown
  Bacterial polypeptide expressing nucleotide sequence isolated from the Sargasso Sea
atgagagagcaatacatcaaaatccacaatttatctgtagcaaaaaatctagctgattttgtcaaaaatgaacttttgttggctactaatgttagcccggatgaattttggaaaggctttgataaagtagtgcatgaattagctgctaaaaataaaaaattactcgaaattagagaaaccttacaacaagaaatagacctttggcataaaaaaaatagaggccaagaaattgactatgaaaaatataaaaattttttagaagaaataggttatttaaaaaaagaaggtgaagattttaaaataacaactaaaaatttagataaagaaatatctaatatagcaggaccacaattagttgttccaataatgaactctagatatagcttgaatgcagcgaatgcaaggtgggtaagtttatatgacagtctttatgggtcaaatataatagagtctgaagaaagtggaagcgaaaaatatgaccctttaagaggacaagaagtgattaaatatactagaaactttttaaacaaatattttcctaataaatgat

SEQ ID NO: 237445 - DNA, 611 bp, Unknown
  Bacterial polypeptide expressing nucleotide sequence isolated from the Sargasso Sea
tatggaaaactatataaaacgcggcagtcttaatatccataatactatcgatgcatttcttaatgatgaggtgctcccgggacttgatataacctcagatgagttttggagaaaatttgaaggacttttagaggaattccatcaaaaaaataaagatttattgtcaaaaagatcttctttgcaggatcaaatctctacttggcataaaaataatgacttcaatttaaatgaatataaaaagtttttacaagaaataggttacttagaagaagtaccagcagattttacaatcacaaccatgaatacggatcccgagatctcgagtattccaggacctcagctagttgtccctattatgaatgcaagatttgccttgaatgcaacaaatgcaaggtggggtagcctttatgacgcattatatggaacggatgtaatttctgaagacggaggtgcatcaaaagagggcgcatataatcaaataagaggagataaggttatagatttttcaaaacaatttttagatgattgtttcccaattactaatcttagttatcaagacattacaaatatttcaattaaggatcaaagattactttttcatagtgagcaag

SEQ ID NO: 237446 - DNA, 730 bp, Unknown
  Bacterial polypeptide expressing nucleotide sequence isolated from the Sargasso Sea
atgtctataaattatcaaaaggttaatgacttaaaagtttcagaaaagttactatcatttgtaaataatgatttgttgaaagaaacaaatatttctccaaatgaattttggtcaggatttaattcggcggttcatgagctagcctcaaaaaataaagatttgattaaaataagagaaaacttacaaaagaaaattgatgattggcatattaaaaataagggcaaggaaattgtaattgatgaatataaaaaatttttgaaagagattggatatttaaaagatgaaggaccagattttaaaatcgaaactagtaatgtagatgatgaaatagctaaaatagctggaccacaactagtggtaccaataatgaatgccagatatacacttaatgcggcaaatgcgagatgggtgagtttatatgacagcttatatggaacaaatataattgagtcagaagaaggtggaagtgaaaggtatgatcctaatcgaggacaagaagtaataaaatatgtaagagaattttttgataaatatatcccaattaaaggtactagttggaaaaatatttcagctttaaaaataataaataaagaacttatcatattcaaaggtgatcatgaatattatttagaggaaaaaaataaatttattggacataggggtgataccaaaaagcccgatgcaattataataaaaaataacaatcttcattttgaaataataatcaacc

SEQ ID NO: 237447 - DNA, 611 bp, Unknown
  Bacterial polypeptide expressing nucleotide sequence isolated from the Sargasso Sea
tcatgcaattggcggcatgtctgcatttataccaaacagaaaagaccctgaggtaacagagaaagcatttgaaaatgtaaaaaatgataagttaagggaagcaactatgggttttgatgggtcatgggttgctcatccagacttagtaagcatatgtaaagatgtattcaatgatcatctaaatggaaaagcaaatcaaatctcatttgtaccaagatatgatattgaggattcaatgctacataacttcgagatagaaaactcatccataacaacgcagggtattcacacaaatatcaaagtgggtattttgtatatgcactcatggcttaatggacagggtgcggcagcattatttaatttaatggaggatgctgctactgctgagatttcgcgttcacagctttggcaatggcttcataactcggttgaaactgaaaacggagaaactatcactgaatcatttatggaagaggcttttgagacagtcttttctgaaataagtgatatagagaatattgaaaaggcaagagacgaatttagaaagttggtgtttgatgaagatttctcagactttttgactttaccagcttatcatttaataaattaag

SEQ ID NO: 237448 - DNA, 745 bp, Unknown
  Bacterial polypeptide expressing nucleotide sequence isolated from the Sargasso Sea
aatgatcaaaaaagatgatatgaaaaaaactaaatggttagaagcatacgaaaataacaatgttgatgtgggtttaaaatgtggcttttctggaaaaataagcattggaaaaggtatgtttccagctccagataatatggctcaaatgatgaaagagaaaatttcacatttagaggcaggagcaaattgtgcttgggtaccatctccaacagctgctgccttacatgcgcttcactatcacaaaattgatgtgtttgaaaaacaaaaagaaatagagaaaagaaataaagcaaatttatataatttgttatcttttccagttacaaacaaacctaattggactgcagaagaaataaataatgagatttcaaattgtgcacaaagtatacttggatatgttgtaagatggatagatcagggtattggatgttcaaaagttcctaatataaacaatataaatctaatggaagatagagcaacattaagaatatcatctcaattaattgcaaattggttacatcatggaatttgtagcagaaagcaagttcttgaaattatgaaaaaaatggcaaaagttgttgatcatcagaataaaaatgatgatatttaccaaagtatgcatcctaaatttgataaatctattgcttttaaaactgcgtgtgaattaatttttcatggtaaatatcaaccctcaggttacacagagccactcttgcatctcaatagattaattaaaaaaaattaa

SEQ ID NO: 237449 - DNA, 580 bp, Unknown
  Bacterial polypeptide expressing nucleotide sequence isolated from the Sargasso Sea
tatgagtataactgagaaaaacgggcttaaaattaatacaaaattattaaattttgttaataatgaaattattccgggtactgatatacaatctgaggagttttggactagttttggaaaaattgttcatgaactcgcgcctctaaataagaaacttattcaaaaaagagaggacattcaaaaaaaaattgatgagtggcataaaggaaataagggagaaaaattaaataaaaaagagtatttaaaatttttaaaatctatttcctatattgttgaagaaggagataaatttaatatcgaaacagcaaatgtagacgatgagatagcaacgatagctggtcctcaacttgttgttccagttgataatgctaggtacgctttaaatgcagctaactctcgatggggaagtttatatgacgccttgtatggaactgacgcaattcctggcgacaaaggtaaagatttcaatgaacaaagagctcaaactgtcatagcttatgtaagaaaatttttagatgaaactattccccttgaaaaaggaagttggaatgaaatttctggaatgaaaattaaagataaa

SEQ ID NO: 237450 - DNA, 760 bp, Unknown
  Bacterial polypeptide expressing nucleotide sequence isolated from the Sargasso Sea
tcctaaaaataaagaacttttaaaagtaagggaaaaaattcaaatggaaattgataaatggcatattgaaaattctattttagattttaatcaaaatgagtatgaaaagtttttaaaagaaattaattacctgaaagatgaagggccaaatttcattataaaaactaaaaatattgatagtgaaattgcaaaaatagctgcaccacaattagtagttcccataatgaatgctcgttatgctttaaatgctgcaaatgcaaggtggatgagtttatatgatagcctttatggaacagatgttattgagtctgaagaatcagctagtgaaaggtacgaccccgaaagaggctcagaagtaataaaattcactaaaaaatttttagataagcatttctcattaaacaattatagttggtcaaaagttacagatataaaaataattaataatgaattaaatatttttataatcaataataaaacaacaattaaggatgataataaatttataggctttagaggtagagccgataagccttcagcgataattcttgaaaataataatcttcatttagaaataataataaatccagatgcatttagtgcaaaaggtgatccagctggaatatcagatataatagttgaatcggcagttacaactatttgcgatcatgaagactcggtagcaggagtagatgctgaagacaaagttttaggctacagaaattggctaggattaatgagagggaatcttaagacagag

SEQ ID NO: 237451 - DNA, 463 bp, Unknown
  Bacterial polypeptide expressing nucleotide sequence isolated from the Sargasso Sea
atggaaaactacattaaacgcgccagtcttaatatccataatgctctcgatagtttccttaatgatgaggtgctaccagggcttgatataacatcagatgatttttggaaaaaatttgaaggtcttttaggggaattccatcaaagaaataaagatttattagcaaaaagatctttgttacaagatcaaatctctgcttggcataaaaataatgattttaatttaaatgaatataaaaagtttttactagaaataggttacttagaagaagtacctccagattttgcaatcacaacaaggaatactgatcctgaaatctcgagtattcctggacctcagctagtcgttcctattatgaatgcaagatttgctttgaatgcaaccaatgcaagatggggcagcctttatgatgcactgtacgggacggatgtgatttcagaagacggaggtgcatcaaaagagg

SEQ ID NO: 237452 - DNA, 181 bp, Unknown
  Bacterial polypeptide expressing nucleotide sequence isolated from the Sargasso Sea
cgcgcaccccggccccgtgcgcgaccacgccgcgtatcgcgctttcctcgaacaaatcggctacctcgtgccggtcccgtcgaacgtcgcggcagccaccgcgaacgtcgacagcgagatcgccacgcaggccggcccgcagctcgtcgtgccgctgtcgaatgcgcgctatgcgctgaac

SEQ ID NO: 237453 - DNA, 451 bp, Unknown
  Bacterial polypeptide expressing nucleotide sequence isolated from the Sargasso Sea
atgacatcaaaatatcactctgtaaataatcttaaagtatcagaggaattattacattttgtaaataatgagttatttaatggtactgatatttctcctgaaaaattttggaaagattttgacaaagcggttcatgaattagctcctaaaaataaagaactaattgattttagaaaaactctacaaaaaaaaattgataaatggcatattgataacaaaggaaatgatattcaaattaatgaatacaaagattttttaaaagaaattggttacttaaaagatgaaggtccagattttaaaattgaaacaagtaatattgacgaggagatagcttcaatagctggtcctcaattagttgttccaattatgaatgctcgttacgctttgaacgctgctaatgcaagatggatgagtttgtacgatagtttgtatggaactgaatgtgattgaa

SEQ ID NO: 237454 - DNA, 757 bp, Unknown
  Bacterial polypeptide expressing nucleotide sequence isolated from the Sargasso Sea
tatgcaagaaaaatacattaaaattaataatctacaagtatccgaaaaactatcaaattttgtaaatgatgaactattaaagaatacaaatgtatcttcagataatttttggttaggtcttgaaaaaactctagatgaacttgcaccaaaaaataaagaattaattaaatttagagaagaattacaaaaaaaaatagatgattggcatatagagaataaaggtaaagaaattaagccggatgtgtataaaaaatttttattagaaattggttatttaaaaaatgagggacctgattttaaaattgaaactaaaaatgttgatgaagaaatttcaagtatagctggacctcagctggttgtacctgtcatgaatgcaagatatgcactaaatgctgccaatgcaaggtggatgagtttatatgatagtctttatggtacagatataattgaacagtctgaagatagcgtatctgaaaggtatgatcctttaagaggtgaaatggtcataaaatatggaagagattttttagataagtattttccattagcgggattgagttggagtaaaattacaagttttgcagtaaaaaatggaaaattaaaagttttaaaaggtgctgatatttttgatttggaagacgaaaataaatttgttgggcacagaggcgaaagcgataatccatctgcaattattctaaagaataataatttacatattgaaattttaaaagactcaagggcttttgctgctcaacaa

SEQ ID NO: 237455 - DNA, 280 bp, Unknown
  Bacterial polypeptide expressing nucleotide sequence isolated from the Sargasso Sea
cagaataagcagccaacacattgctaattggttgtttcacggaatctgtagcaaaaaacatgttttggaaattatgaaaaaaatggcaaaagttgtagatagtcaaaacttaaaagatctgagtatgaaaggacaggctccttaccaaactatgtctggaaattttgacaaatctatagctttcaaggcagcttgtgagcttgtgtttcatggaagatcacaaccttcgggttatacggagccaatacttcacattaatagactgcttaaaaaaaattaa

SEQ ID NO: 237456 - DNA, 680 bp, Unknown
  Bacterial polypeptide expressing nucleotide sequence isolated from the Sargasso Sea
tatgtcaacaaattaccaaagtgttaataatcttaaagttgcagaaaaattactagtttttattaatgaagaattattaaaagatactaatatttctccaaaagaattttggtcaggctttgataaagcggtacatgaattagctccaaaaaataaagaattaattaaaactagagaaattttacaaaaacaaatagatgattggcatattagtaataaaggaaatcaaattaaaattgaagagtataaaaaatttttaaaaaaaattggttacttaaaagatgaaggtcctgattttaaaattgaaactacaaaaattgatgaagaaatagctaatattgctgggccacagttagtagttccaattatgaatgcgagatatacgctcaatgctgctaatgcaagatgggtaagtttatatgatagtttatatggaaccaacttaattgagtccgaggaaggaggaagtgaaagatacgaccctcttcgtggacaagaagtaatcaaatatgtaagagaattttttgataaatatattccgatagaaggtacaagttggaagaacattgctgctttaaaggttaaaaacaaaaatttaattatttttaaagatggttatgaatataagttgaaagatgaaaagaaatttattggtcatagaggagatgccaataaaccta

SEQ ID NO: 237457 - DNA, 379 bp, Unknown
  Bacterial polypeptide expressing nucleotide sequence isolated from the Sargasso Sea
atgagagagcaatacatcaaaatccacaacttatctgtagcaaaaaatctagctgattttgttaaaaatgagcttttactggatactaatattggtcctgacaagttctggaaaggctttgacaaagtagtacatgaattagcacctaaaaataaaaaattactcgaaatcagagaaacattacaacaagaaatagatctgtggcataaaaaaaatagagaccatgaaattgactataataaatataaaaattttttggaagaaataggttatttaaaaaaagaaggtgaagattttaaaatagcaactagaaatttagatgaagaaatatctaatatagcaggaccacagttagttgttccaataatgaactctagat

SEQ ID NO: 237458 - DNA, 884 bp, Unknown
  Bacterial polypeptide expressing nucleotide sequence isolated from the Sargasso Sea
catggcgaatccgctgtcatcgcagtcctcactgcagttgccgcagggcatggaaatcacggctgagatcaagccgggctatgaagcaatcctcacccgcgaagcgcttgagcttgtcgccgcgctgcatcgcacgttcgaaccacgccgccagcaactgctgcaggcgcgcgtcgagcgcactaaacggctcgacgccggtgagcgtccggacttcctcgccgaaacgaagagcgtgcgcgaaggcgactggaagatcgcaccgctgccgcaagatctgcagtgccgccgcgtggagattaccggtccggtcgagcgcaagatgatcatcaacgcgctgaattcgggcgcggattcatacatgaccgacttcgaggattcgaacgcgccgagctgggataaccagattaccggccatatcaatctgaaggacgcggtgcgccgcacgatttcgctcgaacagaatggcaagtcgtacacgctgaacgacaagatcgccacgctgatcgtgcgtccgcgcggctggcacctggacgaaaagcacgtgacggtggacggcaagcgcgtcagcggcggtatcttcgacttcgcgctcttcatggttcacaacgcgaaggaacaggtcgcgcgcggcacggcgccctacttctatctgccgaagatggaaagccacctcgaagcacgcctgtggaacgacatcttcctcgccgcacaggaaggcgtgggcgtgccgcgcggcacgattcgcgcgaccgtgctgatcgaaacgatcgtcgccgcgttcgaaatggacgaaatcctgtacgagttgcgcgagcacagctcgggtctgaacgccggccgttgggactacatcttctcggcaatcaagaagtcaagagcga

SEQ ID NO: 237459 - DNA, 691 bp, Unknown
  Bacterial polypeptide expressing nucleotide sequence isolated from the Sargasso Sea
gatgagggcatatactgagcttctggtgaaaacctgtcacactagaggaaccttggcaatcggaggaagggctgctttcatacccagccgtcgggacgaggaagttaaccgggttgccctggaaaaagttcgtcaagaaaaagaacgcgaggctaatgacggtttcgacggttcatgggtggcacatccagacttggtacaggtttgcactgaagttttcagcaattcgttcgaagatggacgagttaaccaaatgcatagaatgcgtgaggatgttcaagtatcctctgagatgctgctgaattttcagattcccggagggaaaattaccgaagacggtctgcgcaacaacatcagtgtaggcattcaatatatttcagcgtggctgcggggcactggagcagtagcaattttcaacctgatggaagacgctgcaactgctgaaatttcccggtctcaagtctggcagtggtgtcaacatcctgatggaatgcttgatgatggacgcaatattactattgagatggttaaaagcatggttcccgaggaacttgctaaaatccgggtagcctatggcgatgcctttgatgaagagaaaatgaatcaggcaacggaattgtttcttactctggtaacgcagaaagaatttgaggaatttctaacaattagagcttacgatcagctggattga

SEQ ID NO: 237460 - DNA, 784 bp, Unknown
  Bacterial polypeptide expressing nucleotide sequence isolated from the Sargasso Sea
atgagagagcaatacatcaaaatccacaatttatctgtagcaaaagatctagctgattttgtcaaaaatgagcttttgttggatactaatgtaagtcctgatgaattttggaaaggctttgacagagtggtgcatgaattagcgcctaaaaataaaaaattaatagaaatcagagaaacattacaacaagaaatagatctgtggcataaaaaaaatagagaccaagagattgactataataaatataaaaattttttggaagaaataggttatttaaaaaaagaaggtgaggattttaaaatagcgactaaaaatttagatgaagaaatatccaatatagcagggccacaattagttgttccaataatgaactccagatatagcttgaatgctgcgaatgcaaggtgggtaagcttatatgacagtctttatggatcaaatataatagagtctgaagaaagtggaagtgaaaaatatgatcctttaagaggacaagaagttattaaatatactagaaactttttgaacaaatattttccaataaacgaccttgactggaaagatattactggtttagcagtaaataataaaaaactttcaatttataaggaaaatgaagaatataatttattagataaagagaagtttattggccatagaggggatgcagccaaaccaaatactataatcttaaaaaataataatcttcatcttgaaataattattaatcctagagcatttagtgatgcaagagatgctgctggtataagcgatattatagttg

SEQ ID NO: 237461 - DNA, 435 bp, Unknown
  Bacterial polypeptide expressing nucleotide sequence isolated from the Sargasso Sea
tatgaaatttattagtaaaaacgaactaaaaataaaccaaactttatttaattttataaatgaagaagtgttgcctggtacagacattaaacaagatgatttctggagtaaattttctaaagtagttcacgaaacagctccgataaataaaaaactcattgaaaaaagagaaaaaattcaaaaacaaattgatgactggcacttaaataattctaaagagaaatttgataaagacaaatacactgaatttcttaaatcaatttcttacatagtagatgaaggcgatgatttcaaaattactacttcaaatatcgatgatgaaattgcaaaaattgcaggtccacagttagtagtcccagtagataatgctagatacgcattgaacgcagcaaatgctcgctggggaagcttatatgattctttatatggcacaga

SEQ ID NO: 237462 - DNA, 1057 bp, Unknown
  Bacterial polypeptide expressing nucleotide sequence isolated from the Sargasso Sea
catgacctatatagttaaaccaaagaatcatcatcctaatctagaaagaaatgagttagggcttactagaagagattatgaaggtgctatatcaactctttgtgcaggctgtggtcatgattcaattagcgcagcgattattgatgcttgtttccaattaagtataccttcctatcaagtagctaagctttcaggaataggttgttcctctaaagctcctgcatatttcttaaatcaatcccatggatttaattcagtacatggaagaatgccttctattgcaactggtgcaaacgttgctaatcatgaattattatatcttggagtctctggagatggagatagtgcttcaattggtataggtcaatttattcatgcagcaagaagacaacctaatatgatctatatagttgaaaataatgggacatatggacttacaaaaggacaattctctgctacaaatgacttagaatcaaaaagtaaatatggtgaagataatttatttccagctattgatttatgcggtatggccattcaattgggtgctagttttgtggcaagaggtttctcaggggataaagaccaattagttcctctaataaaagcagctataaaccataaagggttctgtcttttagatatcatctctccttgcgttacatttaataatcacaatacatcaactaaaagctatgatcatataagagagcacaatgaatctgtctctagacctgattttgtgcctctaggtaaagaaataactgcagaatattctgaaggagaaaatattgatgtcgcccttcatgatggatcaatattaagtcttgaaaaattatctgatgactacaatccattagataaaaaatcagcactagagaatttaatcaaatcagaaaaggaagggaaagtaactactggattgctctatatagatcctaatgctaaagatttaaaggaaactataaatatgacagataaacctttaaataaactggaagatggagacctgtgcccaggtaacaaatatataagttccttaaacgataaactaaggtaa

SEQ ID NO: 237463 - DNA, 849 bp, Unknown
  Bacterial polypeptide expressing nucleotide sequence isolated from the Sargasso Sea
tatgcaagataaatacattaaaataaacaatctacaagtatctgaaaagctatcaaactttgtaaatgatgaattattaaagaatacaaatgtatcttcagaaaatttttggttgggtatggaaaaaactcttgatgagcttgcaccaaaaaataaagaattaattaaatttagagaggaattacagaaaaaaattgatgattggcatattaaaaataaaggtaaaaaaattaattcagatgagtataaaaaatatttattagaaattggctatttgaaaaatgaaggacctgattttaaaatagagacagaaaatgttgatgaagaaatagcaagtatagctggacctcaattggttgtgcctgtcatgaatgcgaggtatgcattaaacgctgcaaatgcaagatggatgagtttatatgatagtctttatggtacagacgtaattgaacaatctgaagatagtgtttctgaaaggtatgaccctttaagaggtgaaatggttataaaatatggaagagattttttagataagtactttccattagcaggactgagttggaataaaattacaagttttgctgtaaagtatagtaaattaaaagttttaaaaggtgctgatatttttgatttagaagacgaaaataaatttgttggacacagaggtgaaagtgataatccatctgcagttattctaaaaaataataatttacatattgaaattctaaaagactcaagagcttttgctgctcaacaagatcatgcaggtattagtgacattatactagaatctgcagtatcaacaatttgtgataatgaagatagtgtagcagcagttgactcggaaga

SEQ ID NO: 237464 - DNA, 676 bp, Unknown
  Bacterial polypeptide expressing nucleotide sequence isolated from the Sargasso Sea
tatgagagagcaatacatcaaaatacacaacttatctgtagcaaaagaactggctgattttgtcaaaaatgagcttttacaggatactaatgttggtcctgacgagttctggaaaggttttgacaaagtggtgcatgaattagcgcctaaaaataaaaaattactcgaaatcagagagacattacaacaagaaatagatctgtggcataaaaaaaatagagaccacgagattgactataataaatataaaaattttttggaagaaataggttatttaaaaaaagaaagtgaagattttaaaatagcaactaaaaatttagatgaagaaatatctaatatagcaggaccacaattagttgttccaataatgaactctagatatagcttgaatgctgcgaatgctaggtgggtaagcttatatgacagtctttatggatcaaatataatagaaactgaagaaagtggaagtgaaaaatatgatcctttaagaggacaagaagtaattaaatacactagaaactttttgaacaaacattttccaataaatgatcttgactggaaagatattactggtttagcagtaaataataaaaaactctcaatatacaaggaaaataaagaatataatttatcagatttagaaaagtttattggtcatagaggggatgcaacaagc

SEQ ID NO: 237465 - DNA, 340 bp, Unknown
  Bacterial polypeptide expressing nucleotide sequence isolated from the Sargasso Sea
tcaaggtataggttgttcaaagttccagatataaataatattggactgatggaagatagggcaactttaagaatatcttcacagcatattgctaactggatacatcatggaattactactaaattacaagttttaggaataatgaaagaaatggctaaaattgttgataatcaaaataaaagtgatgacaaatatatcaaaatgagtgatgactttgacaggtcattagcttttaaaactgcatgtgatttagttttcagtggcaaagaacaaccatcaggatatacagaacctttgctacatttaaatagacttaaaaaaaaaattaatcagaactaga

SEQ ID NO: 237466 - DNA, 685 bp, Unknown
  Bacterial polypeptide expressing nucleotide sequence isolated from the Sargasso Sea
catggagattcttgataccagcgtacctggaattgaaaaagttcttacagaagaatgccttgaatttatttatgatctagaaaaaaactttggccacaaaagaaaagaattacttaaaataagagctgaaaaacaaaaagaatatgatgctggagaattacctaattttcctcctgaaactgaggaagtaagaaactcagattggaaagtagcgccaataccaaaggacttacaagatagaagagtagaaattacagggccagtagatcgtaaaatggttattaacgcccttaattcaggtgcaaagacctttatgactgattttgaagactctatgtcaccaacttggaataatgtaattaatggtcaaattaatttatatgatctctggagaggtcagattgattttctcgatccaaataatggaaaagaatataaattaaatccagaccctgctgtattaattgtcagaccaaggggttggcatcttgaggaagctcatattgaaattgatggagtaagaatttcaggcggtatatttgattttgctgtttatctttttcataatcacgagaaattaaaagagaatgaaacaggcccgtatttctatctaccaaaaatggaaacatatttagaggcaagattatggaatgaagtgtttgtgtatgcccaagaaaaactaggt

SEQ ID NO: 237467 - DNA, 391 bp, Unknown
  Bacterial polypeptide expressing nucleotide sequence isolated from the Sargasso Sea
tgctcaaggtattttaggttacgttgttagatggattgatcaatctgtacgatgttcaaaagttcctgatataaatgggataggtttaatggaagacagagctacatgcagaataagcagtcaacatatagctaattggcttcatcacggtatatgcagtaaaaaacaagttttggaaattatgaagaaaatggcgaaagtagttgattatcaaaatttaaaagatcgcggcatgaaagatcaggatccttatcaaccaatggctggaaactttgaaaaatcaattgctttcaaagcggcttgtgatttaatttttcatggaaaatatcaaccctcgggatataccgaacctttgcttcattttaacagattaataaaaaaatcaatctga

SEQ ID NO: 237468 - DNA, 708 bp, Unknown
  Bacterial polypeptide expressing nucleotide sequence isolated from the Sargasso Sea
tatgcaagaaaaatacattaaaattaataatttacaagtatctgaaaagctatcaaactttgtaaatgatgaattattaaagaatacaagtgtatcttcaaaaaatttttggttaggtctagagaaaaccttagatgagctagcaccaaaaaataaagaattaattaaattaagggaagatttacagaagaaaatagatgattggcatatcaaaaataaacttaaagaatttaatttagatgagtacaaaaaatttttattaaaaattggctatttaaaaaatgaaggacctgattttaaaattgaaactgaaaatattgatgaagaaatttcaagtatagctggacctcagttggttgttcctgtcatgaatgctcggtatgctttaaatgctgcaaatgcgagatggatgagtttatacgatagtctttatggcactgatataattgaacagtctgaagatagcgtatctgaaagatatgaccctttaagaggtgaaatggttataaaatatggtagagattttttagataagtattttccgttagcaggattaagttggaataaaattacaagttttgctgtaaaatatgggaaattaaaagttttaaaaggtgctgatatttttgatttagaagatgaaaataaatttattggacacagaggcgaaagtgatactccatctgcaattattctaaaaaataataa

SEQ ID NO: 237469 - DNA, 604 bp, Unknown
  Bacterial polypeptide expressing nucleotide sequence isolated from the Sargasso Sea
catgacatcaaaatatcattctattagcaatcttaaggtatcagaagaattattacatttcgtaaataatgagttatttgatggcactgatatttccccagaaaaattctggaaagattttgacaaagtagttcatgaactggctcctaaaaataaagaactgattgattttagagaaacacttcaaaaaaaaattgataaatggcacattgataacaaaggaaaagatattcaaattaaagaatacaaaaattttttgaaagagataggctatttaaaagatgaaggtcctgattttgaaattgaaacaagtgatattgatgaagagattgctacaatagctggacctcaattagttgttccaattatgaatgctcgttacgctttgaatgctgctaatgcaagatggatgagtttgtacgatagtttgtatggaactgatgtaatcgaagcatctgaagatagcacttcagaaagatatgatccggaacgaggagagattgtaataaagtatggtagagaatttttagataaatattttactttaaaagattttagctggaaaaaaataactggaattgcaattcaagataaagatttaaaa

SEQ ID NO: 237470 - DNA, 677 bp, Unknown
  Bacterial polypeptide expressing nucleotide sequence isolated from the Sargasso Sea
aatgaagataaccatagggggtttagaggttgatgagacccttttcgatttcgttacaacctcgcttctgtctggatcgaaccgggatgaggcagacttctgggttaatctagaaagtcttcttaaggagttcagccctcgaatggaacatctcttgcgggttcgtgacgactatcaaagccagatagacgactggcacgtacgccgccgcggaaacccgcatgatcatgaagcgtatacaagtttcctcactgagattggttatgtacaagaacggccaacctcagttcaggtagataccaaaaatgtggatccagaaattgctagcatccccggtccacagttggttgttccggttgacaatgctcgatatgcgataaatgctgcgaatgcgagatggggaagcctatacgacgccctgtatggaactgatgtcatcagtgaagatgatggggctgaaaaagctggcgcttataatcctgttcgtggcgccaaggtaatcgcatacggccgttcgcttctagaccaacacttccctctcaacgggatttctcatactgcttctgctggatacaaggtgataaattcagagcttcgcgttcattcagaaagtgaagagacaggtctcattgaccctgaacagttcgttggttttgtcggtaatccggcgaagcctg

SEQ ID NO: 237471 - DNA, 835 bp, Unknown
  Bacterial polypeptide expressing nucleotide sequence isolated from the Sargasso Sea
aatgagtgaaaaatatctaaaagttcaaaatttatcaatatcagagatactatttaattttataaataacgagatcatccctggaagtggaatagaggaaaaaagattttggaaaggttttaatgattcggtccatcaacttgctgaaaaaaatagacgactgataaagatgagagaacaatttcaaatgaatattaacaaatggcatatcgataataaagataaggaatttaagcaatctgaatatcaaaattttttaagaaaaataggttatttagttgaaaacaaaggagacttttttattagtcctaaaaatattgataatgaaatttcaataatagctggacctcaattagttgttccaataacgaattctagatacgctttaaatgctgcaaatgccagatggatgagtatgtacgacagtttatatggaactgatgtaatagagtcagaagagtcggctagtgagagatatgatcccgaaagaggaatggaagtaattaaatattctaaaaattttcttaataaacattttagtttagaaaagtctaattgggaaaaagtaaataaaattgaaataaaagaaaataaacttttgcttataaccgataaagaaaagttatatttaaaagataaaaagaaatttattggatacagaggtgaaaaaaaaaatccaacagctgttattttaaaaaataataatttacatattgaaataataataaatcgttatgcatatagtgcaaaaagcgatcctgctggaatagcagatataattttagagtctgcaattttctacatttgtgatcatgaagactctgttgcagcgtag

SEQ ID NO: 237472 - DNA, 913 bp, Unknown
  Bacterial polypeptide expressing nucleotide sequence isolated from the Sargasso Sea
ttgaaagtatcgagtgatcttgttcagtttgttaaggatgagttgctaaaagaaacagagatatcaccagaaaatttttgggcaggtttcgaaaaaactgtaaatgaattagcacctaaaaatagagaattaataagcattagaaaagatttacagagcaaaattgatgattggcatatcaaaaacaagggatcagaattcaattttgaagagtataaaaaatttttaattgaaataggctatttaaaaaatgaaggacctgattttcaaattgaaacaaaagatgttgatgacgagatagcaaaaattgcaggacctcaacttgtagttccagttatgaacgcaagatatgcactaaatgctgcaaatgctagatggatgagtttgtatgatagtctatacggaactgatattattgagcaatcagaagatagtgtttcagagagatatgacccactaagaggtgaaatggttattaagtatgggagagattttttagacaaatattttccattgaaagatttaagctggaaaaaaataacaagctttgccgtaaaagatggaaagttaaaaattcttaaaggtgctgatttagttagcttgatagatgtagataaatttattggtcatagaggcgaaagtgataatccttctgcaattattttaagaaataataatttgcatattgaaattttaaaagactctagagcgtttgctgctcaacaagaccatgcaggtataagcgatataatagtagagtctgcagtatcaactatttgtgataatgaagacagtgtagcagcagttgactccgaagataaaattatttgttacagaaattggctaggtttaatgcgtggagatctaaagtcaaaatttgaaaaagatggaaaatatatgagagaaagctaaa

SEQ ID NO: 237473 - DNA, 925 bp, Unknown
  Bacterial polypeptide expressing nucleotide sequence isolated from the Sargasso Sea
ttaaacaaaaaagattatgaaaaatttttaacaaatataggttatttagttaaacctagtcctaattttaaaattgagacaaaaaatgttgattatgagatttcaaatgtggcagcaccacaattagtagtaccaattatgaattcaagatatgcattaaacgctgctaatgcacgttggatgagtttatacgatagtttgtatggaacagatataattcaatcagatgagtccgccagtgaaagatatgatcctgaaagaggtgaagaagtaataagatatactaaaaaatttttagataaacattttacattaaagaaaaaaagctggtcacaagtttcggggatatcaattgaaaaaagtgatttgattttaaatcttattaatgaaaatactacgattaaagataaaaataaatttattgggtatagaggcaaaacaaacaaaccttcagcaataattttaaagaataataatcttcatgttgaaataataattaatcctgaagcttttagcgcaaaaagtgatccagcaggtatttctgatataataatggaatcagctgtgactactatttgtgatcatgaagactctgttgctggagtagatgcaaaagataaggtgcttggctatagaaattggttgggattaatgaaaggaaacctaaaagctgaatttgaaaaaaatggaaaaaagttgataagaaaattaaacccagatagaaaatttgttttgaaaactggggatttatctcatttacatggaaggtcacttttattaaacagaaatgttgggcatttaatgactaatccttcaattcttttatctgatggatctgaaattcccgaaggtattatggatgcttttgtaatatctatagcttggttacatgatttaaaaattggcaaaaattcacgaactggat

SEQ ID NO: 237474 - DNA, 839 bp, Unknown
  Bacterial polypeptide expressing nucleotide sequence isolated from the Sargasso Sea
agtaagaaactcagattggaaagtagcgccgataccaaaggacttacaagatagaagagtagaaattacagggccagtagatcgtaaaatggttattaacgcccttaattcaggtgcaaagacctttatgactgattttgaagactctatgtcaccaacttggaataatgtaattaatggtcaaattaatttatatgatctctggagaggtcaaattgattttctcgatccaaataatggaaaagaatataaattaaatccagaccctgctgtattaattgtcagaccaaggggttggcatcttgaggaagctcatattgaaattgatggagtaagaatttcaggcggtatatttgattttgctgtttatctttttcataatcacgcgaaattaaaagagtatggaacaggtccatatttctatctaccaaaaatggaaacatatctagaggccagattatggaatgaagtgtttgtgtatgcccaagaaaaactaggtattgaaaatggtacatgtaaagcaacaattttaattgagacactacctgcagcattccaaatggacgaaatattatatgaattaaaagatcatattgttggtttaaactgtggtcgatgggattatatatttagctacattaagagattagctttaaatccgaactatattcttccagaccgttcacaagttattatgggagatgcttttttaaactcctattcgctactattaataaaaacttgtcacaaaagaggtgctttcgctatgggaggtatggctgctcaaattcctgtaaagaataatgatgaagaaaatgataaagcattgaaaaagtaag

SEQ ID NO: 237475 - DNA, 687 bp, Unknown
  Bacterial polypeptide expressing nucleotide sequence isolated from the Sargasso Sea
tggatataggattaagttgtggattaagtggtaaagcgcagattggaaaaggaatgtgggcaatgcctgacgagatgaaagatatggtagacactaaaatagctcatccattatctggtgcaacatgcgcatgggttccatcacctacagcggcaacgcttcatgctatgcattatcatgaggtcgatgtactatcaaaacaagatgaactatcttcaagacagcatgctgatttagatagcatcttaacaattcctcttttaaaggaagatttagataaacaaacaattaggaatgagatagcaaacagtgctcaaggtattcttggttatgtcgtaagatggattgatcagggtattggatgttcaaaagttccagatattaataatattggtcttatggaggatagagcaacgtgcaggatatcaagtcaacatatttcaaattggattcatcatggtatctgttcggaagaagaggtaattgatatttttaaagagatggctttagttgttgacgaacaaaataaagacgattcagaatatcaaaaaatgggttcaaatttttctggatttgcatttcaagcttccctggatttagcaataaaaggaacttctcaaccaagtggatataccgagccgttgcttcacaaatggcgattagaatttaagaaaaatacctcttaaa

SEQ ID NO: 237476 - DNA, 638 bp, Unknown
  Bacterial polypeptide expressing nucleotide sequence isolated from the Sargasso Sea
gtgggcaatgccagatttaatggcagaaatgatgaaacagaaaattaatcacccaaaatctggagctaattgtgcatgggtaccaagccctacggcagcaactcttcatgcacttcactatcatgatgtggacgtaaaagaagttcaggaaaaaattctaagttctgcatcttctggtgcactaaatgatttgttaaccttacccttgcttaaaggagaaaatctatctgatattgatattgctagagaaattgaaaacaatgctcaaggtattttaggatatgttgtccggtggattgatcaaggcataggttgttcaaaagttcctgatattaataatattggtttaatggaagatagggcaacttgcagaatttcatctcaagcactggccaattggatagagcacggcattgtatcaaaagatcaagttttaaaagcgtttgataaaatggcaaaagttgttgataaacaaaacgcagacgatgagaaatatattgatatgagtggtaatgaaaattctatagcatttaaagcagcaaaagaacttgttttagatggaataaaccaaccctcaggttatacagagccaatacttcaccaaagaagattagaatttaaattgcaaaataattaag

SEQ ID NO: 237477 - DNA, 957 bp, Unknown
  Bacterial polypeptide expressing nucleotide sequence isolated from the Sargasso Sea
tcttaaagatagaagagtagaaattactggacctgttgatcgcaaaatgattatcaatgctcttaattctaatgttaatgttttcatggcagattttgaagattctctttctccttcttgggaaaacattcaaaacggattaattaacatgcgagatgctgctcacaggacaatttcttttcagcacagggtaactttaaaaaaatataatttacgttcaaatcctgcaattcttatgtgtagagtcagaggattacatcttaaagaaaagcatatttcatgcaatggagtaccattatatggggctttagttgattttgtaatgtacttatatcacaatcataaagctttagaagcatttggatcaggtccatatttttatattccaaaattacagtcctatcatgaggctaaattgtggaatgatatcatctcattttgtgaggacgagctgaaattaaaaaggggaacagtcagagtgacatgtcttattgaaactttaccagcagtttttcaaatggaagaaatattatatcaccttaaagaccatataattggtttgaattgtggaaggtgggattatatcttcagttttatcaagacattacaatcttatcctgaaaaattattacctgacagaagtattattacaatgaatcaaccatttttaaccagctattcttcattgctcgtaaatacttgtcacaaaagaggtgcttttgctatggggggaatggcagcttttgttccatcaaaagatcatgatgagaatagaaagattttacagaaggttaatgaagacaaattatttgaaataaataatgggcacgatggaacatggattgcccaccctgggttagctgattatgtaaacgaaattttcaaagataaatttgatacttttcaaactaaccaattagattttatttcagataaaaaaattactgctgaacaatt

SEQ ID NO: 237478 - DNA, 1059 bp, Unknown
  Bacterial polypeptide expressing nucleotide sequence isolated from the Sargasso Sea
catgaaaattcttgataccagcgtacctggaattgaaaaagttcttacagaagaatgccttgaatttatttatgatttagaaaaaaactttggtcacaaaaggaaagaattattaaaaataagagccgaaaaacaaaaagaatatgatgccggaaaattacctgattttccttctgaaactgaggaagtaagaaattcagattggaaagtggcgccaataccaaaggatttacaggatagaagagtagaaattacgggaccagttgatcgtaaaatggttattaacgctcttaactcaggcgcaaagacatttatgactgattttgaagactctatgtcgccaacttggaataatgttattaatggccaaattaatctgtatgatctttggagaaatcaaattgattttctcgatccaaataacggaaaagaatataaattgaatccagatcctgctgtattaattgtcagaccaaggggttggcatcttgaggaagctcatattgaaattgatggagtaagaatttcaggcggtatatttgattttgctgtttatctttttcataatcacgcgaaattaaaagagaatggaacaggtccatatttctatctaccaaaaatggaaacatatctagaggccagattatggaatgaagtgtttgtgtatgcccaagaaaaactaggtattgaaaatggtacatgtaaagcaacaattttgattgagacactacctgcagcattccaaatggacgaaatattatatgaattaaaagatcatattgttggtttgaactgtggtcgatgggattatatatttagctacattaagagattagctttaaacccgaactatattcttccagaccgttcacaagttattatgggagatgcttttttaaactcctattcgttactactaataaaaacttgtcacaaaagaggtgctttcgctatgggaggtatggctgctcaaattcctgtaaagaataatgatgaagaaaatgataaagcatttgaaaaagtaagaaatgataaggagcgagaagttaataatggtca

SEQ ID NO: 237479 - DNA, 849 bp, Unknown
  Bacterial polypeptide expressing nucleotide sequence isolated from the Sargasso Sea
ggcgcgttatgacgcaggggatttacctgattttcgtgctgacactgccgatatacgtgctggtaactggacagtagctgctattccagctgacttacaggacagaagagtggagatcaccggtcctgtggatcgcaaaatgatcatcaatgcgttaaatgctgatgtaaaagtctttatggccgactttgaagactcgcaagcgccaagctgggatggggtgattgaaggccagattaacttacgggatgccaatttaggcactatcagctacagcgacccacagtctggtaagcaatatgcgctgcgggacaaacaggccttattgatagcgcgggttcgtggtttgcatctgtgggaaaaacatttagaagtcgacggcgaggctgtgccaggttcactggttgattttgctttgtactttttccacaactaccaaacccgtttagctaatggctctggggtctattattacctgcctaaactgcaaagctataaagaagcagcctggtgggatgcggtattccgttttactcaaactaaatttaaccaggctgtcggcactatccgcgctactgtactgattgaaaccctgcctgcagtgtttgaaatggacgaaattctgcatgcgctgcgtgagcatatagtggcgttgaactgtggccgttgggactatattttcagctatatcaaaaccttaaagaatcatgcagaccgcgtcctaccagaccgtcaggtggtgactatggaccagccgtttttatcggcttactcaaaactgctgatcaaaacctgtcataaacgtggcgctttggcgatggggggtatggcggcttttattccggcaaa

SEQ ID NO: 237480 - DNA, 802 bp, Unknown
  Bacterial polypeptide expressing nucleotide sequence isolated from the Sargasso Sea
aatatggcaaaaaaatatacatctgttggtcaattatcagtagcttcagaattattgaattttgttaataatgagcttttacctgggactggtatttcaaatgaagttttttggaacgggttagacaaatgtgttcatgagcttgcaccaaaaaataagaaacttcttgaaaatagagagaatcttcaaaaaaaaattgatgtttggcataaagatagaaaaggtgaaaacattaacattaaagaatatataaattttttggaagaaattggttatttaaaaaaaactggagaaaaatttaaaattgaaaccaaaaatgttgacgaagaaatatctaatattgctggaccacaattagtagtaccagtaatgaatgctagatatgctctgaatgctgctaatgcaagatgggggagtttgtatgacgccttgtacggaacagatgttattccagaagacaatggagcggaacgtggtaaaaaatataattacgttagaggagagagggtaatacaatactctcgtaaattattggataattttgtacctctacaaagcggtagttggaatgatattaaagaaattccaaaagttgaaaataatcagttaagtttaaaattaaaaaatattaaacaatttgcaggatacaataaaaaatcagatgtcttatcatccttgttactgataaataacaatcttcatatagatattaaatttgacccaaaacataaaatagagggaactaaagataaagcgggaatatacgacatcattttagaatcagctttaacaacaataatgg

SEQ ID NO: 237481 - DNA, 533 bp, Unknown
  Bacterial polypeptide expressing nucleotide sequence isolated from the Sargasso Sea
gttaagagaggcaaatgctggtcacgacggcacatggattgctcatcctgggttatctcagattgcaatgaatgcgtttaatcaagccatgggatcatctcccaatcagattcccaataagagaaatgatgttttagtgaatgctcaagaccttatcaaggtcccggatggtaatattaccgaagatggtttgagacagaacatatcaataggaattcagtacattgaggcatggctctcgggcaatggttgtgttccaattcataatctgatggaggacgctgctacagcagaaatatcgcgttcacaaatctggcaatggattcatcatcgtgcaaaaaccacagattcaaataagactataaccgaagagtatttcatcaagacgctcgaggatgaaatggatcaactgaagacagcaagaggttctgaaggcgattaccttcaaccggcaattaatttattcaaggagatgtctacggattcagaattcgatgaattcttgacattgccagcatataaacacctctaat

SEQ ID NO: 237482 - DNA, 960 bp, Unknown
  Bacterial polypeptide expressing nucleotide sequence isolated from the Sargasso Sea
aacttattagtaaaaacgaacttaaaatcaaccaaactttatttaactttattaatgaggaggtgctacctggtacagacattgtacaagatgatttctggagtaaatttgcaaatgtggtgcacgagctagctccaattaataaaaaacttattgaaaaaagagagagaatacaaaaacagattgatgactggcacttaagcaactctaaagaaaaatttgataaaaaaaaatacactcaatttcttaaatcaatttcttatatagtagaagagggcgataattttaaaattgatacctctaatgttgatgatgaaatagcaaaaattgctggtccacaacttgtagttccagttgataatgccagatacgcattaaacgcagcaaacgcccgttggggaagcttatatgactcgttgtatgggacagacgttatacctggtgaaaaaggtaaatcatttaataaagaacgtgcagataaagtaataacgtatgtaagagattttcttgatgaaattttttcattaaaaaaagatagttggaaaaatattgacaaaattgaaattgaaaatgataaattaattttaaatatcaatggaaaaaaaattaatttaaaaaatgaaaatcaattcgtaggatttaatggtgataaatcatctccaacttctatattattgaaaaataacaaccttcattttgatataattatagatccaaatagtccaatcggaaaaaatgataaagcaaatatatcggactttatagttgagtccgctatatctacaataatagataatgaggactcggtagcagctgttgatggtgaagacaaggtaagctgttatagaaactggttaggccttatgaaaggagacttaactgctgatatggaaaaaaatggaaaaaaatttgtaaaaaaattaaatccaaataggacttatctttcaaaaagagggtaaa

SEQ ID NO: 237483 - DNA, 718 bp, Unknown
  Bacterial polypeptide expressing nucleotide sequence isolated from the Sargasso Sea
aatgaaaaaaattagcttaaataatttgcagataaatgaagatttattgcaatttgtaaatgaagaagccattcctggaacaaatttagatataaataatttttggagagattttgatgcagctgtccataaattggcgcctattaacaaaaagttattaaaaaaaagggatgagatacaaaaacaaatagatgaatggcacttgtctaaaaaaggatcggattttgaaaaaaaagaatatataaattttttaaattcaattggatatattgctaaaaatcaaggagactttaaaattgaaacaactaatgtagatgaagaaatctcatctattgcaggcccccaattagtcgtaccagtagataatgcaagatatgctttaaatgcagccaatgctcgttggggaagtttatatgatgcggtctatggaactgatgtaataccaggagaaataggaaaagcttatagcgaagaaagaggaaaaaaagttataaaatatgttagagaattcctagatgatatttttaagataaatgatggtagttggaaagaagttacaaaaattcaaattaagaatagtgaattacaatttttagtaggagataaattagtattcttagaaaataaaaatcattttataggttttaacggaaaaaaagaaagccctagttcagtattattaaaaaataacaagttacatattgatatcattattgat

SEQ ID NO: 237484 - DNA, 488 bp, Unknown
  Bacterial polypeptide expressing nucleotide sequence isolated from the Sargasso Sea
aagaaagaaagctaaattagatgatcttcttgaaatacctatacatcttaaacaaagttggtctaaagaacaaatatcaaaagagctaagaaataatgcccaaggtatactaggttatgtagtaagatggatagatcaatctgttggttgctcaaaagttccagatattaatggtataggacttatggaggatagagcaacatgtagaataagtagtcaacacatagcaaactggctgcatcatggaatttgtagtaaaaaacaagttcttgaaatcatgaaaagaatggcaaaaattgtagataatcaaaacttgaaagataaaagtatgagagggcaagcaccttaccaggcaatggcaagtaattactatcaatcaatagcttttaagacctcatgcgatttaatttttcatggaaaaaaccagccttctggatatacagagcctttgcttcacttcaacagaataatgaaaaaatcaatctgag

SEQ ID NO: 237485 - DNA, 520 bp, Unknown
  Bacterial polypeptide expressing nucleotide sequence isolated from the Sargasso Sea
aaatgttttctctattcaccaaaaaataaaatttagaaaatctgctaaattagatgatcttcttacaataccagtagataaaaaaaaaaattggtccaaggaagatattgaaaaagaattaaaaaataatgcccaaggtattttaggctatgttgttagatgggtcgatcaatcggtaggatgctcaaaagttccagatataaatggagtaggcttaatggaggatagggccacatgcagaataagtagtcagcatatagctaattggcttcatcacggtatatgcagcaaaaaacaagtcttagaaataatgaagaaaatggccaaagtagttgattatcaaaatttaaaagatcgtggcatgaaagatcaagacccttatcagcctatggctggaaactttgaaaaatcaattgcttttaaagcagcttgtgatttagtctttcacggaaagtttcaaccgtcagggtatactgaaccattattacattttaatagattaatgaaaaaatcaatctga

SEQ ID NO: 237486 - DNA, 865 bp, Unknown
  Bacterial polypeptide expressing nucleotide sequence isolated from the Sargasso Sea
tatggcactgatgctatgggttctttacctaaatctggcacttatgatgcagataggggacaagatgtgatagactttgctaaatcatatttagataaaatattaccgttaaataattgcatttgggaaaacttaaccaatatacaacttctagaaaaaaagattacctttaaaaataatgagaaaaatatatctttacaagatgaaacttctctaattggctatataaaaaataattctaatgaactaaaagaagttatttttgaaattaataacctaaagattagaatattatttgatgcaaatgatagaatcggaaaagaagataaagcaaatatatcagatatctattttgaatctgctatatctacaattatggattgtgaagatagtgtcgctactgtagatggtacagataaagttttagcatacaggaactggctagggcttatgaaaggtgatttatctgcatcgttaaaaaaaggtgataaagtaatagaaaggaaattaaataaagacataaattatatttctattgatggtaaagaaaagtttttaaaatcaagatctctaatgttaataagaaatgttggtcatttaatgttaaatcctggtattttagatgctgatggcaatgagatgcctgaaggtattatggatgcaatatttacttctttaatagctattcatgatttaaaaaagatagaagaaccgagaaatagtgaaaaaagatcaatttatgttgtaaaaccaaaaatgcatggccccgaagaagttgaatttgcagatgagatattcaccgaagttgaagaaatgttaaaattacctaagtatacagtaaaactaggtattatggatgaagaaa

SEQ ID NO: 237487 - DNA, 562 bp, Unknown
  Bacterial polypeptide expressing nucleotide sequence isolated from the Sargasso Sea
aaattgtgcatgggttccttctcctacggcagctgctcttcatgctcttcattatcatcaaataaatatattcgacatacattctaaattaaaaaatagagaaaaggctaaattagatgatttattaaatataccaattataaaaaaacctaaatggtcagtagaagaagtaaataaggaaatttcaaattcttcacaaactatactcggctatgtagttagatggatagatcagggtgtgggatgctcaaaagttcctgatattaataatgttggattaatggaagatcgagctacattaagaatttcatctcaacatattacaaattggctttatcacggtatttgcagcagaaaacaagttttagaaattatgaaaaaaatggcaaaagttgttgatgaacaaaataaaaatgacaagctttatgaaaaaatgtcgccaaattacgatcgatctattgcattcaaaacagcatgcgagctagtattccaaggtaaagatcagccatctggctatacagaacccctattgcatttaaatagattaattaaaaaaaattaa

SEQ ID NO: 237488 - DNA, 499 bp, Unknown
  Bacterial polypeptide expressing nucleotide sequence isolated from the Sargasso Sea
aaagaattagctaaaagaaagtccgcaaatttatctgatcttttaaccattccaatagcaaagaagcctaactggtcttttgaagaaatcaccaaagaattaaaaaataatgcacaaggtattttgggttacgtagttagatggatagatcaatcagtgggttgttccaaagtaccagatattaatgggataggtttaatggaagatagagctacatgtcgaataagtagccaacacattgctaactggttacatcacggtatttgtagtaaaaaacatgttttagaaattatgaaaaaaatggcaagagtggtagataatcaaaatctaaaggatccaagtatgaaaggaaattctccttacatttctatgtcggacaactatgaaaagtcgacagcttttaaagctgcttgtgaacttgtattccacggaaaaactcaaccatcgggttatactgaaccaattcttcaccttaacagactactaaaaaaaaattaat

SEQ ID NO: 237489 - DNA, 613 bp, Unknown
  Bacterial polypeptide expressing nucleotide sequence isolated from the Sargasso Sea
aatgctcaatatgtataaaactaaaaccatgcaccctgaatctggggcaaactgtgcttgggttccatcaccaacaggcgctactcttcatgccatgcactatcatcaaattttagtatcagatcgccaagaaaaattacttgaacggactaaagcaagccttgatgatattttaacaattcccgtcatgtcagatcacgaatctttatcttcagaagatgtgcaaaaagaattagataataatgcccaaggcatcttaggatatgtagttcgatgggtggatcagggagttggatgctccaaggtacctgatataaataacatcggtcttatggaagacagagctacttgcagaatatcaagtcagcacattgcgaattggttacatcattctatctgctctgaagatcaagtattggaaaccatgaagagaatggcgcttgttgttgatcagcagaattctggagatccaacctatcaacctatggcaccgtcctatgatggtattgcatttaaggctgcctgtaatttagcgattcaaggaagggtgcagcccagcggttatactgagccaatcttgcataaaatgagattaaaatttaaagctcaatga

SEQ ID NO: 237490 - DNA, 886 bp, Unknown
  Bacterial polypeptide expressing nucleotide sequence isolated from the Sargasso Sea
tttattaataatgaagcactaaaaggtattgagattgatgaggagatcttttggaatggattttcagatattgtagatacttactatccaaaaaatgtcgctcttttagaaaagcgaaagaatttacaaaatcaaatcaacaattggcataaagaaaatagatctagagatactgatcttgatgaatacaagagttttttaaaagaaataaattatattgttgatgaaggacctaatttcaaaattacaacatcaaatgtggatgaagaaatctcaacaatttgcggtccacaactagtagtacctatcacaaatgcaagatttgctattaatgcagtaaatgcaagatggggcagcctatacgatgctctttatggaacagatgcattgggtgagttaccacaaggaaatagttatgatgctgaaagaggaaataaggttgttaaatttgctaaatcacatttagataaatttgctccactagaaaatataaaatggagtgaaattaataaaatagaattaaaagataataaaattactttaggtagcataaatgaaaattcagtaaactttgtaaataaaaatcagcttataggttggaagtcttctaaagacgataaactactagaattgattttattaaaaaacaatcttcattgcagaatattaattaatgaaaatgatgcaattggaaaaaatgatcctgccaatatcgcagatatattagtagaatctgcaatatctagtattcttgattgtgaggatagtgtggcaactgttgatgctgatgataaaattttagcatatgaaaactggttaggtttgattaaaggagatttagaagctgaatttgtaaaaataataagactgtcaagagagtgttaaa

SEQ ID NO: 237491 - DNA, 796 bp, Unknown
  Bacterial polypeptide expressing nucleotide sequence isolated from the Sargasso Sea
atgaatttagtagagaaaaatgggttaaaaattagttcagctttatacgaatttattaataatgaagctattccgggcacaaaagttgattctgaagatttttggaagagtttttctaatgttgctcatgaacttgctcctataaacaaaagtttaattgaaaaaagggaagtaattcaaaaaaaaatagacgagtggcataaatctaatcaaggaaaagaattcgataaagaaaaatatatcaaatttttaaaatcaattggttatttggttgaagaaaaagaagattttgaaattgagacacgtaatgtagataaagaaatagcttcaatagctggaccgcaacttgtagttccagtggataatgctagatacgccctgaacgcagcaaatgcaaggtggggaagtctttacgatgcgttgtatggaacggatgttattccaggagataaatttaaagattataactcccaaagagcatcgaaagttgtaaaatatgttagagattttttaaataaaagttttccactcaaggataaaacttgggaagaaatttcaaaaataataataaaagaagacaaattaatttttctaattgattcaaaaaaaactgaattgaaaaataatgaacaatttattggtttcaatggtgagagggataatcccaattcaattctattaaagaataataatctacatgttgatatttcaattgatccgagtagcattgtgggaaaaaatgataaagcatctatatctgatattatagttgagtctgcgctatcaacaatagtag

SEQ ID NO: 237492 - DNA, 457 bp, Unknown
  Bacterial polypeptide expressing nucleotide sequence isolated from the Sargasso Sea
ttacatacctgtgaacaccaagaaagattggtctaaagatgaaatagagatacaattaaaaaataatgctcaaggtattttaggttatgttgttagatgggttgatcaatctgtaggatgctcaaaagttcccgatataaatggtataggtttaatggaagacagagctacatgcagaataagcagtcaacatatagctaattggcttcatcacggtatttgtagcaaaaaacaagttttagaaattatgaagaaaatggcaagagtagttgattatcaaaatttaaaagatcgtggcatgaaagatcaggacccttatcaaccaatggcaggaaactttgaaaaatcaatagcttttaaagcagcatgtgatttaattttccatggaaagcatcaaccttcaggatataccgaacctttactacattttaatagattgataaaaaaatcaatctga

SEQ ID NO: 237493 - DNA, 642 bp, Unknown
  Bacterial polypeptide expressing nucleotide sequence isolated from the Sargasso Sea
ctgcgccagatttaatgggagaaatgatgaagcaaaaaatttctcatcctctagcaggagcaaattgcgcatgggtaccttctcctactgctgcagctttacatgctcttcactaccatgaggtagatgtttttgctaaacaaaaagaattatcaaaaaggaaagtggctaaactatctgacctattaacaatcccgatagaaaaaaaacctcgctggtctatggatgaaataactaaagaattaaaaaataatgcacaaggtattttagggtacgtagttagatggatagatcaatctgtgggttgttcaaaagtgcctgacattaatggaattggattgatggaagacagggccacttgccgaataagtagtcaacacatagctaactggttacaccatggcatatgcagcaaaaaacatgttttagaaattatgaaaaaaatggcaaaagttgttgatagtcaaaatctaaaagatccaagtatgaaaggacatacaccttacaaaccaatgtcagataattttgataaatcgacagcctttaaagctgcctgcgaactagtatttcatggaaaaactcagccatctggatatacagagccaatcctccatctcaaccggcttcttaaaaaaaattaat

SEQ ID NO: 237494 - DNA, 774 bp, Unknown
  Bacterial polypeptide expressing nucleotide sequence isolated from the Sargasso Sea
aacaagggatcagaattcaattttgaagagtataaaaaatttttaattgaaataggctatttaaaaaatgaaggacctgattttcaaattgaaacaaaagatgttgatgacgagatagcaaaaattgcaggacctcaactggtagttccagttatgaacgcaagatatgcactaaatgctgcaaatgctagatggatgagtttgtatgatagtctatacggaactgatattattgagcaatcagaagatagtgtttcagagagatatgacccactaagaggtgaaatggtcattaagtatgggagagattttttagacaaatattttccattgaaagatttaagctggaaaaaaataacaagctttgccgtaaaagatggaaagttaaaaattcttaaaggtgctgatttagttagcttgatagatgtagataaatttattggtcatagaggcgaaagtgataatccttctgcaattattttaagaaataataatttgcatattgaaattttaaaagactctagagcgtttgctgctcaacaagaccatgcaggtataagcgatataatagtagagtctgcagtatcaactatttgtgataatgaagacagtgtagcagcagttgactccgaagataaaattatttgttacagaaattggctaggtttaatgcgtggagatctaaagtcaaaatttgaaaaagatggaaaattatatgagagaaagctaaatccaaatagaagttatatttctaaggaaggtaaaggtttaaaa

SEQ ID NO: 237495 - DNA, 685 bp, Unknown
  Bacterial polypeptide expressing nucleotide sequence isolated from the Sargasso Sea
agatataggtataagctgcggattaagcggcaaagcacagatcggaaaaggaatgtgggcaatgccagatgagatgaaagatatggtagagactaaaatagcccacccattatctggtgcaacatgcgcatgggtcccgtcacctacagcggcaacacttcatgcaatgcattatcatgaggtcgatgtgctatcaaaacaagatgaactatcttcaagacagcaagctgatttagataacatcttaacaattcctcttttaaagcaggatttagataaacaaacaattaggaatgagatagcaaatagtgctcaaggcatacttggttatgtcgtgagatggattgatcagggtattggatgttcaaaagttccagatattaataatattggccttatggaggatagagcaacgtgtaggatatcaagccagcatatttcaaactggattcatcatggtatttgttcagaggaggaagtaattgatattttcaaagagatggctctagttgttgatgagcaaaataaagatgattcagactatcaaaaaatgggatcaaatttttctggatttgcatttcaagcttctttggatttagcaataaaaggagtatctcaaccaagtggatataccgagccgttgctacataaatggcgattagaatttaagaaaaataccccttga

SEQ ID NO: 237496 - DNA, 475 bp, Unknown
  Bacterial polypeptide expressing nucleotide sequence isolated from the Sargasso Sea
attaaaaaaaagaaaaaaagctaaattagatgatttattaactttaccaatagtgaaaaaacctaactggtcattagatgaaattaataaagaaatttctaattcttctcaaacaatattgggctatgtagttagatggatagatcaaggagtagggtgctcaaaagtacctgacataaacaatgtgggtctaatggaagaccgagctacattaagaatttcatcacagcaaatcacaaattggctttatcacggtgtttgtagcagaaaacaggttttggaaataatgaagaaaatggcaaaagttgttgatgaacaaaataagcatgataaaaattatcaaaaaatgtcacctaattatgatagatctattgcatttaaaacagcatgtgaattggtttttcaaggtaaagatcaaccatccggatatacagagcctctactacatttaaacaggttaattaaaaaaagttag

SEQ ID NO: 237497 - DNA, 464 bp, Unknown
  Bacterial polypeptide expressing nucleotide sequence isolated from the Sargasso Sea
tatgactaaaagattaaaccgtggcaatttacaaatctcagaaactcttattaattttatagaaaaagaggctctgccaaatactcatgtagatgaagcaagcttttggaataattttgaattaattttaaataagtttgtacctaaaaataaagaactgcttgaaattcgaaataaaatgaaaaaattaattgacgaattttataaaagtaattctggaaaaataattgaccaagatgaatacgttagttttttaaaaaaaattaattatattgttcctgtaggggatgattttaagattgaaacaaaaaatatagatcccgaactcgcgacaaaagctggaccacaattagtagttcctgtgacaaatgcaaggtatgcgcttaatgctgcaaatgctagatggggtagtttatatgatgccctttatggaactgatgctatttctgatgaaggtaatgcag

SEQ ID NO: 237498 - DNA, 319 bp, Unknown
  Bacterial polypeptide expressing nucleotide sequence isolated from the Sargasso Sea
aaagttccggatataaataatgttggtcttatggaagatagagcaactcttagaatatcatctcaacatattgcaaattggttgcaccacgggatctgtaaagaagatcaagtcatggaagttatgaagaagatggccaagattgttgatgagcaaaataaaaatgatcctacttatcaaaaaatgtctgataactttgataaatctgtagctttttcagctgcttgtgatcttgtatttaaaggtcgagttcaaccgtctggttatacagaacctttgcttcatcaaaaaagattagaaaagaaagctagtaactaac

SEQ ID NO: 237499 - DNA, 786 bp, Unknown
  Bacterial polypeptide expressing nucleotide sequence isolated from the Sargasso Sea
cctgaaacctaaagaggttggcttaattatttctcctagtcttaaagagtttgtaagaactgaagtacttcctggattagatatttctacgcattatttttggagctcattcgaaagtttgatagataaatttgttaatcgaaataatgagttattagataaaagaaattacatgcaagaccaaataaatgactggcatataaagaacagaaactctgaatttaaccttgaagaatataaaaattttctaaccgatattggatatatttatcctcgaagtggtgattttaaaattgagacttggaatgtagatccagaaattagaaaaattgctggtcctcaattagtcgtgcctgtgatgaatgcaagatttgctcttaatgcagtcaacgcaaggtggggaagtctttacgatgctttgtatggaacagacgtaatttcagaagaaaatggtgcacaaagagagggaggttataaccctgtaagaggagataaagttatagaattcgcaaagaaatttttagatgacacaattcctctagataaaggtacatatgatcaagtaatcaaatttgactttattgacagtgagttattaatgactctcaaagatgggtcgaaagtaaaccttaaagacattgataaatatgttggatacaaagataaaggtgaaggcgcttatggacttctatttaaaaataataaccttcactttgaaatacaaattgataggagtcatccaattggtcaagaggacatagctggaaatcaagatatattaatgga

SEQ ID NO: 237500 - DNA, 658 bp, Unknown
  Bacterial polypeptide expressing nucleotide sequence isolated from the Sargasso Sea
ttaaagggaaatgctcaaataggcaaaggaatgtggccaatgccagatgaaatgttagagatgtataaaactaaaacaatgcatcctgaagcaggagctaattgtgcatgggtaccttcaccaacagcagcaacaattcatgcaatgcattaccatcagatatctgttcaagatcaacaaggtaaaattatcaatagagataaagctaaattggacgatcttcttaatataccttttttgaaaaaagataagttgccatcaaaagaggaaataactgctgaattagaaaacaatgctcaaggtatattgggatatgttgttagatgggtagatcaaggaataggctgttcaaaggttcctgacattaatgatattggcctaatggaggacagagctacatgtagaatatctagccaacatatttcaaattggcttcatcatggattatgttcagaagttgaagttgttgagactatgaagaaaatggcaaaaaaagttgatcaacaaaacaaaaatgatgtgaattataaaaaaatggctccctcatatgatggaatagcttttaaagctgcatgtgaacttgccattaaaggaaaacatcaaccaagcggatacactgaaccaattcttcatgagatgagactaagaagaaaataat

SEQ ID NO: 237501 - DNA, 671 bp, Unknown
  Bacterial polypeptide expressing nucleotide sequence isolated from the Sargasso Sea
gatgatcgaccaagcaggactgcaagtcgcgccagcgctgagccagttcattgaaaacgaagcgctgccgggcaccggcatcgacaaggccgcgttctggagcggtttctcggccctggtgcacgacctggcgccccgcaaccgcgagctgctcgccgaacgcgaccgcctgcagcaggaactcgacacctggcaccgcgcgcaccccggccccgtgcgcgaccacgccgcgtatcgcgctttcctcgaacaaatcggctacctcgtgccggtcccgtcgaacgtcgcggcagccaccgcgaacgtcgacagcgagatcgccacgcaggccggcccgcagctcgtcgtgccgctgtcgaatgcgcgctatgcgctgaacgccgcgaacgcccgctggggcagcctgtacgacgcgctgtacggcaccgatgcgctgcctgaagacggcggcgccgaacgcaccacggcctacaacccgacgcgcggccagcgcgtgatcgactacgcgcgcaacgtgctcgacaacgcggcgccgctcgcgagcggctcgcatcgcgacgcgctgcgctaccgcgtgcaggacggccagctcgccgtcgaaaccgcgaagggcgtcgtgcatctcgcgcagccggcgcagttcgtcggctacaagggcgcggccgacgcgc

SEQ ID NO: 237502 - DNA, 631 bp, Unknown
  Bacterial polypeptide expressing nucleotide sequence isolated from the Sargasso Sea
tatgccagataaaatgaaagaaatgatggatgaaaaaattagtcatttaaaagctggagccaattgtgcatgggtaccatcacctacagcagcatctttgcatgctttgcattatcatcaaataaatatatttgacgaacaaaaaaaaattttaaaacgtgagcaagccaaacttgataatcttttaacaataccaattgcaaatagacctaattggtcactagatgaaattaattctgaaatttctaactctgctcaaacacttttaggatatgttgtaagatggattgatcaaggagttgggtgttcaaaagttccagatataaataatgttggattaatggaagatagggccacactaaggatctcttctcagcatatcgctaactggatacatcacggaataacaacaaaattacaagtcatcgagattatgaagcaaatggcgaaaattgtagataagcaaaatgaaagtgacaaaaattatattaaaatgagcgatgactttgagagatctcaagcattcaaaacagcctgcgatttggtctttaaaggaaaagaacaaccatctggatatacagaacctcttttacattataatagattgaagaaaaaaattaatcagaattag

SEQ ID NO: 237503 - DNA, 844 bp, Unknown
  Bacterial polypeptide expressing nucleotide sequence isolated from the Sargasso Sea
aaagacgagttaatattagaaacttttaaaaaaaagacaaagcttaaaaataaaaataagtttataggctatagggggtctaaagaaaaaactgaggctgttattttaaaaaataataatctacatgttgaaataatcataaatccagatgcttttagtgcaaagggtgatgctgctggtatttctgatgtaattgttgaggcagcggttaccacaatatgtgatcatgaagattctgttgcaagtgttgatgcttcagacaaagtgattggatataaaaattggctaggacttatgaaaggaagtctaaaagccaattttgaaaaaaagggaaagtcattaatcagaaaacttaaccctgatcgaaaatatattacaaaaaacggtgtagtatcaaaattacatggtagggctttattgcttaacagaaacactggtcatctaatgacaagtccagctattcttcttcaagatggttctgaaattcccgaaggcataatggacgcttttattacttcattatgttcattgcatgaccttaaaataaaaaaaaattctaaagaagggtcaattatgattgtaaagccgaaacaacatggtccagatgaatgtgagtttaccgactatttgtttagcaaagtagaacaagttttaaacttaaaaaagtatacaattaaatgtggaataatggatgaggaaagaagaacatctatcaatcttaaggagtgtattagaaaattacagaatagagttttttttattaatacaggttttttagatagaactggtgatgaaatccatacatcaatggagtcaggtccaagattaaaaagggagacatgaa

SEQ ID NO: 237504 - DNA, 625 bp, Unknown
  Bacterial polypeptide expressing nucleotide sequence isolated from the Sargasso Sea
tgccccagatgaaatgaaaaaaatgatagaggaaaagataggacatctcaaagctggtgccaattgtgcatgggttccatctccaacagccgcatcactacatgctttgcattatcatgaaatagatatatttgatgttcaaaagaaattagcattaagatcgccagcaaagttagatgatcttttaaatattcctatagcaaataggcccaattggtcagttgacgaaattaactcagaaatatcaaattcggctcaaactttactaggatatgttgttaggtggattgatcaaggaattggctgctcaaaagtgccagatattaataatattgggttaatggaggatagggcaactttaagaatatcatcacaacatatagccaactggatacatcatggaattacaaccaaaattcaagttattgaaataatgaaagaaatggcaaaagtagtagatgaacaaaataaaaatgacataaattataaaaaaatgagtgacaattttgataaatctttggctttcaaaactgcttgtgagcttatttttaaaggtaaagaacaaccctctggctatactgaacctctccttcacttttatagattagaaaaaaaattatcttaa

SEQ ID NO: 237505 - DNA, 709 bp, Unknown
  Bacterial polypeptide expressing nucleotide sequence isolated from the Sargasso Sea
atggtagaaaaaagtggcttaaaagttagttcaactctcctcgagtttataaataacgaggtaattccgaacactaacgttaatattgataaattttggaaaaaattttcagaagttgtccatgaactgtcgccgatcaataaagctttaattcaaaaaagagaaacaatacaaaaaaaaatagacgattggcataaatctaataaaggtaaagagtttaataaaaaagaatacgtgaatttcttaaagtcaattgattatttaattgatgaaaaaaatgactttgagatagagacggccgatattgatgaagaaatttcctctattgcaggacctcaactagtagttccagtagataatgctcgttacgcattgaatgctgcaaatgcacgttgggggagtttgtacgatgcactttatggtacggatattatatcaggaagtataggaaaaagttgggatcaagagagagccaaaaaagtgataaattttgtaagagattttctagacgaaagaattccattagcacaaaccagttggaagaatgtttcaaaatttaaaatagaaaaaaataaacttgttgtattttcgaattcaaaagaatactttctaaaaaacaatgagcagttcatagggtataaaggtgataaagaaaatccaaattcaattttaataaagaataacaatcttcatatagatattttaataa

SEQ ID NO: 237506 - DNA, 777 bp, Unknown
  Bacterial polypeptide expressing nucleotide sequence isolated from the Sargasso Sea
gtagacaatgaaatatcaagtatctgtggtcctcaattagtttgtcctgtttctaacgcaagatttttattaaatgctgcaaatgcaagatgggtaagtttgtatgatagtttgtatggaacagatttaattcctgaaacccatggagctttaagaggaaaaacttataacccgataagaggtaagaaagtaattctttatgcgcgtgatttgttagacaagtatattcctcttgagggaaaaagttggaaagaaatatcaaaaattccagaagtaaaaaataataagctaaatttaaaacttaaatatcccaaacagtttgttggatatagaaaaaaaactaataaattgtgctcacttttatttataaataataatcttcatattgatattttatttgatcaaagtggagacatggaaattaataaccctgaaggtaatcaagatgtattaaaaattcatgatattattttagaatctgcaatctcaactatttgtgatcatgaggatagtgttgctgcagtagatgcggaagataaagttcttggttatcaaaattggttgggattaatgaagttagaattaaagtcagaatttaaaaaaaatggaaaaaatattataagaaaattaaaccctgatagatattatgtttcttcaaagggtaaaaaaattaaattacacggaagatctttaatgttaaatagaaacgttggtcatcttatgactaatcctgcgatacttttaaaagatggttctgagtgcccggaaggcatacat

SEQ ID NO: 237507 - DNA, 769 bp, Unknown
  Bacterial polypeptide expressing nucleotide sequence isolated from the Sargasso Sea
atgaacaagaaataccaaaacgttaataaccttaaagtttctgatgagttattgtcatttgtaaatgatgaattgttaaaagaaacttcaatttccccagaaaaattttggcaaggatttgataatatagttcatgaattatcaccactaaacaaaaaattaattgaaaaaagagaaattttacaaaaaaaaatagatgattggcatattaaaaatagaggagctgaaattaaaattgaagaatataaaaaatttttaaaagagattgactatttgaaggatgaaggaagtgactttcaaattgaaacaagtaatgtagatgacgaaattgctcgaatagctgggccgcaattagtagtgccaataatgaatgctaggtacaccctaaatgctgctaacgcaaggtgggtaagcttatatgatagtctttatggaacaaatataattgagtctgaagaaggtggaagtgaaagatatgatccgaatagagggcaagaagtaataaaatatgtaagagaattttttgataaatgtattcctattcaagggacaagttggaaaaatattgcagctttaaaaatagttaacaaagaacttgttattttaaaagatgattatgaatataagctaaaagataaaagtaaatttgtaggccacagaggtgatgcaaataagccagaagcagtaataatcaaaaataataatctccattttgaaataataattaatcctaaagcatttagtgctgctcatgatatgcaggaataag

SEQ ID NO: 237508 - DNA, 763 bp, Unknown
  Bacterial polypeptide expressing nucleotide sequence isolated from the Sargasso Sea
ataaaaaacaaagataagtttttcaataaagaggtttataagagttttctctataaaataggttatattgtacctgagagagaaaatttcaaaattaaaactaaaaatatagatgacgaaatttcttctttagctggtccacaattagtagttccattactaaatgcaagatacgctattaacgcagccaatgctaggtggggaagtttgtatgacgctctttatggatcagatataatctcttctaaaggcaagttgaaaatttcaaaaaactataatcgctatagaggtgctgaagttatcaaattagctaaaagtcatttagataaatacttcccattagaaggttattcttattatgatgtaaaaaatgttgaaattatagactcaaagttaaatttcttctcatcagattctgagaaggttaaattagttaatgaaatgcaatttgtaggatacattgggcaaaaaaaatcacctgatgaaataattttagagcaaaatggacttaaaatacgtttgcaaattgataaactagacccaattggaaaaaatgataattttaatcttaaagatattaaagtggaatctgctctttcagtaattatggattgtgaagattctattgtttctgttgatgcttctgataaagtttctacctttaagaattggttagggcttttagatgagacaattcaagttaaagtctctaaaaatcaaaaatcttttataagaaaacttaataatgatttggagtatatac

SEQ ID NO: 237509 - DNA, 684 bp, Unknown
  Bacterial polypeptide expressing nucleotide sequence isolated from the Sargasso Sea
actttaaaaaaatataatctgcgttctaatccagctatcctgatgtgcagggttcgtggattacatttaaaagaaaagcatattacatacaataatactcaactttatggtgctttagttgattttgtaatgtatttatatcacaatcataaggcgctcgatagatttggttctggtccatacttttatattccaaaacttcaatcttacaaagaagcaaagctatggaatgatattatttgtttttgtgaagatgagttaaatcttgatagaggtactgtaagagttacctgtcttattgaaacacttcctgcagtatttcaaatggaagaaatattatattatttaaaagatcatattatcggtcttaactgcggaagatgggattatatttttagttttattaaaactcttcaatcatttccagaaaagcttttacccgatagaaatattattacaatgaatcaaccttttttaacagcttattcaactttattagtgaatacttgtcataaaagaggagcatttgcaatgggagggatggcagcatttgtcccctcaaaaaatcatgatgaaagcagaaaaattttacaaaaggttcgagatgataagttatttgaaataaacaatggacatgatggaacttggatagctcatcctggtttagcagtattatgtaaatga

SEQ ID NO: 237510 - DNA, 768 bp, Unknown
  Bacterial polypeptide expressing nucleotide sequence isolated from the Sargasso Sea
tattggctataccggaaacccaaaggctccaagttcagttctactaaaaaataatggtctttgtgtagaacttgtcttcgatcgggctcatgttatcggtagtagagaccaggctggtttggcagatgttcggctagagagcgcattatcagcaataattgatctagaggactccgttgcatgtgttgatggagcagataaggttagtgcttacgcttcatggctgggtttaatgaaaggtaaccttacttctgagtttgaaaaaaatggtaaaaaaattactaggtcgcttaactctgatttatctttcatttctccagatggagatgattttagcgttaagtctaaagcattgctttggattcgaaatgttggtcatttaatgactacacccgccgtaattgatgcaaatggtgacgaggtttatgaggggcttctggatgctatggtgaccacgatgattggtatccatgatttaaagaagcctgatggtaattcgagacatgggtcaatatacattgtgaagccgaagatgcatggtcctgccgaggtagcctttgcagataagatgttttcagcggtagagacttttcttggtctaaaacaatattctgtgaaattgggaataatggatgaggaacgtcgaacttctgtaaaccttaaagagtgtatacgtgctgcaaaaggacgggtggcctttataaatactgggttcctggatcggactggagatgaaattcatactagtatggaggcaggtccgtttag

SEQ ID NO: 237511 - DNA, 571 bp, Unknown
  Bacterial polypeptide expressing nucleotide sequence isolated from the Sargasso Sea
atgaataaaatcaaaaatcagtatcatttagtaggtaaattatttgtaaataaaattttatataactttgttaataaagaacttttaaaaaaaacaaaaattaaacctaaacaattttggtcgggattagatagatctttatatcttttaagagataagaatcaaaaattaattgaaactagaaaagaattacaaaaccatatagatagatggcacttaaaaaataaaaataagaaatttaatattaataaatacaaaaagttcctttcagagataggatacttaaaaaaacaaacctcaaactttaaaattcaaacaagtaatatcgataacgaaatagcaaaaatccctgggccccaattagttgtgccagtatctaatgccagatatgctctgaatgcagcaaatgcaagatggggaagtctttatgatgccctttatggaacagatgctattggttcagaaaaattagacaatagatacaaccctataagaggtggaaaagtaattagatactgtagagattttctcgatgaaatatttccactaaaaaatggttctggaaaaaaat

SEQ ID NO: 237512 - DNA, 292 bp, Unknown
  Bacterial polypeptide expressing nucleotide sequence isolated from the Sargasso Sea
attggattaatggaagatagagcaaccttaagaatttcatctcaacatattgcaaattggcttcatcatggcttatgctcgaatagacaggttcttgaaattttaaaaaaaatggcaaaagttgtagataaacagaatgaagatgactctaactacgaaagtatgtcaccagagtatgataaatctattgcttttaaagcagcatgtgaattaatctttcatggaaaatctcagccttcaggctatacagaacctctcttacatttaaacagattaattaaaaaaagctaat

SEQ ID NO: 237513 - DNA, 644 bp, Unknown
  Bacterial polypeptide expressing nucleotide sequence isolated from the Sargasso Sea
aatgcaggctggatctttcatgaaaaagaatgatatgaaaaacgcttcttggatttcttcctatgagaagagaaatgtaagtattggattagaatgtggactaaaaggaaaggcacaaattggcaaaggtatgtgggcaatgccagacttaatggctgaaatgataaagcaaaaaattaatcacccaaaatctggtgctaattgtgcatgggtaccaagccctactgcagcaactcttcatgcactgcactatcatgaggtgaatgtaaaagatgttcaagaagaaattctaagctctgcatcatctggtacattaaatgatttattaaccttaccattgttgaagggagaaaatctatctgaaatcgatatcactagggaaattgaaaataatgcacagggcattttaggatatgtagtaaggtggattgatcaaggtataggctgttcaaaagttcctgatattaataatattggtctaatggaagatagagcaacttgcagaatttcatcacaagcactagcaaattggatagaacatggcgtggtatcaaaagatcaagttttaaaggcctttgataaaatggcaaaagttgttgatgaacaaaacagtaatgatgaaaaatatattcctatgagtgata

SEQ ID NO: 237514 - DNA, 550 bp, Unknown
  Bacterial polypeptide expressing nucleotide sequence isolated from the Sargasso Sea
atgcccgagaccactaaagtcgctggcctttcggtcgccacaacgctatttaattttatcaacgatgaagctatcccaggcaccggtttatccagcgagcccttctggaaagaatttgccgcattaattgagaaattatcgcctcgcaataaggagttgctcgaaaaacgggaaatgctccaatccaaaatcgatgcttggcatattggtcatcgggaccaagactttgatccacaagaatatcgcgaatatttgctgtcgataggctatctgattcctgagggcgacacattttctatcaacacaaaaaacgttgatcccgaaattagctctgtcgcaggaccacaattagtggtgccagttacaaacgctcgatacgccctgaacgctgccaatgcccggtggggaagcctttacgatgccctctatggaacagatgtaatttctgaagatgagggagcagaaagagatggcgcctataatccccttaggggagcaaaagttattaagtttgcaaaggactttctagatagagccgcacctctagctt

SEQ ID NO: 237515 - DNA, 549 bp, Unknown
  Bacterial polypeptide expressing nucleotide sequence isolated from the Sargasso Sea
tatctattatatctctgaagaaaaagaagatttcaagattgaaacctctgatgttgatcaagaaattgcttctatagcagggcctcaattagttgtaccagtagataatgcaagatatgctttgaatgctgcaaatgctagatggggaagtttgtatgatgccttatatggaacagacgttattcctggagataaaggtgaaaattttaacgaagatagagctaaaaaagttattacttatgtaagaaactttttggatgaagccgctcctattatagatattagctggaaagaaataactagtataaaagtaaaagatagtgatattgtttttttttcagttaacaaagaaagctatttaaaagataaaaaacaatttattggttttaatggaaaagaagataatccaacctcagttttaatcaaaaataataaccttcacatagatattttaattgattcaaatcataagatcggaaaatctgataaagcttccatctccgatattatcatagaatctgctttgtcgaccattattgataatgagga

SEQ ID NO: 237516 - DNA, 828 bp, Unknown
  Bacterial polypeptide expressing nucleotide sequence isolated from the Sargasso Sea
aatcatatctaggggtaaattatcgattttggacattctctttaagtttgtcaatgaagagcttttgcctggaacaaatgttgataaagaaaaattttggaacggctttgaaaattgtgttcatgagcttgctcctataaacaaaaaactagttgaatttagagaaatattacaaaaaaaaataaataattggcataaagaaagaaaaggcaaacaaatcaatattaacgaatattcaaattttttaaaagaaataggatatttaaaagaagagggcaaaaattttcagattgaaactgaaaatgtagacaaagaaatttcaactattgctgggcctcaactggttgttcctataatgaatgcaagatattctttaaacgccgctaacgctagatgggggagtttatatgacgctttatatggaacagatgtaattccagaatctggtggggctgaacgtggaaaaaagtataactatataagaggtgaaaaagtaattgcttatgcgcgtcaaattttagataaaaatattcctttggaaaatggtagttggaaagatatttctgaaatcccaaaagtggaaaaaaataaattaaatttaaaattgaaaaatccaaaacaatttgttggttatcttaaagataaaaataatttaacttctcttttatttcaaaataacaatcttcatattgatgttagatttgatgtaaatcagacacgtggtggactcaaagataaagcgggaatatacgatgtagttttagagtctgccataacatcaattatggatcatgaagattctgttgctgcagtagatgctcaagacaa

SEQ ID NO: 237517 - DNA, 472 bp, Unknown
  Bacterial polypeptide expressing nucleotide sequence isolated from the Sargasso Sea
catggaacgtgagcctgcaaatctagacgatatcctcagaattcctttagaggagcaaccaaactggtcagaagaagaaatccgaaaggaacttgagaacaactgccagggaatcctgggatacgtggtgcgctggatcgaccaaggtgttggctgttccaaagtcccggacatacaggatgtcggtctcatggaagaccgggctactttaagaatctccagccaaatgcttgcaaattggctgttgcatggaatcgtcagcgaagaacaggtgacccaggcacttgaacgtatggcaactgttgtcgatcggcaaaatgcaggagatcctttctaccaaccaatggctccctcctttgaggggatagcctttcaggctgcccgtgatctagtctttaaaggaacagaaatccccaacggatacaccgaaccaacccttcatgcaaggagaagggaattgaaatccgcttag

SEQ ID NO: 237518 - DNA, 607 bp, Unknown
  Bacterial polypeptide expressing nucleotide sequence isolated from the Sargasso Sea
gatggaccaaaaaactggacatttgaaagctggagctaattgcgcttgggttccttccccgacagctgcggctttgcatgcactacattatcatcaaattaatatatttgatgagcaaaaaaaattatataatcgtgatcaagcaaaactcgatgatcttttaacaattccagtagcagatagaccaaattggtctgtagaggagataaataaagagatttgtaattctgctcaaactttattgggctatgtagttagatggattgatcaaggtgtaggttgttcaaaggttcctgatataaataatgttggtcttatggaagatagagctactttaaggatttcttcccaacatattgcaaattggattcatcatgggataacaaccaagatacaagttaaagagattatgaaagaaatggcaagagtagtggataaacagaatgaaggcgataaaaattatattaaaatgagtgacaattttgaaaaatctttagcttttaatacagcttgtaatttaatatttaaaggtaaagatcaaccatctggttatactgagcctcttttgcattctaatagaattaccaaaaaactacttagtatttga

SEQ ID NO: 237519 - DNA, 439 bp, Unknown
  Bacterial polypeptide expressing nucleotide sequence isolated from the Sargasso Sea
aatgatagataaaaataaccttaaaataagttcaacgttgtttgaatttatcaataaagaggctattccaggcacaaatataaatgaagatgagttttggtcaaatttttcaaagtatgttcacgaacttagtccgataaataaaaaattaattgaggaaagagaaaatatacaaaaaaaaattgatgaatggcataaatcaaaaagtggaagtgattttaatagtagtgaatatattaattttttaaaatcaattaattaccttgttgaggaaaaagatgattttaaaatagaaacttcagatgttgacagcgaaatatcttctatagctggtccgcaacttgttgttcctgttgataatgctcgctacgctcttaatgctgcaaacgcaagatgggggagcttgtatgatgcgctttatggaacagatgttattcca

SEQ ID NO: 237520 - DNA, 526 bp, Unknown
  Bacterial polypeptide expressing nucleotide sequence isolated from the Sargasso Sea
gctacattatcatcaaataaatatatttgatgagcaacaaaatataaaaaaaagggaacaggcgaagttggatgatctcttagacattcctatagctactaatcctgattggtctgaaaaagaaatttacacagaaatatcaaattcagcacaaactttattggggtatgttgtgcgatggattgatcaaggaataggttgttcaaaggttcctgatataaataatattggtcttatggaagatagagcaactctaagaatttcatctcagcatattgctaactggatacatcatggaatagtaacaaaaaaaaaagtaatggaaataatgcaagaaatggcaaaggttgtcgataaacagaatatgaacgataagagatacataaatatgagtgatgacttcgaaagatcaagagcttttaaaactgcttgtgacttaatatttaaaggaaaagaacaaccttctggttatacagaacctcttttacattttaataggttaaaaagaaaaattaatcagaattag

SEQ ID NO: 237521 - DNA, 802 bp, Unknown
  Bacterial polypeptide expressing nucleotide sequence isolated from the Sargasso Sea
tcccttaaaaaattgtagttggaatgaaataaataaaatacaaaaagaaaaaggggaattaaaattttactttaatgatattaaatatactactttaaaatttgttgaacaaattgttggactgaaaacaagttcgagcaataaaataaatgagctgattttaataaaaaacaatttacatgttcgtataatttttaatcctgaacatcctattggcaaaaatgatagtgcaaacattagtgatataatattagaatcagcgatttctactattttagattgtgaagatagtgttgcaacagtggatgctgaagataaaatattggcatatcaaaattggcttggtttaatgaaaggtgacttaaaaaccaatttttcaaaaaatggcaaaacaataacgagatctctaaataatgatattaaaattcaatcattaaaagaagaagaaattacgcttaaaggcagatctttaatgcttattagaaatgtaggtcatttaatacagacacctatgatattagatcaaaatggtgatgaggtttatgaaggtttggtagatgcagtaataacttcacttattgcactttttaattttaagaaaaaagaaaataaaaattcaaattataattcattatatattgttaaaccaaaaatgcatggtccagaagaggtttcttttgcgtgtaaaacttttgatgaaatagaaaagtttctaaagctagctaaaaatacaattaaaatcggtatcatggatgaagaaagaagaacaagcgttaatcttaaagaatgtattcgtgaagct

SEQ ID NO: 237522 - DNA, 678 bp, Unknown
  Bacterial polypeptide expressing nucleotide sequence isolated from the Sargasso Sea
tatgaattatattgagaaaaataaccttaaaatagattcaatattgtttgagtttatcaacaaagaagtaattccaggtacagatattacacctgaagatttttggaaaaattttggaaaaacagtccatgaacttgctcccacaaacaaatcgctgattgagaaaagagaagctattcaaaaaaaaattgatgattggcataaaaaaaatgggggcaaagattttaacaaggaacaatatattaattttttaaaatctatttcatatattattgatgcaaaagaagattttaaaataaatacatcaaatgttgataaagagatttcttcgatcgctggccctcagctagttgttccagttgataatgctagatatgcgctgaacgcagctaatgctcgatgggggagtttatacgatgcattatatggaactgatgtaattccaggagaaaaaggcaaaggccataataaagaaagggctaataaagtaatttcctatgtaagagaatttttagatcaagtcttttccattggcggcggaagttggaaagagatttctaaaattcaaattgatggggatgaattggtattaattatcaatgagaaaaaaaattatttaaaaaataaaaagcagtttgttggtttcaatggagaaaaaaatgaacctcattctgtatt

SEQ ID NO: 237523 - DNA, 652 bp, Unknown
  Bacterial polypeptide expressing nucleotide sequence isolated from the Sargasso Sea
tatgtgggcaatgccagataaaatgaaagatatgatggagcaaaaaacagggcacttaaaagcaggagcaaactgcgcatgggttccttctccaacagcagctgcattacatgctctgcactatcatgaaataaatatttttgatgaacaaaaaaaattaactgatagaaaaccagctgagcttgatgatcttttaacaatcccaatagcagatagacctaattggtctgtagaagatataaacaaagaaatttctaattctgcacagaccttattaggttatgtagtaagatgggtagaccaaggtgttggttgttcaaaagtaccggatatcaataatataggtttgatggaggacagagcaacactgagaatttcatctcaacatatagccaattggattcatcatggaattactacaaagatacaggtaactgaaataatgaaagatatggctaaaattgtagacgaacaaaataaaaatgacccacaatatattaaaatgagtaaagactacgaaaactctatagcgtttcaaactgcgtgtgatttagtttttaaaggtaaagagcaaccttcaggttatactgaaccattacttcatctaaatagattgaaaaaaaaatctaatctgagttcgaaaacaaattag

SEQ ID NO: 237524 - DNA, 589 bp, Unknown
  Bacterial polypeptide expressing nucleotide sequence isolated from the Sargasso Sea
aaaatctcacatttagaggctggagcaaattgcgcatgggttccttctccaactgccgcggcccttcatgcccttcattatcataaaataaatattttcgaaaaacatgcagagttagaaaaaagacagaaggcaaaattgaatgatttattaaatataccaattgtgagaaaacctaattggtcaattgaagagataaataaagaaatttcaaattctgcacaaacaatacttggttatgtagttagatggatagaccaaggagtaggatgttcaaaagttcctgatatcaataatgttggcttaatggaagaccgtgcaacattaagaatttcatctcaacaaattacaaattggctttatcatggtatttgtagcagaaaacaagtcttagaaataatgaaaaaaatggcaaaagttgttgatgatcaaaataaaaatgacaaactttatcaaaaaatgtcacccaactatgaccgatctattgcttttaaaactgcatgtgaactcgtctttcaagggaaagatcaaccctctggttacactgagccattacttcatttaaacagattaataaaaaaaaattagt

SEQ ID NO: 237525 - DNA, 685 bp, Unknown
  Bacterial polypeptide expressing nucleotide sequence isolated from the Sargasso Sea
atgagtttaactgagaaaaatgggctaaaaataagttctaaactatttgatttcataaataatgaagtcataccaggtactaatgtcaaatcagacgaattttggaacaattttgaaaaatctgttcacgagcttgctccaatcaataaaaatttaatcgaaaaaagagaaaatattcaaaaaaaaattgatgaatggcataaaaaaaataagaatattgagcacgataaaaaaaaatatacagagtttttaaaatctatttcttatattgttgaggaaaaagaagactttaaaattggaacttctaatgtagataatgaaatttcatcaattgcaggtcctcaactagtcgtcccggtagataatgcaaggtacgcattaaatgctgctaacgcaagatggggaagtttatatgatgcattatatggaactgatgtaattcctggaagtaaattcaaagaatttaacgaagaaagagcaagcaaagtaatagcttatgttagaaaatttttagatgagatagctcccctagaaaaacttagttggagtgaaatttcagaaataaaagttaaagacgaagatattcaatttttaagtggaaaaaatgaaatatatttaaaagataaaaatcaatttattgcttttaatggagaaaagaataaaccaagctcaattttaattaaaa

SEQ ID NO: 237526 - DNA, 362 bp, Unknown
  Bacterial polypeptide expressing nucleotide sequence isolated from the Sargasso Sea
aggctacgtagtcagatgggttgatcaaggagttggttgttcaaaagtaccagatattaataatgtaggattgatggaggatagagcaacacttcgaatatcatctcaacatattgcaaattggcttcatcatggaatttgtaataaagagcaagtcatgaaaataatgaaaaagatggcaaagacagttgatgatcaaaacaaaaatgatcctaaatataaaaaaatgtctgaagattttgaaaaatcgatagcattttctgctgcttgcgatcttgtttttaaagggagagttcaaccttcaggatatactgaaccattattgcatcaaaaaagattagaaaaaaagtctacaaattaat

SEQ ID NO: 237527 - DNA, 537 bp, Unknown
  Bacterial polypeptide expressing nucleotide sequence isolated from the Sargasso Sea
gatgagttatgtagaagcgggcggctttcgtgtcgccgacgttttttttcggtttatcaatgaggaggctttgccaggaacggagattaatcaggatagtttttggaatagtttcggcgcaatcgtcgcggattttgcgccgatcaatcgcaaactcctcgaaactcgtgacgccatgcaggccaagctcgactcctggcatcgcgaacatcggggccaaccaatcgatgctgaggcctacaaggacttcctaaagcagatcggctacctcgtcgatgaaggcccggaattcgagatcggcacgaaaaatgtggatgctgagtttacgtctatggcagggccgcagcttgtggttcctgtgactaacgcgcgttacgccctgaacgccgccaatgcgcgttggggtagcctttatgacgccctttatgggacagacgccgttgacgagaaggacggtgcgtcccgcgtcggtgcgttcaacccagtgcgcgctgagcgcgtggtttcttggtcaaaaagcctgctggatcaagcagc

SEQ ID NO: 237528 - DNA, 862 bp, Unknown
  Bacterial polypeptide expressing nucleotide sequence isolated from the Sargasso Sea
taagtatcagaggaattgttatttttttgttaataatgaattatttaaaggtactgatatttctcctgaaaaattttggaaagattttgacaaagcagttcatgaactagctcctaaaaataaagaactaattgattttagagaaatactgcaaaaaaaaattgataaatggcatattgataaaaaaggaaaagatattcaaattgaagactacaaaaattttttaaaagaaattggttacttaaaaaatgaaggttcagattttaaaattgaaacaagtgatattgatgacgaaatcgctacaatagctgggcctcaattagttgttccaattatgaatgcacgatacgctttgaacgctgctaacgcaagatggatgagtttgtacgatagtttatatggaactgatgtaattgaagattctgaggatagcacttcagagagatatgatccagaacgaggagagattgtaattaagtatggtagagattttttagataaatactttactttaaaagatttcagctggagaaaaataacaggaatagcaattcaaaataaagaattaaaagtgttaaaaggtgttgatgtaacaaccctaaaagatgaaaataaattcattggtcatagaggagaagcggataatccatcagcaataatattaaaaaacaataaccttcatattgaaatattaaaaaatccaagagcttttagtgctcaacaggatcatgcaggcataagtgatataatattagaatctgcagtatctacaatttgcgataatgaagacagtgttgcagcagttgatgctcaagataaagtagtttgttatagaaattggcttggattgatgaaaggagat

SEQ ID NO: 237529 - DNA, 777 bp, Unknown
  Bacterial polypeptide expressing nucleotide sequence isolated from the Sargasso Sea
atctagaaaaaaaaggtaagaaaattaatttgaatgattacaaaaaattcttaaaaaaaataaattatttaaaaaaaagtggaaaaaattttaaaatacaaacaaaaaatgttgataacgaaatttctaatatatgtggaccgcagttagtatgtcctgtttctaacgcaagatttttgctaaatgctgcaaatgcaagatgggttagtctatatgatagtctctatggtgctaatataattcctgaaacaaaaggtgcattaaaaggtaagacttataacccaataagaggagaaaaagttatttattattcaagagagcttttggataagtacattccacttaaaaatcaaagttggaaaaatttaaaaaaaattcctcatattaagaaaggaaaattaaatattaaactaaaagacactaagcaatttgttgggtttagaaagaaaaacggaaaattattttcgatactttttgtaaataataatttgcacttagatattttatttgatcaaaaaggcaatttagaagttaataatcctgatggaaatcaagatccactcaaaatacatgatatctttttagagtcagcaattactacaatatgtgatcatgaggatagtgttgccgctgtagatgcagaagataaagttttaggttatagaaattggctttctttaatgaaaggaaacttaacttcaaaatttaggaaaaataataaaactataaaaagaaaattaaaattagatagagagtatttatctcctaaaaggtaaa

SEQ ID NO: 237530 - DNA, 652 bp, Unknown
  Bacterial polypeptide expressing nucleotide sequence isolated from the Sargasso Sea
tatgtgggcgatgccagatctaatgaaggatatgatgaaacaaaaaattgttcatccattggctggcgctaattgtgcgtgggtgccttcacctaccgcagcctcattgcacgccctacactatcatgaggttgacgtctttgccaaacaaagagaattatcgaaaagaaaatcagcaaaactttcagatttattaactattccagttgctaataaaactaactggtcgatagatgaaataaatagagaactaaaaaataatgcacaaggaattttgggatatgtggttagatggattgatcaatctgttgggtgttctaaagtgccagatataaatggcattggattaatggaggatagagctacttgtcgaataagtagtcagcacatcgctaattggttacatcatggtatatgtagcaaaaaacaagttatggaaattatgaaaaagatggcaaaagttgtcgatggacaaaatctaaaagacaaatccatgaagggacaacttccttaccaatctatggcaggacattttgataaatcaatcgcatttaaagctgcatgtgatttagtttttcatggaaaacatcaaccatctggttacacagaacctttgcttcattttaatagattgatgaaaaaatcaatctga

SEQ ID NO: 237531 - DNA, 859 bp, Unknown
  Bacterial polypeptide expressing nucleotide sequence isolated from the Sargasso Sea
aatttttggagcggttttagttcagcggctcatgaattatcaaaaaaaaataaagaacttcttgaaaaaagagaagaattgcaaataaaaattaatacctataacaaaaataaaaaaggaaaaaagtttatagtaaaagaatatgaaagatttttatataaaataggttacatcaaaaaaaaaggtcaaaatttcaaaatcaaaacaaaaaatgttgacgatgaagtagcaaaaatttgtggtcctcaacttgtctgtcctgtatctaattcaagatttttattaaatgcagcaaatgcaagatgggtaagtctttatgatagtctttatggatctgatttaattgaatctgaagagtcggcaagtgaaagatatgacccagaaagaggcctggaagttattaagtatacaaaaaaatttttagatgattttttccctctaaaaaaagataaatggattaatataaaaaaaattaaaatagaaaaaaaacaactaaaattaattacttataaatgtgttgatgagcttaaaaataaaaataaatttgtaggctacagaggcgataaagaaaatccatcaacagttatactaaaaaataataatttacatttagaaataataataaacccgaaagctttcagcgcaaaaagtgatgctgctggaattagtgatattattgttgaagctgctataacaactatttgtgattttgaagatagtgttgccgcagtagatgcagaagataaaataaattgttatagaaattggcttggtttaatgaaaaaagaattaagctctcaatttattaagaatggaaaaagttatcgcagaaaacttaatcctgacagaaaatattttt

SEQ ID NO: 237532 - DNA, 406 bp, Unknown
  Bacterial polypeptide expressing nucleotide sequence isolated from the Sargasso Sea
gaaattaattcagaaattactaactctgctcaaactttattgggttatgtagttagatggattgatcaaggaataggttgctcaaaagtccccgacattaataatattggtctaatggaagatagagcaacattaagaatttcttcacaacacatagcgaattgggtccatcatggtataacaactaaaattcaagtaatagagattatgaaagaaatggccaaagtagtcgatgaacaaaataaaaatgataaaaattatactaaaatgagtgatgattttgaaaattcaatagcatttcaaacagcttgtgatttaattttcaagggtaaagaacagccatcaggttatactgaacctcttttgcattcaaatagattaacaaaaaaactcaatctaaattaga

SEQ ID NO: 237533 - DNA, 735 bp, Unknown
  Bacterial polypeptide expressing nucleotide sequence isolated from the Sargasso Sea
tattaaaggcacaggtatagatagagataatttctggtctggctttgataaagcagttcatgaattagctcctataaataaaaaattactacaaaagagagatgaaattcaaaaaaaaatagatgaatggcatttgttaaataaaggtaattcttttgatgaaaagaaatactttaattttttaaaatcaataggatatatggttgaacaaaaagaagattttaaaattaatacatcaaacgttgatgaagaaattgctactatagctggacctcagttggttgttcctgttgataatgctcgttacgcattaaatgctgcaaatgctagatggggaagtttgtacgatgcgctttacgggactgatgccactccaggaaataaaggtaaagaatataatgaggaaagaggttatgcggttataagttatgttagaaattttttagatgaatctgtccctatttcaaatgcaaaatggaatgaagtaaaaaaatttaaaatagaagatgataaacttgttttattttttacaagtgaaaaatactttcttaaaaacaatgatcaatttattggctttcagggagaaaaaaatagtccaaaatcaattttgttaaaaaataacaatctgcatatagacatagtaattgattcaaatagtagagttggaaagatggactcagcaaatataagtgatgttattattgaatccgcaatttctactattgtggacaatga

SEQ ID NO: 237534 - DNA, 930 bp, Unknown
  Bacterial polypeptide expressing nucleotide sequence isolated from the Sargasso Sea
tttaggttatagaaactggttaggtctaatgaaaggtaatttacagactagttttgtgaaatctggtaaaatctacttaagaaaactaaacccagacagaaaatgtatgtctcctgaaggcaaagaatttagacttcaaggaaggtccttgctcttatgcagaaatgttggtcatctaatgacaaatcctgcaatacttctaaaagatggttctgaaattcctgagggaataatggattcatttattactgttgcttgtgcgttacatgatttaaaaaaaagaaagaattctcaaaatggatctgtgtatatcgtaaaaccaaaaatgcatggtcctgacgaatgtaaatttactgttgaaatttttgaatctgttgaaaaattgcttaagttaaaaaaaaatactattaaaatcggattaatggatgaagaaagacgtacatcagttaacttaaaagaatgcgtaagaatattaaaagatagaatagtttttcaaaacacgggatttcttgacagaactggggacgaaattcatacaagtaataacgcaggtccgatgataaaaaaagcagaaatgaaaaaatctaaatggattcaagcttatgaaaacaacaatgttgaagttggcttaaaatgtggtttttctggtcttgctcaaataggtaaaggtatgtttgcaatgcctgatttaatggccgaaatgatgaaagaaaaaatttctcatcccttatcaggtgcaaattgtgcctgggttccaagtcccacagctgcagctttacattctttacactatcatgaagtaaatgtttttgatattcataaaaaaataattaaaaaaaataatacctcttcaatagatgatttattgacaataccaatttctgataagacaaattggtctatagaggaaattaatttaaaaatttcaaa

SEQ ID NO: 237535 - DNA, 526 bp, Unknown
  Bacterial polypeptide expressing nucleotide sequence isolated from the Sargasso Sea
tcattatcaccaaattaatatatttgatgaacagcaaaaaattatcaatcgtaaccgtgcaaaattaaatgatctactcacaatacctgtagcagataggcccaactggtctgtcaatgaaatcaataaagaaatttcaaattctgcacaaacattacttggatacgtggttcgatggattgatcaaggtataggttgttcaaaagttcctgatataaacaatattggacttatggaagatagagctacattaagaatttcttctcaacacattacaaattggatacatcatggaataacaaccaaaattcaagtgatggaaataatgaaacaaatggctaaaattgtagatgaccaaaatgctggagataaaaattatgttagaatgagtgataattttgaaaaatcattagcatttaaaactgcatgtgatttaatctttaaaggaaaagaacaaccttctggttatacagaaccacttttacatttaaataggttaaaaaaaaaggctagtcagaacttgtag

SEQ ID NO: 237536 - DNA, 811 bp, Unknown
  Bacterial polypeptide expressing nucleotide sequence isolated from the Sargasso Sea
agaaatattgaacttttagaaaagcggaaaaattacaaaaacaaaatagatgaatggcataaaaaaaatatttcaaaaaatattgatattgaacaatacaaaagctttttaaaagaaataagttatattgttgaagaaggtccagactttaaaattacaacatcaaatattgatgaggaaatttcaacaatttctggtccacaactagttgttccaataacaaatgctagatttgcaattaatgcagtaaatgcaagatggggcagtttatatgatgcactatatggaacagatgctttgggagaaggtccgcaaggaaaaagttatgacccagaaagaggaaataaagttgttatttttgctaaatcacatttagataaatttgctccattagaaaatacaaaatggaacgaaattaataaaataaaaattaaagacaataaaatcattttaggaagcttcaaagaaagtaatgtaaattttgtaaataaaaataatcttgttggttggttaagttcaaaagataatagaattagtgaacttattttaaaaaaaaataatcttcattgtagaattttgattaacgcagatgatcctataggaaaaaaagatcctgctaatatatcggacatacttattgagtcagcaatatctactattcttgactgtgaagatagcgtagctactgttgatgccacagataaaattttagcatacaaaaactggttaggacttataaaaggagatataaaagctacatttgttaaaaatactcaaactgtaaatagagttttaaataaagatattgtct

SEQ ID NO: 237537 - DNA, 803 bp, Unknown
  Bacterial polypeptide expressing nucleotide sequence isolated from the Sargasso Sea
taaagatcatattattggcctgaattgtggaagatgggattatattttcagttttattaagaccttgcaatcttttcctgaaaaattattaccagacagaagcattattacaatgaatcagccatttttaacaagctattctactttacttgtaaaaacttgtcataaaagaggtgcttttgcaatgggaggaatggcagcttttgtaccatcaaaaaatcatgatgaaaacagaaaaattttacagaaagttaatgaagataaattatttgaaataaataatggacatgatggaacatggattgcgcatccaggattagctgattatgtgaatgaaatattcaaagataaatttgatacttttcaaacaaatcaattagattttatatcagatgaaaaaattactgccgaacaactgttacaaggatgtgatggggtaagttctgaggattgtcttagatcaaatattagaatttcattgaaatacattgaagcttggatttcaggattaggttgtgttgccatttatggattgatggaagatgctgcaacagcagaaatatctagaacttcaatttggcaatggattaaacataaaaataaattagataatggaaaaattgttgacgaacagttatttagaacatacctagaagaggaactgttgaacgttaaaaacgaagtaggaattgaaatttttgaaaatggaaaatttgatttagcaaaatcaatctttgaacaaataactttgtctgaaaatgtagaagaatttttaaccacgaaagcgtatgaggaattataat

SEQ ID NO: 237538 - DNA, 417 bp, Unknown
  Bacterial polypeptide expressing nucleotide sequence isolated from the Sargasso Sea
ttttctaaacaaattgagataatgaagaggaaaaaggctaaattagacgatttgcttgaaattcctatcaactccccaaaaaataaatggtcaaaatcacaaatatcagaagagcttaaaaataacacacaaggtattttaggatatgtagttagatggattgatcaatctgttgggtgttcaaaagtacctgatataaatggtataggattgatggaagatagagctacttgcagaattagcagccagcatatagcaaactggttgcatcacggtatttgtagcaaaaagcaagttttggaaattatgaaaaaaatggccaaaattgtagataatcaaaatcttaaagataaaagtatgaaggggcaagatccatatcagtctatgggagcaaattattatcaatcaattgctttt

SEQ ID NO: 237539 - DNA, 565 bp, Unknown
  Bacterial polypeptide expressing nucleotide sequence isolated from the Sargasso Sea
tctccgactgctgcagcaatacatgctttgcactatcatgcagttaatgtattttctattcatcaaaaattaaaaaatagaaaacgagctaaattagatgatcttcttacaataccagtagagaccaagaaagactggactaaggatgaaattgagaaagaattaaaaaataacgctcaaggaattttaggttatgttgttagatgggtagaccaatctgtaggatgctcaaaagttcctgatataaatggagtaggtttgatggaagacagagctacatgcagaataagcagtcaacatatagctaattggctttatcatggtatatgtagcaaaaagcaagttttagaaattatgaagaaaatggctagagtagttgattatcaaaatctcaaagatcgtggtatgaaagatcagaatccttatcaaccaatggctggaaattttgaaaaatcaattgctttcaaagcagcatgtgatttaatttttcatggaaagtatcaaccttctggttacacagaaccattgcttcattttaatagattaataaaaaaatcaatctgac

SEQ ID NO: 237540 - DNA, 608 bp, Unknown
  Bacterial polypeptide expressing nucleotide sequence isolated from the Sargasso Sea
gaaaaaaatgttagaagaaaaaattggtcacttgaatgctggcgctaattgtgcttgggttccgtcacctacagctgcctcattgcatgctttgcactatcataaagtaaatgtatttgatattcaaaaaaaattgtcctcaagaactcaagcgaaattggatgatcttctaactattccaattgcagatagacctaattggtctgttgatgaaattaattccgaaatttcaaattcagcccaaacattactaggatatgtggttaggtggattgaccaaggaattgggtgttctaaggttccagacattaataatgttggtttgatggaagatagagctactttaagaatttcatcccagcatattgcaaattggatacaccatggaataaccacaaaaatgcaggtaattgaaataatgaaacaaatggcaaaaatagtcgatgaacaaaacaaaaatgataaaaattatgttaagatgagtgataatttcgatagttcaattgctttcaaagctgcatgtgatttaatatttaaaggtttagagcagccatctggttatactgaaccccttctacatcataatcgattaattaaaaaaagttagt

SEQ ID NO: 237541 - DNA, 442 bp, Unknown
  Bacterial polypeptide expressing nucleotide sequence isolated from the Sargasso Sea
tatgagcattactgagaaaaatggacttaaaattagttcaaatttatttaatttcattaataatgaagttttacctggaacagacatcttaccagataaattttgggatggttttgaaaaagctgtgcacgaactcgctccaataaataaaaatttaattttaaaaagagaagatattcaaaaaaaaattgacgaatggcataaacaaaataagggtatagaattaaataaaaaagattatacaaaatttttagagtctatttcttatatagctaaggaaaaagaaaaatttagcatcgaaacttctaatgtagatagtgagatttcatctattgctggcccgcaacttgtagttccagttgataatgcaagatacgcattaaatgctgctaacgctcgatggggtagtctatacgatgcattatatgggactgatgtgata

SEQ ID NO: 237542 - DNA, 846 bp, Unknown
  Bacterial polypeptide expressing nucleotide sequence isolated from the Sargasso Sea
tatgattcaaaagaaaaatattaaaattaacgaaaagctctatgattttattaataatgaagcactaaaaggtattgagattgatgaggagatcttttggaatggattttcagatattgtagatacttactttccaaaaaatgttactcttttagaaaagcgaaagaatttacaaaataaaatcaacaattggcatgaagaaaatagatctagagatactgatcttgatgaatacaaaagttttttaaaagaaataaattatattgttgatgaaggacctgatttcaaaattacaacatcaaatgttgataaagaaatctcaacaatttgtggcccgcaactagtagtacctatcacaaatgcaagatttgctattaatgcagtaaatgcaagatggggcagtctatatgatgctctttatggaacagatgctttgggggaagttccacaaggaaatagttatgatcctgaaagaggaaataaggttgttggatttgctaaatcacatttagataaatttgctccactagaaaatataaaatggagtgaaattaataaaattgaattgcaagataataaaattattttaggaagtataaaggaaaattcagtaaactttgtaaataaaaatcagcttataggttggaggtcttctaaagacggtcaactgctagaaataattttattaaaaaataaccttcattgcagaatattaattaatgaaaatgatgcgattggaaaaaatgatcctgcaaatatctcagatatattgttagagtctgcgatatctagtattcttgattgtgaagatagtgtagcaactgttgatgctgatgataaaatttt

SEQ ID NO: 237543 - DNA, 736 bp, Unknown
  Bacterial polypeptide expressing nucleotide sequence isolated from the Sargasso Sea
ctggtcccaattttaaaatacaaacaaaaaaatgttgataatgaaatttcaagtatttgtggaccacaattagtttgtcctgtttcgaatgcaagatttttacttaatgctgcaaacgcaagatgggtaagtctctatgatagcttatatggtgcagatataattccagaaacgagaggggcgcttaaaggaagtacttacaacccaataagaggaaaagaagtcattttatactcgagaaatcttttagataagatagttcctttaaaaaataaaagttggagggatttaaatgaaatcccaaaaattttaaataataagcttaaattagacttgttaaatcaaaatcagtttattggatattcgaaagtatcaaataacatatcttccatattattcaaaaacaataatttgcatatagatatattatttgatcagtcaggaaagatggaggttaataatccagaaggaaaccaagacccattaaaaattcatgatatttttttagaatcagcaataacaacaatctgtgatcatgaagatagtgtagcagcagtagatgctgaagacaaagttcatggctataaaaattggttattactaatgaaaggtgaactcaaatcatcatttattaaaaatggcaaaaaaactttaagaaaattaaataaagatagaaactatatttcaaccaaaggatctaagtataaattgcacggaagatcattattattaaaca

SEQ ID NO: 237544 - DNA, 599 bp, Unknown
  Bacterial polypeptide expressing nucleotide sequence isolated from the Sargasso Sea
tttaaccaaaaaaatttctcatttggaggcaggggcaaactgtgcatgggttccttccccaacagcagctgcacttcacgctcttcattatcatgagttgaatatattcgataaacatttagaaataaaaaaaagacaaaaagcaaaactagaaaatttattgcaaataccagttgttaaaaaacctaattggtcagttgaggaagtaaataaagagatatctaattcagcgcagacaattcttggatatgttgttagatggattgatcaaggcataggatgttcaaaagttcccgatattaataatataggtttaatggaagaccgtgcaactcttagaatttcgtctcagcaagtagctaattggttgcatcatggaatttgcagcaggaaacaagttttagaaattatgaaaaaaatggcgaaagtagttgatgaacaaaacaaaggggacaaattttatcaaagtatgtctccacactatgatagatctatagcttttaaaacagcttgtgagcttgtatttcaaggaaaagatcagccgtctggatacaccgaaccacttctccatttaaacagattaattaaaaaaaattagt

SEQ ID NO: 237545 - DNA, 685 bp, Unknown
  Bacterial polypeptide expressing nucleotide sequence isolated from the Sargasso Sea
ttaaactcctattcgttactattaataaaaacttgtcacaaaagaggtgctttcgctatgggaggtatggctgctcaaattcctgtaaaaaataatgatgaagaaaatgacaaagcatttgaaaaagtaagaaatgataaggagcgagaagttaataatggtcatgacgggacatgggttgcacatccaggattagttcctgtggcgatggaaatttttgataatcaattatctggcgataatcagctagatgtttctttagataatataacaatcactcaagacgatttactagaagttcataaaggtcaaagaactgaagaaggaatgcgcgaatgcattaaggtcggcgttcaatatatcgaagcgtggttagcgggtcgtggagcagtacctttgtacaacttaatggaagacgcagcgacagcagaaatatcaagagcacaaatatggcaatggttgaaacatgcaacaaaacttgatgacggaagaacggttaatgaggaattatttaaagatattttaactagtgaaatagataatttaaaaaatgtccttggtgatgatgtctgggcaaaaggtaaatatgaaaaagctgttgaaatatttgaaaaaatgtctatatctccagtttgcgaagaattcttgacacttcctgcttatgaagaaatagtgtcttcttagc

SEQ ID NO: 237546 - DNA, 658 bp, Unknown
  Bacterial polypeptide expressing nucleotide sequence isolated from the Sargasso Sea
tatgggtattgcacaaataggtaagggtatgtttgcagaaccagataatatgaataaaatgatgatcgaaaaaattaatcatctaaatgctggagctaattgtgcatgggttccatcgcctacggctgcagctctgcactctttacactaccacgaaatcgatatttttaagaggcaacttgaattaaaaaaaagaaaaaaagttagacaaaaagatctacttaaaattccttatgctaacggaaaaagatggaagatagaagaaattaggagcgaaattgctaattgtgctcagagtatacttgggtacgttgttagatggatcgaccaaggcattggttgttcaaaagttcctgacattaatggtatatttttaatggaggatagagctaccttgagaatatcctcacaacttattgctaactggttgcatcatggagtatgtagcagaaaacaagtacttgaaatcatgaaaaagatggcaaaagttgtcgataaccaaaatgttaaagataagaattatcaaaatatgtttccaaattacgataaatctatagctttcaaaactgcttgcgaattaatatttcaaggcaaagatcaaccctctggttacactgaacctcttttacatttaaatagattgattaaaaaaaattaa

SEQ ID NO: 237547 - DNA, 520 bp, Unknown
  Bacterial polypeptide expressing nucleotide sequence isolated from the Sargasso Sea
aatatttttaacgaacaaaaaaaattaacagatagagaaccagctaagcttgatgatctattaaccatcccaatagcagatagacctaattggtctgtagaagatataaataaagaaatttccaattctgcacaaactttattagggtatgttgtgagatgggtcgatcagggtgtaggttgttctaaagtaccagatattaacaacataggtttgatggaagacagagccactcttagaatttcatctcagcatatagcaaactggatacatcatggtattacaaccaaaatacaagtaactgaaataatgaaagagatggcaaaaatagtagacgaccagaacaaagatgatccactatatgttaaaatgagcagtgattatgaaaactctatagcatttcaaactgcgtgtgatttagtgtttaaaggtaaagaacaaccttcaggttatactgaaccgctacttcatctaaatagattgaaaaaaaaatctaatctgagttcgaaaccaaattaga

SEQ ID NO: 237548 - DNA, 652 bp, Unknown
  Bacterial polypeptide expressing nucleotide sequence isolated from the Sargasso Sea
gataaagctgtccatgaacttttccctataaataaaaaacttatttctattagatctgaaatgcaaaaaaagatagacgattggcatatcaagaataaagggaagcaattagatataaaaaaatacgaaaattttttaaaggagataggatatttagtaaaagaaggttcaaaattttccatagaaactaaaaatgtagattctgagatttctaatattgcaggtccccaattggttgttcctgtaaaaaatgcgagatattctttaaatgcggcaaacgcaagatggggtagtttgtatgacgctttgtatggaacagatgtgattccagagtcaaatggagcggaacgcggaaaaaaatacaactatgttagaggagaaaaagtaattgaatatgcacgtaaatttttggactctattattccattggaaaaaggtagttggaaagatatttcggaaattccaaaagttgaaaataatctattaaacttaaaactaaaaaatcctaaacaatttgttggttattctaaaaaatcaaacgacatttcttcgcttttgtttctaaataacaatcttcatatagatgttaaattcgattcaaataaaacaaggggagaaacaaaagataaagcggggatatacgatataattt

SEQ ID NO: 237549 - DNA, 836 bp, Unknown
  Bacterial polypeptide expressing nucleotide sequence isolated from the Sargasso Sea
ccatctatacttttagaggatggatctgaaatacctgaaggtattttagatgcttttataacatgtttatgctgtcttcacgatcttaaaagtaaaaagaactctaagaccggttctataatgattgtaaaacctaaacagcatggaccagatgaatgtggtttcacagatttaattttcgaaaaagttgaaaaagtacttggattggaaaaatatacaattaaatgtggtattatggacgaggaaagaagaacaactctaaatttaaaagaatgtataagaaaactagaaaatagagttttttttataaacactggcttcttggatagaacaggtgatgaaatacatacatccatggagtcaggtccaatgataaaaaagggagatatgaaacaatcagtttggattaaagcttatgaaaacaataacgtagatataggattaaagtgtggttttagcggaattgcacaaattggaaagggaatgtatccagaacctgataacatgtcaaaaatgttaaatgaaaaaatagtacacttaaacgctggagcaaactgtgcttgggtaccttctccaacagctgctgccttacatgctcttcattaccacgatatagatatatttaaacgacatgaaataataaaaaaaagaaaaaaaattaataaatttgatttgcttgatataccaacgatttcaaagccaaattggtccaataatgaaattagaaatgaaattgcaaactgtgctcaaagtatattaggttatgttgtgagatggattgatcaaggaattggttgttcaaaagttccagatttaaatggaattaacttgatgga

SEQ ID NO: 237550 - DNA, 469 bp, Unknown
  Bacterial polypeptide expressing nucleotide sequence isolated from the Sargasso Sea
atgaattacgttgaaaaaaataaccttaaaatagattcaaaattctttgaatttattaacaaagaagtaatcccaggtacaaatatcaattctgaggatttttggacaaattttggaaaaatagtccatgaacttgctccaataaacaaatcactaattaaaaaaagagagattattcagaaaaaaattgatgattggcataaaaaaaatatgggaaaagattttaataaggaacaatacataaattttttaaaatctatttcatatattgttgactcaaaagaagattttaaaataaacacatcaaacgttgataaagagatttcttcagtcgccggaccccaactagttgttccagtagataatgctagatatgcactaaatgctgcaaatgcccgatggggaagtttgtatgacgcattatatggaacgagatgtaattccaggagaaaaaggaggaagctttagt

SEQ ID NO: 237551 - DNA, 550 bp, Unknown
  Bacterial polypeptide expressing nucleotide sequence isolated from the Sargasso Sea
atgactaaaagattaagacgtggcaatttacaagtatcagaaactcttactaattttattgaaaatgaggcgcttaccgatacaaacatttctcctgatatgttttgggaaaaattagaagcaatcttaaatcaatttgttcctagaaataaagaattacttcaaattagaagtgaaataaaaagtaaaatagacaaattctatttagaaaattctagcaaagatattaatcatgaagaatatataaaatttctaaagaaaattaattatattgtatccgaaagagaaaattttcaaatcaatacaaaaaatgtagatgatgaattagctctaaaagctgggccacagttagtcgtacctgtaactaatgcgaggtatgcacttaacgctgcaaatgcaagatggggaagtttatatgacgcactttatggaacagatgctatttctgaaaatggcaatgctgaaagatctacgtcttataatcctataagaggaaataaagtaatatcatacgcgaaagagtttttagataaaaattttccattacaaa

SEQ ID NO: 237552 - DNA, 380 bp, Unknown
  Bacterial polypeptide expressing nucleotide sequence isolated from the Sargasso Sea
agcacagactttattgggatatgttgttcgatggattgatcaaggaattggttgttcaaaagttcctgatataaatgatgtggggcttatggaagatagagcaactcttagaatttcatcccaacatattgcaaattggattcatcataggattatttcaaaaaataaagtgttggaaataatgaaagatatggcaaagattgtcgataagcaaaataaaaatgataaaagatatattaatatgagtgacgattatgatagatcaagagcatttaaaactgcatgtgacctaattttcaaaggtaaagaacaaccatctggctacaccgaaccacttttacacctcaatagattaaaaagaaaaattaatcagaattaaa

SEQ ID NO: 237553 - DNA, 562 bp, Unknown
  Bacterial polypeptide expressing nucleotide sequence isolated from the Sargasso Sea
gtgccaagtccacgggcagcaacattacattctatgcattatcatcaagttaatgttataaatattcaaaatgaaattatcaaaaaaggaataaaaactaatttaaataatttaattaacttgcctttactaagaggaaaaaatttatcagaagaagaaattacttcagaaattgaaaataatgctcaaggaatattaggatatgtagtcagatggattgatcaaggaataggttgctcaaaagttccagatataaataatattggattaatggaagatagagcgacatgcagaatttcttctcaatcattagttaattggattttacatgacattgtatcaaaagataaagttgagaaatctctcaaaaaaatggctcaaatagtagataatcaaaataaacatgatccaaattatattaagatgtctccagattttaatactttagctttcaaggctgctcatgatttaatttttgaaggtttaaatcaaccttcaggctatacagaaccaattctccacaaaagaagattgcaaataaaaaatttaaataattcttaat

SEQ ID NO: 237554 - DNA, 685 bp, Unknown
  Bacterial polypeptide expressing nucleotide sequence isolated from the Sargasso Sea
ttttaactcctattcgttactattaataaaaacttgtcacaaaagaggtgctttcgctatgggaggtatggctgctcaaattcctgtaaaaaataatgatgaagaaaatgacaaagcatttgaaaaagtaagaaatgataaggagcgagaagttaataatggtcatgacgggacatgggttgcacatccaggattagttcctgtggcgatggaaatttttgataatcaattatctggcgataatcagctagatgtttctttagataatataacaatcactcaagacgatttactagaagttcataaaggtcaaagaactgaagaaggaatgcgcgaatgcattaaggtcggcgttcaatatatcgaagcgtggttagcgggtcgtggagcagtacctttgtacaacttaatggaagacgcagcgacagcagaaatatcaagagcacaaatatggcaatggttgaaacatgcaacaaaacttgatgacggaagaacggttaatgaggaattatttaaagatattttaactagtgaaatagataatttaaaaaatgtccttggtgatgatgtctgggcaaaaggtaaatatgaaaaagctgttgaaatatttgaaaaaatgtctatatctccagtttgcgaagaattcttgacacttcctgcttatgaagaaatagtgtcttcttag

SEQ ID NO: 237555 - DNA, 703 bp, Unknown
  Bacterial polypeptide expressing nucleotide sequence isolated from the Sargasso Sea
atgcaagttgatgaggatttaaaaaattttgttaataatgaattattaaatggtttagatattactcctgattttttttggcaaacgcttgagaatcttatttatgtttatgggccactaaataaaagtttattagaaaaaagaaaattattgcaagacaaaatagatgaatggcacataaataataaagataaaaactttaactttgataattataaaaattttttatatgaaattggttatatcgttcctgaatctgatgatttttcaatagctactaaaaatgttgatcctgaaataagctcaattgctggtcctcaattagttgttcctgtaatgaatgctagatttgccttaaatgcagcaaatgcaagatggggaagtttgtatgacgcattgtatggaactaatattatttcagaggaggatggagcttctcgagtgggatcttataatccagcaagaggtgagaaagtcattgcttttgcaaaagagtttttagatgaaaccattcctttagaattaggctcatttaaaaatgttacaaaatttaattttaaagatggcttcctatcaatgatcttgaatgatggaacaaatacaatgcttaaaaatgccaagcaatatcttggttattcaagatatgaaaatgattcttttggacttctatttagaaataataatttgcattttgagattcaga

SEQ ID NO: 237556 - DNA, 873 bp, Unknown
  Bacterial polypeptide expressing nucleotide sequence isolated from the Sargasso Sea
acaggtactatatgattttattaataacgaggctctaaacggaacgggcttagataaaaaaaaattttggaaaggcttttcaaattcagcacatactctaacgcatcaaaatagaaaaatcttaaatgatagaagaaaaattcagatagatatagatagatatcatatagataatagaacaaaaaaactaaataaaaaaaattataaaaaatttttaaaaaaaattggttatataaataaaattggacctgattttaaaattgaaacaaaagataatgatatagaaattacaaatatagctggtccacaattagtagttcctgtaatgaacgctagatatgcactaaatgctgcaaatgcaaggtgggtaagtttatatgatagtttgtacgggacagatataatagaatctgaagagtctgcaagtcaaagatatgatcctgaacgtggccttgaagtaattcgtttttctaaaaaatttttggataaatattttaaaataaaaaattcaacatggattaaagttcataaaattgaaattgaaggagagaatttaaaattaatcacatttgaaaataacttttatttacttaacaataaaaaatttattggatatagaggagataaaaaaaatccctcagcaataatacttaaaaataacaatttacatattgaaataattataaatcctgacgctttcagtgctaaaagtgatcctgcaggtatatcagatataataatggaagcagcaataaccactatttgtgatcacgaagactctgttgcgggagttgatgcgaaagataaggttttaggttatagaaattggttaggccttatgaaaggtaacttaactactaaatttgagaaatc

SEQ ID NO: 237557 - DNA, 601 bp, Unknown
  Bacterial polypeptide expressing nucleotide sequence isolated from the Sargasso Sea
catccaatgtcaggagctaattgtgcatgggtgcattctccaactgcagcagcaatccatgctttacattatcatgcagtaaatgttttctctattcatcaaaaaataaaacttagaaaatctgctaaattagatgaacttcttacaattccagtagatgataaaaaaaagtggtctaaggaagatattgaaaaagaattaaaaaataatgcccaaggtattttaggctatgttgttagatgggtcgatcaatcggtagggtgctcaaaagttccagacataaatggggtaggcttaatggaggatagggccacatgcagaataagtagtcagcatatggctaattggcttcatcacggtatatgcagcaaaaaacaagtcttagaaataatgaaaaaaatggctaaagtagttgattatcaaaatttaaaagatcatggcatgaaagatcaagacccttatcagcctatggctggaaactttgaaaaatcaattgcttttaaagcagcttgtgatttagtttttcacggaaagtatcaaccatcagggtatactgaaccattattacattttaatagattaatgaaaaaatcaatctgac

SEQ ID NO: 237558 - DNA, 385 bp, Unknown
  Bacterial polypeptide expressing nucleotide sequence isolated from the Sargasso Sea
aaattcggctcaaactttattaggatatgttgtaagatggatagatcaaggagttggttgttctaaagttcctgatatcagtaatacttatctcatggaggacagagcaacgcttagaatttcatctcaacatatagcaaattggctacaccatggaatcacaactaaaatccaagttatggaaataatgaaagaaatggcaaaaattgttgataaacaaaataaaaatgacaaaaaatatattaatatgagtgatgattatgataactcaatagcatttcaaactgcatgtgaattaatatttaaaggtaaagaacaaccatcaggttataccgaacctcttttacatttaaatagattaaataaaaaagttaatcagaattaa

SEQ ID NO: 237559 - DNA, 439 bp, Unknown
  Bacterial polypeptide expressing nucleotide sequence isolated from the Sargasso Sea
atgcaaatttcaactggatttattgattttattgagcaagaggttttgccggagacaactattgcggcagataagttttgggctggccttgcaaaagtggttaaggaactcacaccgacaaataagaaactgttggaaaggcgaacttattttcaacgtcaaatagatcaatggcatagggcaaacaagggcgaggaattcaactccgctgactacaaaagatttttatattcgattggctacatcgtaccagagaaggagccattttctatcgacactaaacaagtagatccggaaatatcaaaaattgcaggtcctcagctagttgtgccaattatgaatgctcgctttgcattaaatgcagcaaatgcgcgttggggatctttgtacgatgctctctatgggactgatgcaataaaaccagtgaaaaaacaatagt

SEQ ID NO: 237560 - DNA, 447 bp, Unknown
  Bacterial polypeptide expressing nucleotide sequence isolated from the Sargasso Sea
tatatagttaaacctaaacaacattctccagatgaatgtaaatttaccgataaaatttttactaatgttgaagaaatacttaatttaaaaaaaaacactgtaaaaataggacttatggaagaagaaagaagagcatcagttaatctaaaagaatgtataagagcttttgaaaatagaattttttttatcaataccggatttttggaccgtactggggatgaaataagaacttctatggaagcagggcctatggctaaaaaattagatttaaaaaaatcaatatggattcaagcttatgagaacaataatgttgatattggtttagaatgtggattctcaggaaaagcacaaataggaaaaggaatgtttgctgcaccaaaggctatggcacaaatgatgaatgaaaaaatatcacatttagaagcaggagcaaattgtgcttgggtt

SEQ ID NO: 237561 - DNA, 502 bp, Unknown
  Bacterial polypeptide expressing nucleotide sequence isolated from the Sargasso Sea
taaatctaggaataaagctaagttagaagatattttacaaattccaaaagccgatagacccaattggtcagtaacagatattaatcgtgaattagaaaataatgctcaaggtattttaggttatgtcgttagatggattgatcagggtgtcggttgttctaaagttccagacattaataacattggtttaatggaagatagagctacgcttagaatatcttctcaacatatggctaactggatccatcatggaatatgtacaaaggaacaagtgatgtctacgatgaaaaaaatggctaaaatagttgataagcaaaacgaaaaagatcctgcttacaatcgaagtggtagatcaggatataaaaaaatgtctgatgattttgaaaactctatagcttttgctgccgcttgtgatttagtttttaaaggaagaactcaaccctcaggttatactgagccacttttacatgaaaaaaggttggaaaaaaaaaattctaactag

SEQ ID NO: 237562 - DNA, 382 bp, Unknown
  Bacterial polypeptide expressing nucleotide sequence isolated from the Sargasso Sea
ggaattttgggatatgtagtacggtggatagatcaatctgtaggttgctccaaagtacccgatattaatggcattggattaatggaggatcgagccacttgtcgtataagtagtcagcatatttctaattggctatatcacggtatatgtagtaaaaaacaagttttagaaataatgaaaaaaatggcaaaagttgtagacgaccaaaatttaaaagatcctggcatgaaagggcaagcgccttatcaggctatgtcaggtaattttgataaatcaattgcatttaaggcagcttgtgaacttgtctttcatggaagacatcaaccatctggatacacagagccaattcttcatcttaatagacttcttaagaaaaactagt

SEQ ID NO: 237563 - DNA, 438 bp, Unknown
  Bacterial polypeptide expressing nucleotide sequence isolated from the Sargasso Sea
aatgactaaaagattaagacgtggtaatttacaagtatcagaaattcttgttaattttattgagaatgaggcacttgctgatacaaatatttctcctgatatgttctgggaaaagttagaaacaatattagatcaatttgttccaagaaataaagaactacttcaaataagaagtgaaatgaaaagcaagatagacaagttctatttagataactctggtaaagatgtagatcatgacgaatatgtaaactttttaaaaaaaattaattacattgttcctgaaggagaaaaatttctaatcaaaaccaaaaatgtagatgatgaactagcacttaaggctggacctcagttagttgtaccagtaactaatgcaagatacgcactaaacgctgcaaatgcaagatggggaagtttatatgacgcactttatggaacaga

SEQ ID NO: 237564 - DNA, 610 bp, Unknown
  Bacterial polypeptide expressing nucleotide sequence isolated from the Sargasso Sea
aatgttagaagaaaaaataaatcatccaatgtctggtgctaattgtgcttgggtacctagtcccacagctgcaaccttgcatgtcatgcattatcataagatcaatgtagaaaagcagcaaaattatattaaagaaaaaaaatcaaaaaatgaacttgatgaattgttaacactacctcttttaaaaggaaaaaacttatcagaaggagaaattaaaaatgaacttgaaaacaatgtacaaggaattttaggctatgtagttagatggatcgaccaaggcataggctgttcaaaagttaaagatataaataatatagggcttatggaagatagggcaacttgtagaatttcttcccaagctataacaaattggctcacccatggaataattacaaaagagcaaattaaaaaaacattaaaaaaaatggctaaagtagttgataaacaaaataaaaatgatcctaattatataaatatgagtaaatcttatgatacgttagcatttcaagctgctgaaagacttgcattagaaggtctagatcaaccttctggttatacagaacctatacttcatgaaatgcgtttaaaatttaagtctctaaacaactaa

SEQ ID NO: 237565 - DNA, 760 bp, Unknown
  Bacterial polypeptide expressing nucleotide sequence isolated from the Sargasso Sea
ggggagtttatacgatgcgctgtacggcactgatatgatcattgaatctgaaggcgctattagagaaggtggatataatcctattagaggtgatagggtaattgcatttgctaaaaattttttagatgaaacgtttcctcttgagaatggaacttttaacaaggtaaccgattttgaattcatcgatggtgaaattgttgtcacgcttgttgacgggtcaaagactcatcttttaaataaagatcaatatataggctacatggataagggtgagggcgcttatggactgctctttaaaaataataatttacatattgagattcaagttgatagatctcatccaattggtcaagatgatttagctggcattaaagatatattagtagaatctgcaattaccacaatccaagactgtgaagactcagttgcagcagttgacgatgaagacaaaattatcgtttatagaaattggctaggtcttatgaaaggagatttaaaaagatcttttaataagaatggcaagtacctaacaagagaattaaatggagatagaaggtatttattaaaaaatggcaaaatgatactccttccaggaagaagtttattattggttcgaaatgttggtcatttgatgacaaatcctgctattaaggatgaaaatggtaatgcagttcctgaaggtattatggatggtttttttactatttgcgcttcaatacatgatcttattggtaatggcttatataagaattctaaaact

SEQ ID NO: 237566 - DNA, 823 bp, Unknown
  Bacterial polypeptide expressing nucleotide sequence isolated from the Sargasso Sea
ttccaaatatcgtggacctcaattagtatgtccagtttcgaatgctagatttttattaaatgcagcaaatgctagatgggtaagtttatatgatagtctttatggtacggacataattccagaaacaaaaggtgctgttaaaggcaatacttataaccctattagaggaaatgaggtaattaaatatgcaagaaatattttagataaatatattcctttaaaaaaacaaagttggaagaatttaaaagatattccaaatgtaaaaagtaacaaattaaatttaagccttttatatcctaatcaatttgttggttattctaaaaaaagaggaaagctttcatcattattatttaagaataataacctacacatagatatattatttgatttaagtggaaatatggaaattaataatccagatggtaatcaagataaacttaaaatccatgatatttttttagagtctgctatcactacaatttgtgatcatgaagatagtgttgcagctgttgatgcagaggacaaagtgttaggttataaaaattggctaaacttaatgaaggcggatttaaaagcttcttttgctaaaagtgggaagaaagtttatagaaaattaaataatgatagattttatatttcaaaaaagggttcaaaaataaagttacatggaagatccttactgttaaatagaaacgtaggacacctcatgactaatccatctattttgcttaaagatggttcagagtgtccagagggtatattggatgcatttataacttcagctgcatgtttgcatgatttcaaaaaaataaaaaattcaaga

SEQ ID NO: 237567 - DNA, 564 bp, Unknown
  Bacterial polypeptide expressing nucleotide sequence isolated from the Sargasso Sea
aatgagcaaaattaatatcaacaatttaaaggtagataatgaattatataattttgtaaaccaggaagttattcctggtttggatataaatgttgataaattttggagtggtttaagcaatgctgttcatgaacttgcaccaattaataaagaattgctaaaaaaaagagatgaaattcaaaaaaagattgatcagtggcatttgtcaagaaaaggctcgcctttaaatcaggatgaatatttaaaatttttaaaatctataaattatattgttgaggaaaaagaagattttaagattgaaacatcagatgtggataaggaaatttcaagtattgctgggccacaacttgttgttcctgttgataatgctagatatgctttaaatgcagcaaatgcaagatggggaagtttgtatgatgctctctatggaacagatgtaatatcaaaaaacaaatctaaagaatttgatcaagataaagcaaataaagttgtagactatgtgcgtaatttatttgatagaatatttccaacagaaagtggcagctggaaatctgtttcaaaatt

SEQ ID NO: 237568 - DNA, 643 bp, Unknown
  Bacterial polypeptide expressing nucleotide sequence isolated from the Sargasso Sea
atgccagatctaatgaaagatatgatgaaacaaaaaattgttcatccactggctggtgctaattgtgcatgggtgccatctcctacagcagcctcattgcacgccctacactatcatgaggttgatgtatttgccaaacaaagagaattatcaaaaagaaaatcagcaaaactttctgatttattaactattccagttgctaatagcactaactggtctatagaagaaataaataaagaactaaaaaataatgcacaaggaattttgggatatgtggttagatggattgatcaatcagttggatgttctaaagtgcctgacataaatggcgttggcttaatggaagatagagctacttgtagaataagcagtcaacacatcgctaattggttgcatcatggtatatgtagtaaaaaacaagttttggaaattatgaaaaagatggcaaaaattgtcgatggacaaaatctaaaagacaaatctatgaagggacaacttccttaccaatctatggcaggttattttgataaatcaatcgcatttaaagctgcatgtgatttggtttttcatggaaaacatcaaccatctggatacacagagcctttgcttcattttaatagattgatgaaaaagtcaatctgaa

SEQ ID NO: 237569 - DNA, 829 bp, Unknown
  Bacterial polypeptide expressing nucleotide sequence isolated from the Sargasso Sea
agaaacgtaggccatcttatgactaatcccgctgtattgttaagagatgggtctgagtgtcccgaaggtatactcgatgcatttattacctctttagcatgtattcatgattttaagaaaaaaagaaattctagtgtaaataatatttatattgtgaaacctaaaatgcacggtccagaagaatgtagttttactgacgaaatatttaataatgttgaaaaattacttggtttaaaaaaaaatcaaatcctatgcggtattatggatgaagaaagaagaacatctgtaaacttatatgagtgcataagagcattgaaaaatagagtttttttcataaatactggttttttagacagaacaggcgatgaaattcatacatcaatggaagtgggaccaatggtacgaaaagctgaaatgaaaaagactaagtggattaatgcttatgagaataacaatgtagatataggtttaaaatgtggtttttctggaaaatgtcaaattgggaaaggtatgtatgccgctcctgacaaaatgaaggatatgattaaacaaaagataatacatccaaaatcgggtgctaattgtgcctgggtgccatcacccactgcagcagctttacattcacttcattatcatgaagtagatgtttttaatatacaaaaaattattaagaaaagaaaatctgcaagactctcagacttgttgacgataccaattaaaaaaaatcctaaatggaatttaaatgaaataacagaagagttaaaaaataatgcccaaggaatattagagtatgtcgttcgatgggtagatcaatcagtaggtgttcaaa

SEQ ID NO: 237570 - DNA, 794 bp, Unknown
  Bacterial polypeptide expressing nucleotide sequence isolated from the Sargasso Sea
aaagaatgcataagaactttaaaaaatagggtattttttattaatactggttttttagatagaactggagacgaaattcatacatcaatggaagttggtccaatgattaaaaaaggtgatatgaaatcatcgaaatggatccatgcttatgaaaataataatgtagatattggtttaaagtgtggtttttctggaaaatgtcagattggcaaaggcatgtatcccgcgccagatttaatgaatgaaatgatgaaacaaaaaattatccatccgttaactggagcaaattgtgcatgggtaccatctccaacagcagcttcgctgcatgctttacactatcacgaggtaaatgtatttaataaacaaaaagaaatagcaaaaagaaaacctgctaagctaagtgatcttttaactattccagtacaaaaaaaacataattggtcaattgaagaaattaataaggaattaaaaaataatgcccaaggtattttgggatacgtagttagatggatagatcagtcagttggttgttcaaaagttcctgatattaatggaataggattaatggaagatagggccacctgcagaataagtagtcaacatattgctaattggttacatcacggtatatgcagtaagaagcaggttttagaagtaatgaaaaaaatggctaaagttgttgatagtcaaaaccttaaggatcccagtatgaaaggacatgcgccctataaaccaatgtcagataactttgataaatcaactgcatttaagacagcttgcgaacttgtttttaa

SEQ ID NO: 237571 - DNA, 738 bp, Unknown
  Bacterial polypeptide expressing nucleotide sequence isolated from the Sargasso Sea
tatgaaaatagtagataaaaatgggttaaaaattagttcaactttgttcgattttgtaaataatgaagcaattcctggaacaggtgtaaattctgaagatttttggttaaaattttcaaattatgttcacgaacttgcaccgataaataaaagattaatcgataaaagagaaacaatacaaaaaaagatagatgaatggcataaatcaaaaaagggaaaagaatttaataagaaagaatatataaattttttaaaatctttaggttatttaatagaggaaaaaaatgattttaaaatagaaacttctaatgtagatcaagaaatatcatcaatagctggtccccagcttgttgtcccagtggataatgctagatatgcacttaatgcagcaaacgctagatggggtagtttatatgatgctctttacgggactgacgttatagcaggagaaaaatttaagaattataatatcgagagagcaaataaagtaataaattttgtaagaaattttttagatgaaaattttaaactttcaaaaataagctggaaagaaattactaaaattgaagttgaaaatgataaattagttttaattaaagactctgaaaaagattatcttaaaaataatgatcaatttattggttttaatggagacataaattctccaaaatcaattctaataaaaaataataatctacatattgatatcataattgatccaaatagtgaggttggaaa

SEQ ID NO: 237572 - DNA, 910 bp, Unknown
  Bacterial polypeptide expressing nucleotide sequence isolated from the Sargasso Sea
aggaaagattttcaaaatcaaatcaatggattggtttataaaaagaaaaaatataaaattcaattttgatgaatatttttctttcttaagagaaattggatatgtaattaatgaaaaagaagactttataatagatactaaagatgttgatgatgaaatttctagtattgctggtccacagttagttgttcctgtaaataatgcacgatatgcaataaatgctgcaaatgctagatggggtagtttgtatgatgcgctttacggttctgatattattcctgaagataatgggtgtgaaaaaggagataattataatcctaaaagaggaaataatgtaattaattatactagaaaaattttagacaaatcgtgtcctgtaaaaaatttaagttggagcgaaattgaaaaattttctattaatgatggaaatttaaatatcatatctggtgataaatattttgaattgtctaatccaaaacaatttgttggttatgttaatgaacaaaataatttgaggaaaattctcttaatcaaaaataaattgcacatagaaattcttattaatccttatggaaaaattggaagtaatgataaagcaaatatagatgatgtaattttagagtcagctgttactacaattatggattgtgaagattcaattgcagcagtagatggtaatgataaagttctagcttacaagaattggcagaaattagttaatggtgaacttgaatttaaaatgattaaaaatgaaaaaaattttgttagaaagttaaatgttaataaagaatttttgacacctcatgggaaaaaatacactatatctggtcgctctcttatgttaattagaaacgttggacatttaatgaaaaacccagctattttattatcagatgatacagaaatacct

SEQ ID NO: 237573 - DNA, 490 bp, Unknown
  Bacterial polypeptide expressing nucleotide sequence isolated from the Sargasso Sea
taaaattttaaaacaaaaagaaaaaaattcattatcagatttattatcactacctttattaaatagaaaaaatttatcagaacaagaaatacgttttgaaatagaaaacaatgttcaaggtattttaggatatgtggttcgatggattgatcaaggaattggctgttcaaaggtcccagacattaataacgttggtcttatggaagatagagcaacttgtagaatatcatcacaagcattagctaattggctacatcatagcataataactaaagatcaggtgatgaatgctttaaaaaaaatggctgcggttgtagatgaacaaaataaaaatgatactaattatattccaatgtcaaaaaactttaacacatttgcttttatagctgctaaagatttaatttttgatggcaagaatcaaccatctggttatacagaacctatacttcataaaaaaagattagaatttaaattaaataaaataaattaa

SEQ ID NO: 237574 - DNA, 811 bp, Unknown
  Bacterial polypeptide expressing nucleotide sequence isolated from the Sargasso Sea
caccgcgtttctcagcgcgccgctgacggggttgctcgaaggcggcgtgccgatcacggtcgacggccggatcgcaggcgcgatcggcgtgtctggcgtaaagtccgaacaggacgcgcaaatcgcccgcgccggcacacaaagcgtcgtggcctagccagccaacgcacgcgcgtttttcattccccgggaggaatcacgatgatcgaccaagcaggactgcaagtcgcgccagcgctgagccagttcattgaaaacgaagcgctgccgggcaccggcatcgacaaggccgcgttctggagcggtttctcggccctggtgcacgacctggcgccccgcaaccgcgagctgctcgccgaacgcgaccgcctgcagcaggaactcgacacctggcaccgcgcgcaccccggccccgtgcgcgaccacgccgcgtatcgcgctttcctcgaacaaatcggctacctcgtgccggtcccgtcgaacgtcgcggcagccaccgcgaacgtcgacagcgagatcgccacgcaggccggcccgcagctcgtcgtgccgctgtcgaatgcgcgctatgcgctgaacgccgcgaacgcccgctggggcagcctgtacgacgcgctgtacggcaccgatgcgctgcctgaagacggcggcgccgaacgcaccacggcctacaacccgacgcgcggccagcgcgtgatcgactacgcgcgcaacgtgctcgacaacgcggcgccgctcgcgagcggctcgcatcgcgacgcgctgcgctaccgcgtgcaggacggccagctcgccgtcgaaaccgcgaagg

SEQ ID NO: 237575 - DNA, 740 bp, Unknown
  Bacterial polypeptide expressing nucleotide sequence isolated from the Sargasso Sea
aaaaattcaaattattaataatgaattaattttcagtgacaagaactctaatttaaagaaattgcttaatcctagtcagttttgtggttatattggatttgagttaaaccctgacgaaattattcttaaaaaaaatagtcttcgtattcgtcttcaactagataaagagcatccgataggtaagattgatagctttcatcttaaagatatagttatagagtcggcgccatcagtaattatggactgtgaagattctgttgtctctgtagacacaaatgataaaattaaaacttatagaaattgggtaaagctattaaatgggacaattcaaactgaggttaaaaaggataatgtttctttcataaggaaactgtctaaagatataagttacaaaaaacctaatggggaaggtgatagtatgaaaggtttatcacttcttttaattagaaatgttggccatctgatgacctcttcttcaataattgatcataataaaaatgaaattggcgagggaataatagatacctttcttactgcattatgttttttaaaaactattgataattctaaaaactctaaatttaaatcgctttacattgtaaaaccaaaaatgcacggccctgaggaagtaaagttttctgttgatacattttcaaaaattgaaaaacttctaaaaattccagaaaatacaattaaaattggattaatggatgaagaaagaagaacaaccctaaacttaa

SEQ ID NO: 237576 - DNA, 397 bp, Unknown
  Bacterial polypeptide expressing nucleotide sequence isolated from the Sargasso Sea
tagtgaaatttctaactcagcacaaacattgttgggttacgtggttagatggatagatcaaggcgtaggttgttccaaagttccagatataaataatattgggctaatggaagatagagcaactttaagaatatcttcacagcatattgctaactggatacatcatggaattaccactaaattacaagttttgggaataatgaaagaaatggcaaaaattgttgatagtcaaaataaaaatgataataaatatatcaggatgagtgatgactttgacaggtcattagcttttaaaactgcatgtgatttagtttttaatggtaaagagcaaccctcaggatacacagagcctttgctacatttaaatagactcaaaaaaaaaattaatcagaactag

SEQ ID NO: 237577 - DNA, 557 bp, Unknown
  Bacterial polypeptide expressing nucleotide sequence isolated from the Sargasso Sea
catgaataaagttgcttcggataagttaagagaggcaaatgctggtcacgacggtacatggattgctcatcctggattatctcaagttgcaatgagtgcgtttaatcaagccatgggatcatctcccaatcagattaccaataagagaaatgatgtttcagttaatgctcgagaccttatcaaggtaccacagggaaatatcacagaggaaggtttgaggcagaacatatcaataggaattcagtacattgaggcatggctctcgggcaatggttgtgttccaattcataatctgatggaggacgctgctacagcagaaatatcgcgttcacaaatctggcaatggattcatcatcgcgcaaaaaccacagattcaaataagactataaccgaagagtatttcatcaagacgcttgaggatgaaatggaccaactgaagacagcaagaggttctgaaggtgattaccttcaaccggcaatcaatttattcaaggagatgtctacggattcagagttcgatgaattcttgacattgccagcatataaacacctctaat

SEQ ID NO: 237578 - DNA, 621 bp, Unknown
  Bacterial polypeptide expressing nucleotide sequence isolated from the Sargasso Sea
aagttggaaaaatataaaaaaaattccctatattcaaaaaggagaactaagcattaaactcaaaaactcaaaacaatttgttggatttagaaagaaaaaaggcaaaatattttcactactttttgtaaacaataatttgcatttagatattttatttgatcaaaaaggtaatttagaagtaaataaccctgctggaaatcaagatccactgaaaatacatgatatctttttagagtcagcaatctctactatatgtgaccatgaagatagtgttgctgctgtagatgctgaagataaagttttaggttatagaaattggctttctttaatgaaaggaaacttaaccacaaaattcaggaaaaataataaaactatattaagaaaattaaattctgacagagaatatttatctttaaaaggtaaaaaaattaaattacatgggagatctttgttgcttaacagaaatgttggacacctaatgacaaatccagcaattctactaaaagatggatcggaatgtccagaaggaattttagatgcttttgtgacatctgcagcatgtcttcatgattttaaaagaaagggaaattctagaactaactcaatttatattgttaaacc

SEQ ID NO: 237579 - DNA, 826 bp, Unknown
  Bacterial polypeptide expressing nucleotide sequence isolated from the Sargasso Sea
aattgtagaaaagctgggtgctaaaaataaaactcttatacaaaaacgagaggatatacaatccaagattgatgaataccatatcactcatagaggacaagatatagacatagaagactataagtcatttttatatgatattggatatttagttccagaaggagaaaattttaaaattgatacgagtaatgttgatgaagaaattgcagatttatgtggacctcagttagtagtaccaattatgaacgctcgatatgcattaaatgctgccaatgcaaggtggggaagtctttacgatgctttttacggaacagatgctatgggtgatttgcctccaaaaggtgggtatagcaatgatagaggagataaggtaatttctaatgctaaagcgcatttagataaagtagcacctttagactcaaataattggcatgaaatttctgaaattaatgtggttgaaggacaattaatattatcagtaaatgaaaaagaagtttctttattaaatcaaaaccaatttgttggatatattcaaaataataattctatcaatgaagttattttattaataaatggtcttcatattcgtattctaatagaccctgatcatgtaattggaaaaaatgataaagcaaatatatctgacattattctagaagccgcaattactactattatggattgtgaagatagtgtggcagcggtagatggtgaggataaagttttggcctataaaaattggttaggcttgatgaagggagatctcacagaggatcttgaaaaatcaggtaaaataattacacgtaggcttaatcaagatataaaa

SEQ ID NO: 237580 - DNA, 307 bp, Unknown
  Bacterial polypeptide expressing nucleotide sequence isolated from the Sargasso Sea
caacgtaggtttgatggaagacagagcaacgctaagaatttcttctcaacatattgctaattggttgcaccacggaatttgtaaaaaagagcaagttatggagataatgaaaaaaatggctaagatagtagatgaacaaaataaaaatgatcctaagtataaaaaaatgtctgataattttgaaaaatcattagctttttcagcagcatgtgatttagttttcaaagggaaatatcaaccttcaggttatactgagccattgttacataaaaaaagattagaaaaaaaaactttaattaatcgttag

SEQ ID NO: 237581 - DNA, 724 bp, Unknown
  Bacterial polypeptide expressing nucleotide sequence isolated from the Sargasso Sea
atggataaaataaaaaaaaattatcaaaaagttgaaaaattgtttgttagcaaaattttgtataattttgttaataaagaacttttaaaaaaaactaaaattaatccaaaaaggttttgggttgctttaaataagtcgttttatagtctaagagaaaaaaatgcaaaattaatacaaatcaggaaagaatttcaaaattcaataaatgaatggcatttaaataataaatcaaaaaaattcaatttaattaaatataaaaaatttctttttgatattggctacttaaaaaaaaatgttgctaattttaaaattcaaaccaaaaatgttgatgaagaaatatcaaaaattgctggaccgcaattagttgttccaatatcaaatgctagatacgcattaaacgctgcaaacgctagatggggtagtttatatgatgcactttatggaactgatgcaataggttctgaaaaattagataataggtataatcctattagaggtgggaaggtaataagctactgtagagattttcttgatgaaatttttcctttgaaaaatggttcgtggaaaaaaataaacactcttaaaatccaaaataataaacttgttttaaaaattgataataaaattatacaactaaaaaatagtaagcaatatagaggatatagatcagataagaaaaaattaaaaggtgttttattaataaataataatcttccacgttgag

SEQ ID NO: 237582 - DNA, 651 bp, Unknown
  Bacterial polypeptide expressing nucleotide sequence isolated from the Sargasso Sea
gatgatcgaccaagcaggactgcaagtcgcgccagcgctgagccagttcattgaaaacgaagcgctgccgggcaccggcatcgacaaggccgcgttctggagcggtttctcggccctggtgcacgacctggcgccccgcaaccgcgagctgctcgccgaacgcgaccgcctgcagcaggaactcgacacctggcaccgcgcgcaccccggccccgtgcgcgaccacgccgcgtatcgcgctttcctcgaacaaatcggctacctcgtgccggtcccgtcgaacgtcgcggcagccaccgcgaacgtcgacagcgagatcgccacgcaggccggcccgcagctcgtcgtgccgctgtcgaatgcgcgctatgcgctgaacgccgcgaacgcccgctggggcagcctgtacgacgcgctgtacggcaccgatgcgctgcctgaagacggcggcgccgaacgcaccacggcctacaacccgacgcgcggccagcgcgtgatcgactacgcgcgcaacgtgctcgacaacgcggcgccgctcgcgagcggctcgcatcgcgacgcgctgcgctaccgcgtgcaggacggccagctcgccgtcgaaaccgcgaagggcgtcgtgcatctcgcgcagccggcgcagttcgtcggcta

SEQ ID NO: 237583 - DNA, 358 bp, Unknown
  Bacterial polypeptide expressing nucleotide sequence isolated from the Sargasso Sea
gatgcatggtcctgatgaagttcagttttcatgtgatttattttcagaaatcgagaagatttttaaactacctcaaaacacaataaagattggcattatggacgaagagagaagaactactctaaatctaaaagagtgtattgaaatagctaaagatagagttatctttattaatacaggtttcttagatagaacaggtgatgaaattcatactagtatggaagcaggaccaatggtcacgaaagcagaaatgaaaaatcaaaaatggatacaggcttatgaaaactggaatgttgatataggtctgggagttggttttaaaggtaatgctcaaattggaaaaggaatgtggcctatg

SEQ ID NO: 237584 - DNA, 607 bp, Unknown
  Bacterial polypeptide expressing nucleotide sequence isolated from the Sargasso Sea
gatgctagaaatgtataaatcaaaaacagtacatcctaaatctggagcaaattgtgcatgggtgccatcaccaactgctgcaacactccatgcaattcattaccatcagatttctgttcaagatgaacaagataaaattatgaaaagggaaaaagctaatttagatgatattttgtctatacctttaataagttctgataatgttccaagtccccaagagattcaaaaagaattggataacaatgcacaaggtatccttggatatgttgttaggtgggtagatcaaggagtaggttgttcgaaagttcctgatattaatgatgttggcttaatggaagatagggcaacttgcaggatttcaagtcagcatatttctaattggttatatcatgatctttgttcagaagagcaagtcatagatactatgaaaaagatggctagaattgtagatatacaaaataaggatgataccaactataggccaatggccccatcatttgatggaatagcttttaaagctgcatgtgatttagcaacaaagggaaaagatcagcctagcggatacacagaaccaattcttcacgagatgaggttaaaaagaaagtaa

SEQ ID NO: 237585 - DNA, 835 bp, Unknown
  Bacterial polypeptide expressing nucleotide sequence isolated from the Sargasso Sea
aaaaattttattagaaatggttatttaaaaaatgaaggacctgattttaaaatagaaactgaaaatgttgatgaagaaattgcaagtatagctggacctcagttggttgtgcctgtgatgaatgcaaggtatgcgttaaatgctgcaaatgctagatggatgagtttatatgatagtctttatggtactgatgtaattgaacaatctgaagatagcgtatctgaaaggtatgaccctttgagaggtgaaatggttataaaatatgcaagggattttttagataagtactttccattagctggactaagttggaataaaattacaagttttgcagtaaaatatggaaaattaaaagttttaaaaggtgctgatatttttgatttagaagatgaaaataaatttattggacacaggggtgaaagtgataatccatctgcaattattttaaaaaataataatttacatattgaaattctaaaagactcgagagcttttgctgctcaacaagatcatgcaggaattagcgacataatactagaatctgcagtatcaacaatttgtgataatgaagatagtgtagcagcagttgactcggaggataaaattatttgttatcgaaattggctaggtctaatgaaaggagatcttaaatcaaaatttgaaaaagaaggaaaattatttgagagaaaattaaacccacacagaagttatatttctaaagatggtaaaggtttaaagttacatgggagaagccttttgcttgtaagaaacgttggtcatctaatgactaacccttcaattttattaagtgatgggagtgaaatacctgagggaa

SEQ ID NO: 237586 - DNA, 700 bp, Unknown
  Bacterial polypeptide expressing nucleotide sequence isolated from the Sargasso Sea
atgcaaggatatattacaaagggccgactacaggttgccgaacaactcgataactttatcaacgaacaggcacttcctggcactggcgtcgaccaagaggcgttttggcaaggcgctgaagctctcttcgaaaaattcatacctcaaaatcgcgcgctactagaaaagcgagagcaacttcagcgcgctattgatgactaccacaaagctgggaacccggtaggtggtagcgaatacacagacttccttaaaaacattgggtatctcgttgagcagcctgcgaacgttaccgccgacacacaaaacgtagatgcagaaattgctactatggcggggccgcagcttgtagtacctattaataatgctcgctatgcacttaacgctgtaaacgctcgctggggaagcctgtatgatgcattgtacggcactgacgttataagcgatgaaggcggcgcagaagcagggaaaagttataaccctgttcgtggcgctaaagtagtagcgaaagcgaaaacctacctagataacatgataccgctagcgaaaggcagccacgcagacgttacacagtataaaattgatacgggtaaactggctatcacgcttaccgatggcgatgaaaccaccctagcgaatactgaacaatggcaaggataccaaggcgatatcaatgccccatcaagcctgctttttgcgcaca

SEQ ID NO: 237587 - DNA, 346 bp, Unknown
  Bacterial polypeptide expressing nucleotide sequence isolated from the Sargasso Sea
cgtcaggtggatcgaccagggagtcggctgctcaaggtgccggatatccttgacattggtctgatggaagaccgtgccactctccgaatctcgagccagcacatagccaactggcttcatcacgggatcgttactgaggaccaggtgatggcatctttagagcggatggctgctgtcgttgatcgacaaaatttcgccgacccgcagtatcagcccatggcaccaggatgcgatggcgttgcctttgaggcagcctgcgacctcattttccggggacgggaagtctgcaacggctacactgagcctccgctacatctgcggcggctgcaaaagaaatctggctgaa

SEQ ID NO: 237588 - DNA, 877 bp, Unknown
  Bacterial polypeptide expressing nucleotide sequence isolated from the Sargasso Sea
caaactaaaaatgtggatagagaagtttctgatatttgtggtcctcaattagtttgtcctgtttcaaacgcaagatttttacttaatgcagctaatgcaagatgggtgagcttatatgatagtctttatggagcagatataattcctgaaacaaaaggtgcggtcaaaggaaatacatataatccaatcagaggtaaagaggtaatttcatatgcaagagatattttagataagttagttccgttaaaaaaagaaagttggaaaaatttaagagaaattcctttaattaaaaataataaacttgaattaaacttattaaacccaaaacaatttattggctattcaaaggtatcaggtaaattatattcaatattatttaaaaataacaatctgcatattgaaatattattcgatcaaacaggaaaaatggaaattaataatccagagggaaaccaggatccattaaaaattcatgatatttttgtcgaggcagctattacaacaatatgtgatcatgaagatagtgtggcagctgtagatgcagaagataaagttctgggatatagaaattggctacttctaatgaaggggaaattaaaatcatcattcataaaaaatggaaaaaaaatttttagaaaattaaataaagataaaaattatatttcctcaaatggttctaaacttaagttacatggaagatctcttttattaaatagaaatgttggtcacttgatgacaaacccatgcatcctattaaaagatggatccgaatgcccggagggtatattagatgcttttgtgacttctgcagcatgtttacatgattttaagataaatggaaattcaagaaataaaaggatctatattgtaaaaccaa

SEQ ID NO: 237589 - DNA, 346 bp, Unknown
  Bacterial polypeptide expressing nucleotide sequence isolated from the Sargasso Sea
tgttagatggattgatcaagggataggttgctcaaaagttcctgatataaataacgttggattaatggaagatagagcgactttaagaatatcatcacaacatatcgcaaattggctttaccatggaatatgcagtagaaaacaagttttagaaattatgaagaaaatggcaaaagttgttgacgaacaaaataaaaatgacaagttataccaaaaaatgtcgccaaaatacgatacatctatagcttttaaaacagcatgtgaattggtatttcaaggaaaagaccagccttctggttatacagaaccattattgcatttaaatcgcttgattaaaaaaaattaa

SEQ ID NO: 237590 - DNA, 646 bp, Unknown
  Bacterial polypeptide expressing nucleotide sequence isolated from the Sargasso Sea
gatgagttatgtagaggcgggcggccttcgtgtcgccgacgttttttttcggtttatcaatgaggaggctttgccgggaactgagatcaaccaggatactttttggaatagtttcggcgcgatcgtcgcggattttgcgccaatcaatcgcacgctcctcgaaactcgtgacgccatgcaggcgcaactcgattcctggcatcgcgaacatcgggaccaaccaatcgatgctgaggcctataaggtgttcctgaagcaaatcggctacttagtcgatgaaggccccgcattcgtgatcggcacgaaaaatgtggatgctgagtttacagctatggcggggccgcagcttgtggtcccggtgactaacgctcgctacgccctgaacgcggcgaatgcgcgctggggtagcctttatgacgcgctttatgggacagatgccgtcgacgagaagggcggcgcgtcccgcgtcggtgcgttcaacccagtgcgcgctgagcgcgtgattgcctggtcaaaacgccttcttgatcaagcggcacccttggccaatggttctcatgctgaggtgacggcctactctgtcgtagattgccaactccgtgtgacgttgtcgaatgagactatcacaaaattagccgatccggct

SEQ ID NO: 237591 - DNA, 556 bp, Unknown
  Bacterial polypeptide expressing nucleotide sequence isolated from the Sargasso Sea
gatgaattatgtagaagcgggtggccttcgcgtcgccgacgttctttttcggtttatcaatgaggaagcgttgtcgggcaccgggatcggtcaagattccttttggacgagttttggcgcaatcgtcgccgattttgcgccgctcaaccgaacactcttggaaacccgtgacgccattcagactaagctggactcctggcatcgcgaccatcagggccaacctattgatgcagatgcctacaaggccttccttaaggagatcggctacctcgtcgatgagggcccggcattcgcgatcggcacggaaaatgtggatgccgagtttgcggccatcgcggggccgcagcttgtggttccggtgactaacgcgcgctatgctttgaacgcggccaatgcgcgctggggcagcctttatgacgcgctttatggatcggatgctatcgacgaggaaggcggcgcggcacgtggagacgcgttcaatccagtgcgtgccaaaagggtcattgcctggtcaaaacgcttacttgatgatgcggcggccttggccgaaggctcg

SEQ ID NO: 237592 - DNA, 604 bp, Unknown
  Bacterial polypeptide expressing nucleotide sequence isolated from the Sargasso Sea
gtattgaaaggtgctgatatttttcatttagaatatgaaaataaatttgttggacacagaggtgaaagtgataatccatctgcaattattttaaaaaataataatttacatattgaaattctaaaagactcaagagcttttgctgcccaacaagatcatgctggtattagtgatattatactagaatctgcagtgtcaacaatttgtgataatgaagatagtgtaacagcagttgactcgaatgataaaatcatttgttatcgaaattggctaggtctaatgaaaggagaccttaagtcaaaatttgaaaaagaaggaaaattatttgagcgaaaattaaatccacacagaagttatatctcaaaagatggcaaaggtttaaagttacatgggagaagccttttgcttgtaagaaatgttggtcatctaatgactaacccttcaattttattaattgatggaagtgaaatacctgagggtattatggatgcatttataactacggcagctgctctgcatgatattaaaaacaaaaataattcaggaactggatcagtttatattgtaaagcctaaaatgcatggtccggacgaaactgcattta

SEQ ID NO: 237593 - DNA, 327 bp, Unknown
  Bacterial polypeptide expressing nucleotide sequence isolated from the Sargasso Sea
gaataggttgttcaaaagtccctgatataaataacattggcttgatggaagatcgtgcaactcttagaatttcgtctcaacatattgcaaattggttacatcatggaatttgtagtaggaaacaagttttagaaattatgaagaaaatggcaaaagtggttgatgagcaaaacaaaaaagataaattatatcagagaatgtatcctgaatttgataaatcaattgcatttaaaaccgcatgcgagttagtattccaaggaaaagatcaaccttcagggtatactgaaccattgttacatctcaataggttgattaaaaaaaattaat

SEQ ID NO: 237594 - DNA, 457 bp, Unknown
  Bacterial polypeptide expressing nucleotide sequence isolated from the Sargasso Sea
aatgatcttttaaatattcctattgcagccaaaccagattggtctaaggaagaaattaatactgaaatatcaaactcagcacaaactttattaggatatgttgttcgatggattgaccagggaataggttgttcaaaagttcctgacataaatgatataggtctgatggaagacagagcaacccttagaatttcatctcaacatatagcaaattggattcatcacaaaataactacaaaaaatgaagtattggaaataatgaaagaaatggcaaaggttgtcgataaacaaaataaaaatgacaaaagatatatcaatatgagtgatgattatgatagatcacgtgcatttaaaacagcatgtgatttaattttcaaaggcaaagaacaaccatctggttataccgaaccacttttacatttgaatagattaaaaagaaaaattaatcagaattaga

SEQ ID NO: 237595 - DNA, 394 bp, Unknown
  Bacterial polypeptide expressing nucleotide sequence isolated from the Sargasso Sea
taataaagaaatttctaattctgcacaaactttattagggtatgttgtaagatggatagatcaaggtgtgggttgttcaaaagttcctgatattaacaacattggtttgatggaagatagagcaacactaagaatttcttcacaacatatagccaactggattcatcatggaattacaactaaaatacaggtaactgaaataatgaaagagatggctaaaatagtagataatcagaacaaagatgatacgctatatgttaaaatgagtgatgattatgaaaactctatagcatttcaaactgcgtgtgatctagtgtttaaaggtaaagaacaaccttcgggttatactgaaccattacttcatttaaataggttaaaaaaaaaactaatctga

SEQ ID NO: 237596 - DNA, 569 bp, Unknown
  Bacterial polypeptide expressing nucleotide sequence isolated from the Sargasso Sea
aatgatacatttagaaaacaagtttggaataaaaatttcaactgaatttattgattttgtcgagcaagaggttttgcctgagacaactattgtggcggataagttttgggctggccttgcaaggttggttaaggagctcactccgacaaacaagaaactgttggaaaggcgaactttttttcaacgtcaaataaatgaatggcacagggcgaacaagggtagagaattcagttccgctgactacaaaagttttttatattcgatcggctacatcgtaccagagaaggagccattcttgatcgacactaaacaagtggatcctgaaatagcaaaaattgcaggtcctcagctagtcgtgccaattatgaatgctcgctttgcattaaatgcagcaaatgcgcgttggggctcgttgtacgatgctctatatgggactgatgcgataaaaccagtcgaaaaggcaacagcatataacaaagatagggggcagaaagtaattcaatggggccgcaaatttcttgatgacacctttccactgataaatggctcttgggagcaggtaactgaag

SEQ ID NO: 237597 - DNA, 1657 bp, Unknown
  Bacterial polypeptide expressing nucleotide sequence isolated from the Sargasso Sea
gatgacggaacaaactttaagtgagcagcaattgaattcggcacagaaacagaataagaccactgcgaatggcgcgctgaccatagtgggaaatactatccctggccaagaagtgatttttaccgaaggtgcgctggcgttgcttgagtcactttgccgggaatttgcaactgaagtgcccaccttactcgccaaacgtaaagacagacagacgcgtatcgataaagggactttgccagactttttacctgaaactcgcgctattcgtgacggcgcatggaagatccgcggtattccgaacgacctacttgaccgccgtgtcgaaatcaccggtcccgtcgaacgtaagatggtgatcaatgcacttaatgccaatgccaaagtgtttatggcggattttgaagactctttagcaccgagctggcaaaaagtagtggaaggtcagattaacctgcgtgatgcggtgcgtggtgaaattgaatacacagcgcctgaaactggtaaacactacaagttaggcccaaatcctgcggtattgatctgccgcgtgcgtggcctgcacttaaaagagaagcatgttgaatttaaccagcagtccattcccggcgcgttattcgactttgcgatgtacttttaccataactatcgtcaattgctggcgaagggcagtggtccttacttctatattccaaaactcgagagtcatatcgaggcgcgctggtgggcaaaagtgtttgcttttgttgaagaaagattctgcctgcagcctggcaccatcaaatgtacctgtttaattgagacgctgcctgcggtgtttgaaatggacgaaattctctatgaattacgctcaaacatcgtcgcactaaactgtggtcgttgggactatatctttagttatatcaaaacattaaagcgccatagcgaccgcgtgttaccggatcgccaagcggtgaccatggatacgcctttcttaagcgcctattcaagactgctgatcaaaacctgccataaacgcggcgcactggcgatgggaggtatggcggcctttattccggcgaaggatcctgtacagaacgaagccgtgttgcaacgggtgcgtaaggacaaagagcttgaggctcgcaatggacacgatggtacttgggtcgctcaccctggtcttgcggatacggcgatggggatttttaacgaatatatcggccaagatcatcaaaatcaattgcatatcacccgtgatgtggatgcaccgatcctcgccgcagagttattaaaaccctgtgatggtgagcgcactgagcaagggatgcgcctgaatattcgcatcgctctgcaataccttgaggcgtggatcagtggcaacggttgtgtgccgatttatggattaatggaagatgcggcaaccgctgaaatctcccgcgcctcgatttggcaatggatccaacatggtaagtcactctccaacggcaaacccgtcacgaaacaattgtttaaagacatgctggtggaagagttagcaaacgtgaaaaaagaagtgggcagtgacagattcacccacggcaaatttacccaagcggcggtattgcttgaggatattaccacttcggatgagttggtcgacttcttaaccttacccggttacgaaatgctaactgcttaa

SEQ ID NO: 237598 - DNA, 398 bp, Unknown
  Bacterial polypeptide expressing nucleotide sequence isolated from the Sargasso Sea
taattctgcacaaactttattagggtatgttgttagatgggtcgatcaaggtgtgggttgttctaaagtgccagatattaacaacataggtttaatggaagacagggccactcttagaatttcatctcaacatatagcaaactggatacatcatggtattacaacaaaattacaagtaactgaaataatgaaagagatggcaaaaatagtagacgaccagaacaaagatgatccgctatatgttaaaatgagtggtgattatgaaaactctatagcatttcaaactgcatgtgatttagtttttaaaggtaaagaacaaccttcaggttatacagaaccattacttcatttaaatagattgaaaaaaaaatctaatctgagttcgaaaccaaattaga

SEQ ID NO: 237599 - DNA, 442 bp, Unknown
  Bacterial polypeptide expressing nucleotide sequence isolated from the Sargasso Sea
aatgaacgttacagagaaaaatgggcttaaaattaatacaaaattattagattttgttaataacgaaattattcctggtactaatataagatctgaggaattttggactaattttggaaaaattgttcatgagcttgcgcctataaataaggaattaattcaaaaaagagatgacattcaaaaaaaaattgatgagtggcataaaaaaaataaaggaaaagaatttaataaaaaacaatatttagattttttaaaatctatatcttatattgttgaagaaaaggatgaatttaaaattgaaacttcaaatgtagatgatgagatagcaacaatagctggccctcaacttgttgttccggttgataatgctaggtatgttttaaatgcagctaacgctcgatggggaagtttatatgatgccttgtatggaactgatgtaatt

SEQ ID NO: 237600 - DNA, 1004 bp, Unknown
  Bacterial polypeptide expressing nucleotide sequence isolated from the Sargasso Sea
gaatgaattagcaattaagaacaaaaatttactttatagaagagacaaaattcaaaggaaaataaatggctggcaccaagatagattaggtaaaaagtttaaatctaaagaatacgaaaagtttttaaaggatattggttatattttgaacgaaggaaataaattcaaaatacagactaaaaatatagatgatgaaatttcatctattgcaggaccgcaacttgttgtgccaataatgaatgcaagatataccttgaatgctgcaaatgcaagatgggtgagtctttatgatagtttatatggaacagatgtaattgaatctgatgaaagtggtggagaaagatatgatccgataagaggtgaagaagtaataaaatattcaaaaaattttttagataattattttcctatcaataaaattaaatggaaagatgttactagttttgtaatcgagaaaaaagaacttaagttatttaaaaataaccaaatattttctttaaaaaaaaaaaataaatttatcggttttagaggagaaaaaaataaaccttctgcaataatattaaggaataataatcttcatttagaaattataataaatcctaaagcatttagtgcaaaaaatgatcccgcaggaattagtgatattattttggaatcagcgttatctacaatatgtgataacgaggatagtgttgctgcagttgactctgaagataaaattctttgttataaaaattggcttcaattaatgaagggaaatttgactacacgttttgaaaaaacaggaaaggtatttgaaagaaagctaaaccccgatagaaatttctatttaccttcaggaaaaaaaagtaagctccatggaagatctttgcttttaattagaaatgtaggtcatttaatgactagctcatgtattttgttaaaaaatggatctgaaattccagagggcattatggatgctttttttacatcagcagcttgtctccacgatattaaaaagaaaa

SEQ ID NO: 237601 - DNA, 619 bp, Unknown
  Bacterial polypeptide expressing nucleotide sequence isolated from the Sargasso Sea
aatgaaagatatgatgaacaaaaaaacaggtcatttaaaagctggtgcaaattgtgcttgggtaccatctccaactgctgctgctttacatgcgctacattatcatgaaatcaatatttttgacgaacaaaaaaaaattttaaatagaaatcaagcaaaacttgatgatcttctaacaataccagtagcagatagaactaattggtctgttgaagaaataaataatgaaataagtaattcagctcaaacattacttggatatgttgtgagatgggttgaccaaggaataggttgttctaaagttccagatattaacaatgtaggtctaatggaggacagagcaactttaagaatttcctcgcaacatattgcaaactggatacatcatggaattactacagaaattcaagtaacagaaattatgaaagaaatggcaaaaattgttgatggtcaaaataaaaatgactctaaatatatcaaaatgagtgatgactttgaaaactcaatagctttcaaaactgcatgtgatttagtatttaaaggtaagcagcagccctctggatatactgaaccattattacatattaatagattagaaaagaaatctaatctgaattag

SEQ ID NO: 237602 - DNA, 562 bp, Unknown
  Bacterial polypeptide expressing nucleotide sequence isolated from the Sargasso Sea
aaaagtaagaaatgataaggagcgagaagttaataatggtcatgacgggacatgggttgcacatcctgggttagtacctgtggcgatggaaatttttgataatcaattatctggcgataatcagctagatgtttctcttgataatgtaacaatcactcaagacgatttattagaagtgcatgaaggtcaaagaacagaagaaggaatgcgcgaatgtattaaggtcggcgttcaatatatcgaagcgtggttagcgggccgtggagctgtacctttatacaacttaatggaagacgcagcgacagcagaaatatcaagagcacaaatatggcaatggttgaaacacgcaacaaaactcgatgatggaagaacggttaatgaggaattatttaaagatattttaaccagtgaaatagctaatttaaaagaagttcttggtgatgagatttgggcaaaaggcaaatatgaaaaagctgttgaaatatttgaaaaaatgtctatatctcctgtttgtgaagagttcttgacacttcctgcttatgaagaaatagtgtcttcttag

SEQ ID NO: 237603 - DNA, 401 bp, Unknown
  Bacterial polypeptide expressing nucleotide sequence isolated from the Sargasso Sea
tattcagcaggaactggacaacaactgccagggcatcctcggttacgtggtgcgctgggtcgagcaaggcgtcggctgctccaaggtgccggacatccacaacgtcggcctgatggaagaccgcgccaccctgcgcatctccgcccagcacatcgccaactggctgcaccacggcgtggtcagcgaggcccaggtacgtgagacgctgcagcgcatggcgcaggtggtcgacggacagaatgccggcgatgcggcctaccgcccgatggcaccgaacttcgagcaatcccacgccttccgcgccgccagcgacctggtattcaagggccgcgagcaaccgtccggttacaccgagccgctgctgcatgcctggcgtttgcgctttaaagaggaggtctgaa

SEQ ID NO: 237604 - DNA, 1573 bp, Unknown
  Bacterial polypeptide expressing nucleotide sequence isolated from the Sargasso Sea
aatgatcgatattaagtctgaaaaaaaaagtcaatatcaaaatatattgacggatgaggctattagttttctagaaaaagtctgttcaacttttgagaatacccgtcaagaaattctaaaaaatagggtaaaaatgcaaaatgatatttcatctggtaaaagactttctttcccaaaagacaaaaaaataagagaagacaattggaaggttacagcacccccagcagatgtggcaaatagaaatgtagaaattactggaccagtggatagaaaaatgattataaatgcattgaattctggagctgatgtattcatggcagattttgaagattcaacttcccctacatggaaaaatattatggatggccaagtcaatttacttgatgctaatcttagagaccttgaatttgtggatccaaaaaatgagaaaacatactctttaaacccagaaagtaacacaagtctctttgtaaggccaagaggcctacaccttgatgacaaaaatgtattactaaatggcgcccctgtatcaggagcatttttagattttgctttatatacatttcacaatgcaaaattgagattagaaaatgggataggtacatatttttacataccaaagcttgaaaatagttcagagtcacaactttgggatgatatcttttctttttctgaagatgaactgagtttgcctagaggaactttgcgggcaactgtactcctagagacaatatcagcatcttttgaaattgaggagattctttactcattaaaagagcattctctaggaatgaatgcaggccgatgggattatatttttagcgcgatcaaaaaacatagggacttaccagaaataaattttccagatagatcacaaattaccatgactgttccatttatgaaagcatacactgaattgcttgtacagagctgtcacaaacgaggtgctcatgcaatagggggtatgtctgcgtttataccaaatagaagagatcctgaaattacagaaaaggctatagatcaagtgaaaaaagataaagaacgtgaagtaactatgggttttgatggctcttgggtagcacatccagatttagtacaagtatgtaaagatgtattcaaagattccttaggcgctaaggaaaaccaaattgattttatacccaatgaaccagttatatctgaggacatgcttcaagattttaatatccctggagcaacaattaccgaagaaggtattagaactaatatacgtgttggtatcttgtatgttcaatcatggcttttgggacagggagccgctgcattatttaatctaatggaggatgctgcaacagctgaaatctctagatctcaattatggcagtggattaagaatgaagcaaaaacagacgtaaacaaaagtattgataaaagttttgtaaccgagctaatcgaagatgaagtaaataaaataaaagaaattcaagaaaattcagaaatgctaagtgaagcagtaacattatttagcgatcttatttttgatgaagattttgaagaatttttaacattaccagcttataatttgatagattag

SEQ ID NO: 237605 - DNA, 1573 bp, Unknown
  Bacterial polypeptide expressing nucleotide sequence isolated from the Sargasso Sea
atgattgaaatccaatcaaataaaaaaaatgaataccaatcaatattatctaatgatgcaataaattttttagaaaaaatttgctcaaattttgaaatcagtcgtcaagaaattttagagaatagaaaaaaaatacaaaatgcaatttcatcaggtactaaactctcttttccgaaagataaaaaaataagagagggtgactggaaagttactccccctccaaaagatgtagcaaataggaacgttgaaattactggtccagttgatagaaaaatgataataaatgccttaaattctggtgccgatgtattcatggcagattttgaagattcaacttcacctacctggaacaacataatgaatggtcaaataaatttacttgatgcaaatttgaagaaacttgaatttgttgatccaaaaaacaaaaagacatacaccctagattcagaaagtaacacaagcctttttgtaaggccaagaggtttacaccttgatgagaaaaatgtattgataaatgagttaccaatttcaggagcatttttagattttgctttatatacatttcataatgcaaaactaagattagataacggcattggtacgtatttctatataccaaagcttgaaaatagtaaagaatcacaactctgggatgacatattttctttttctgaagatgaattagatctacccagaggaacaattagagctactgttctccttgaaacaatttctgcttcatttgaaattgaagagatgctttattctttaaaagagcactctcttggtatgaatgcaggcagatgggattatatttttagtgcaataaaaaaacatagggacctagaagaaatcaattttccagatagatcacaaattaccatgactgttccatttatgaaagcatatactgaactgctcgtacaaagttgtcacaaaagaggagctcatgcaataggaggtatgtctgcatttattccaaatagaagagatacagatgttactgagaaagcattagaaaatgttaagaaagataaagagcgagaagtttctatggggtttgatggttcttgggtagctcatccagatttagtaaaagtatgtaaagatgtgttccaaaattccttaggtacaaaagaaaaccaaattgactatgtacctaacgaaccaactatatctgaagagatgctccaagattttaacattcccaattcaacaattaccgaagaagggataagaacaaacatacgtgtaggcatcttgtatatccaatcatggcttctaggacaaggagcagctgcattatttaatcttatggaggatgctgctacagctgagatttcaagatcacaattatggcaatggctaaataataaagcagtgactgaatcagacaatatgattaataaaggttttataagtgaattaattgatgacgaagtaaataaaataaaagagattcagaaaaattcagaaatgctgaatgaagcagtagaggtatttagtgatcttatttttgatgagaatttcgaagaatttttgactttatcagcttataatttaatagattaga

SEQ ID NO: 237606 - DNA, 391 bp, Unknown
  Bacterial polypeptide expressing nucleotide sequence isolated from the Sargasso Sea
aatgcacaaggtatttttgggatatgtagttagatgggtagatcaatctgttggctgttcaaaagtaccagatattaacggtattggtttaatggaagacagagccacctgccgaataagcagtcaacacattgctaattggcttcaccatggaatatgcagcaagaaacatgttttagaaattatgaaaaaaatggctaaagttgtagataatcaaaatttgaaagatccaagtatgaaaggccattctccttatataccaatgtcggataacttcgctaagtcaatcgcttttaaagctgcttgtgaacttgtatttcatggaaaaactcagccatcaggctatactgagccgattcttcatcttaatagacttctgaaaaaaaattaa

SEQ ID NO: 237607 - DNA, 715 bp, Unknown
  Bacterial polypeptide expressing nucleotide sequence isolated from the Sargasso Sea
atgacccacactctcacacattcaggactcagcgtagatttagagcttgctgactttgttaaaactaaactattacctggtacacacttatcagaacaacaattttggcaaagctttgcaaagattgttcaaacgctcacgccaataaataaagcgttgctggctaagcgagaacagctgcaacagcaaattgatcagtaccacattgcaaataaaacgtgggatagcaagcaataccaacgttttttaagtgacattggctacctagtgccagagcctgcaaattttaaaattgaaacacaacaggttgaacccgaaatagcggttacagcaggcccacagttagttgttccagtaagtaacgcacgctttgcacttaatgcagctaacgcacgttggggctcgttatacgacgccttatatggcacagatgtgttaagtgaagatgacggggcagaaaaaggcactacctataatccggttcgtggctttaaagtaatggcatacgcacgccagtttttagacaaagcactgccacttgaaaacggctcacatattgaaagcaccaattattctgttgtaaacggcgcattagttattacgctgcgtgacagctctcaaaccactttagctgacccctctcagttaattggctaccaaggcgaagcccaaaacccaagcgttgtattgctaaaaacaatggcttacatataga

SEQ ID NO: 237608 - DNA, 701 bp, Unknown
  Bacterial polypeptide expressing nucleotide sequence isolated from the Sargasso Sea
aatgtcattaaagatatctccacctctgcaagattttgttagaaatgagatgttgccaggattaaatatttctgaaaattatttttgggcctcattacaaaatattttaaataaattttctaaaataaacgaagagttgttagataaaagaaagtatttacaaaacaagatcgataattggcatattgatagaagaaataaagaattcgacatcaaggagtataaaaacttcttagttgaaattggttacttgtatccaagaagtgaaaatttctctattaatacacgggatgttgatccagaaattagaaagattgccggtcctcaacttgttgttccagtaatgaatgctaggtttgcccttaatgcagcaaacgcaagatggggtagtctttatgatgctttgtatggtacagacataataagtgaagataatggagctacaagagagggcggatataatcctattagaggtaataaagttatagagttctcaaaaaatttccttgatgaaactattcctctcgaaaatggaacttatcaggatgtaaccaattttgagtttgttgatagtgagttattagtaactttaaaagataattcgaaaactactttaactaataaagacaaatatattggttatatggataagggtgagggtgcatatggcctattattcaaaaataacaatcttcatttga

SEQ ID NO: 237609 - DNA, 499 bp, Unknown
  Bacterial polypeptide expressing nucleotide sequence isolated from the Sargasso Sea
gaagtccaggaaggtattataagttctggatcaacaggttcacttgatgatttaataactttacctttattgaaaggtataaatttatcagaagatgaaatttctcgtgaggttgaaaataatgcacagggaattttagggtatgtggttcgttggattgatcaaggcataggttgctcaaaagtaccagatattaataatatcggattaatggaggatagagcaacatgtcggatttcttctcaagcacttgctaattggattgaacatggaatcatttcaaaggagcaggtcctaatagtattaaaaaaaatggctaaggtagttgatgatcaaaatgcagatgataaaaattatattcctatgtctgaaaatgaagattctattgcttttaaagcagctagggatttagtttttgaaggcaaaaatcaaccatcaggttatacagaacctattcttcatcgtagaagattagaatttaaattaaaaaataattaag

SEQ ID NO: 237610 - DNA, 1573 bp, Unknown
  Bacterial polypeptide expressing nucleotide sequence isolated from the Sargasso Sea
aatgattgaaatagaatcaaataaaaagaaagattaccaatcaatactgaccgatgatgcaataaattttttagaaaaaatatgttcaacttttgaaagttcacgtcaagagattttagaaaatagagaaaaaatgcaacaatccatttcgtctgggagtaaactctcttttccaaaagatcaaaaaataagagaagataattgggcggttactccccctccaccagacgtagttaacagaaatgttgagattacaggacctgttgatcgaaaaatgattataaatgctttaaattccggagcagacgtatttatggcagattttgaagattcgacttcaccaacctggaaaaacttaatggatggtcaagttaatttattggatgcaaataatagaaaacttgaatatgttgacccaaaaaatgagaaaacttatgctttgaatgaggatagtaatacaagtttatttgtaaggccaagaggtctacatcttgatgacaaaaatgttttaattgatggaaaaccagtatctggtgcattcttagattttgctttatatacatttcataatgcaaaattacgtctagaaaataatattggtacttatttttatatacctaaactcgaaaatagtcatgaatcccagctatgggatgatatatttacattatcagaagatgaattagatttacctagaggaactataagagcaactgttttgctcgaaacaatttcagcatcgtttgagattgaagagatgctttattcacttaaagaacactctcttggcatgaatgcgggaagatgggattacatttttagtgcaataaaaaaacatagagatttaaaagatattaactttcccgatagatcccaaataaccatgactgtgccctttatgaaagcatacactgaattacttgtacaaagttgtcacaaaagaggagcgcatgcaattggaggtatgtcagcatttattccaaataggcgaagtcctgagattactgaaaaagctatagaccaagtcaagaaagacaaagaaagagaagtcaatatgggatttgatggctcttgggtagcgcatccagaccttgtaaaagtttgtaaagatgtatttcaagattctttaggcacaaaagaaaatcaaatcgattttgttccaaacgaaccagttatatctgaaaatatgcttcaagattttaatattcccggatcaactatcacagaggaaggaataaggacaaatatcagagttggtattctctatatccaatcttggcttcttggacagggagcagcagcactatataatctcatggaagatgcggcaacagcagaaatttcaagatcacaattatggcaatggcttaatactgaatcacatacagattccaaaattactattaataaagaatatattgatgaactaatgtctgatgaagtaacaaaaatcaaagattttcaagaggacccaaaaagacttgacgaagctgtaaatttatttagagaacttatatttgatgaaaattttgaagaatttttaacattacccgcttatactttaatagattag

SEQ ID NO: 237611 - DNA, 564 bp, Unknown
  Bacterial polypeptide expressing nucleotide sequence isolated from the Sargasso Sea
aatggaaaaaaagtatataaaaattaatggtatttcggttgctagcaaattggcagattttgtcaaaaatgaactattagaaaatacagaagtagacgtaaaacatttttggaatggatttgaaaaatcaattaacaaattagttccaatgaataaagaattactaaaaaaaagacaacaaatccaaaaaaaaattgatgattggcacaatagaaatgaatttgaagaatttgattatttaaaatacaaaaaattcctaacacaaattgggtatattgttgaagaaaaagaagattttaaaattgaaactacaaatgtagatgctgaaatatcaaaaattgctggtcctcaattggttgttccggtaatgaatgcaagatatgctttaaacgctgccaatgctagatggggaagtttatatgatgctttgtatggaactgattttcttgagtctaataaaggtttggatagtcactataatccctttagaggaggaaaagtaataaaatattgtcgaggaatattagataagttttttccattaaacgaaaatacttggaaaaa

SEQ ID NO: 237612 - DNA, 778 bp, Unknown
  Bacterial polypeptide expressing nucleotide sequence isolated from the Sargasso Sea
aatgaatcttttttctaaattttttaaatcttctaaacactctgctaaagaaattaatttaaaaatatcttcatctcttgaagattttataaaaaatgaagttctgcctggtctaaatatttcacctcattatttttggagctcttttgaaaatcttattgaaaagttttctaatcgaaataaaaatctattaattaaaagaagtgaaatacaagaaaagattaatgattggcatattcaaaatagaaataaagaatttaatttagaagaatataaaaattttttaactgatattggttatttacatccaagagcaggtgattttatgatcaagacatggaatgtagatccagagattagaaagattgctggtcctcaattggttgtacctgtcatgaatgcaagatttgctttaaatgcagctaatgcaagatggggaagtctttatgatgctttatatggaacaaatataattactgaagaggatggtgctacaagagagggaggttacaacccaataagaggaaacaaagtaatagaatttgctaaaaaatttctcgatgaaacaataccaatgcaatcaggcacatatgatcaggttattcagttccaatttattgatagtgagttatcaatgaaattagaggatggaaaaaaagtaaatttaaaggatattgatcaatatgttggttataaagatgagggtgagggcgcatatggacttctatttaaaaaaataatcttcactttgaaatacaaattgatagatcgcatccaa

SEQ ID NO: 237613 - DNA, 631 bp, Unknown
  Bacterial polypeptide expressing nucleotide sequence isolated from the Sargasso Sea
tatgtggccaatgcctgacgaaatgttaaatatgtatgaaaccaaaaccatgcatccagaatctggagcaaactgtgcttgggtaccgtcaccgactggcgccactcttcatgcaatgcactatcatcaaatcttagtttctgatatacaacaaactattctagagcgacctaaggccaatattgatgatattctcactattcctttaatggaaaatccagaagggctatcagctgaagatattcaaaaagaattagacaataatgctcagggtattcttggttatgttgttagatgggttgatcaaggagtaggttgctccaaggttccagatattaataacgtcggacttatggaggatagagcaacatgtagaatatctagccaacatatcgcaaattggttgcatcactctatttgcactgaggaccaagttatcgataccatgagaagaatggctctagttgttgatcagcagaattctggggatccctcatacctaccaatgggtccatcatatgatggtgttgcttttaaagcagcgtgcaatcttgccatagagggaagaagtcaacccagtggttacactgaacctatattgcacgaaatgaggttaaaatttaaagcttaa

SEQ ID NO: 237614 - DNA, 805 bp, Unknown
  Bacterial polypeptide expressing nucleotide sequence isolated from the Sargasso Sea
tctgaatcctaagaccattgcgctgattgaatcccttcacgataattttgaaaatcaaagaagaaagttgcttgaggatagagaaatcttgcaaaaagaattggacgatggaaaattcccaaacttcttgacccaaaccaaggacatcagggaaagcagttatgtggtttcgcccataccagaagatcttcaggatcgcagggttgagatcacaggaccaccagatcgaaagatggtcatcaatgctttgaactctcccgttaagacttttatgtgtgattttgaggattcttgctcaccgacatggaagaatattattcaaggtcatgtaaatgttcgagatgcagtagaggagagcattgaatttacaagagaatcggatagcaaggtttacagacttaatgataagattgcaacgctgattatcagaccaagaggctggcatctcaacgaaaagcatgtatcgatcaacgatcagcccatatcagcatcgctttttgattttgctgtttacctttcaaataactatgaagccctttcaaaaaaaggcacaggaccttatttttatcttccgaagcttgaaaatcatcttgaggcgagactctggaacgatgttttcgtgcatgctcagaattttttaaatattgatcgtggcacaatcaaggccacagttttgattgaaacaataactgctgcctttgaaatggatgagattatcttcgagctaaaagaacattcggccgggcttaattgtggtcgatgggattatatatttagctttataaagaaatttagaaatcatcaa

SEQ ID NO: 237615 - DNA, 949 bp, Unknown
  Bacterial polypeptide expressing nucleotide sequence isolated from the Sargasso Sea
atgaaaataaattatcaaactgtaaataatttaaaaattgcaagtgaattacttaaatttgttaacgaagaattactaaaaaatactggtatttcttcagaaaaattctggactgggtttgataaatatgtccacgaactagcaccaaaaaataaagaattattaaaaataagagaagatttacaaaaaaaaattgatgattggcatattaagaataagggcaaagaaattaacattaacgattataaaaaatttttaaaggatataggttatttaaaaaaagagggtgatgattttaagattgaaacctctaatgtagatgatgaaatagctaaaatagctggaccccaattagttgttcctgttatgaatgcaagatatgccttaaatgcagctaatgcacgttgggtaagtttatatgatagtctttatggaactaacataattgagtcagaggaaggtggaagtgaaagatatgatcctaatcgtggacaagaagtaattaaatatgtaagagaattttttgataaattcatacctatagatggaacaagctggaaaaatattgctgctcttaaagtagttaataaggatttagttatcttaaaagatgattatgagtataaattaaaagataaaaataaattcataggtcataggggagatgcaaataaaccagaagcgataataataaaaaataataatcttcattttgaaataataattaaccctaaagcatttagtgctgctcatgatatagcagggataagtgatgtaatagctgagtcggcggtttcaactatttgtgataacgaggatagtgttgccgcaattgatgctgaagataaagttatttgttatagaaattggttaggcttaatgaaaggagatttaaaaattcagtttgaaaaaaatggtaaaaatttagaaagaaaattaaatcctgata

SEQ ID NO: 237616 - DNA, 533 bp, Unknown
  Bacterial polypeptide expressing nucleotide sequence isolated from the Sargasso Sea
ctatcatactataaatgtattttctgttcatcaaaaattgaagaaaagaaaattagctaaattagatgatcttcttacaataccagttgagactaacaaaaactggtctaaggatgaaattgagaaagaattaaaaaataatgcccaaggtattttaggttatgttgttagatgggttgatcaatctgtaggttgttcaaaagttcctgatataaatgggataggcttgatggaagacagagctacgtgcaggataagcagtcaacatatagctaattggcttcatcacggtatatgtagcaaaaaacaagttttagaaattatgaagaaaatggctaaagtagttgattatcaaaatttaaaagatcatggtatgaaagatcaggacccttatcaaccaatggctggtaactttgaaaaatcaattgctttcaaagcagcatgtgatttagttttccatggaaaatatcaaccctcaggttacactgagcctttgcttcactttaatagattgattaaaaaatcaatctgac

SEQ ID NO: 237617 - DNA, 625 bp, Unknown
  Bacterial polypeptide expressing nucleotide sequence isolated from the Sargasso Sea
gataaaatgaaggaaatgttagatgaaaaaatcagtcatttgaaagctggtgcaaattgtgcctgggttccttccccgactgcagcatcattacatgctcttcactaccatcaaataaacatttttgatgaacaaaaaaagattatgaaacgagaacaatctaaattagatgatctattgacgattcctgtggctgatagacctaattggtcagttgatgaaatcaataaggaaattactaactcagcacaaacgctactaggttatgttgtgaggtggattgaccaaggagtgggttgttcaaaagtccctgacataaataatattggacttatggaagatagagccaccttaagaatatcttcacaacatattactaattggatacatcacgggatcacaacaaaaattcaagttatggaaatcatgaaagccatggcaaaagttgtagataaacaaaatgagaatgataggaactatgtaaggatgtcagataatttcgaaaattctttagcatttaaaacagcttgcgacttgatatttaaaggaaaagatcagccatcaggttatacagagcctcttctgcatttaaacagaatagaaaaaaaatctagcttgaattaat

SEQ ID NO: 237618 - DNA, 655 bp, Unknown
  Bacterial polypeptide expressing nucleotide sequence isolated from the Sargasso Sea
taaagggaatgcacaaataggcaaaggaatgtggctcatgcctgatgagatgttagaaatgtataaagctaaatcagttcatccaagatctggagctaattgtgcctgggttccttctccaactgctgcaacaattcatgcgattcattatcatcaaatttatgttcaaagtgaacaagataaaattttaaatagagataaagctagcttaaatgaccttttaaaaattccattaattaaaagttatgaaatgccctcagctgaggaaatacaagaagagcttgataataatgctcaagggattcttggttatgtagtcagatgggttgatcaagggataggttgttctaaagtacctgatctaaatgatataggattgatggaggatagggcgacttgcagaatatctagccaacatattgcaaactggcttcatcatggactttgttctgaaaagcaagtaattgaaacaatgaaaaaaatggcaaaagtcgtagacttgcaaaacaaagatgatgttaactataaaaaaatgtcacctgcttatgatggtattgcatttaaagcagcatgcgatcttgccataatgggaaggacgcaaccaagcggatatacagagccaattcttcatgagatgagattaaaacgaaaatga

SEQ ID NO: 237619 - DNA, 862 bp, Unknown
  Bacterial polypeptide expressing nucleotide sequence isolated from the Sargasso Sea
attgagacactacctgcagcattccaaatggacgaaatactttatgaattaaaagatcatattgttggtttgaactgtggtcgatgggattatatatttagctacattaagagattagctttaaacccaaactatattcttccagaccgttcacaagttattatgggagatgcttttttaaactcctattcgttactgctaataaaaacttgtcacaaaagaggtgctttcgctatgggaggtatggctgctcaaattcctgtaaagaataatgatgaagaaaacgataaagcatttgaaaaagtaagaaatgataaggaacgagaagttaacaatggtcatgatggaacatgggttgcacatcctgggttagtacctgtggcgatggaaatttttgataaacaattatctggtgataatcagctagatgtttctttagataatataacaattactcaagacgatttactagaagtgcataaaggacaaagaactgaagaaggaatgcgcgaatgtattaaggtcggtgttcaatatatcgaagcatggttggcgggtcgtggggctgtacccttatataacttaatggaagacgcagctacagcagaaatatcaagagcacagatctggcaatggttgaagcactcaacaaaactcgatgacggaagaacggttaatgagggattatttaaagatattttgactagtgaaatagataatttaaaagaagttctaggtgaagaagtttggtcaaaaggcaaatatgaaaaagctgttgaaatatttgaaaaaatgtctatatctcctgtttgtgaagagttcttgacacttcctgcttatgaagaaatagtgtcttcttagc

SEQ ID NO: 237620 - DNA, 1651 bp, Unknown
  Bacterial polypeptide expressing nucleotide sequence isolated from the Sargasso Sea
atgacggaacacactttaggtgaacagcaattgaattcgacacagaataaggccactgcgaatggcactctggccttagtgggaaataccataccagggcaggaggtgatttttaccgaaggcgcgctggcgttgcttgagtcactttgccgtgaatttgcgacagaagtgcccaccttactcgccaaacgtaaagatagacaagcgcgtattgataaaggggctttgcctgactttttacccgagacacgcgctattcgtgacggggcatggaagatccgtggcattccgaatgacttactcgatcgccgtgttgaaatcaccggtcccgtcgaacgtaagatggtgatcaatgcactcaatgccaatgccaaagtgtttatggcggattttgaagactctttagcaccgagctggcagaaagtggttgaaggtcagattaacctgcgtgatgccgtgcgcggtgagattgaatacacagcgcctgaaactggtaaacattacaagctaggcccaaatcctgcggtattaatctgccgtgtgcgtggtctgcacttaaaagagaagcacgttgaatttaaccagcagtccatccccggcgcgttattcgactttgcgatgtacttttaccataactatcgccaattgctggcgaagggcagtggtccttacttctatattcctaaactcgagagccatatcgaagcgcgttggtgggcaaaagtgtttgcttttgttgaagaaagattctgcctacagcctggcacaatcaaatgtacttgtttgattgagaccttacccgcagtgtttgaaatggacgaaattctctatgaattacgctcaaacattgtcgcgctcaactgtggtcgctgggactatatcttcagctatatcaaaacattaaagcgtcatagcgaccgcgttttaccggatcgccaagcggtgaccatggatacgcctttcttaagcgcctattcaagactgctgatcaaaacctgccataaacgtggcgcactggcgatgggtggcatggcggcctttattccagcgaaggatcctgctcagaacgaaaccgtgttgcaacgagtgcgtaaggacaaagagcttgaggcgcgtaatggccacgatgggacttgggtcgctcacccgggtcttgcggatacggcgatggggatctttaacgaatacataggccaagatcatcaaaaccaattgcatatcacccgtgatgtggatgcaccgatcctcgccgcagagttattaaaaccctgtgatggcgagcgtacagagcaagggatgcgcctgaatattcgcatcgcactgcaataccttgaggcgtggatcagtggcaacggttgtgtaccgatttacggattaatggaagatgcggcaaccgctgaaatctcccgcgcctcgatttggcaatggatccaacatggcaagtcactctcaaacggcaaacccgtcactaaacaattgtttaaggacatgctagtggaagagttagcgaatgtgaaaaaagaagtgggcagtgacagattcacccacggcaaatttacccaagcagcggtattgcttgaggatattaccacttcggatgagttggtcgatttcttaaccttacccggttacgagatgctaacggcttaat

SEQ ID NO: 237621 - DNA, 656 bp, Unknown
  Bacterial polypeptide expressing nucleotide sequence isolated from the Sargasso Sea
aacttgtcacaaaagaggtgctttcgctatgggaggtatggctgctcaaattcctgtaaagaataatgatgaagaaaatgataaagcatttgaaaaagtaagaaatgacaaggaacgagaagttaacaatggtcatgacgggacatgggttgcacatcctgggttagtacctgtggcgatggaaatttttgataaacagttgtctggtgataatcagctagatgtttctttagataatataacaattactcaagacgatttactagaagtgcataaaggacaaagaactgaagaaggaatgcgcgaatgtattaaggtcggcgttcaatatatcgaagcgtggttggcgggtcgtggagctgtacctttatataacttaatggaagacgcagcgacagcagaaatatcaagagcacaaatctggcaatggttgaagcactcaacaaaactcgatgacggaagaacggttaatgaggaattatttaaagatattttaaccagtgaaatagctaatttaaaagaagttctaggtgaggaagtttgggcaaaaggcaaatatgaaaaagctgttgaaatatttgaaaaaatgtctatatctcctgtttgtgaagagttcttgacacttcctgcttatgaagaaatagtgtcttcttagc

SEQ ID NO: 237622 - DNA, 772 bp, Unknown
  Bacterial polypeptide expressing nucleotide sequence isolated from the Sargasso Sea
aattcatacctcgatgaaggccggacctatggttcgtaagactgacatgaaaggtcagaaatggatccaaagttacgaagattggaacgttgatgtcggcctggcttgcggcttttccgggaaagcccaaatcggcaagggcatgtgggcgatgccggatgaaatggcagacatggtgaaaaacaaaatcgggcaccccatggccggtgccaactgcgcctgggtcccatcccccactgctgccactctccatgccattcattatcatcgggtgaatgtgcttgaacgccaacaggaactcatggaacgtgagcctgcaaatttatacgatatcctcaaaattcctttagaggagcaaccaaactggtcagaagaagaaatccgaaaggaactggagaacaactgccagggaatcctgggatacgtggtgcgctggattgatcagggtgttggctgttccaaggtcccggacatccaggatgtcggcctgatggaagaccgtgcgactttaagaatctccagccagatgcttgcaaattggctattgcatggaatcgtcagcgaagaacaagtaacccaggcacttgaacgtatggcaactgttgtcgatcggcaaaatgcagaagatcctctctaccaaccgatggctccctcctttgaggggatagcctttcaggctgcccgtgatctagtctttaaaggaacagaaatccccaacggatacaccgaaccaacccttcatgcaaggagaagagaattgaaatccgcttag

SEQ ID NO: 237623 - DNA, 960 bp, Unknown
  Bacterial polypeptide expressing nucleotide sequence isolated from the Sargasso Sea
ggcggagaagagatgacaaggactctgaatgaggatagaaattattcagacaaaaatggtcaagaaattactcttcccggaagaagtgttcttttggtgagaaatgtcggtcatttaatgacaaatcctgcaatcctcgatggaaacaataatgaggtccccgaaggaattatggatgccatgtttactatctgtataggcaagcatgatcttttaaaggaaggaaaacaatcaaattcaagaactggaagtatttatatagtaaaaccaaaaatgcacggacctgaagaagttaagtttacgtgtgatttgtttgcaaaagtagaacaggaattgggcttagatcctctaaccgtaaaaattggcattatggacgaggaaagacgaaccactgttaaccttaaagaatgcatcagagtggcaagtgacagagttatatttataaatacaggtttcttagacagaacgggtgacgaaattcataccagcatggaagctgggcctgtagtaccaaaagcagagatgaagcagcaatcttggattgctgcttatgaggattggaatgttgatattggtcttgagactgggttcaaaggtaaggcgcaaataggtaaaggaatgtgggcaatgcctgatgagatgttaggaatgtatgaaaataaatctatgcatcctgaagctggtgcaaattgtgcgtgggttccatctcccactgccgcaactttgcatgctattcattatcacaaagtttccgtttcagaacgtcaagaggaattagcatccagaccaagggctgatttaaaagatattctttctattccattgctggaaaatcctgaaagcttaacacctgaagtgatacaaactgaacttgataataattgccaaggcatacttggttatgttgtcaggtgggtagatttaggggtaggttgctccaaggtccctgatataaataat

SEQ ID NO: 237624 - DNA, 954 bp, Unknown
  Bacterial polypeptide expressing nucleotide sequence isolated from the Sargasso Sea
cctgcgtaaaaattttaaaatattaacaaaaaatgtagatagggagatatcaagtatttgtggtcctcaactagtttgtcctgtctcaaatgcaaggtttttattaaatgcagctaatgcaagatgggtaagtttatatgatagtttgtatggaacagatataattcctgaaactcaaggagcagtaaaaggaaaaacttacaatccaataagaggaaaaaaagtaatcgagtatgctagaaatttattagatatgtatgtgcccttaaaaggaaaaagttggaaagatttaacgaaaattccagaagttataaataataaagtagatttaaaactaaataattacaaacaattcgtaggttataaaaaaaaaaaaaaaaaattaagctctcttttatttgtaaataataatctccatatagatattttgtttgaccaaagtggtaaaatggaaattaataatccagatggtaatcaagataaaataaaaatacatgatataattttagaatcagcaatatcaacaatttgtgatcatgaggacagcgtggctgcagtagatgctgaagacaaagttcagggatatagaaattggcttggtttgatgaaaggcgacctgaaggaagaatttgtaaaaaatggaaaaaaaattttaagaaaattaaatccagatcgagattatgtttccatcaaaggaaaaaaatttaaattgcatggtagatctttgcttttaaatagaaatgttggtcatcttatgacaaatccagctatacttttaaaagatggatctgaatgtcctgaaggaataatggacgcttttataaccactcttgcatgtctacatgattttaaaaaaaaaggaaattctagggttaattctatttatatagttaaacctaaaatgcatggaccggacgagtgtagatttacaaatttaatttttgaaaaagttga

SEQ ID NO: 237625 - DNA, 973 bp, Unknown
  Bacterial polypeptide expressing nucleotide sequence isolated from the Sargasso Sea
tttacagatttaatttttaaaaatgtggaaaaagttttaaagcttaaaaataatcaaattctttgtggaataatggatgaagaaagacgaacctctttaaatttaaaagaatgtataagagcgttaaaaaaaagagttttttttataaatactggatttttggataggactggtgatgaaattcatacatctatggaatatggaccgatgatattaaaaggagatatgaaagcttcaaaatggatacgggcatatgaaaacaataatgttgatgttggattatcctgtggattttccggtaaagcacagataggcaaagggatgtgggcaatgcccgatcttcttaatgacatgatgaagcaaaaaatttctcatccagaagctggggcaaattgtgcatgggtgccatcaccaactgctgcagctattcatagtttgcattatcatcacgttgatgttttttcaaaacaaaaagacataatgaaaagaaaaaaagcgaagttagatgatttacttgaaatccctattaattcaccaaaaaacaaatggtcaaaatcccaaatatcagaagagcttaaaaataatacacaaggtattttaggctatgttgttagatggattgatcaatctgttgggtgttcaaaagttccagatataaatggtgtcggattgatggaagatagagctacttgtaggataagcagccagcatatagcaaactggttgcaccacggagtatgtagcaaaaaacaagttttggaaattatgaaaaaaatggccaaaattgttgataatcaaaatcttaaagataaaagtatgaaagggcaagatccataccagtctatgggagcaaattattatcaatcaattgcttttaaaactgcatgtgatttggtttttcacggcaaaagtcagccctcgggttacactgaaccattgcttcactttaatagaataatgaaaaagtcaatct

SEQ ID NO: 237626 - DNA, 943 bp, Unknown
  Bacterial polypeptide expressing nucleotide sequence isolated from the Sargasso Sea
ctaaaaggaaaaacttataacccaatcagaggtaaaaaagtaattgaatacggtcgtactatattagacaaatatgtacctttaaaaaataaaagctgggaaaaattaaaaaaaattccagaagttaaaaataacaaattatatttaaagcttaaaaatcctaaacaatttgttggttataaaaaaaaatcaaacgaaatatcttcaattttatttaaaaataacaaccttcatattgatattttatttaatgtaaaaagaaatatggaaacaaacaatcctgagtcccagcgtatgcaagatgaattaaaaatccatgatattttattagagtcagcaattactactatttgtgatcatgaagatagtgtagctgccgtagatgctgaggataaagttttaggctataaaaattggcttggtctaatgagaagaaatttaaaagtagaatttaaaaaaaacggaaaaaaaatttttagaaaattaaattctgatagagattatatatcccctgaaggtaaaaaatttaaattacatggaagatcattgttgttaaataggaatgttggtcatctgatgacaaacccggcgatacttttaaaaaatggttctgagtgtccagagggaattttagatgcttttattacctcgctcgcgtgtttgcatgattttaaaattaaaggaaattcaagaactaattcgatttatattgttaaaccaaaaatgcatggtcctgaagaatgttcttttacaaatttaatttttgaaaaagttgaaaaagttttaaatttaaaaaaaaatcaaattctttgtggaattatggatgaagaaagaagaacttcagtaaatctaaaagaatgtataagaattttaaaaaatagagttttttttattaataccggttttttagatagaactggagatgaaattcatacatcaatgg

SEQ ID NO: 237627 - DNA, 1111 bp, Unknown
  Bacterial polypeptide expressing nucleotide sequence isolated from the Sargasso Sea
tacaactttgaaagatgcaaataaatttattggtcatcgaggtgaagcagatagcccatcagcaataatattaaaaaataataaccttcatattgaaatactaaaaaatccaagagcttttagtgctcaacaggatcatgcaggcattagtgacataatattagaatcagcagtatctacaatatgtgataatgaagacagtgttgcagcagtagatgctcaagataaagtgatttgttatagaaattggcttggattaatgaaaggagatctcttaacaagatttgagaaagagggaaaaacattggagagaaaacttaatccaaacagaagttatatttcaaaagaaggaaaaggattaaaattacacggtagaagtcttttattaattagaaatgttggtcatttgatgactaatccctcaataatattgaaagatggaagtgaaattccagaaggattgatggatgcttttataacaactgcagcagctcttcatgataagaaaaaaaaaggaaattcaagagctggttcaatatatattgtaaaaccaaagatgcatggtccagacgaaacagcgtttacaaatgaaatttttactaaagttgaagaggtattaaaattaaaaaaatacacatgcaaaattggaattatggatgaagagagaagaacttcatctaatcttaaagagtgtattagaaccttaaaacacagagttttcttcataaacacaggtttccttgatcgtacaggtgatgaaatgcatacatcaatggaggcaggaccaatgattaaaaagggtgatatgaaatcttcaaaatggattggggcttatgaaaataacaatgttgatataggtttggcttgtggcttttcaggaaaagctcaaataggtaaaggaatgtgggctatgcctgataaaatgaaagacatgttagatcaaaaaactggtcatcttaaagatggggcaaattgtgcttgggtaccatctccaactgcagcagctatacatgctttacattatcatgagataaatatttttgatgttcaaaaaaaattgtctaatagagataaggctaaaattgatgatttacttactattcctatcgca

SEQ ID NO: 237628 - DNA, 760 bp, Unknown
  Bacterial polypeptide expressing nucleotide sequence isolated from the Sargasso Sea
catggaagctggaccaatgatcaaaaaaggagatatgaaagagtctaaatggattaaaacctatgaggataataatgtagatataggcttaaaatgtgggttttcaggtgttgctcaaataggtaaaggaatgtgggccatgcctgacaaaatgaacgaaatgatggaacaaaaaattggacatgtgaatgcaggtgcaaattgtgcttgggttccttctcctactgctgctgcattacatgttatgcactatcatgaagtaaatgtttttgaaaaacaaaaagcaataataaaaagagagccttcaaagttatctgatcttcttactattccaatagcagatcgacctaattggtctgttgatgaaattaatgctgaaatttcaaattctgcccaaactattttgggttatgtagtcagatggattgatcaaggtataggttgttctaaagttccagatataaatgatattggattaatggaagatagagcaacattaagaatttcttctcaacatattgccaattggcttcatcatggcttatgctcgaatagacaagttcttgaaattttaaaaaaaatggcaaaagttgtggataaacaaaataaagacgactctaactacgaaagtatgtcaccagagtatgataaatctattgcttttaaagcggcatgtgagttaatctttcatggaaaatcacaaccatctggctatacagagcctcttttacatttaaatagattaattaaaaaaagctaa

SEQ ID NO: 237629 - DNA, 942 bp, Unknown
  Bacterial polypeptide expressing nucleotide sequence isolated from the Sargasso Sea
cgattggtggaccaaagattactttttcatactgagcaagatcaaattacatatttaaaaaatgaagatcaattcaaaggatttaacggatctcctgaaaatccttcagaagttttattagttaacaataatcttcatttggaaattcaaatagaccccaatcatcctgttggtaagactgataaagcaaatattaaagatattgttttggagtctgcagtttcaacaattcaagattgtgaggattcagttgccgcagttgatgctgaagataaagtaattgcctatagaaactggctcggtttgatgaaaggaaatctttctgaaacatttgaaaaaaatggaaaacaactaacaagagtcttaaaagaagatagagaatatttagatactaatgggaactctttttctcttcctggaagaagtcttttacttgttaggaatgttggccatcttatgcagaatccttcagtaatattgggcaatggcgaagaggtttttgaaggaattttagatgctatgtttaccatatgtatagccttacatgatctaaataagttaaatatattgtcgaattcaaggaacaaaagtatgtatatcgttaaaccaaaaatgcatggttccgaggaggtagctttcacatgtgacttatttgatgcagttgaacgattatttaatctagaaaaaaatactgtaaaagttggaattatggatgaagagagacgaaccactatcaatctaaaggcttgcatcaaaaaagctaaagaaagaataatttttataaatactggttttttagataggacaggagatgaaatacatacgagtatggaagcaggtcctatggttccaaaatcggatatgaaagctcaatcatggataaatgcttatgaagattggaatgtggatataggattaagttgtggattaagtggtaaagcg

SEQ ID NO: 237630 - DNA, 971 bp, Unknown
  Bacterial polypeptide expressing nucleotide sequence isolated from the Sargasso Sea
atatttaaaagaagagggaaatgattttaaaatagataccaaaaagcttgatagtgaaatttcaagtattgcaggtcctcaacttgttgttcctataatgaactctaggtatacattaaatgctgctaatgcaagatgggtgagtctttatgatagtttatatggaacagatttaattgaatctgaagagacaggtagtcaaaagtatgaccctctgagaggacaagaggtaataaaatttgctcgtaattttctaaatgatcacttctctatcaatggaattcattggaaagatataaatggatttaaaatagagggaagtaaattaaaaatattaaaagacaataaagagtttgagttagtagataaaaataaatttattggatacagaggagagcctgataatccaacaacaataattttagaaaacaataatttaaaaattgagataataattaatcctaaagcttttagcgctgttcaggatgctgcgggaataagtgacataattatagagtctgcaatatctacaatatgtgataacgaagatagtgttgctgcagtagactcagaagataaaattttatgttacagaaattggttaggtttgatgaaaggaactctaaaatctgtctttgaaaaagatggaaaaactttagaaagaaaacttaatccagatagaagttatatttcaaaagataataaaaaagaaaagttacatggtagaagcttacttttaattagaaatgttggtcatctaatgaccaattcagcaattattttagaagatggttctgaagtcccagaaggtatcatggatgcatttattacaactgctgcagcaattcatgatttaaaaagaaaaggtaactcaagaacaggttctatatatattgtaaaaccaaaaatgcatggacctgaagagactgcttttacggataaaatattcacaaaagttgaggaagtattaa

SEQ ID NO: 237631 - DNA, 1051 bp, Unknown
  Bacterial polypeptide expressing nucleotide sequence isolated from the Sargasso Sea
gaaaaaaaaggtaaaacttatattagaaaattaaatccagatagaaaatttgtaaaaaaagatggatctttatccaaactgcacggaagggcacttctgctaaataggaacgttggtcatttaatgactaatccatgtattctacttaaagatggatcagaaattccagagggtatactagatgcatttgtaacatcattatgctccatgcacgacattaaactaaaaaaaaactcgagaacggggtctataatgatagttaagccaaaacaacatggtcctgaggaatgctcttttactaacttgatttttgaaaaagttgaaaaggttttaagattagaaaaatatactattaaatgtgggattatggatgaagaaagaagaacatcattaaatctaaaggaatgcattagagaattaaaagatagagtattttttataaatacaggttttttagatcggactggtgacgagatacatacctcaatggaatttggaccaatgattaaaaaagcagatatgaaaaatgcagattggataaaagcttacgaaaacaataatgttgatataggtttaaaatgtggatttatgggtattgcacaaataggcaaaggtatgtttgcggaaccagataatatgaataaaatgatgatcgaaaaaattaatcatctaaatgctggagccaattgtgcatgggttccatcgcctacggctgcagctctgcactctttacactaccacgaaatcgatatttttaagaagcaacttgaattaaaaaaaagaaaaaaaattagacaaaaagatctacttaaaattccttacgctaacggaaaaagatggaaaatagaggaaattaggaacgaaattgctaattgtgctcagagtatactaggttacgttgttagatggatcgaccaaggcataggttgttcaaaagttcctgacattaatggtgtttttttaatggaggatagagctactctgagaatatcctcgcaacttattgctaattggttgcatcatggaatatgtagcagaaaacaagtactga

SEQ ID NO: 237632 - DNA, 973 bp, Unknown
  Bacterial polypeptide expressing nucleotide sequence isolated from the Sargasso Sea
aaattaaaaattcatgacatttttttagaatctgcaatctcaacgatttgtgaccatgaagatagtgtggcagctgtagatgctgaagacaaagttgttggatataaaaattggctaggtttaatgaaaggtaatttaaaagtaaaatttaaaaagaaaggaaaaaacgttttaagaaaattaagcagagatagaaaatatatatcaccttatggaaaacaatttaaattacacggtagatcattgttactgaatagaaatgttgggcatttaatgacaactccctctattcttttaaaaaatggttcagaatgccccgagggaatacttgacgcttttattacatctgctgcatgtattcatgactttaaaaaaaaacaaaactcaaaaaaaaattctatatatattgttaaaccaaaaatgcatggaccagatgaatgcgccttcacaaatttaatttttgaaaaagttgaaaaattactaaagttaaaaaaatatacaataaagtgcggaataatggatgaagaaagaagaacttctgtaaacttaaaagagtgtataagatctttaaaaaacagagtttttttcattaatacaggatttttagacagaacaggagacgaaatacacacatcaatggaattgggtccaatgatgaaaaaaggggaaatgaaatcttcaacttggatttctgcttatgaaaataacaacgttgatattggactttcatgtggattttcaggcaagtgtcaaattggaaaaggaatgtatgccgctcctgatttgatggcagacatgattaaacaaaaaatttctcatccattaggaggagcaaattgtgcttgggttccaagtcccactgctgctgctttgcatgtgttgcactatcatgaagtaaatgttttttccaaacataaagaattgttaaaaagaaaacccgcaaaaattttagatcttctaactattcctatca

SEQ ID NO: 237633 - DNA, 676 bp, Unknown
  Bacterial polypeptide expressing nucleotide sequence isolated from the Sargasso Sea
atgtggttttcaggtaaagcacaaataggtaaaggtatgtgggcaatgccagataaaatgaaggaaatgttagatgaaaaaataagtcatttaaaagctggtgcaaattgtgcctgggttccttccccaactgcagcatcattacatgctcttcactatcatcaaataaacatttttgatgaacaaaaaaaaattatgaagcgtgaacaatctaaattagatgatttattgactatccctgtggctgatagacctaattggtcagttgatgaaatcaacaaggaaattactaactcagcacaaacactgctaggttatgttgtcagatggattgaccaaggagtgggttgttcaaaagtccctgatataaataatattggacttatggaagatagagctaccttgaggatatcgtcgcaacacattgctaattggatacatcatgggatcacaacaaaaattcaggtaatggaaatcatgaaagccatggcaaaagttgtggataaacaaaatgagaatgataaaaactatattaaaatgtcagataatttcgaaaattctttagcatttaaaactgcttgcgacttgatatttaaaggaaaagatcaaccatcaggttatacagagcctcttctacatttaaacagaatagaaaaaaaatctagcttgaattgat

SEQ ID NO: 237634 - DNA, 946 bp, Unknown
  Bacterial polypeptide expressing nucleotide sequence isolated from the Sargasso Sea
aattggctaggattgatgaaaggagatttaaaatcaatatttgagaaaaatggtaaagaattagaaagaaaacttaatccagataggagttacacttcattaaacggtgaaaagttaaaacttcacggaagaagtcttttgcttgtgagaaacgttggacacttaatgacaaaccctgcaatcactttaaatgatggatcagaagttcctgaaggaataatggatgctttcataacttcagcagcttgtattcatgatttaaaaagaaaaggtaattcgagagaagggtcaatttatattgttaaaccaaaaatgcatggtccagaggaaacagaatttactaatttaatttttacaaaggttgaagaagttttaaaattagaaaaaaatacaattaagtgtggaattatggatgaagaaagaagaacatctgcaaaccttaaagagtgtattagaacacttaaagatagagtattttttataaacactggatttttagatagaactggtgatgagatgcacacctcaatggaagctggaccaatgatcaaaaaaggagatatgaaagcgtctaaatggattaaaacctatgaggacaataacgtagatataggcttaaaatgtggtttttcaggagttgctcaaataggtaaaggaatgtgggccatgcctgataaaatgaacgaaatgatggaacaaaaaattggacatgtgaatgcaggagcaaattgtgcttgggttccttctccaactgctgctgcattacatgttatgcactatcatgaagtaaatgtttttgaaaaacaaaaagcaatattaaaaagagagccatcaaaattatctgatcttcttactattccaatagcaaatcgtcctaattggtctattgatgaaattaatactgaaatttcaaattctgctcaaactattttgggttatgtagtca

SEQ ID NO: 237635 - DNA, 657 bp, Unknown
  Bacterial polypeptide expressing nucleotide sequence isolated from the Sargasso Sea
aggcgcaaataggaaaaggaatgtgggctatgcctgataggatggcagacatgatgaatcaaaaaatatctcatcctgagtcaggtgctaattgtgcttgggtaccttcccctacagcagcaactcttcatgctacccactaccataaaattgatgtttttcagaaacagaacaaaataaaatctagaaaaaaagccaacctcgaaaatatattaaaaataccaaaagcagacaggcctaattggtcagttgaggatatcaataaagaattagaaaataatgctcaaggtattctaggatatgtggttagatgggttgatcagggagttggttgctccaaagtaccagatataaacgatataggtttgatggaagatagagcaactttaagaatatcatctcaacatatggcaaattggttacatcacaatatatgctcaaaggatcaggttatgagtgttatgaaaaaaatggcagcaattgtggatcagcaaaataaagaagataaaaattatttgcctatgtccccaaattttgaaaagtctgtagctttcactgcagcttgcgacttggtatttaaaggaagagaacagccatcaggttatactgagcctatacttcacaaaaagaggttagaaaaaaagtctaatcgttaga

SEQ ID NO: 237636 - DNA, 962 bp, Unknown
  Bacterial polypeptide expressing nucleotide sequence isolated from the Sargasso Sea
attaaatccagatagaagttatatctcgaaagatggaaaaaaattaaaattacatgggagaagtctcttgctcgtaagaaatgtagggcatttaatgacaaatccttctattctactgaaagatggatcggaaatacccgagggtataatggatgcttttattacgtcagcagcatgtcttcatgattttaaaagaaaaggtaattcaagaaaaggatccatatatattgttaaaccaaaaatgcatggaccagatgaaacagcctttacagatctaatattttctaaggttgaagaagtgcttggtttaaaaaagtatacctgcaaaataggcataatggatgaggaacgaagaacatcagtaaatttaaaagaatgtattagaactcttaaaaatagagttttttttattaatacaggatttttagatagaactggtgatgaaattcatacctctatgaatgcaggtccaatgatcaaaaaaggtgatatgaaaaaatctaaatggatttctgcctacgagaataataatgttgacattggtttagagtgcggtttttcaggagttgcacagataggaaaaggtatgtgggccatgcctgataaaatgtcagatatgatgaatcaaaaaattgatcacctgaaagctggggcaaattgtgcatgggtgccatcaccgacagccgctgcacttcattctcttcattatcatgaaattgatatatttaaaaaacaaaaggaactattaaaaagaaaaaaaactaatcctgatgatttgttggttattccgactgcaaatagacctaattggtcaatagaggatattaatcaagaaatttcaaattcagctcaaacacttcttggatatgttgtgagatggatagaccaaggagtggggtgctcaaaagtgcctgatatcaataatattggtttaatggaggatagagcgactctaagaatat

SEQ ID NO: 237637 - DNA, 864 bp, Unknown
  Bacterial polypeptide expressing nucleotide sequence isolated from the Sargasso Sea
gcaggtttacagacttaatgatgagattgcaacgctgatcattagaccaaggggctggcatctcaacgaaaagcatgtaacgatcaacgatcaagccatatcagcatcgctttttgattttgctgtttacctttcaaataactatgaagccctttcaaaaaaaggcacaggaccttatttttatcttccgaagcttgaaaatcatcttgaggcgagactctggaatgatgttttcgtgcatgctcagaattttttaaatattgattgcggcacaatcaaggccacagttttgattgaaacaataactgctgcctttgaaatggatgagattatcttcgagctaaaagaacattcggccgggcttaattgtggtcgatgggattatatatttagctttataaagaaatttagaaatcatcaaaattttctattaccaaacagaaccgaggtaacaatggagcggcattttctaaaaagctatgtcgacttgcttattcgcacttgccataaaagaaatgtacatgcgatgggtggaatggcagctcagattccaatcagaggcgacgaagaacaaaatcaaattgccatgaataaagtttctttggataagttaagagaggcaaatgctggtcacgacggcacatggattgctcatcctgggttatcacaggctgcaatgaatgcgtttaatcaagccatgggatcatctcccaatcagattaccaataagagaaatgatgtttcagtgaatgctcaagaccttatcaaggccccggatggcaatattaccgaagatggtttgagacagaacatatcaataggaattcagtacattgaggcatggctctcgggcaatggttgtgt

SEQ ID NO: 237638 - DNA, 392 bp, Unknown
  Bacterial polypeptide expressing nucleotide sequence isolated from the Sargasso Sea
tattttagggtatgttgtaagatggattgatcaaggagttggttgttctaaagttccagatataaataatatcggcttaatggaagatagagcgactttaagaatatcatctcaacatatagcaaattggttgcatcatggaatctgcacaaaagatcaggttatgacggtaatgaaaaaaatggcaactatagtagacaaacaaaacgataaagatccagcttactcaagaagtgggagatctggatataaaaaaatgtcagataacttcgaaaaatcaattgctttttctgctgcctgcgatcttgtctttaaaggtagaattcagccttcaggatataccgaaccattattgcacgagaaaagactagagaaaaaattgtcttcttaat

SEQ ID NO: 237639 - DNA, 1019 bp, Unknown
  Bacterial polypeptide expressing nucleotide sequence isolated from the Sargasso Sea
ccccggaagatccttaatgctcaatcgaaatgtaggacatttgatgactaacccttctattttattaagtgatggctcagaaattcctgaaggtataatggatgcgtttataacaacagctgctgcaattcatgattttaaaaataaaggaaattcaaaaacaaattcagtttatattgtaaaaccgaaaatgcacggacctgatgaagttgcatttactaatttaatttttgaaaaagtagaaaaagttttaaaattaaaaaaatttacaattaaagttggaataatggatgaagaaaggagaacaactgtaaatctaaaagaatgtattagagctgttaaaaatagagttgtttttattaatactggatttttagatcgtacaggtgatgaaattcatacctcaatggaagcaggacctgtaattaaaaaaggtgatatgaaatcttctaaatggatagctgcttatgaaaaaaataatgttgaagtgggattggcttgtggtttttcaggaattgctcaaattggaaaaggaatgtgggctgctccagataaaatggcagatatgatatctcaaaaaattaatcatcctaagtctggagctaattgcgcttgggtaccttctccaactgccgctacacttcatgtattacactatcatcaaataaatgttttttttaaacagaaagaattaaaaaataaaacttcttcaaaaatctctgatatacttacaattccaattgcagatagaccaaactggtctacagaagagattacaaaagaattagagaataacgctcaaggtattttaggttatgttgttagatggatagatcaaggtgttggctgctccaaagtacctgatatcgataatgtaggtctaatggaagatagagcaactttacgaatttcatctcagcacatcgctaattggttacaacacggagtttgtagcaaaaaacaagtattagaaactatgaaaaaaatggcaaatattgtagataaacaaaatatttagg

SEQ ID NO: 237640 - DNA, 958 bp, Unknown
  Bacterial polypeptide expressing nucleotide sequence isolated from the Sargasso Sea
gagattgggtacctaaataaagaaggaaaaaaatttcaaattggaaccaaaaatgtggatagtgaaatttctacaattgctgggccacaactggtagtaccagtaatgaatgcaagatattctttaaacgcagctaatgctaggtggggaagtttgtatgacgctttatatggaactgacgtaatttcagagtctaatggagcagaacgtggaaaaaaatataattatataagaggagaaaaagtaattgcatatgctcgtaatttcttagatatcaatgtaccattgaaaaaaggtagttggaaaaatatttcagaaattccaaaagttgaaaataataaaataaaattaaaactaaaaaatcctaagcaatttattggctatgcaaaaaaatcaaactatttatcttcacttttatttaaaaatcataaccttcatatagatatcaaatttgacccctattatacaattggagggcttaaagataagtctgccggagaactacaggataaggcagcaatttacgatataattttggaatcagcaataaccacaattgtggatcatgaagattctgttgcggctgtagatgctaaagacaaagtgcatggatatagaaattggttagggttaatgaaaggcaaccttttatataaaggagaaaaaaatggaaaaaaactaataagaaaattaaatcctgatcgagaatatattgaccctaatggtaatgaaattaaattacatggaagagccttaatgctcaatcgaaatgttggacatttaatgaccaacccttccattttgttaagtgatggatctgaaattccggaaggtataatggatgcttttataacaacagctgcagcgattcatgattttaaaaacaaaaaaaactcaagaacaaattctgtttatatagttaagccaaaaatgcatggaccagacgaagctgctttta

SEQ ID NO: 237641 - DNA, 637 bp, Unknown
  Bacterial polypeptide expressing nucleotide sequence isolated from the Sargasso Sea
aatgcaagacatgttatctcaaaaaatcggtcatcctaaatctggtgctaattgcgcttggactccatcaccgacagcagcgacacttcatgcaatgcattatcataaaatagatgtttttgatattcacaaaaagataaagaataaaataaaattcgatttagataatttattaaacatccctgtgatctcaaaaccaagttggaacatagatgacgttaaaaatgaactagaaaataattgccaaggaattttagggtatgttgttagatggattaatagtggtattggttgctcaaaggttcctgatataaataatataggcttaatggaagacagggcaactttgagaatatcttcacaacacattgcaaattggctttatcataacatatgcactaaatctcaggttttagaaactatgaaaaaaatggcaaaaatagtagatgatcaaaacagagatgaccagagctatgaaaagatgtctaacaattttgaaaaatccatagcatttaagactgcttgcgatttggtttttaaaggaaaggaccaaccgtctggttatactgaaccactattgcacgctaacagatatttaaaaaaaaaattaaatttgggttctatttttaaaagctga

SEQ ID NO: 237642 - DNA, 937 bp, Unknown
  Bacterial polypeptide expressing nucleotide sequence isolated from the Sargasso Sea
gatttattcgatgcagttgaacgattatttaatctagaaaaaaatactgtaaaagttggaattatggatgaagagagacgaaccactatcaatctaaaggcttgcatcgaaaaagctaaagaaagaataatttttataaatactggttttttagataggacaggagatgaaatacatacgagtatggaagcaggtcctatggttcctaaatccgatatgaaagctcaatcatggataaatgcttatgaagattggaatgtggatataggattaagttgtggattaagtggtaaagcgcagattggaaaaggaatgtgggcaatgcctgacgagatgaaagatatggtagagactaaaatagctcatccattatctggtgcaacatgcgcatgggttccatcacctacagcggcaacacttcatgcaatgcattatcatgaggtcgatgtgctatcaaaacaagatgaactatcttcaagacagcatgctgatttagatagcatcttaacaatccctcttttaaaggaagatttagataaacaaacaattaggaatgagatagcaaacagtgctcaaggtattcttggttatgtcgtaagatggattgatcagggtattggatgttcaaaagttccagatattaataatattggtcttatggaggatagagcaacgtgcaggatatcaagtcaacatatttcaaattggattcatcatggtatctgttcggaggaagaggtaattgatatttttaaagagatggctctagttgttgacgaacaaaataaagacgattcagaatatcaaaaaatgggatcaaatttttctggatttgcatttcaagcttccttagatttagcaataaaaggagcttttcaaccaagtggatatactgagccattgcttcaccaatggcgattagaatttaagaaaaata

SEQ ID NO: 237643 - DNA, 940 bp, Unknown
  Bacterial polypeptide expressing nucleotide sequence isolated from the Sargasso Sea
ataaaagagtatgaaaaatttttaaaagaaattggttacttaaatgaagaaggagaagactttaaaatcgatacaaaaaatattgatgatgaaattgccaaaatcgctggtcctcaattagttgtgcctgtaatgaatgcaagatatgccttgaatgctgcaaatgctagatggatgagcttatacgatagtttgtatggtacagatgtaatccaatctgaagagtctgctagtgaaagatatgacccagagagaggattagaggtaataaattatacaaagaagtttttagatgaaaacttttctttagaaaataatagttggcgaaatgtaaataaaataaaagtagtagataatgatctatgccttgagatatcaaaagaaaaagtaggattaaaagataaaaataaatttattggatttagaggaaatgatcgctcgccatctggcgtaattcttaaaaataataatttacatgtcgaaattataattaatccaaatgcttttagcgcaaagagtgatgctgctggaatatcagatataatacttgaatcagcaattacaactatttgtgatcatgaagactctgttgctgctgtagatgcagaagataaagtagctggatataggaactggttaggattaatgaaaggtaatttggtttcaacctttgaaaaaagaggcaaaaagttaataagaaaacttaaccctgatagaaaatttattgataaaagcggaaaagaacaaaaactttttggaagatctcttctattaaatagaaacgttggacatttaatgactagtccagcaattctactgcatggtggttcggaaatacctgaggggattatggatgcatttataacaaccttatgtgcattacacgatttaagaactagaaaaaattcgaggcaatcttcaatatatattgtaagcctaa

SEQ ID NO: 237644 - DNA, 863 bp, Unknown
  Bacterial polypeptide expressing nucleotide sequence isolated from the Sargasso Sea
tttaattgctattcatgatttaaaaaaaacatctaataaaaattcaatttataattctatttatatcgtcaaaccaaaaatgcatggacccgaagaagttgaatttacagtaaatctttttgagcgcatagaggcaatgttaaatcttcccaataatacaattaaagtcggtattatggatgaagaaagaagaacaagtattaatctaaaagaatgtataagggcagcaaaatctaggttagcttttataaatacaggatttcttgatagaacaggggatgaaatacatacttcaactcaagcaggttcatttataacaaaggcagatatgaaaaatactgcttggataaaatcatatgaagatcgaaatgtagatattggattagagtgtggattaaaaggaaaagcacaaattggtaaaggaatgtgggctatgcctgatttaatgatggaaatggtagagcaaaaaatttcacatccaaaagctggagcaaattgctcatgggtgcctagtccaactgctgctactctacacgcaatgcattatcattatgtaaatgtttttgatattcaagatgaaattaaagctaatggcaaaagaggtacattaaatgatttactaacattacctttattaaataaaagaaatttatctgaagaagaaataaataatgaaatagaaaataatgctcaaggaattttaggttatgtagtgagatgggttgatcaaggaattgggtgttctaaagttcccgatattaacaacattggattaatggaagatagagctacatgccgtatctcatcacaagcaattgctaattggattgaaaatggacttattacaaaagagcaagcatgaa

SEQ ID NO: 237645 - DNA, 979 bp, Unknown
  Bacterial polypeptide expressing nucleotide sequence isolated from the Sargasso Sea
tttttaaagacaataaatatttccaataactctgaatataaatcactttatatagtaaaacccaaaatgcatggtccagaagaagtggaattttcaattgatacatttacaaaaatagaggaacttttaacaattccaaaaaatactattaaaattggaataatggacgaagaaagaagaacaactctaaacttaaaagaatgtattagagcagctaaagatagagttttttttataaatactggcttccttgacagaacaggagatgaaattcatacctctatggaagcaggtactatgattaaaaaatctgaaatgaagaatgtaggttggataaaagcatatgaaaattggaatgtagaaattggtttaaattgtggtttttctggattagcacaaattggaaaaggtatgtgggctatgcctgatatgatgtcaagaatgatggaagaaaagattgcacattgtcaatcaggagcaaatacagcttgggttccttcacctacagcagcaacacttcatgcgttacattatcataaagtagatgtaatggaactacataaaaaaaatactaaaaaaagaattgttacaatagatgatttaatagatttaccaattgttaataatccaaactggacagaaaaagaagttaaaactgaacttgaaaataatattcagggtattcttggatatgttgttaagtggattaataacggaattggatgttcaaaggtccctgatattaataatattggcttaatggaggatagagcaactcttagaatttcatcacagcatatatccaattggttatatcaaggagtttgtaaggaatcccaagttcttgaaacttttaaaaaaatggctgtagttgttgatgagcaaaataaatatgatgataaatacattcctatgtctcaagattttgataattcaattgcattcaatacagctattgaattgattttgaaagtgtaaa

SEQ ID NO: 237646 - DNA, 850 bp, Unknown
  Bacterial polypeptide expressing nucleotide sequence isolated from the Sargasso Sea
gacagatataattccagaaaattatggtgcagtaaaaggaaaaacatacaatccaataagaggaaaaaaagtaatcgaatacgctcgtagcttgctggataggtatgtgcccttgaaagataaaagttggaaagaattgacaaaaatcccagaaatcatagataataaaataaatttaaaacttaaaaattctgaacaatttgtaggttataaaaaaaaatcaaataaaatatcttctcttttatttgttaataataatcttcatatagatattttatttgaccaagatggaaaattagaagttaataatcctgatgggaatcaagataaaattaaaatacatgatattttattagaatcggcaatttctactatttgtgatcatgaagatagtgtcgcagcagtagatgctgaggacaaagttttaggatataggaattggttgggcttaatgaaaggaaatctaaaagttgaatttataaaaaatggaaaaaaaattattagaaaactaaattcagatcgaaactatatttctaaaaaaggaaaaaaacttaaattacatggtagatctttactattaaatagaaatgttggtcatcttatgacaaatccagccatcttgttaaaagatgggtctgaatgtcctgaaggaatacttgatgcatttattacttcactagcttgtattcatgattttaaaaaaaaacaaaattctagagtcaattctatttatattgttaaacctaagatgcatggacctgaggaatgtgaatttactaatcttatttttgaaaaagttgaaaaagttttaaatttaaaaaaatatcaaattcttttgtggaattatgga

SEQ ID NO: 237647 - DNA, 738 bp, Unknown
  Bacterial polypeptide expressing nucleotide sequence isolated from the Sargasso Sea
aaaaaggagatatgaaatcgtcgacttggataaatgcctatgagaacaataatgtagatatagggttagaatgtggtttttctggggttgcacaaattggcaaaggtatgtgggcaatgcctgataaaatggctgatatggttaatcaaaaaattgtccacttagaggctggtgctaattgtgcttgggtaccatcacctactgcagcagcacttcacgcactccattatcatcaaattagtgtttttaaaaaacatgatgaattaaaaaaaagaaaaaaaactcaactatcagatttattaactatacctgtggtaaataacccaaaatggaagattgaggaaattaataaggaaatttcaaattcagctcaaactattctaggttatgtggttagatggatagaccaaggaattgggtgttcaaaagtaccagatttaaacaacattggtttaatggaagatagagcaaccttaagaatttcttctcaacatatagctaattggttacatcatggaatttgtagcagaaaacatgttctagaaataatgaaaaaaatggcaaaggtagttgataaacaaaatgaaggggacaaaaattatcaaaatatgtctcctcactacgataaatcaattgcgtttaagactgcctgtgaacttatattccaaggaaaaagtcagccatcaggatatactgaacctttacttcatcttaatagattgataaaaaaaaattagt

SEQ ID NO: 237648 - DNA, 841 bp, Unknown
  Bacterial polypeptide expressing nucleotide sequence isolated from the Sargasso Sea
aagtttgaaaaagatggaaaaaaactaattagaaaattaaatccaaatagaaattatatatctaaagatggaacaaaagagagtcttcatggcagagcgcttcttttgaatagaaatgtaggccacttaatgacaaattcagctgttctattacaagatggatcagaaatacctgaaggaatattagatgcattcgttacttctttatgcgcaattcatgatttaaaaaataaaaataactcaagaactggctctatatacattgttaaacccaagcagcatggaccagatgaaacatcatttacaaatttattattttctaaagttgaaaaagttttaggtttagaaccattcacaattaagtgtggaattatggatgaagagagaagaacaacgattaatttaaaagaatgtataagaacattagaaaacagagtgttcttcataaatactggttttttggatcgaactggtgatgagatgcatacttcaatggaagctggtccaatgattaaaaaaggagatatgaaaacttcagcgtggattaatgcttatgaaaataacaatgtagatattggtttaaaatgtggattttcaggtattgctcaaataggtaagggaatgtgggccatgccggataaaatggctgatatgttaaatcaaaaaatttctcacttagaagctggagcaaattgtgcatgggttccatcaccaaccgctgcggctcttcatgctattcattaccataaaataaatatatttgagcaacatgacaaaataaaaaaaagaaatacagcaaaattagatgatttattaaccattccagttataaaaaatccta

SEQ ID NO: 237649 - DNA, 373 bp, Unknown
  Bacterial polypeptide expressing nucleotide sequence isolated from the Sargasso Sea
ctcagctcaaacaatattaggatatgttgttagatgggttgaccatggaataggatgttctaaagttccagatataaataatgttggactaatggaggatagagcaacacttagaatatcttcacaacatatagctaactggctacatcatggtatttgctcaaatagacaagttttagaaattcttaagaaaatggcaaagatagttgataaacaaaataaaggagacccagaatatcaaaacatgtctccaaattacgataggtcaatttcttttaaggcagcgtgtgaattaattttccatggcaagtcacaaccatcgggttatactgaacctctgttacatttaaatagattgataaaaaaaagctaa

SEQ ID NO: 237650 - DNA, 958 bp, Unknown
  Bacterial polypeptide expressing nucleotide sequence isolated from the Sargasso Sea
attgatatggctaatatatcagatgtgatagtagaatcagctttgtctacaatagttgataatgaagactctgttgcggctgttgatgctgaagataaagtaaaatgctatcgaaattggctaggacttatgaaaggagatctgacatcaacttttgaaaaaaacggaaagataattgttagaaaacttaatccagatagaatttatacttctaaatatgaaaaaaaaataaatcttcatggaagagctctattattaaatcgaaatgtaggtcatttaatgacaaattcttcaattcttttgaaagatggatcggaaataccagagggtataatggatgcatttgtatcaactttgtgtgctttacatgattttaaaaataaaaaaaattctagaacagggtcagtttatatcgttaaaccaaaaatgcatggaccagaggaggttgcatttaccaatactttatttgaaaaagttgaggaaacattaggtattaaaaaatactccattaaagttggaataatggatgaagagaggagaactactgtcaatttaaaagaatgtattagaaaagttaaaaatagaatagtttttatcaatactggttttttagatagaactggtgatgaaatgcatacctcttttgaagctggtccaatgatttttaaaggtgaaatgaaaaaatcaacttggttaaatagttatgaaaattggaatgttgatgttggtttaagttgtggtttttcaggaaaagctcaaattggaaaaggaatgtgggcaatgccagaccagatggcaaatatgcttgaacaaaaaattgatcatccaaaatctggagcaaattgtgcttgggtaccatctccaacagcagcaactttacattcattgcactaccataaaatcaatgtatttgacgaacaaactaaaataaaattacgggataaggccaaaatagaaa

SEQ ID NO: 237651 - DNA, 874 bp, Unknown
  Bacterial polypeptide expressing nucleotide sequence isolated from the Sargasso Sea
atgacaaatgtaatcacccatggtggtttgaccgttgccaaggatctttatgatttagtcaataatgaaattcttgccaacggtactatctcggctgaccagttctggtccggtcttgatgagtcggttcatcaattagcaccaaagaaccacgaccttttgcaaaaacggactaaattgcaaaaacagattgatgaatggttgaaagccaatagtgatggtggcgttgatgctatagcttatgaaacatttttaggtgatattggttatctgcacaatgatgcaggcgattttaacatcgaaaccagcaatgttgatccggaaattgcaaccatcgccggcccgcagcttgtggtgccaattacaaatgcgcgttatgcactgaacgcggcaaatgcccgctggggcagcctttacgatgcgctttatggcactgatacaatttgtgatcaaggcggcgctagcaagacatttacctataatccggttcgtggggccaaagttattgcctttacgcgagacctgctggacaggtctgtgccattggcgacatcaagctggacagaggcaagcggttttaccattaacaataataggctagaggtgaaaattggcagtatgacctccagccttcgcgatgctagccagtttattggttatacaggaacatccaatgcgccagacagcattattttaatcaaaaacgggctgcatctcgaagttataatcgatgcagatgggacaatcggcagtggtgatgccgcccatatcaatgatgtaatagtcgagtccgccttgaccagcattatcgatttagaagattcgattgccgctgtggacgccgaagacaaagtgctggcctaccggaatggca

SEQ ID NO: 237652 - DNA, 925 bp, Unknown
  Bacterial polypeptide expressing nucleotide sequence isolated from the Sargasso Sea
tgataaaggtggtaaatttatcaccagagagcttaatccagatagaaaatatttattaaaaaatgggaaaatgatactccttccaggaagaagtctcatgttagttagaaatgtaggacatttaatgactaatccagctgtaagagaccgaaagggtaacgaagtcccagaaggaattatggatgctttctttacggtgtgtattgctatacatgacattataggtaatggagtgtacaaaaattcaaaaacgaaaagtatatacatagtaaaaccaaagatgcatggtcctgaagaggtaaagtttacttgtgacttattctcagaggttgagagaatttttaacttacctgaaaacactgtaaaacttggaataatggatgaagaaagaagaacaacagtaaatttaaaagagtgtatagaaatagctaagcaaagagtcatttttattaacacaggtttcttagatagaactggtgatgaaatacatacaagtatggaagccggaccaatggttactaaagcagaaatgaaaaatcaagattggataaaagcatatgaaaattggaatgtagatataggtcttgaaactggattcaaaggtaatgctcaaattggaaaaggtatgtggccaatgcctgatgaaatgttagatatgtacaatactaaaacaatgcatccaaaggctggcgctaattgcgcatgggtcccttctccaactgctgccataattcatgcaattcattatcatcaaataaatgtacaggacgaacaagaaaaaattagcaaaagggaaaaagctgatctcgatgatcttttaaaaatacctttcatggaaaaaaatcaattaccttcacaagaagaaatcaatgctgagttagaaaataatgctcaaggtattttgggctatgttgttagatgggta

SEQ ID NO: 237653 - DNA, 832 bp, Unknown
  Bacterial polypeptide expressing nucleotide sequence isolated from the Sargasso Sea
aaatgttaataaaataaaagtagtagataatgatctatgccttgaaatatcgaaagataaagtaggattaaaagataaaaataaatttattggatttagaggaaagaatcaatcgccatctggcataattcttaaaaataataatttacatgtcgaaattataattaatccaaatgcttttagcgcaaagagtgatgctgctggaatatcagatataatacttgaatcagctattacaactatttgtgatcatgaagattctgttgctgctgtagatgcagaagataaggtggttggatataggaactggttagagttaatgaaaggtaatttggtttcaacctttgaaaaaagaggaaaaaagttaataagaaaacttaatcccgatagaaaatttattgataaaaacggaaaagaacaaaaactttttggaagatctcttctattaaatagaaacgttggacatttaatgactagtccagcaattctattgaatggtggctcagagatacctgaaggaataatggatgcatttataacaactttatgtgcgttacacgatttaaaaactagaaaaaattcgaggcaatcttcaatatatattgtcaagcctaaaatgcatggacctgatgaatgtagtttcacagatttaatttttcatacagtagaaaaaattttagggcttgatgaatatactattaaatgtggaattatggacgaagagagaagaacatctgtaaatcttagggaatgtataagaagattaaaagatagagttttttttattaatactggtttcttagatagaactggggatgaaattcatacttca

SEQ ID NO: 237654 - DNA, 945 bp, Unknown
  Bacterial polypeptide expressing nucleotide sequence isolated from the Sargasso Sea
gatggggaagtctttatgatgcactttatggtactgatgctataggttcagaaaagcttgataatagatataatcctgtaagaggtgggaaggtaattagatattgcagagattttctagatgaaacttttccgttgaaaaatggttcctggaaaaaaattaattcattaaaaatactaggacataagcttttgcttaaaatagataacaaaagttttaaactaaaaaatcctaaacaatataaaggatacagatcagataaaaaaaaattaaaaggagttttattagttaataataatctacatgttgaattaataataaacccttatgcttttagtgctaataatgatcccataggtcttagtgatttagttattgagtcagctgtctctactataatagatcatgaggatagtgtggcagcggtcgatgctgaagataaggtcttgggatatagaaattggttaggattaatgaaaggagacctaaaagtaaaatttgataaattaggaaaaaaatatgagagatttttaaattcagatagaaattatatttcttctaatggaaaaggtattaaattgcatggtagagctttgctacttaatagaaatgttggacatttaatgaaaacaccagcagttcttttttcagataaagcgcaaataccagaaggtattttagatgcatttataacttcagcagcttgtctttatgatttaaataaaaaaaaaaattctagaaaaggatcaatttatatagttaaaccaaaaatgcacggaccagatgaggtagcttttgctgatgaaatattttctaaagtcgaagaagtgttaaaaataaaaaaagatacaataaaaataggaataatggatgaggaacgaagaactagtgcaaatctaaaacaatgcataaaaaaagttaaaaaaagaagtagtatttattaac

SEQ ID NO: 237655 - DNA, 775 bp, Unknown
  Bacterial polypeptide expressing nucleotide sequence isolated from the Sargasso Sea
ataacaatcaatgatcaaccaatatctggatctctgtttgatttcggtgtttatctttcaaataactttgaagcactatcagaaaaaggcacaggaccttatttttatcttcccaagcttgaaaatcacctagaggcgagactctggaacgatgttttcttgcatgctcaagattttctgaatatcgatcgaggaaccattaaagccactgttcttattgagacaatcacagctgcatttgaaatggatgagattatctttgagcttagagatcattctgcaggccttaattgtggccgctgggattatatattcagctttataaagaaatttagaaaccatgaggaatttcttttaccgaatcgaacagaagtaacaatggagcggcatttcttaaaaagttatgtggatttactcattcaaacctgccacaaaagaaatgttcatgcgatgggtggaatggcagctcaaattccaatcaggagtaatgagaaacaaaaccaaattgctatggataaagttgcttcagataaatcaagagaggcgaatgctggccatgacggaacatggattgctcatcctggattatctgatgtggcaatgaatgcattcaatcaagcaatgggaacatctgcaaatcaaatatctaataaaagaaacgatgtttcagtacgtgctcaagatctcatcaaggttccaaatggcagcatcacagaggaaggtttgaggcaaaatataacaataggtattcaatacattgaggcatggctatcag

SEQ ID NO: 237656 - DNA, 775 bp, Unknown
  Bacterial polypeptide expressing nucleotide sequence isolated from the Sargasso Sea
aacgttgatgatgaaattagtattattgctggtcctcaattagttgtgcccatagataatgctagatatgcgttaaatgctgctaatgcaaggtggggtagtttatatgatgcttactatggaacagatgctattaaagaaactgatggtttacagaaaaccaataaatataatccaaaaagaggtttaaaagtaattgaaaaaggtcgggattttttggatcaaattttcccattagaaaaacaaaagtggagtgatgtagaaaaaatttttgtagataaagaaaacttagcatttaactgtcagaataattcacaagataaacttaaaaatataaaacaatttattggttacaatggaaaaaaagaaaatccgattagcatcattttaaaaaataacaatcttcatatagaaattataattgaccccaaaagtcaggtcgggaaaaatgataaagcccatatatcagatattctaatcgagtcagcaatttcaactattatggacttagaagattctgtagctgccgtagatgctgaagataaagttaagtgttatcgaaattggctaggcataatgaagaatgaactaaagactaccgtaaacaaaaacggtaatagctttgatcgtaaactgaatgatgacaaaaaatttattgatattaatggtaacgaaaaatttctaaatggcagatctttattgttaatcagaaatgttggacatttaatgaggaacaatacagttatcttggataatggagaagaaatacctgagg

SEQ ID NO: 237657 - DNA, 791 bp, Unknown
  Bacterial polypeptide expressing nucleotide sequence isolated from the Sargasso Sea
aatgaatgcaagatattctttaaacgcagctaatgctaggtggggaagtttgtatgatgctttatatggaactgacgtaatttcagaatctaatagagctgaacgtggaaaaaaatataattacataagaggagagaaagtaattaaatatgctcgtaatttcttagatatcaatttcccactaaaaaaagatagttggaaaaatatttcagaaattccaaaagttgaaaataataaactaaacttaaaattaaaaaatcccaaacaatttattggttataaaaaaaaatcaaaccatttatcttcacttttattaaaaaataataatcttcatatagatataaaatttgacccctattacacaattggaggacttaaagataagtctgtcggagaactacaagataaagcagcaatttacgatataattttagaatcagctataactacaattatggatcatgaagattcagttgcagctgtagatgctaaagacaaagtacacggatatagaaattggctaggattaatgaaaggtgaccttctatataaaggaaaaaaaaatggtaaaaaattaataagaaaattaaatcctgatcgaaaatatactgatcataatggtaatgaaattaaattacatggaagagctttgatgctcaatcgaaatgttggacatttaatgaccaacccttccattttgttaagtgatggatctgaaattccagaaggtataatggatgcttttataacaactgctgcagccattcatgattttaaaaataaaaaaaatt

SEQ ID NO: 237658 - DNA, 576 bp, Unknown
  Bacterial polypeptide expressing nucleotide sequence isolated from the Sargasso Sea
tggagtctggagctaattgtgcatgggttccttctcctactgcagcaacacttcattcacttcattatcacgaaatagatatatttaataaacacaaagaattaaaaaaaagagaaagcgctaaactttcagatattttaacaattcctattataaataatcccaattggtcaatagatgaaattaataaagagatttctaattctgcacaaacacttttgggatatgttgttagatggatagatcaaggagttggctgctctaaagtgcctgatatagataacgttggattaatggaggatagagcaacattacgaatttcatcacaacatatagctaattggttacatcatggcatttgtagcaaaaaacaggttttggaaatattaaaaaaaatggcaaaggttgttgatcaacaaaataaagaagataaaaattataaaaaaatgagtcctgagtttgataaatcaatagcattcaaaactgcctgtgaattaatttttcaaggcaaagaccaaccttctgggtatacagagccccttttacatttaaatagattaattaaaaaaaattaat

SEQ ID NO: 237659 - DNA, 900 bp, Unknown
  Bacterial polypeptide expressing nucleotide sequence isolated from the Sargasso Sea
aaagtattcaattaaagttggtataatggatgaagaaagaagaacaaccgtaaatttgaaagaatgcattagacaagtaaaaaataggattgtttttattaatacaggttttctagacagaacaggtgacgagatgcatacatcttttgaggcaggtccaatgatctttaaaggagaaatgaaaaaatcaacttggttaaatgcttatgaaaattggaacgtagatgtaggtttaaattgtggtttttctggtaaagcacaaatcggaaaaggaatgtgggcaatgccagatcaaatggctaacatgatggatcaaaaaatctcacaccccaaatctggtgcaaactgcgcgtgggttccatctccaacagcagctactttacattctttgcattatcataaagtaaatgtatttgaagaacaaaataaattaaaattaagaaataaaactaaattagaaaatattttggaaattcctaaagcagatagacctaactggtctgttgaagatattaacagagaattagaaaacaacgcacaaggaatattgggttatgtggtcaggtggatagatcaaggagttggctgctctaaagttccagacattaataacgttggtttaatggaagatagggcaactttacgaatttcttcacaacacatagctaattggttacatcacggaatttgtagcgaagaccaagtaatgaaaattctgaaaaaaatggcaaaaactgttgattctcaaaatgaaaaagatcctctttatgttaaaatgtcagataactttgaaaaatctatagcattttcagcagcctgtgatcttgtttttaagggaagatttccaccctctggctatacagagcctttacttcataaaaaaaggctagagaaaaaaaa

SEQ ID NO: 237660 - DNA, 526 bp, Unknown
  Bacterial polypeptide expressing nucleotide sequence isolated from the Sargasso Sea
ttacatgcaatgcactatcataaattaaatatttttgaaaaacataaaaaattaaataataataaaataaattacattgataatttattaacgataccgattgcagatagacctaattggggcaaagaagaaataaaaaatgaattatgtaactcagctcagactattttaggatatgtagtaaggtgggtagaccaaggaataggatgctctaaagttccagatataaataatgttggattgatggaggatagagcaacactaagaatatcttcacaacatatagctaactggctacatcatggtatttgctcaaatagacaagttttagaaattctaaaaaaaatggcaaagatagttgataaacaaaatgaaggagatccaaaatatcaaaaaatgtctccaaattacgacaagtcaatctcctttaaggcggcttgtgaattgattttccatggcaagtcacaaccatcaggttatactgaacctctattacatttaaatagattgatcaaaaaaagctaat

SEQ ID NO: 237661 - DNA, 886 bp, Unknown
  Bacterial polypeptide expressing nucleotide sequence isolated from the Sargasso Sea
atagctggtcctcaattagttgttccagtaatgaatgcaagatatgctttaaatgctgctaatgctagatggataagtttatacgacagtttatatggatcagatttaattgagtctgaagagtccgcaagtgaaagatatgatccggaaagaggggcagaagtaataaagtttacaaaaaattttttagatgaaaattttgaattaaataattcaagctggaagaatgtaagcaaaatagagtttgcaaataaaaaacttaatctatttattgatgatcagataaccaatttaaaagataagagtaaatttttagggtacagactgaaagaagaaaaactttctgcgataattctaaaaaataataatcttcatgttgaaataattattaatcctgatgcatttagtgctaaaggtgatgcggcaggaatttcagatataattgttgagtccgccatttcaactatatgtgatcatgaggattctgttgcaggtgtagatgcttacgacaaagttgtaggatataaaaattggcttggattaatgaaaggaaatcttacagcagagttcgaaaaaactggaaaaaagtatgtaagaaaattaaatccagatagaagttatatagacaaagatgggggaaaaaataaattacatggtagagctttactacttaatcgtaatgttggtcacttaatgactaatcctgcaattttactatcagatggatcggaaattcccgaaggtattatggatggtttcattacatctttaatctgcctgtatgatttaaaaaataaaaaaaattctagaaccggatcaatttatattgttaaaccaaaaatgcatggacctgatgaagcattgttcactgacttagtttttagcg

SEQ ID NO: 237662 - DNA, 899 bp, Unknown
  Bacterial polypeptide expressing nucleotide sequence isolated from the Sargasso Sea
cagtttacttggtgatttattttcagcagttgaagaagccctaaatcttgatcagttgactgccaaagtagggatcatggacgaagaaagaagaaccacggtaaatcttaaagaatgtattcgcgttgctaaggaaaggataatctttattaacactggatttttagatagaactggagatgaaattcataccagcatggaggctggccccatgattcctaaggcagacatgaaaaagcagccttggattcttgcttatgaagactggaatgttgattcaggtcttgaaactggatttaaaggcaacgcacaaattggtaaaggtatgtggccaatgcctgacgaaatgttaaacatgtatcaaaccaaaattatgcatccagaatctggagcaaactgtgcatgggtaccatcacctactagcgctactctccatgcaatgcattatcatcaaatcttagtttctaatagacagcaaagtatccttgaacgacctaaggccagtattgatgatatcctcaccattcctttaatggaaaatccagaaggattatccggcgaagatattcaaaaagaattagataacaatgctcagggcattcttggttatgttgttagatgggttgatcaaggagtaggttgttctaaggttcctgatattaataatgttgggcttatggaggatagagctacatgtagaatctctagccaacatattgcaaattggttacatcattctatttgttccaaagaccaagttatcgataccatgaaacgaatggctcttgttgttgatcagcagaattctgaggatccgtcatatctaccaatgggcccatcatttgacggcattgcctttaaagcggcatgtaatcttgctatagagggaaaagtcagcc

SEQ ID NO: 237663 - DNA, 931 bp, Unknown
  Bacterial polypeptide expressing nucleotide sequence isolated from the Sargasso Sea
attaaaattacatggcagatccttgctgttaaatagaaatgttggtcatcttatgactaattcatcaatccttttagaagacggttctgaatgccctgaaggaatacttgatgcttttattacttctcttgcttgcctacatgattttaaggaaaaaggaaattcaagagttaactctatttatatagttaaacctaaaatgcatggccccgaggaatgtagttttactaatttaatttttgaaaaagttgaaaaagttttaaatttaaaaaaatatcaaattctttgcggtattatggatgaggaaagaagaacttctgttaatttaaaagagtgtataagagctcttaaaaatagagttttttttattaatacaggttttttggatagaacaggagatgaaattcatacatcaatggaagttggtcccatgatcaaaaaaggtgaaatgaaatcatcaaaatggattcaagcttacgaaaataataatgtaaatgttggtctagaatgtggattttctggcaagtgccaaataggcaaaggaatgtatgctgcgccagatttaatgagtgaaatgatgaagcaaaaaattattcatcctttatctggagcaaattgtgcttgggtaccttctcctaccgcagctgccttgcacgcgctgcattaccatgaagtagatgtattcgttaaacaaagagaattattaaaaagaaaaccagcaaaactttttgatcttttgactattccaataacaaaaaaacctaattggtctatagaagaaattaacaaagagctaaaaaataatgcacaaggtattttaggctacgtggttagatgggtagatcaatctgtaggatgttcaaaagtacctgacattaatggtgtaggtttaatggaagatagagccacttgtcgaataagtagccaacac

SEQ ID NO: 237664 - DNA, 835 bp, Unknown
  Bacterial polypeptide expressing nucleotide sequence isolated from the Sargasso Sea
ccagatgaagttggttttgcaaatgaactatttggtagagttgaagaagttttaggattagaaaaatattttattaaagttggaataatggatgaggaaagaataacaacggtaaatttaaaagaatgtattagaaaagttaaagaaagagttgtgttcatcaatactggatttttagatagaactggcgatgaaatgcatacctcttttgaatttggaccaatgatttttaaaggtgaaatgaaaaaatctacttggctaaacacatatgaaaattggaatattgatattggtttgtcttgtggtttttctggtaaggcgcagataggaaaaggaatgtgggcaatgcccgatagaatgtctgacatgatgcaacaaaaaaaagatcatcctagatcaggtgctaattgcgcctgggtgccttctccgacggcagcaacattacattcgattcactatcatcaattcaatgtttttaaaaaacaaaaagaacttaaatcaagagtaaaggcaaagctggaggacttattaaaaattcctgttgcagatagaccaaactggtctgtcgaagaaattaatagggaattagagaataatgctcaaggaattttaggttatgtagtgagatggattgatcaaggcgttggttgctccaaagtacctgacataaataatgttggtctaatggaagatagagctacacttagaatttcttctcaacatatagcaaactggcttcatcatggaatttgtagcaaagaacaagttttaaaaattatgaaaaaaatggccgcaattgtagataaacaaaatatcaacgacaaaaattatcagc

SEQ ID NO: 237665 - DNA, 865 bp, Unknown
  Bacterial polypeptide expressing nucleotide sequence isolated from the Sargasso Sea
agaagattttcaaatagaaacttctaatgtagatcttgagatttcttcaatcgctgggccgcagctggttgtacctgttgataatgcaagatatgcgttgaatgcggcaaacgctcgatggggaagtttgtatgatgcactttacggtactgacgctttaccagggaaaaaagtttcaggttacgacgccgagagggctttaaaagtaataaattatgtaagagattttttaaatgacactataccgttatccgatacttcttggaatgaagttacaaatattattgtaaaaggtgataaccttatttttttaacggaaaaaaaagaaagttttcttaaaaacaaaaatcagtttataggttaccgtggagataaagaaaatcttgagtcaatcttagttaaaaataataatttacatattgatataattataaatccaaataacgacatcggcaaaatagataaagcttctatttcagatatcatagtagaatctgcactatcgactataatagataatgaagactctgtagctgcggtcgatgctgatgataaaattaaatgttacagaaactggttgggtctgatgaaaggtgatttagaaactaaaatggagaaaaatggaaaaaaatttactagaaagttaaatcctaatagaagttatatttcaccaaatggtgaaaaaatttctcttcatggaagagctttacttttaaatagaaatgttggtcatttaatgactaatcccacaatcatattaaaggatggatcagaaattcctgaaggaattatggacgcttttttttctactctatgtgcattacacgattttcaaaacaaaaataattcaagaacgggttcggta

SEQ ID NO: 237666 - DNA, 919 bp, Unknown
  Bacterial polypeptide expressing nucleotide sequence isolated from the Sargasso Sea
attaaatgcgggattatggatgaagaaagaagaacatcattaaatctaaaggaatgcattagagaattaaaagatagagtattttttataaatacaggttttttagatcggactggtgacgagatacatacctcaatggaatttggaccaatgattaaaaaagcagatatgaaaaatgcagattggataaaagcttacgaaaacaataatgttgatataggtttaaaatgtggatttatgggtattgcacaaataggcaagggcatgtttgcggaaccagataatatgaataaaatgatgatcgaaaaaattaatcatctaaatgccggagccaattgcgcatgggttccatcgcctactgctgcagctctgcactctttacactaccacgaaatcgatatttttaagaagcaacttgaattaaaaaaaagaaaaaaaattaggcaaaaagatctacttaaaattccttacgctaacggaaaaagatggaaaatagaggaaattaggaacgaaattgctaattgtgctcaaagtatactaggttacgttgttaggtggatcgaccaaggcataggttgttcaaaagttcctgatattaatggtgtttttttaatggaggatagagctactctgagaatttcctcgcaacttattgctaattggttgcatcatggaatatgtagcagaaaacaagtccttgagatcatgaaaaagatggcaaaagttgtcgataaacaaaatattaaagataaaaattatcaaaatatgtttccaaactacgataaatctatagctttcaaaactgcttgtgaattaatatttcaaggcaaagatccaccctctggttacactgaacctcttttacatttaaatagattgattaaaaaaaataaatatttatattttttctgtttttgaa

SEQ ID NO: 237667 - DNA, 913 bp, Unknown
  Bacterial polypeptide expressing nucleotide sequence isolated from the Sargasso Sea
aattggcttggtttaatgaagggtgatttagaagcccaagttgaaaaaaacaaaaaaaaatttactagaaaacttaatccggacagaatttataaatctcccaatggttctaaaattactttgcatgggagggcattattgctcaacagaaatgttggtcatttgatgaccaacccctcaattgtcttaaaggatggttctgaaatcccagagggaattatggatgcttttttttcaactctttgtgcattgcatgattttaaaaataaaaaaaattcaaggactggatctgtatatattgttaaacctaaaatgcatggaccagaagaggtgagttttacagatgaaatttttgagaatgttgaaaaggtccttggtctaaataaaaatacaataaaggttggaattatggacgaagaaagaagaactactgtaaatttaaaagaatgtattagaagagtgaaagaaagagtagtttttatcaatacaggttttttagatagaactggagatgaaatgcatacttcttttgaggccggaccaatgatttttaaagctgatatgaagaaatcaacttggctaaacacctatgaaaactggaatgttgatgttggtttatcatgtggtttttcaggaaaagcacaaatcggaaaaggaatgtgggcaatgccagatagaatgtcagacatgatggagcaaaaaattgggcatccaaaatctggagcaaactgtgcctgggtaccatctccaacagctgctacacttcactcgatacattatcacaaaataaatgtgtttgataaacaatcagaaataactaaaagaaaaaaagctgatttaaaaaatattttagaaataccaaaagcagataggcccaactggtcaattgaagatattaataaagaattagaaa

SEQ ID NO: 237668 - DNA, 748 bp, Unknown
  Bacterial polypeptide expressing nucleotide sequence isolated from the Sargasso Sea
cagtctatatatattgttaaacctaaaatgcatggtcccgatgaatgtgcttttacaaatttaattttttcaaaagttgaagaagttttaaatttaaaaaaatatacaataaagtgtggaataatggatgaagaaagaagaacatccgttaatctcaaagagtgtattagaattttaaaaaatagagttttttttatcaacactggctttttagatagaactggtgatgaaatgcacacatcaatggaagctggcccaatgattaaaaaaggagatatgaaatcttctaaatggataaaagcatacgaaaataataatgtagatgttggattaaattgtggtttttctggagttgcgcaaataggtaaaggtatgtgggcaatgccagacaagatgtcagatatgatgaaacagaaaattggtcatttggaagccggagcaaattgtgcatgggtgccatcacctacagctgctgctctacatgctctacattatcatggacttaatatatttaataaacataaagcactaaaaaaaagaactaaagcaaaactaaaagatcttcttactattccaattacaaacaaaccaaattggtcggaacaagatataaacttagaaatttctaactctgctcaaacaattcttgggtatgttgtaagatggattgatcaaggaattggttgttcaaaagttccggatattaataatattggtttaatggaagacagagcaacacttagaattt

SEQ ID NO: 237669 - DNA, 901 bp, Unknown
  Bacterial polypeptide expressing nucleotide sequence isolated from the Sargasso Sea
atagatcagtggcatttatcgaaaaagggatcaaattttgagaaaagtgagtatataaatttcttaaaatcaattaattatattgtagaagaacaatctgattttgaaatcaatacatcaaatgttgataaagaaatatcttcaatagcaggacctcaattagtggtgccagttgataacgccagatatgctttgaatgctgccaatgctcgctggggcagcttatatgatgcgttatatggaacagatgcgataccaggagaaattggtaaagattacaatgaagatagaggaaataaagtaataaaatttacaagagaatttttagataacacttttccaattagtgatgctagttggaagaaaattacaaagattaaaattaatgaaaaaaatttagtttttcaagtaaatgaagttaattataatttaaaagataattctcaatttgttggatacacaggtgatgatgaaaatataagttctcttttgctaaaaaataataatttacatactgatatcattataaatccaaacagcattattggaaaaaaagataaggctggtatcacagacttaatcgttgaatcagcaatttccactattgtcgataacgaagactcggtagctgccgttgatgctaaagataaagtaagatgttatagaaattggctcggtcttatgaagggtgacttagaaaccgaagttaaaaaaggtcaaaaaaaatttattcgaaaactaaaccctgatagaatttataaatcaccaaatggctctaaaatagttttgcatggaagggctctactgctaaatagaaacgtgggtcatcttatgactaatccctcaattttgttgaaggatggatctgaaattccagaagggtataatggatgcatttatt

SEQ ID NO: 237670 - DNA, 811 bp, Unknown
  Bacterial polypeptide expressing nucleotide sequence isolated from the Sargasso Sea
ttagatgaagaaatatctaacattgcaggaccacaattagtgtttccaataatgaactctagatatagcttgaatgctgcgaatgcaaggtgggtaagcttatatgacagtctttatggatcaaatataatagagtctgaagaaagtggaagtgaaaaatatgatcctttaagaggacaagaagtaattaaatacactagaaactttttgaacaaatattttccaataaatgatcttgactggaaagatattactggtttagcagtaaataataaaaaactcttaatttataaagaaaataaagaatataatttatcagatttagaaaagtttattggtcatagagggaatgcagccaaaccaaatgctataatcttaaaaaataataatcttcatcttgaaataattattaatcctagagcatttagtgctgcaagagatgctgccgggataagtgatattatagttgagtctgccgtttcaacaatatgtgaccatgaagatagtgtagccgcagtagatgctgaagataaagtaacttgttatagaaattggctaggactgatgaaaggaaatttaaaatctatatttgagaaaaatggtaaagaattagaaagaaaacttaatccagataggagttacacttcattgaatggtgaaaaattaaaacttcacggaagaagtcttttacttgtgagaaatgttggacacctaatgacaaaccctgcaatcactttaaatgatggatcagaagtaccagagggaataatggatgcttttataacttcagcagcttgtattcatgattgaa

SEQ ID NO: 237671 - DNA, 778 bp, Unknown
  Bacterial polypeptide expressing nucleotide sequence isolated from the Sargasso Sea
ggtgctgacatttatgatttggtagatgagaataaatttattggtcatagaggtgaagccgataacccagctgctataattttaaaaaataacaatttacatatagaaattttaaaagactcaagagcttttgctgctcaacaagatcatgctgggattagtgacataattttagaatctgctgtgtcaactatctgtgataacgaagatagtgtagctgcggtagatgcagaagataaaattatttgttatagaaattggctaggtttgatgaaaggtgatctaaaatcaaaatttgaaaaagaaggaaaattatttgaaagaaaacttaaccctaatagaagctatgtttcaaaagatggaaaaggtttaaaacttcatggaagaagtttactgctagttagaaatgttggtcacttaatgactaatccttcaataattttaaaagatggtagtgaagttccagaaggaataatggatgctttcattactacagctgcagcccttcatgatattaagaaaaaaactaattcaagaactggatctatttatatcgtgaaaccaaaaatgcacggaccagatgaaactgcatttactgatttacttttctcaaaagttgaagaagttttaggtttaccaaaatacacctgtaagattggaataatggatgaagaaagaagaacctcggctaatttaaaggagtgcattagatcgttaaaaaatagagttttctttataaatacaggttttctagacagaactggtgatgaaatgcaca

SEQ ID NO: 237672 - DNA, 876 bp, Unknown
  Bacterial polypeptide expressing nucleotide sequence isolated from the Sargasso Sea
ttgttgataacgaggactcggtagccgcggtggactctagtgataaagtaaaatgttatagaaactggcttggtttgatgaagggagatttaaaaactgaggtgaataaaaatggaaaaacatttataagaaaattaaattccgacagaagttacgtgggtccagatgggtcaaaaatcaatttacatggtagagccttattacttaatagaaatgtaggtcatttaatgacaaatccagcaatattattaaaagatggatctgaaatacctgaaggtattatggatgctttcatatctactttatgtgctatgcatgactttaaattgaagaataactctagaaaagaatcggtttacattgttaaaccgaaaatgcatggccctgaagaagttgaatttactaacaatttattttcaaaagtagaagatgctttaaaaataaaaaaatattcaattaaagtcggaataatggatgaggaaagaaggacaactgtaaatttaaaagaatgtataagaaaagttaaggaaagagttgtttttataaatactggatttttagatagaactggggatgaaatgcatacatcctttgaagctggtccaatgatttttaaaggagatatgaaaaaatctaagtggttaaatacttatgaagattggaatgtagatattggtttagcatgtggtttttctggtaaggcccaaataggaaaaggtatgtgggctatgccagataaaatgtcagatatgatgaagcaaaaaattaatcatccaaaatctggcgcgaactgtgcttgggtaccgtctccaacagcggctactcttcatgcaacacattatcattactttgatgtttttaaaaaaccaagatgaa

SEQ ID NO: 237673 - DNA, 856 bp, Unknown
  Bacterial polypeptide expressing nucleotide sequence isolated from the Sargasso Sea
aaaagaatgtataaggcaagtaaaaaaatagaattgttttttatcaatacgggttttcttgataggacaggagatgaaatgcacacttcatttgaagcaggtccaatgatttttaaaggtgatatgaaaaaatcaacttggttaaacacttacgaaaattggaatgtagacgtaggattaaagtgtggattctcaggtaaagctcagattgggaaaggtatgtgggcaatgccagatcagatggcaaatatgatggcacaaaaaattaatcatccaaaatctggtgcgaattgtgcatgggtcccttctccaactgcagcaaccttacattctcttcattatcacaaggttgatgtatttgatgaacaaaaaagaattaaaacaagaaatatcgctaaagtagatgatatcttagaaattcctaaagctgatagacctaattggtctttagaagatataaatcgtgagttagaaaataatgctcaaggtattttaggttatgtggttagatgggttgatcaaggtattgggtgctctaaagttcctgacttaaacaatgtgggacttatggaagatagagctacactaagaatttcctcgcagcatattgctaattggcttcatcacggtatttgcaataaagatcaagtaatgaaaataatgatgaaaatggctaaaacggttgacaaacaaaatgaaaatgatcctcattataaaaatatgtctgataactttgagaaatcaatagcgttttcagctgcatgtgatcttgtttttaaaggaagagttcagccatctggttatactgaacccttgttacacaaaaaaaggttagagaaaaaatctgtaaattagt

SEQ ID NO: 237674 - DNA, 870 bp, Unknown
  Bacterial polypeptide expressing nucleotide sequence isolated from the Sargasso Sea
tcaattttatttaaaaataataatctacatattgatattttaattgatcctaatcattttattggaaaaatagataaagcatcaatctcagatttcattgttgagtcagctatttcaaccataattgataatgaggactctgttgctgcagtcgatgccgaggataagattaaatgctatcgtaattggctaggtttaatgaaaggtgatttgactgctcatatagaaaaaaatggaaaaaaatttgttagaaaattaaatccagatagaacttacatatcgaaagacgggaataagattaatctacatggcagagcactattattaaatagaaatgtaggtcatttaatgaccaacccagctatcatacttaaagacggtacagagattccagaaggaataatggatgcatttatggcaactctatgcgctcttcatgatttcaaaaataaaaaaaattcaagaagtggatcagtctatattgttaagccaaaaatgcatggtcctgaagaagtggctttcacgaataagctttttgaaaaagttgaagaagctcttggtataaaaaaatattctattaaagttggaataatggatgaggaaagaaggacaacagtgaatttgaaagaatgtattaggcaagtaaaaaatagaattgttttcattaacacaggtttccttgatagaacaggagatgagatgcacacgtcattcgaagcaggaccaatgatttttaaaggtgatatgaaaaaatcaacctggttaggagcgtatgaaaattggaatgttgatattggattaagttgtggtttttctggtaaagctcaaatcggtaaaggtatgtgggctatgccggaccagatgggaaat

SEQ ID NO: 237675 - DNA, 907 bp, Unknown
  Bacterial polypeptide expressing nucleotide sequence isolated from the Sargasso Sea
ataataattaaccctaaagctttcagtgctgttcaggatgctgcgggcataagtgatataattatagagtctgcaatatctacaatatgtgataatgaagatagtgttgcagcggtagactcagaagacaaaattatatgttacagaaattggttaggtttgatgaaaggaactttaaaatctgtcttcgaaaaaggtgggaaaactttagaaagaaaactcaatccagatagaagttatatttcaaaagaaaataaaaaagaaaaattacatggaagaagcttacttttaattaggaatgttggtcatctaatgacaaattcagcaattattttagaagatggttctgaagtcccagaaggtataatggatgcatttattacaactgctgcagcaattcatgatttaaaaagaaaaggtaactcaaggaccggttctatatacattgtaaaaccaaaaatgcatgggcctgaagagactgcttttacagataaaatatttactagagttgaggaagtcttaaaacttgaaaaaaatactataaaatgtggtattatggatgaagaaagaagaacgtctgtaaacttaaaagaatgtattagaacattaaagagtagagttttttttataaatacaggatttttggatagaactggggatgaaatgcacacgtcgatggaagcaggtccaatgataaaaaaaggtgacatgaaaaaatcgaagtggatagctgcatacgaagataacaatgttgacgttggtttaaaatgtggattttcaggagttgcacaaataggtaaaggtatgtgggctatgccagataaaatgaaagatatgatagatcaaaaaatatcacatcttgaagctggtgcaaattgcgcatgggttccttctcctaccgcagcct

SEQ ID NO: 237676 - DNA, 835 bp, Unknown
  Bacterial polypeptide expressing nucleotide sequence isolated from the Sargasso Sea
aatggttataaaatatggaagggattttttagataagtactttccattagctggactaagttggaacaaaattacaagttttgcagtaaaatatgggaagttaaaagttttaaaaggtgctgatatttttgatttggaggatgaaaataaatttattggacacagaggtgaaagtgataatccatctgcaattattttaaagaataataatttacatattgaaattctaaaagactcaagagcttttgctgctcaacaagatcacgcgggtattagtgatattatattagaatctgcagtgtcaacgatttgtgataacgaagatagtgtcgctgcagttgactcggaagataaaattatttgttatcggaattggctgggtctaatgaaaggagaccttaagtcaaaatttgaaaaagaagggaaattatttgagagaaaattaaatccacacagaagttatatttcaaaagatggcaaaggtttaaagttacatggtagaagccttttacttgtaagaaatgttggtcatttaatgactaacccctcaattttattgagtgatggaagtgaaataccagagggtattatggatgcatttataactacagctgctgcactacatgatattaaaaataaaaataattcaagaactggatctgtttatatagtaaagcctaaaatgcatggtccagacgagactgcatttacagatttaattttttctaaagttgaagaagttctaaatttacctaaatacacttgtaagattggtattatggatgaagaaagacgaacatcagccaatttaaaagaatgtattagaagtctttaa

SEQ ID NO: 237677 - DNA, 799 bp, Unknown
  Bacterial polypeptide expressing nucleotide sequence isolated from the Sargasso Sea
gatagaacaggagatgaaatgcatacctccatggaagcaggaccaatgattaaaaaaggagatatgaaatcgtcaaaatggataactgcatatgaaaacaataatgttgatattggtttaaaatgtggtttctcaggtaaagctcaaataggaaaagggatgtgggctatgccagataaaatgaaggaaatgatgaaagataaaatcaatcatttaaaagctggagcaaattgtgcatgggttccatcacctacagcagcttcattgcatgctctacactatcatgaaatagatatatttaaagaacagcaaaaaattaaaaagagagagccagcaaaaattaatgatcttttgactattcctgttgctaatagacctaattggtcagttgatgaaattaataaagaaatatcaaactcagcacaaactttattgggttatgttgtaagatggattgatcaaggaattggttgttcgaaagtaccagatataaacaatattggacttatggaagacagggcaactttaagaatatcctcccagcatattgcaaactggatacatcatggtgtaacaacaaaaattcaagttcttgaaataatgagggaaatggcaaaggttgttgataaacagaatgctaatgataaaaattacattaaaatgagtgatgattatgaaagatctctagcatttaaaactgcgtgtgatttaatatttgagggtaaaaatcaaccatctggttatacagagccattattacataaaaatagattaaaaaaaaaaattaatcagaattaga

SEQ ID NO: 237678 - DNA, 861 bp, Unknown
  Bacterial polypeptide expressing nucleotide sequence isolated from the Sargasso Sea
actgaaaaatgataagcaattaataggttacttaggagaactagaaagcccgtcctccgtattgttaaaaaataataatcttcatatagatattatatttgatcctaaaagttcaaacgggcaacaagataaagctggtattcacgacataattttagagtccgccatatcatcaattatggatcatgaggactctgtggctgcggtagatgctaaagataaaattataggttatagaaattggttgggtcttatgaaaggaaatttacaagttgaaatggaaaaatatggaaaaaaatttgtaagaaaattaaattcagatcgtgtttatacgaaatttgaaaatgacgctacaaaaaacaattctaaaattatattgcatggtcgttctttaatgctgaacagaaatgttggtcatcttatgacaaattcttctattctacttgaagataagtctgaagttccagaaggaataatggatgcttttattactgttgcggcagctattcatgattttaaaagaaaaggtaactctagaactcattctgtttatatagttaaaccaaaaatgcatgggcctgaggaagtttcttttacagatcaaatttttgaaagggttgaagatgttcttttgttaaaaagaaatacaataaaaataggtattatggacgaagagagaagaaccaccgtaaatttaaaagaatgtattagagcaacaaaaaatagagttgtttttattaacactggttttctagatagaactggtgatgagatccatacatcatttgtagttggacctatgattaaaaaaggtgagatgaaaaaatctggttggattgcagcttatgaagattggaatgt

SEQ ID NO: 237679 - DNA, 701 bp, Unknown
  Bacterial polypeptide expressing nucleotide sequence isolated from the Sargasso Sea
aatcactttaaatgatggatcagaagttcctgaaggaataatggatgctttcataacctcagcagcttgtattcatgatttaaaaagaaaaggtaattcgagagaaggatcaatttatatcgttaaaccaaaaatgcatggtccagaagaaacagaatttactaatttaatttttactaaagttgaagaagttttaaaattagaaaaaaatacaattaagtgtggaattatggatgaagaaagaagaacatctgcaaaccttaaagaatgtattagaacacttaaagatagagtattttttataaacactggatttttagatagaactggtgatgagatgcacacctcaatggaagctggaccaatgataaaaaaaggagatatgaaagagtctaagtggattaaaacctatgaggacaacaacgtagatataggcttaaaatgtggtttttcaggagttgctcaaataggtaaaggaatgtgggccatgcctgacaaaatgaacgaaatgatgaaacaaaaaattggacatgtgaatgctggcgcaaattgtgcttgggttccttccccaactgctgctgcattgcatgttatgcactatcatgaagtaaatgtttttgaaaaacaaaaagcaatattaaaaagagagccatcaaaattatctgatcttcttactattccaatagcagatcgccctaatt

SEQ ID NO: 237680 - DNA, 798 bp, Unknown
  Bacterial polypeptide expressing nucleotide sequence isolated from the Sargasso Sea
gatgaaatttttcctttaaaaaatgggagctggaaagaaatttcaaaatttaaaattcaaggtaatgaattacagttttctatcaaagataaaaatcaaaatcttaaaaataaaaatcattttgtaggcttttctggtaaaaaagaaaatccaagttcagttttattaaaaaacaatgaattatacattgatatcataatagatcccaatagtgctgcgggaaaaagcgataaagcaaatatttcaaatgtaattgttgagtctgcaatttctacaattattgacaatgaggactctgttgcggcagtagactctaaagataaagtcaaatgttacagaaactggcttggtttaatgaaaggaaatttaaaagcggaagttgaaaaaaatggaaagaaatttataagaaaattaaaccctgatagaatttatgaagctcctgatggatctcaagttattttacatggaagagctttattacttaatcgaaacgttggtcatttaatgactaatccctctgtaactttaaaagatggatcagaaataccagaaggtataatggatgcatttatatctgctctttgtgcgatccacgattttaaaagtcaaagaaattctagaacaggctcaatgtatattgttaagccaaagatgcatggtccagaagaggttgcttttacaaatgatatgtttgagatagttgaaaaagttttaggtttaaaaaaatattccataaaagtaggaattatggatgaagaaagaagaactactgtaaatctaaaagaatgtattagaaaa

SEQ ID NO: 237681 - DNA, 1000 bp, Unknown
  Bacterial polypeptide expressing nucleotide sequence isolated from the Sargasso Sea
tggaaagatattactgggtttagcagtaaataataaaaaactcacaatatataaggaaaataaagaatataatttatcagatttagagaagtttattggtcatagaggggaagcagctaaaccaaatgctataatcttaaaaaataataatcttcatcttgaaataattattaatcctagagcatttagtgctgcaagagatgctgctggtataagcgatattatagttgaatctgctgtatcaacaatttgtgaccatgaagatagtgtagcagcagtagatgctgaagataaagtaacttgttatagaaattggctaggattgatgaaaggaaatttaaaatcaatatttgaaaaaaatggtaaagaattagaaagaaaacttaatccagataggagtttcacttcattgaatggtgaaaagttaaaacttcacggaagaagtcttttgctagtgagaaacgttggacacttaatgacgaaccctgcaatcactttaaatgatggatcagaaattcctgagggaataatggatgctttcataacctcagcagcttgtattcatgatttaaaaagaaaaggtaattcgagagaagggtcaatttatattgttaaaccaaaaatgcatggtccagaggaaacagaatttactaatttaatttttacaaaagttgaagaagttttaaaattagaaaaaaatacaattaagtgtggcattatggatgaagaaagaagaacatctgcaaaccttaaagaatgtattagaacacttaaagatagagtattttttataaacactggatttttagatagaactggtgatgagatgcacacatcgatggaagctggaccaatgatcaaaaaaggagatatgaaagagtccaaatggattaaaacttatgaggataataatgtagatataggcttaaaatgtggattttcaggggttgctcaaataggtaaaggaatgtgggccatgcctgataaaatgacgaaatga

SEQ ID NO: 237682 - DNA, 913 bp, Unknown
  Bacterial polypeptide expressing nucleotide sequence isolated from the Sargasso Sea
aacaaaagtaattcaagaactgggtcagtttatattgtaaaacctaaaatgcacggtccagacgagactgcatttacagatttaattttttctaaagttgaggaagttttaaatttacctaagtacacttgcaagataggtattatggatgaagagagaagaacatcagcaaatttgaaagaatgcattagaagtcttaaaaatagagttttttttattaatactggattcttagatagaactggtgatgaaatgcatacatcaatggaagccggtcctatgattaaaaaaggtgatatgaaatcatctaaatggattactgcatacgaaaacaacaatgttgatattggtttaagttgtgggttttctggtaaagctcaaattggaaaaggaatgtgggcaatgccagataaaatgagagacatgatggagcaaaaaacaggacacttaaaagcaggagcaaactgcgcatgggttccttctccaacggcagctgcattacatgctttacactatcatgagataaatatttttgatgaacaaaaaaaattaacagatagaaagccggctaatcttgatgaacttttgacaatcccaatagcagatagacctaattggtctgtagaggacataaataaagaaatttctaattctgcacaaactttattagggtatgttgtaagatgggttgatcaaggtgtgggatgttctaaagtgccagatattaataacataggtttgatggaagatagagcaacactaagaatttcttcacaacatatagccaactggatacatcatggtattacaacaaaaatacaagtaaccgaaataatgaaagagatggccaaaatagtagatgatcaaaacaaagatgatccgctatatgttaaaatgagtagtgattatgaaa

SEQ ID NO: 237683 - DNA, 741 bp, Unknown
  Bacterial polypeptide expressing nucleotide sequence isolated from the Sargasso Sea
ttagaaaattttgaaaatgaatttaatttaaaagaatataaatcctatattgaaaaaattggttatcttgtaaaggaaggtcctgattttaaaatcaaaacaaaaaaattagataaagaaatatcaagtatagctggacctcaacttgttgttccaataatgaatgcgagatatgctttaaatgcagcaaatgcaagatggatgagtttatatgatagtttgtatggaacagacgtaatatcttcagaagaatcaattagtgaaagatatgacccagagcgaggactacgtgttattaaatatacaaaggaatttttagataaaaattttaaattaaaaaactcatcttggaaaaaagtaaatcaattattaatacaaaatcataaattagaattacaaacagataaaggggttgtaaaacttgaagacgaaagtaaatatttgggttatagaatagacaaagagaaaataagcgcaatcattttaaaaaacaataatcttcatattgaaattataattaatccaagtgcttttagttctaaaggagaccctgcgggaatttcagatataattatagaatcagctatctctactatttgtgatcatgaagattctgtggctgcagttgatgctgaggacaaaatagtaggatataaaaattggttaggactaatgaaaaaagatcttgttgctgaatttgaaaaagacggaaaaaaattaagaagaaaattaaatccaaat

SEQ ID NO: 237684 - DNA, 837 bp, Unknown
  Bacterial polypeptide expressing nucleotide sequence isolated from the Sargasso Sea
tattataattgaatcagcacttacaacaatacaagattgtgaagattctgttgcgactgtagatgcagaggataaggtaatggcatataaaaattggttaggattaatgaaaggagatcttgaagatacttttgaaaaaaatggtaaaaccattactagaaagcttaatcaagacaaagtctatatttccaaaaatggtgaatataggttacccggccgttcagtaatgttaattagaaacgttggtcatttaatgactaatcctggaattttagacaagaatggagaagaaattcctgaaggtatcatggatgctatgatcacttcattaatagctatccatgatattaaaaatagtaaaatgaattccagaactggatctgtttacattgtaaagcctaaaatgcatggaccagaagaagtaaagtttgcttgtgatgttttttctgctgtagaagatgctctcaatttaaacaaatacacgcttaaaattggaattatggacgaagaaagaagaaccacagttaatttaaaggagtgtattagagaagctaaagaacgaactgtttttataaatactggatttttagacagaacaggtgacgaaatacatacagctatggaagctggaccaataattcgtaaaggtgatataaaaaatgcaaagtggatttcagcatatgaaaataataatgttcaaattggtcttgattgtggtttgtctggcagagctcaaataggtaaaggtatgtgggcaatgccagatttaatgaatgagatgttaaaacagaaaattaatcatccgaaaagtggggctaatactgcatgggttccaag

SEQ ID NO: 237685 - DNA, 542 bp, Unknown
  Bacterial polypeptide expressing nucleotide sequence isolated from the Sargasso Sea
tcctaccgcagcttctttacatgcaatgcactatcataaagtagatatttttgaacaacataaaggcttaaaaagtaataaaatagattatattgataatttgttaaggatcccagtagcagacagaccaaattggagcaaagaggaaataaataatgaattgtgtaactcagctcaaactattttaggttatgtagtaaggtgggtagatcaaggaataggatgctctaaagttccagatataaataatgttggattgatggaggatagagcaacactaagaatatcttcacaacatatagctaactggctacatcatggtatttgctcaaatagacaagttttagaaattctcaaaaaaatggcaaagatagtcgataaacaaaatgaaggagatccagaatatcaaaatatgtctccaaattaccataaatcaatatcttttaaggcagcatgtgaattgattttccatggtaagtcacaaccttcgggttatactgaacctctattgcatttaaataggttgattaaaaaaagctaat

SEQ ID NO: 237686 - DNA, 970 bp, Unknown
  Bacterial polypeptide expressing nucleotide sequence isolated from the Sargasso Sea
tccgctcttacaactataattgataatgaggactcggttgctgctgtggatgctgaagataagattaaatgttaccgtaattggcttggtttaatgaaaggtgatttaacggccaacatggaaaaaaatggaaaaaaatttgttagaaagttaaatccagacagaacttttatatcaaaagatggaaagaaaattgctcttcatggaagagcattattattaaatagaaatgtagggcacttaatgactaaccctgcaattttacttaaagatggttcagaaattccagaaggcataatggatgcgttcatggctacgttatgcgctcttcatgattttaaaaataaaaataactcaagaactgggtctgtttacattgtaaaaccaaaaatgcacgggccagaagaggttgcttttactaatacattgtttggaaaagctgaagaggctttaggaattgaaaaatactcaattaaagttgggataatggatgaagaaagaagaacaacagttaatttaaaagaatgtattagacaagttaagaatagaatagtttttattaatacaggtttcttagatcgaactggtgatgaaatgcatacttcttttgaagctggaccaatgatctttaaaggggatatgaaaaaatcaacttggttgggtgcttatgagaactggaatgttgatgttggattaagttgtgggttttcaggtaaagctcaaattgggaaaggcatgtgggctatgccagatcagatggcgaatatgatgaaccaaaaaataggccatccaaaatctggggctaattgtgcgtgggttccttctcctactgcagctactttacattcaatgcattatcacaaagtaaatgtatttgatgaacaaaacaaaattaaatcaagagctaaagctaagctcaatgatattttagaaatacctgcagcagatagacctaattgggctatagatg

SEQ ID NO: 237687 - DNA, 373 bp, Unknown
  Bacterial polypeptide expressing nucleotide sequence isolated from the Sargasso Sea
caaggaattttaggatacgttgttagatggatcaatcaaggtgttggttgttcaaaagttccggatataaataatgttggtcttatggaggacagagcaactcttagaatatcatctcaacatattgcaaattggttgcaccatgggatttgtaaagaagatcaagtgatggaagtgatgaagaagatggcaaaaattgttgatgagcaaaataagaatgatcctgcttatcaaaaaatgtctgataactttgataaatctgtagctttttcagctgcttgtgatcttgtgtttaaaggccgagttcaaccatctgggtatacagagcctttgcttcatcagaaaagattagaaaagaaagctagcaattaac

SEQ ID NO: 237688 - DNA, 742 bp, Unknown
  Bacterial polypeptide expressing nucleotide sequence isolated from the Sargasso Sea
gataaaaaaagaagaaatgaaaaaaactaaatggatttctgcctacgagaacaataatgtagatgttgggcttgaatgtggtttctctggtattgctcagattggaaaagggatgtgggctatgccagataaaatggcagacatgatgaagcaaaagatttctcatttagaatctggagcaaattgtgcatgggttccatcaccaactgccgctggacttcattctcttcattatcatgaaattaatgtgattaaaaaacaatcagaattaaaaaaaagaaaaccagcaaaagagttagatctaataacaattcccatttctgatagagttaattggtcattagaagaaataaatgatgaaatttctaattctgcccaaactattttgggctatgttgttagatggatagatcaaggtgtaggttgttcaaaagttcctgatatcaataatattggacttatggaagatagggccaccctaagaatttcttctcaacaaattgctaattggttacaccatggagtttgtagtaaaaaaagagttttagaaataatgaaaaaaatggcaaaagttgtcgacaagcagaacgaaaatgattcaaaatatgaacaaatgtccccaaattttgaaaaatcaatagcgtttaaagctgcctgtgaattaatctttcatggaagaaagcagccatctggatatactgaaccacttcttcatttcaacagattgcttaaaaaaaattaa

SEQ ID NO: 237689 - DNA, 838 bp, Unknown
  Bacterial polypeptide expressing nucleotide sequence isolated from the Sargasso Sea
tcaagaaaaggaactgatataaataaaaaagattattttaattttttaaagtcaatcaattatatcattcaagaaaaagaagactttaaaattgaaacgtctaatgtagatcaggagatatcatcaattgcaggacctcagcttgtagttcctgtagataatgcaagatatacacttaatgcagctaatgctagatggggaagtttgtatgatgcattgtacggaacagatattattcctggtgcaaaaggaaaagattacgatagtgataggggaaacaaagtaatttcttatgtgagaaaattcttagatgaatcagtacctttagataatttaagttggaaagatatttctagaattcaagttgataaaaaagatttagtcttgttatcaggagaggaaaaaaatcatcttaaaaataaaaatcaatttattggttttaatggtgacaaaaataaaccaacttctattttattaaaaaataataaccttcatattgatattttgatagatcctaatcattttatcggaaaaactgataaagcttctatttcagatattattttggagtcagctttatctacaatcattgataatgaggactcagtcgcagctgttgacgccgaagataaagtaaagtgttacagaaattggttggggcttatgaagggcgatcttacagttaacatggaaaaaaatggcaagaaattcgttcgtaaattaagtcctgataggacttatacttccaaaaatggtggtgagattgtattgcatggaagagctttgctgctaaatagaaacgtaggtcacttaatgactaatccatcaataatttaaa

SEQ ID NO: 237690 - DNA, 453 bp, Unknown
  Bacterial polypeptide expressing nucleotide sequence isolated from the Sargasso Sea
acggtcttttggaaatcccaaaagcagatagggcaaattggccagttgaagatataaatcgcgaacttgaaaacaatgctcagggaattttgggttatgtagtaagatggatagatcaaggggtaggttgttcaaaagttcctgatataaataatattggattgatggaagatagagcaactttaagaatatcttcacaacacatggctaattggttgcaccataatgtttgttcaaaacaacaagttatgtcagtgatgagaaaaatggcagctatagtagataaacaaaatattgctgataaaaattacaaaccaatggctgaaaattttgaaaaatctgtagcttttcaggctgcttgtgatttagtgttcaagggtaaagaccagccttctggatatactgaaccacttttgcataaaagaagaatagaaaaaaaatctaatctatagt

SEQ ID NO: 237691 - DNA, 850 bp, Unknown
  Bacterial polypeptide expressing nucleotide sequence isolated from the Sargasso Sea
atgaaaggtgatcttatgtctacttttgaaaaaaatggtaagaaaattgtcaggaaacttaatgcagatagagagtatatttcaaaagataataaaaaaattaaacttcacggaagagctctattgttaaatagaaatgtaggccatctgatgactaacccagctattaaattaaataatggtgaagaaattcctgaaggtatattagatgcttttatatctactttatgtgctttgcatgattttcaaaataaaaataattctaggactgggtctgtatatatagtaaagccaaaaatgcatggaccagaggaagtgagcttcacaaattctttgtttgaaaaagttgaggaaacattaaatataaaaaaatactctattaaagttggaataatggatgaagaaagaagaacaactgtcaatttaaaagagtgtattcgacaagttaaaaatagaattgtttttataaatacaggtttcttagatcgaactggagatgaaatgcatacctcttttgaggcaggtccgatgatctttaaaggtgatatgaaaaaatcttcttggttaaatacttatgagaattggaatgttgatataggtttaaaatgtggattttctggtaaagcccaaataggaaaaggaatgtgggcaatgcctgatcaaatgttaaatatgatggaacaaaaaattgctcatccaaaatcaggtgctaattgtgcttgggttccatcacctacagctgctactttacattctctacactatcacaaggtaaatgtttttgatgaacaaaaaaaaataaaaacaaggagtgagtcattattaaaaaacatattagaaatccaaaagc

SEQ ID NO: 237692 - DNA, 831 bp, Unknown
  Bacterial polypeptide expressing nucleotide sequence isolated from the Sargasso Sea
ctagatttaccaaatagtacaatcaagataggtattatggatgaagagagaagaacaagtataaatctaaaagaatgtattagggcagctcaatcgagagtggcttttatcaatacgggttttttagacagaactggtgatgaaattcatacagcaatgcaggcaggttctttcttaaaaaaagctgacatgaaaaatgctccttggatatcatcttatgaaaaaagaaatgttagcattggattagaatgtggactaaaaggtaaggcacaaattggcaaaggtatgtgggcaatgccagatttaatggctgaaatgatgaaacaaaaaattggccatccaaaatcaggagctaactgtgcttgggtcccaagcccaactgctgctacacttcatgctcttcactatcatgaagtaaatgttaaggaagttcaggaaagtattataagttctggatcaacaggaacgcttgatgatttattaactttacctttattgaaaggtataaatttatcagaagatgaaatttttcgtgaggttgaaaataatgcgcagggaattttaggatatgtggttcgttggattgatcaaggtataggttgctcaaaagtaccagacattaataatattggattaatggaagatagagcaacatgtcggatttcttctcaagcacttgcaaattggattgaacatggaattgtttcaaaagaacaagtcctaatagtgctaaaaaaaatggctaaggtagttgatcggcaaaatgaggatgatacaaattatattcctatgtctggaaatgaagattcaatagctttaaagcagctagag

SEQ ID NO: 237693 - DNA, 872 bp, Unknown
  Bacterial polypeptide expressing nucleotide sequence isolated from the Sargasso Sea
ttacagacttaatgatgagactgcaacgctaatcataagaccgagaggttggcatctcaacgaaaagcatataacgatcaacgatcaacccatatcagcatcgctttttgattttgcagtttacctttcaaataatcaccaagcccttttaaaaaaaggcacaggaccatatttttatcttccgaagcttgaaaatcatcttgaggcgagactctggaacgatgttttcgtgcatgctcagaattttttaaatattgatcgcggcacaatcaaggccacagttttgattgaaacaattactgctgcctttgaaatggatgagattatctttgagctaaaagaacattcggccgggcttaattgtggacgatgggattacatattcagctttataaagaaatttagaaatcatcggaattttctattaccaaacagaaccgaggtaacaatggagcggcattttctaaaaagctatgtcgacttactcattcgcacttgccataaaagaaatgtacatgcgatgggtggaatggcagctcaaattccaatcagaggcgacgatgagcaaaatcaaattgccatgaataaagttgcttcggataagttaagagaggcaaatgctggtcacgacggcacatggattgctcatcctggattatctcaagttgcaatgagtgcgtttaatcaagccatgggatcatctcccaatcagattacaaataagagaaatgatgtttcagtgaatgctcgagaccttataaaggtaccagacggaaatataacagaggatggtttgaggcagaacatatcaataggaattcagtacattgaggcatggctctcgggcaatggttgcgttccaaattcataat

SEQ ID NO: 237694 - DNA, 865 bp, Unknown
  Bacterial polypeptide expressing nucleotide sequence isolated from the Sargasso Sea
gatggtaggggtttaaaattacatggtagaagccttctgcttgtgaggaatgttgggcatttaatgacaaacccatccattattttagatgatggaaatgaagtgccagaaggtattttagatgcatttataacgacagctgcagcacttcatgacttaaagaaaaaaaataattcaagaactggatctgtatatatcgttaaacctaaaatgcacggaccagatgaaacagcatttacagatttaattttttcaaaagtagaagaagttttaggattaaaaaaatatacatgcaaaataggaataatggatgaagaaagaagaacatcttccaatttgaaagagtgtattaggtccttaaaaaatagagtattttttataaatacgggatttttagatagaactggtgatgaaatgcatacatcaatgatggcaggacctatgattaaaaagggagaaatgaagtcatcaaaatggattacagcttacgaaaacagaaatgtggatattggattaaaatgtggtttttctggtaaagctcaaattggtaaaggtatgtgggctatgcctgacaaaatgaaagatatgatggaacaaaaaacaggccatttaaaagctggtgcaaattgtgcttgggtgccatctccaactgctgctgcccttcacgccctacattatcatgaaataaatatttttgatgaacagaaaaaaattttaaataggaaacaagcagaacttgatgatcttctaacaataccagtagcagatagaactaattggtctgttgaagaaataaataatgaaataagtaattcagcccaaacattacttggatatgtggtgagatgggttgaccaaggaatag

SEQ ID NO: 237695 - DNA, 921 bp, Unknown
  Bacterial polypeptide expressing nucleotide sequence isolated from the Sargasso Sea
tctgaaaccatgggttggaaaaattgataatgcggccatctcggatatagtgatagaatccgccctatcaacaattgtagataacgaggattctgtagcggctgttgatgctgaggacaaagttaagtgctatcgaaattggttaggtttaatgaaaggagatctatcttctacttttgagaaaaatggtaaaaagattgtcagaaaactcagccaagatagagagtatgtctctaaaaatggagaaaaaatcaatcttcatggcagagctttattgcttaataggaatgtaggacatttaatgaccaacccgggggtactcttaaaagatggagcggaaataccagaggggattttggatgcatttgtatctacattatgtgctttacatgatttcaaaaataaaaaaaattcgagaacaggctcagtttatattgttaaacctaaaatgcatggaccagaagaagtagctttcacaaatactttatttgaaaaagttgaagagacactgggcattaaaaagtacactattaaagtcggaattatggatgaggaaagaagaacaactgtaaatttaaaagaatgtattagacaagttaaaaatagaattgttttcattaacactggctttttggatagaactggagatgaaatgcacacatcttttgaagcagggccaatgatattcaagggagaaatgaaaaaatcaacttggttgaatacttatgaaaattggaatgtggacataggtttaaaatgtggtttttcaggtaaagctcaaattggtaaaggaatgtgggctatgccagatcaaatggcaaatatgatggaacaaaaaattggtcatccaaaatcaggtgcaaactgtgcttgggtggcatctccaactgcagcgacactacattctcttcattaccataa

SEQ ID NO: 237696 - DNA, 850 bp, Unknown
  Bacterial polypeptide expressing nucleotide sequence isolated from the Sargasso Sea
gacagtgtatcaggaagatatgatcccctcagaggtgaaatggttattaaatatgccagaaattttttagatgacaattttcctttaaaaggattaagttggcaaaagataactggctttgcggttaaagacggtaaattaaaagctttaaaaggtgctgataattttaatttagttgatgaaaaaaaatttattggtcacagaggtgaaaatgataatccaattgcaatcatcttaaagaataataatttgcatattgaaattttaaaagactccagagcttttgctgctcaacaagatcatgcaggtattagtgatataattttggagtctgcagtatcaacaatttgtgataacgaagacagtgttgcagcagtcgactctcaagataaagttgtatgttatcgaaattggttaggtctcatgaaaggtgatttaaaatcagaatttgaaaaagagggaaaattatttgaaagaaagcttaatcctaaccgaagttatatttcaaaaaatggaaaaggattaaagctacatggtagaagtcttttgctcataagaaatgttggacatttgatgacaaatccttcaatacttttaagtgatggaagtgaggttccagaaggtattatggatgcatttataactaccgctgcagcactccatgatttaaaaaataaaaataattcaagaaccggatctgtttatattgttaaaccgaaaatgcatggaccagatgaaactgcttttactgatttaatttttacaaaagttgaagaagttctgggtttaaaaaagaatacttgtaaaattggaattatggatgaggaaagagaacatctgctaatttaaa

SEQ ID NO: 237697 - DNA, 769 bp, Unknown
  Bacterial polypeptide expressing nucleotide sequence isolated from the Sargasso Sea
catacttcaatggaagctggtccgatgataaaaaaaggagacatgaaagcttctaaatggattaatgcatacgaaaataacaatgtagatataggtctaaattgcggtttttcaggtgtggcacaaattggtaagggaatgtgggcgatgcctgaccaaatggaaaaaatgataaaacaaaaaattggacatctagaagcaggagctaattgtgcttgggtcccttcacctacggcggcgacactacatgctattcattattatgaaatagatatatttaaaaaacatgatgaactaaaaaaaaggcaacaagccaagctttcagatattttaacaattccaattataaataaaccaaattggtcaattgaagaaataaataatgaaatttcaaactctgctcaaacacttttgggttacgttgtaagatggatagatcaaggtgttggttgttctaaagtgcctgatattaataatgtcgggttaatggaagatagagctacattaagaatatcttctcagcatattgcaaattggctacaccatggaatttgtaataaagagcaaatattagaaataatgaaaaaaatggcaaaaattgttgatgaacaaaataaagaagacaaaaactatcagaatatgtctcctaattatgaaaaatctatagcttttaaaactgcttgtgaacttatttttcaagggaaaaaacagccatcgggatatacagagccattattacattttaatagattaattaaaaaaaattaat

SEQ ID NO: 237698 - DNA, 927 bp, Unknown
  Bacterial polypeptide expressing nucleotide sequence isolated from the Sargasso Sea
tatatcatcagaagaatcggttagcgaaagatatgatcctgaaagaggtatgcaagtaagagaatatactaaaaaatttttagatcagtatttccaattaaaaaattcatcatggaaaaaaataaataggatttcaattaaagatcatactttagaactacatacagacaaggagatcacaaaacttggggataatgataaatatgtaggatatagattagataaagaaaagatttcggcgataattttaaaaaataataatttgcatgtagaaattattatcaatccaggtgcctttagtgccaaaggggatcctgctggtatttcagatattataatagaatctgctatttcgacaatatgtgatcatgaagattcggttgctgctgtagatgctgaggataaaataattggatatagaaactggcttggtcttatgaaaaaaaatcttacttctgagtttgaaaaaaatggaaaaaaattaattcgaaaacttaatcctaatagaaattacattaccaaggacggtaataaaaaaagtcttcatggaagagcccttctattaaatcgaaatgttggtcatttaatgacgaattcttcagttcttttacaagatggatctgaaataccagaaggtattttagatgcatttgttacttgtttgtgtgcaatacatgatttaaaaaacaaaaataactcaagaactggatcaatctatatcgtaaagcctaagcagcacggacctgatgaaacagcttttaccgatttattatttacaaaggtagaggaggttttagggttagaaaaattcacaattaaatgtgggataatggacgaagaaagaagaacaactgtaaatttaaaagaatgtataagaacgttagaaaatcgagttttcttcataaacactggttttttagatagaac

SEQ ID NO: 237699 - DNA, 817 bp, Unknown
  Bacterial polypeptide expressing nucleotide sequence isolated from the Sargasso Sea
cactggtaataaagaaaatccaaattcaattttactaaaaaataataatttacatattgacattataatagatccaaatagcagtgcgggtaaaagcgataaagcaaatatttcaaatgttttcatagagtctgcaatttctacaattattgataatgaggactcagttgctgcggtggactctaaggataaagttaaatgttataggaattggcttggtttgatgaaaggagacttaaaagcagaagttgaaaaaaatggaaaaaaatttattagaaaattaaatgctgatagagtttataatagcatagatggatctaaaatagttttgcatggaagagcgttattgctaaatagaaatgtaggtcatctaatgactaatccatcaataactctaaatgatggaactgaaatacctgaaggtataatggatgcatttatatcaactctttgtgcaattcatgattttaaaaacaagaaaaattcaagaaaaagctcaatgtatattgttaaaccaaaaatgcatggtcctgatgaggttggttttactaatgatatttttgagacagttgaaaaagttttaggtttaaagaaatattctattaaagttgggatcatggatgaagaaagaagaacaactgttaatcttaaagaatgtattagaaaagttaaaaatagagtggtttttattaacactggatttctagatagaactggagacgagatgcatacttcattcgaagcgggtccaatgattttcaaaggagatatgaaaaaatctacctggctaaacacttatgaaaattggaatgttgat

SEQ ID NO: 237700 - DNA, 970 bp, Unknown
  Bacterial polypeptide expressing nucleotide sequence isolated from the Sargasso Sea
tctattgggtatatcggtgaagaaaaatctgattttaaaattagcacttctaacgtggatcaagaaatttcatcaatccctggaccacagttagttgttcccgtagataacgcaaggtatgccttaaatgctgcgaacgcacggtggggaagtttttatgatgccctttacggcaccgatgtaatacctgggaaaacaaacaagggctatgatgatgaaagggcaaaaaaggtaattaattattcaagagaatttttagataatatttttcctattactgatgcgagttggaaagatattacaaaaattaagttacaggaaaaaaatttagctcttttaataaatgaaaaaaagttttatctaaaaaataaaaaacaatttgttggttttaatggtgaacctgagaatttaaactcaattcttttaaaaaataacaatttacacattgatatattaatcgatccaaatagcacagttggaaaaaatgacaaagcaggtatatcagacataattatcgagtccgctatatccactatagtagataatgaagactccgttgcagcagtagattcaaaagataaaataaaatgttatagaaactggcttggtttaatgaaaggcgatttaaaaacagaagttcaaaaaaataacaaaaaatttataaggaaacttaaccctgatagagtctataactctccaaatggatcaaagattactttacatggaagagctttattacttaatagaaatgttggtcatcttatgacgaatcctgcaattattttaaaggacggttcagaaatacctgagggcataatggatgctttcttttcaacactttgtgcattacatgattttaaaaataaaaaaaattcaagaacaaattctgtttatatagttaaaccaaaaatgcacggaacagaggaagtagactttaccaatgaaatttttgaaaatgttgagaaagttc

SEQ ID NO: 237701 - DNA, 559 bp, Unknown
  Bacterial polypeptide expressing nucleotide sequence isolated from the Sargasso Sea
ttgggttccatcaccaactgccgccattcttcacgcaattcactatcacaaagtaaatgtttttgaggtacaaaaacaaattttatctagaaaaaaagcaaaacttgaaaatcttctagaaattccagttgcagaccgacctaactggtcaactgaagacataaataaagagcttgaaaataatgcacaaggtattttaggctatgttgttagatggatagatcaaggaattggttgttctaaggttccggatatcaataatacaggtttgatggaagatagagccaccttaagaatttcttcacaacacatggctaattggttacatcaaaaaatttgcacaaaggatcaggtaatgaaaattatgaaaaaaatggcaaaaattgttgatcaacagaataaaaatgataaaaaatatattccaatgtctaaagattttgataattctattgcatttaaaacagcttgtgatttagtttttaacggcaaggatcaaccctcaggttatactgaaccattgctacataagatgaggattgaaaaaaaatctattcgttag

SEQ ID NO: 237702 - DNA, 856 bp, Unknown
  Bacterial polypeptide expressing nucleotide sequence isolated from the Sargasso Sea
ctacacggcagaagtcttttacttgtaagaaatgtaggtcatcttatgacgaattcctcaattttattaagtgatggaagtgaaataccagaaggtattatggatgcttttatgactacagcagctgctttacatgatttaaaaattaagaataattcaagagctggatcagtttatatagtaaaaccaaaaatgcatggtccagatgagacggcatttacagatttaattttttctaaagttgaacaagttctaaatttacctaagtatacttgtaagattggtattatggacgaagaaagaagaacatcagcaaatttaaaggagtgtattagaagtcttaaaaatagagtttttttcataaatactggcttcttagatagaactggcgatgaaatgcatacatcaatgcaagctggtcctatgattaaaaaaggtgatatgaaatcatctaaatggattattgcatacgaaaacaataatgtagatattggtttaagttgtggtttttctggtaaagctcaaataggcaaaggaatgtgggcaatgccagataaaatgaaagatatgatgcagcaaaaaacagggcacttaaaagcaggggcaaactgtgcatgggttccgtctccgacagcagctgctttacatgctttgcattatcatgaaataaatatttttaatgaacagaaaaaattaatagatagagaaccagctaagcttgatgatcttttaacaatcccaatagcagatagacctaattggtccgtagaggatattaacaaagaaatttctaattctgcacaaacattactaggttatgttgtaagatgggtcgatcaaaggtgtgggttgttct

SEQ ID NO: 237703 - DNA, 892 bp, Unknown
  Bacterial polypeptide expressing nucleotide sequence isolated from the Sargasso Sea
tgaaaagtttataaaaaaatttttaaaaaaaattggttatttaaaaaattctggttcaaattttaaaattatgacaaaaaatgttgataaagaaatatcaagtatttgtggacctcaactagtttgtcctatttctaatgcaagatttttattaaatgcagctaatgcaagatgggttagtttatatgacagcttgtatggtactgatataatacctgaaacaaatggtgccgtgaaaggaaaaacttataatccaattagaggtaaaaaagttatagatcacactcgagacttattagacaaatatatacctttagagaataaaagctggaaaaatttagatgaaactccaaaagtaataaataataaattaaatctaagactaaaaaatcctaaacaatttgtaggttataaaaaaaaattaaatcaattatcttctctcttattcgttaacaataatttacacatcgatattttatttgatcaagtaggagatgtagaaaacaaaaatccagatggcaatcaagacaaaatgaaaatatatgatatttttttggaatctgctatttctaccatttgtgaccacgaggatagtgtggcagcggtagatgcagaagataaagttcttggatatagaaattggttaggtttaatgaagggaaatttaaaagtagaattttcaaaaaatggaaaaaaaattataagaaaattaagcgctgatagaaattatatatcaagcaaaggtaaaaaatttaaattacatggtagatcattgctattaaacagaaatgttgggcaccttatgactaatccttcaatacttttaaaagacggatccgaatgtccagaaggaattcttgacgcttttgttacttctcttgcgtgccttcac

SEQ ID NO: 237704 - DNA, 466 bp, Unknown
  Bacterial polypeptide expressing nucleotide sequence isolated from the Sargasso Sea
agagagccatcaaaattatctgatcttcttaccattccaatagcaaatcgtcctaattggtctattgatgaaattaatactgaaatttcaaattctgctcaaactattttaggttatgtagtcagatggattgatcaaggtataggttgttccaaagtcccagatataaataatattggattaatggaagatagagcaaccttaagaatttcatctcaacatattgccaattggcttcatcatggcttatgttcgaatagacaggttcttgaaattttaaaaaaaatggcaaaagttgttgataaacagaataaagacgatactaactacgaaagtatgtctccagagtatgataaatctattgcctttaaagcagcatgtgaattaatctttcatggaaagtcacagccttctggctatacagaacctctcttgcacttaaacagattaattaaaaaaagttaat

SEQ ID NO: 237705 - DNA, 966 bp, Unknown
  Bacterial polypeptide expressing nucleotide sequence isolated from the Sargasso Sea
gatgcacggccctgatgaggttgcgctagcggtcgaaatgtttgaccggatcgaagactacttaggactaggtcgaaacaccatcaaaatcggaattatggatgaagaacgtcgaacctccatgaatctcctgtcatgcatccataaagctaaagaacgagtcgtgttcatcaacaccggcttcttagaccgaacgggagacgaaattcatacaagtatggaagctgggccatttgtcccaaagacagagatgaaagcacaagagtggctaccagcgtatgaagacatcaacgttgacgaaggcctggcagctggccttctaggccatgggcaaatcggaaaaggtatgtgggccagacctgatgacatgacagacatgctcagagaaaaggtaggccacccgaaatcaggtgcttcttgcgcatgggtccctagccccacagcagctactttgcacgcacttcattatttcgaagtcgatgtcgttggtgtgcaggccgaccttgaaggtcgtgatgctacggatagaacggtcatgctcacaattccccttctcgaatctgggcgcgaattgagtccggatgaagtttccgctgagcttcgtaacaacgtgcaaggtattttgggttatgtctctcgatgggttggacaaggcgttgggtgctcaaaggttccagatatcaacgacattcaattgatggaagaccgggctacgttgcggatctccagccagcacattgctaactggctacatcatggagtaatcagtgatgaggaaattatttccacgatggaagaaatggctgcttttgttgacgaacaaaacgaagatgaccctgaataccatccaatgtgtggcgatcttgattcaagtatcccttatcaggctgcattggccctagttttcgaaggtcgagaccaagcgaacggctatacggagtttctattaactgagcggcggcaacg

SEQ ID NO: 237706 - DNA, 759 bp, Unknown
  Bacterial polypeptide expressing nucleotide sequence isolated from the Sargasso Sea
aaaaaggagacatgaaatcctcaagatggatcaaggcatatgaaaataataatgttgatgtaggattagattgtggtttttctggaaaggcgcaaattggaaaaggaatgtgggcaatgccagatttattaaaggagatgatggaacaaaagatttctcatcctatgtccggtgctaattgtgcatgggtaccatcgccaactgcagcagcaatacacgctttgcattatcatgaagtaaatgtgttttctattcatgaaaaattgaaaaacagaaaaccagctaaattggatgaacttcttaccataccagtagcgaaaaacaaaagttggtctaaagatgaaattgaaaaagaattaaaaaataatgcccaaggtattttaggctatgtagtcagatggattgatcaatcagttggatgctcaaaagttcctgatataaatgctgttggtttgatggaagacagagccacatgtagaataagcagccaacatattgctaattggcttcatcacggtgtatgcagtaaaaaacaagttttagaaatcatgaagaaaatggccaaagtagttgattatcaaaatttaaaagatcgtggtatgaaagatcaagatccttatcaagcaatggcaggaaacttcgaaaaatcaattgccttcaaagctgcatgtgatttaattttccacgggaaataccagccatctggatatactgaaccattactacattttaatagattgataaaaaaatcaatctgaa

SEQ ID NO: 237707 - DNA, 844 bp, Unknown
  Bacterial polypeptide expressing nucleotide sequence isolated from the Sargasso Sea
aatggatgaagagagaagaactacaattaatcttaaggaatgtataagaacattggaaaatagagtatttttcattaatacaggatttttagacagaaccggtgatgaaatgcacacttcaatggaggctggaccaatgattaaaaagggagaaatgaaaacttcagattggatcatagcttacgaaaataataatgtagatataggattaagctgcggtttctctggaactgcgcagattggaaaaggaatgtgggctatgccagacaaaatggcagatatgctagagcaaaaaattactcatttagaggctggagcaaattgtgcatgggttccctctccaactgcagctgcccttcatgctatccattatcataaaataaatatatttgataaacatcttgacttaaaaaagcgggaaaaagcaaaattagagaatttattaaaattaccaattataagaaaacctaactggacaccagaagaggtaaataaagaaatctcaaactctgctcagacaattttaggttatgttgtcagatggatagatcaaggtattgggtgttctaaagttcctgatataaataatattggtcttatggaagatagagcaactttaagaatatcatctcaacaaataacaaattggctttatcatggaatttgcagtaggaaacaagttttggaaattatgaaaaaaatggctaaaattgttgacgaacagaataaaaatgataagtcatatcaaaaaatgtcaccaaattatgatcgttcaattgcatttaagacagcatgtgagcttgtttttcaaggaaaagatcaaccatctggctacaccgagcca

SEQ ID NO: 237708 - DNA, 928 bp, Unknown
  Bacterial polypeptide expressing nucleotide sequence isolated from the Sargasso Sea
atgtcaaaaagttatgaaactgttaataacttaaaagtatcaaaagaattactagcttttgtcaataatgagctacttaatgatactaatatttccgcagagaaattttggttgggctttgaccaagctgttcatagcctagccccaagaaataaagaattacttaaaataagagaagatttacaaaaaaaaattgatggttggcatcttaaaaataaaggtaacgaatttgaaattaaagaatataaaaaatttttgaaggaaatagactatttaagggatgaaggccctgattttaaaattgaaaccaaaaatgttgatgacgaaatcactaaaatagctggaccacaattggtagttccaattatgaatgccagatatacacttaatgctgccaatgctagatgggtgagtctttatgatagcttatatggtacaaatataattgaatcagatgaaggtggaagtgaaagatatgatcctcttcgaggccaagaagtaatcaagtatgtaagagagttttttgatacttgtataccaattgaaggaactagctggaaaaatattgctgggatgagaatagtcgacaaagatttaattattttaaaagacgattatcattacaaactaaaagataaagataagtttgtaggtcatagaggtgatgcaaacaaaccaagcgcaataatcttaaaaaataataatcttcattttgaaattataattaacccaaaagcattcagtgctgcccatgatattgctggaattagtgatgtaatcgcagagtcagctgtttccactatttgtgataatgaagatagtgttgctgcagtagatgctgaagataaagttgcctgttatagaaattggttgggtttgatgaaaggtgacttaaaaattcaattgaaaaaaatggtaaaaatttaga

SEQ ID NO: 237709 - DNA, 781 bp, Unknown
  Bacterial polypeptide expressing nucleotide sequence isolated from the Sargasso Sea
gattttaaaaaaaaaggaaattctagaactaactcaatttatattgttaaacctaaaatgcatggacccgaagaatgcgcctttactaatttaatttttcaaaaagttgaaaaagttttaaaattaaaaaaaaatcaaattctttgcggaatcatggatgaagaaagaagaacatcagttaatcttaaagaatgtataaggattttaaaaaatagagttttctttattaatactggttttttggacagaactggagatgaaattcatacatcaatagagatgggcccaatgatattaaaaggtgatatgaaatcttctaaatggatctccgcttatgaaaataataatgttgatatagggatttcgtgtggtttttctgggaaagctcaaataggtaaagggatgtgggcaatgcctgatttaatgaataatatgatgaaagaaaaaattaaccatcctttatcaggagctaactgtgcatgggtaccttcacctactgcagcaggactacatgttcttcactatcatgaaataaatgtatttgaaaaacaaaaagaattatctaaaagaaattcagcaaaacttttagatctattaaatatcccaattgaaaataaaccgaattggtctactgagaaaataaacaatgaaataaaaaacaatgcacaaggaattttaggatatgtagtaaggtggattgatcaatctgttggttgttctaaagttcctgatataaacggtattggtttaatggaagatagggctacatgtaggataagca

SEQ ID NO: 237710 - DNA, 358 bp, Unknown
  Bacterial polypeptide expressing nucleotide sequence isolated from the Sargasso Sea
cgctggattgatcagggtgttggctgttcaaaagtgccagatatttacgatatcggtttgatggaagaccgtgccactttgcgtatttcgtcgcaacatatcgccaactggttgtaccatggcgtatgtaatgaagccctcgtgatggatgtgatgaaggaaatggccacagttgttgatcgccaaaatagcggtgatcccacctatcagaagatggcaggccggtttgatgagtcggttgcgtttaaagccgcgtgcgacctggtctttagaggccgcgagcagccatcaggctataccgagccgatcctgcatgcccgccgtctagaaaaaaaggccgaagatcaagcggcctaat

SEQ ID NO: 237711 - DNA, 580 bp, Unknown
  Bacterial polypeptide expressing nucleotide sequence isolated from the Sargasso Sea
gattaaaaaaggcgatatgaaatcatctaaatggatcatggcttatgaaaataataatgtagatataggactaagatgtggtttttctggtaaggcacaaattggtaaaggtatgtgggcaatgccagataaaatgagagatatgatggaacaaaaaatcggacatttgcaagctgcagctaactgtgcttgggtgccttctccaactgctgctgcacttcatgcattacattaccacgaactaaatatttttaataaacagaaacaaatattaaaaagagaaaaagctaagctagacgatttattgactatccctaaagcagatagaccaaattggtcggttgatgaaataaattccgaaatatcaaactctgctcaaactattttaggttatgttgtgagatggatagatcagggaattggctgttcaaaggtccctgacataaataatgtcggtcttatggaagatagagcaactctaagaatctcatcacaacatattgcaaactgggttcaccatggagtaacaactaaaattcaagtaatagatataatgaaagaaatggccaaaatagttgat

SEQ ID NO: 237712 - DNA, 859 bp, Unknown
  Bacterial polypeptide expressing nucleotide sequence isolated from the Sargasso Sea
ggacataagtgtttctttgaggacaaaaaagaaatttatttaaagaacaaagatcagtttattggatataatggtgaaaaagaaaaactgacttcagttttattaaaaaataataatctacatatcgatattataattgatccaaatcattatattggaaaacttgataaagcttcgatctctgatttcattgttgagtccgctctttcaaccataattgataatgaagactcggttgctgctgtggatgctgaagataaaattaaatgttaccgtaattggcttggcttaatgaaaggtgatttaacagccaacatggaaaaaaacggaaaaaaatttgttagaaagttaaatccagatagaacttatacatctaaagaaggaaaaaaatttactcttcatggaagagcattgttactaaatagaaatgtagggcacttaatgactaaccctgcaattttacttaaagatggtacagaaattccagaaggcataatggatgcgttcatggctacgttatgtgctctacatgattttaaaattaaaaataactcaagaactggatcggtttacattgtaaaaccaaaaatgcatgggccagaagaggttgccttcactaatacattgtttggaaaagttgaagaagctttaggaattaagaaatactcaattaaagttgggataatggatgaagaaagaagaacaaccgttaatttaaaggagtgcattagacaagttaagaatagaatagtttttattaatacaggtttcttagatcgaactggtgatgaaatgcatacttcttttgaagctggaccaatgatctttaaaggggacatgaaaaaatcaacttggttgg

SEQ ID NO: 237713 - DNA, 618 bp, Unknown
  Bacterial polypeptide expressing nucleotide sequence isolated from the Sargasso Sea
ggaccaggagaggtaaagttcacttgtgacctttttgaagcggttgaaaaattacttggtttgacaaggaacacactcaaagtgggaattatggatgaagagcgaagaacgacgcttaatttaaaagcttgcattaaagcggcaagtgagagagtcgttttcatcaatactggatttcttgaccgcactggggacgaaattcacactagcatggaagctggacctatgatcccaaaaacaaaaatgaaggcatcaaattggatttctgcatacgaagataataacgttgatgttggtcttgcatgcgggctacaaggcaaggcgcagattggaaagggtatgtgggcaatgccagacctgatggaggcgatggtagagcagaaaatcaaccacccagagtctggggcgaatactgcgtgggtgccttccccaaccgctgcagtccttcatgctatgcattaccatcgaataaaagtttttgagcagcaagataaaattaaaacaagaactgtagcgagcatcgatgaaattttgaaaataccccttttagaggatcgagcaagcttaacgtcggaggaaatttcaaaggagttggataataatgctcaaggtatactt

SEQ ID NO: 237714 - DNA, 788 bp, Unknown
  Bacterial polypeptide expressing nucleotide sequence isolated from the Sargasso Sea
tttgacaaaaaatattgatgatgaaatttcgagtatatgtggtcctcaactagtttgtcctatttctaatgctagatttttattaaatgctgctaacgcaagatgggtaagtctatatgacagtttgtatggtaccgatataattccagaaaatcatggagctttaaaaggaaatacttataatccaattagaggtaaaaaggttatagaatatactcgtaatctattagataaatatattcctataaaagacaaaagttggaaaaatttaaaaacaattccagaagtaaaagataataaattaaatttaaatttaaaaaaccctaatcagtttgtaggatataaaaaaaaattcaacaaaatatcttctctcttgtttgttaacaataatcttcatattgatattttatttgatcaaactggaaatatggaaaataataatcctgatggaaatcaagacaatataaaaattcatgatatatttttagagtcagctatttctactatttgtgatcatgaagatagtgtggccgctgtagatgctgaagataaagttcttggatatcgaaattggttaggattaatgaaaggaaatttaaaagtagaatttttaaaaaaaggaaaaaaaattataagaaaattaaatgctgatcgaagttatatctcaaaaaaaggtaaaaagtttaaattacatggtagatcactacttctaaatagaaatgttggtcaccttatgaccaatccagctatacttttaaatgatggatctgagtgccctgagggatttt

SEQ ID NO: 237715 - DNA, 877 bp, Unknown
  Bacterial polypeptide expressing nucleotide sequence isolated from the Sargasso Sea
agcgaaagatatgatcctgagagaggtttagaagttataaaatacagtaaaaaatttttagatgatttttttacattaaaaaataaccttagctggaaaaatatacaatcaataattattgaaaaagaaaatttaattttattttcatacagctccaaatctacacttaaaaatcaaaataaatttataggttacagaggagaaaaaaataatccaacggcgatcatattaaaaaataataatttacatgttgaaataattataaatcccaaagctttcagtgcaaaaaatgatccagcaggaattagtgatataattcttgaatcagctttaactacaatttgtgataatgaagatagtgttgcagcggtagatgctaaagataaagttgattgttatcgtaactggttgggtttaatgaaaaaaagtttgacttctaaatttaataaaaatggaaaagattattttcgtaagctaaatcctgatagaaaatattttagtccaaaaggaaaaaagctaaagttacatggaagatctttattattaaatagaaatgtaggtcatttaatgacaaatccatctattttgttaagagatggttcagaagtgccagaaggaataatggatgcttttattacatctgcagcatgtattcatgatttaaagctaaaaaacaattcaagaaaaggctccatatatatcgttaaaccaaaaatgcatggtcctgacgaggcaagctttgctgatgctatatttacaaaagttgaaaaaattctaaatttaaaaaaaaatactattaagtgtggaataatggatgaagaaagacgtacatcagttaacttaaaagaaacaataagagctctcaaaaatagagttt

SEQ ID NO: 237716 - DNA, 767 bp, Unknown
  Bacterial polypeptide expressing nucleotide sequence isolated from the Sargasso Sea
caaatattgaaaaattttggcaaaaaatacaaaagagttttaaactcagatagaaggtatacttctcataacggaaaaacatttaagttgcatggtagggctcttttgcttaatagaaatgttgggcacttaatgacaaacccctcaattttattatcagataaatcagaagttcctgaaggtattatggacgcttttataatttctgcagcgtgcttacatgattttattaaaaaagggaactcaagaaaaaattcaatttatattgttaaaccaaagatgcatggaccagatgaagtcgcatttgccgatgaaatttttactcacgttgaaaatgttttaaaaatgaaaaagaatacaatcaaaattggaataatggatgaagaaagacgaacaagtgctaatttaaaagagtgcattagaaatgtaaaaagaagagttgtctttattaatactgggtttttagatcgaactggtgatgagatacacacatctatggaggcgggtccagtgattaagaaaggcgatataaaaaattctgattggattaaagcatatgagaacaataatgttgttgttggattagaatgtggtttttctggtaaagcacaaattggaaaaggaatgtgggctgccccagatagaatggcagatatgttaaatgaaaaaatagggcatccttcttctggagcgaattgtgcctggacaccttcgccaactgcagcaactttacatgcaacgcattatcacaaagttaacgttttcaa

SEQ ID NO: 237717 - DNA, 832 bp, Unknown
  Bacterial polypeptide expressing nucleotide sequence isolated from the Sargasso Sea
aatgacaaaccctgcaatcactttaaatgatggatcagaagttcctgagggaataatggacgctttcataacctcagcagcttgtattcatgatttaaaaagaaaaggtaattctagagaagggtcaatttatattgttaaaccaaaaatgcatggtccagaggaaacagaatttactgatttaatttttactaaagttgaagaagttttaaaattagaaaaaaatacaattaagtgtggaattatggatgaagaaagaagaacatctgcaaaccttaaagaatgtattagaacacttaaagatagagtattttttataaacactggatttttagatagaactggtgatgagatgcatacctcaatggaagctggaccaatgatcaaaaaaggagacatgaaagagtctaaatggattaaaacctacgaggacaataacgtagatattggcttaaaatgtggtttttcaggagttgctcaaataggtaaaggaatgtgggccatgccagacaaaatgaacgaaatgatggaacaaaaaattggacatgtgaatgctggcgcaaattgtgcttgggttccttccccaactgccgctgcattgcatgttatgcactatcatgaagtaaatgtttttgaaaaacaaaaagcaatattaaaaagagaaccatcaaaattatctgatcttcttactattccaatagcagatcgtcctaattggtctgtcaatgaaattaatactgaaatttcaaattctgctcaaactattttgggttatgtggtcagatggattgatcaaggtataggttgttccaaagtcccagatataaacgat

SEQ ID NO: 237718 - DNA, 940 bp, Unknown
  Bacterial polypeptide expressing nucleotide sequence isolated from the Sargasso Sea
cgaaatatttaatgaagttgagactgtattaaaacttaaacctaatacaataaatgttggaataatggatgaagaaagaagaacatctttaaatctaaaagaatgcattagaaaagtaaaaaaaagaatagtttttattaacacaggttttttagatagaaccggtgatgaaatacacacctccatgtgtgcaggtccaatgataaaaaaaggtgatatgaagtcttcaaaatggatagctgcttacgaaaataataatgtagacataggattaaaatgtgggttttcaggcatagctcaaataggaaaaggtatgtggccagctcctgataaaatggctgacatgatggatcaaaaaattaaccatcctaaagcaggtgcaaattgtgcttggactccaagtccaacggcagcaacattacattctctgcattatcatgatgtagatgtatttaaagttcaaaaagaattaaaaaatagaaataatgataatttagaaaatcttttaaaaatacctattgcagatagacctaattggtcagtagaagaaattgttaaagagttagaaaataactcacaaggaatacttggatatgtagttagatggattgatcaaggagtcggatgttctaaagtcccagatataaacaacgttggccttatggaggatagagctactctaaggatttcatcacaacatattgctaattggttaaaatataatatttgcacaaaaattcaggtcatggatataatgaaaaaaatggctcggattgtagatgatcaaaacaaaaatgataaaaattatataagaatgtcagaaaattttgaaaattctctggcgtttaaaacagcttgtgatttagtgtttaaaggaactgatcaaccatctggttacactgaaccacttttacatcaaaatagaatagataaaaagcaa

SEQ ID NO: 237719 - DNA, 700 bp, Unknown
  Bacterial polypeptide expressing nucleotide sequence isolated from the Sargasso Sea
tgatgaaatccatacttctatggaagctgcaccagttgtacgtaaagaagccgttaagacccagaaatggattgctgcttatgaaaaccgtaacgttgcgattggtttagcatgtggtttacaaggtaaagctcagattggtaaaggcatgtggccaaaaccagatagcatgaaagatatgttggcgactaagactgcacatccaaatgctggtgcaacttgtgcatgggttccatctccaacgggtgcagtacttcatgcgttgcattaccatcaaatcaatgtaaaagcgcgccaagatgaattggctgcggaagatatgttgacacttgatgacttattaactccaccatttgcacctgaaacaaattggactgcagaagagttaaataatgagcttgagaataactgccaaggtattttaggttatgttgttcgttgggtagatttgggtgtgggttgttcgaaagttccagatatcaacaacgttggtttgatggaagatcgcgcaacattacgtatttcttctcaacatgttgctaactggttacgtcacggtatcgtaacgcgcgaacaagttgaagaagtgcttaagcgcatggctgtgattgttgatcaacaaaatgccaatgatccattgtacacgccaatggcaccgaactttgatgggattgcatttccaagcagcatcagaatttaa

SEQ ID NO: 237720 - DNA, 795 bp, Unknown
  Bacterial polypeptide expressing nucleotide sequence isolated from the Sargasso Sea
atccaagattgtgaagactctgtagctactgtagatgcagaagataaagttttagcctataagaattggcttggtttaatgaaaggtgatcttgaagatacctttgaaaaaaatggaaaaaaaattgtaagaaaacttaataaaatgaaagttttcaaaacaaaaaatggcgaattacatttatcgggactgtccttaatgcttattagaaatgttgggcatttaatgacaaatccggctattatttattctgaaaataaagaggtacccgagggaattatggatacagttattactaccatgatatccatgtttgatcttaaaaatggaaagaataactctaaaactggctctgtatatatagtaaaaccaaaaatgcatggccctgaagaagtggcttttacaattgaattatttgctgcagttgaaaatatgcttggattaccaaataatactataaaaattggtattatggatgaagaaagaagaactacaataaatttaaaagaatgtattaggcatgctaaagaacgtctagtatttatcaatactggatttctagatagaactggagacgaaatacataccgcaatggaaggcggacccataatacccaaagcagaaataaaaggtgctgaatggataaacgcttacgaaaaaaataatgttttagtaggactaaactgcggtttgtctggtaaagcacaaatcggaaaaggtatgtgggcaatgccagatctgatgaaagatatgtatgaacaaaaaatacaacatcctaatagcggtgcaaataca

SEQ ID NO: 237721 - DNA, 863 bp, Unknown
  Bacterial polypeptide expressing nucleotide sequence isolated from the Sargasso Sea
aatgcatggaccagaagaagttagttttgctgacaaagtatttagcaaagttgaagaagtattaagcttaagcccaaatacaataaaaatgggtattatggatgaagaaagaagaaccacagtgaatttgaaagagtgtattcgaaatgcaaaaaaaagaattgtttttattaatacaggtttcttagatagaactggcgatgaaatgcacacctcttttgaagcaggacctatgatttttaagggagaaatgaaaaaatcaagttggttaactgcttatgaggattggaatgttgatattggactagaatgtggattctcaggaaaggcccaaatcggaaaagggatgtgggctatgcctgataggatgcaagacatgttaaagcaaaaaattgcacacccaaatgccggtgcaaattgtgcctgggttccttcaccaacagcagcaatattgcatgctacacattatcataatgtaaatgttttcgataaacataaagaattatctttacgtgaaagagcaaatttagataatattttgactattccaacggccgatagaacaaattggtcagctaatgacattgaaaaagaaattgaaaataattgtcaaggaattttaggttatgttgtaagatggattgatcaaggagttggctgttccaaagttccagatattaataacattggtttaatggaggatagggcaactttaagaatttcttcacagcatattgctaattggctgtatcaccaaatttgttcaagagaacaagtcatgaaatcgatgaaaaaaatggccaaagttgtagatgatcaaaactctaaagataaaaattatgtagcaatgaataataattttg

SEQ ID NO: 237722 - DNA, 942 bp, Unknown
  Bacterial polypeptide expressing nucleotide sequence isolated from the Sargasso Sea
ttggttttagtgaagtcgaaaaagttttagggttaaaaaaatacacaattaagtgtggcataatggatgaggaaagaagaacatctataaatttaaaagaatgcataagaaatctgaaaaatagagttttttttataaatacaggatttttagatagaactggtgatgaaatacatacatctatggaagctggtataatgattaaaaaagcagatatgaaaacttcaaaatggataaatgcatatgaaaataataatgttgaaataggattaagatgtggattttctggaattgctcaaattggaaaaggaatgtgggctatgccagataaaatgtcagatatgatgatccaaaaaataaaccatctaaaagctggagcaaattgcgcatgggttccttcgcctacagctgcttctcttcatgtattacattatcataaaataaatatttttaataaacacaaggaaataaaaaaaagaaaaaaaacaaaactaagagatatattgactttaccaataataaataaaccaaattggccattggaggatataaataaagaaatttcaaattctgcacaaacgattttaggttatgttgtaagatggatagaccaagggataggatgttcaaaagtacccgatataaataatataggattaatggaagatagagctactcttagaatatcttctcagcatataactaattggctacatcatggaatttgtagcagaaagcaagttttagaaataatgaaaaaaatggcaaaaattgtagataaacaaaacaagaatgataaaaattacaaagatatgtctccaaattttgatcaatcaatcgcttttaaaacgtcttgcgaattaatttttcaaggaaaaaatcaaccttctgggtacacagagcctttattgcatttaaacagattaatcaaaaaaaattaat

SEQ ID NO: 237723 - DNA, 577 bp, Unknown
  Bacterial polypeptide expressing nucleotide sequence isolated from the Sargasso Sea
cttgggttcctcaccaacagcagctacgcttcatgcactacattaccatcaagtagacgtctttgctaaacagaaagaattaaaaaatagaactgctgcaaaaatttctgacatactaacaattccaactgcagacaggcccaattggtctctagaagaaattaatagagaattagaaaataatgcgcaaggtattttgggttatgtggttaggtggatagaccaaggagtaggttgctcaaaagttcctgacattaataatgttggactaatggaagatagagcaactttacgaatttcatcacaacacattgccaattggcttcaccatggaatttgtagcaaagaacaagtgttagaatctatgaaaaaaatggcagagattgtagataaacaaaatattaaagatccatctttaaaaggatacacctcttataaacgtatgtctgatgactatgacaggtctatagcttttaaagctgcttgtgatcttgtgtttaaaggtagagaacagccatccggatacactgagccaattcttcatcacaaacgtttagaaaaaaaagctaatcagtag

SEQ ID NO: 237724 - DNA, 767 bp, Unknown
  Bacterial polypeptide expressing nucleotide sequence isolated from the Sargasso Sea
ttttttggcgggccctatgattaagaaaggagatatgaaaaaatctgcatggatttcagcttatgaaaattggaatgtcgacattggactatcttgtggtttttctggagtagcacaaattggaaaaggaatgtgggcaatacctgataaaatggctgatatgatggaacaaaaaattaatcacccaaaagctggtgcgaattgtgcatgggttccatctccaaccgcagcaacgttacatgcgatgcattatcataaaattaatatatttgaagaacaaaaaaatatctcatcacgcactaaagcaaagttatctgatatattaaaaattcctatagctgatcgcccaaattggtcggttgaagatataaataaagagttagaaaataatgcacaaggtattttaggttacgttgttagatggattgaccaaggagttggatgttcgaaggttccggatataaataatgttggtttaatggaagatagagcaactttacgtatctcttcacaacatattgctaactggctacatcataaaatttgtaacacagaccaagttatgaaggtgatgaaaaaaatggccttagttgttgataaacaaaatagtaatgatccaaattatgaacctatgtcgaaaaatttcgaaaaatccatcgcttttaaagctgcatgtgatctggtctttaaaggtaaagatcagccctctggttatactgagccaatactgcatttgcgacgacttcaaaaaaaaactaatctgtaga

SEQ ID NO: 237725 - DNA, 319 bp, Unknown
  Bacterial polypeptide expressing nucleotide sequence isolated from the Sargasso Sea
gaaataattattaatcctagagcatttagtgctgcaagagatgctgccgggataagcgatattataattgagtctgctgtatcaacaatttgtgaccatgaagatagtgtagccgcagtagatgctgaagataaagtaacttgttatagaaattggctaggattgatgaaaggaaatttaaaatcaatatttgaaaaaaatggtaaagaattagaaagaaaacttaatcctgataggagttacacttcattgaatggtgaaaagttaaaacttcacggaagaagtcttttacttgtgagaaacgttggacacttaatga

SEQ ID NO: 237726 - DNA, 867 bp, Unknown
  Bacterial polypeptide expressing nucleotide sequence isolated from the Sargasso Sea
aaagtacacggatatagaaattggttaggattaatgaagagtgacttaatatacgaaggaaaaaaaaacactggaaataaaccttttacttttacaagaaaactaaatcctgacagagaatatatttcacctgatggaaataaaattaaattgcatgggagggctttaatgcttaacagaaatgtagggcatttaatgaccagttcttctattttgctaagtgacagttcggaaattcccgaaggtattatggatgcatttataacgacaactgctgcaattcatgattttaaaaataaaaaaaattcaagatctcaatccttttatatcgtaaaaccaaaaatgcatggacctgatgaagttgcttttactaatttaatttttgaaaaagtggaagaagttttgaatttaaaaaaatacacaatcaaagttggaataatggacgaagaaagaagaacaacactaaatttaaaagaatgcattagaaatgttaaaaatagagttgtttttataaatactggatttctagatcgtactggtgacgaaatacatacctcaatggaagctggacctatgattaaaaaaggagatatgaaatcatctaaatggatatctgcttacgaaaataataatgttaatatcggattagcttgtggtttttcgggcatagctcaaattggaaagggtatgtgggctgcaccaaacaaaatgagagatatgatgtctcaaaaaatcagtcatcccaaatccggagctaattgcgcttgggtaccttcgccaacagcagctacgctccatgcattgcactatcatcaggtagatgttttctccaaacagaaagagttaaaaaatagagctcctgcaaaa

SEQ ID NO: 237727 - DNA, 900 bp, Unknown
  Bacterial polypeptide expressing nucleotide sequence isolated from the Sargasso Sea
aatttaaaaaaatttcaaattttatgtggtattatggatgaagaaagaagaactacaattaatttaaaagaatgtataagagctttaaaaaatagagtttttttcattaatactggttttctagatagaactggagacgagattcatacatccatggaagttggaccaatgattagaaaaggtgaaatgaagttatcaaagtggattcaagcatatgagaataataatgtggatgtaggtttggcgtgtggtttttcaggtaaatgtcaaataggcaaaggtatgtatcctgcgccagatctgatgggtgaaatgatgaaacaaaaaattgttcatcctttatctggagctaattgcgcatgggtaccatcaccaactgctgctgcattacatgttcttcattatcatgaggttgatgtattttctaaacaaaaggaactgttaaaaagaaaatccgcaaggttatctgatcttttaactattccagtcgcaaaaaagccaaattggtcaatggaagatattacaaaagaattaaaaaataatgcgcaaggtattttgggttatgttgttagatgggttgatcaatctgtaggatgttctaaagtgcctgatattaatggaataggtttaatggaagatagagctacttgtagaataagtagtcaacatattgcgaattggcttcatcatggtatttgcagcaaaaaacatgttttagaaattatgaaaaaaatggcaaaagtagtagataatcaaaatctgaaagatccaagcatgaaaggatattctccttataaaaaaatgtcagataatttcgacagttcaacagcttttaaagctgcatgtgaattagtgtttcatggaaaaactcagccttctggttatactgagccaattctt

SEQ ID NO: 237728 - DNA, 943 bp, Unknown
  Bacterial polypeptide expressing nucleotide sequence isolated from the Sargasso Sea
gatgttactgggttttaatatcataaatggagagttggttatttttgtagataaaaaatctacagctctcgaaaatcattctcaattcgctggttatcgcgaggcggaaaatagactagatgcaatattactagttaaaaacaatcttcacatagaaattttaattaaaccagatggtaaaattggacaaactgataaagctggaattgacgatatcattgttgaatctgctatttccactattatggattgtgaagattctgttgccgcagttgattcagaagacaaggttctagcctatcgaaattggcttggtctaatgcgtggtgacttgtccgtagaaatggaaaaaggaggaagaaccttcatacgtaaattaaaccaggacaaaatttttaccgctccaaatggcagcatgttaactttgcatggtcgctctttaatgctagttcgaaatgttggacacttaatgacaaatcccgccatacttcttggagataaaagcgaaatcccagaaggcatcttggacagttttatgactgttttaggagctatgcatgattttaaaatgaaaggaaattcgagaaccaagtctatttatatagttaaacctaaaatgcatgggccagaggaagtggctttcacatgtgaaatttttgatatggttgagtctatactcaaactccctgctaacaccgttaaaatcggtattatggatgaagaaaggcgtacaaccgtaaatttgaaagagtgtatacgagcagcaaaaagcagagtagcttttataaatactggattcctcgatagaacgggagatgaaatacatacttctatgaacgctggtgcaatgattcgaaaaacggatatgaagcaagcggcatggataaccgcatatgagaattggaatgtggatattgggctgtcctgcggtttctctggtaag

SEQ ID NO: 237729 - DNA, 742 bp, Unknown
  Bacterial polypeptide expressing nucleotide sequence isolated from the Sargasso Sea
ttacatattgaaataattattaatcctagtgcttttagtgcaaaaggagatcctgcaggtatttcagatattatagtagaagcagctatatctacaatttgcgatcatgaagactctgttgccgcggtagactctgatgataaaataatcggatatcgaaattggcttggtcttatgaaaaaagatttattagctgaattcgaaaaagatggaaaaaaattaataagaaaattaaatccaaatagaagttatgtttccaaaaatggtactaaagaaagtttacatggtcgtgcacttcttctaaatagaaatgttggtcacttaatgaccaattcagcagttctcctccaagatggatctgaaatacccgaaggaattttagatggatttattacttctttgtgtgcacttcatgatttaaaaaataaaaataattcaagaactggatcaatttatatagtcaaaccaaaacagcatggacctgatgaaacagcatttactaatttactttttactaaaatagaggaaattttgggaataaaaaagtatactattaaatgtggtattatggacgaagaaagaagaaccactgtaaatttgaaagaatgtattagaactctggaaaatagagtattttttataaatactggttttttggatcgaactggtgatgagatgcatacctctatggaggcagggcctatgattaagaagggtgatatgaaatcctctgcttggataa

SEQ ID NO: 237730 - DNA, 781 bp, Unknown
  Bacterial polypeptide expressing nucleotide sequence isolated from the Sargasso Sea
gatcctgcaggtattaaagacgtttttctagaatctgccgtaaccactattcaggatctagaagattctgttgctgctgtgaatggtgaagataaaactgatgtttataaaaattggcttggtctaatgaaaggaacccttgcagaaactttcgaaaagggcgggtcaactcttacaagaagtctaaatgaagatttatcttttttatctccagatggaaaaccgattactattgcagctagaagtctaatgctcgttagaaatgttggtcacttgatgactaatccagctgttttacttgacggtaaagaaatacccgaaggaataatagatgcaatgttcacaatcgcgataggtaagcatgatttagatcaaacaggatctgtccagaattctaaaacaggcagtatatatatcgtaaaacctaagatgcatggccctgaagaggttcagtttacttgcgatttattttccgatgttgaaagcgctcttggtttagaaaaaaataccgtgaagatagggataatggatgaagagagaaggacaacggtaaatttaaaagaatgcatcagagttgcaaaagaaagagttatttttatcaatactggatttttagatagaacaggtgacgagattcacacaagcatggaagctgggccaatgataagaaaggcagaaatgaaacagcaaccttggatcttatcttatgaggactggaacgtagataatagtttatcttcaggctttaagggaaaagctcaaattggaaaaggtatgtggc

SEQ ID NO: 237731 - DNA, 913 bp, Unknown
  Bacterial polypeptide expressing nucleotide sequence isolated from the Sargasso Sea
tctgaatcctaagaccattgcgctgattgaatcccttcacgataattttgaaaatcaaagaaggaagttgcttgaggatagagaaatcttgcaaaaagaattggacgatggaaaattcccaaacttcttgacccaaaccaaagacatcagggaaagcaattatgtggtttcgcccataccagaagatcttcaggatcgcagggttgagatcacaggaccaccagatcgaaagatggtcatcaatgctttgaactctcccgttaagacttttatgtgtgattttgaggattcttgctcaccgacatggaagaacattattcaaggtcatgtaaatgttcgagatgcagtagaggagagcattgaatttacaagagaatcggatagcaaggtttacagacttaatgatgagattgcaacactgattatcagaccaagaggctggcatctcaacgaaaagcatttaacgatcaacgatcagcccatatcagcatcgctttttgattttgctgtttacctttcaaataactatgaagccctttcaaaaaaaggcacaggaccttatttttatcttccgaagcttgaaaatcatcttgaggcgagactctggaacgatgttttcgtgcatgctcagaattttttaaatattgatcgtggcacaatcaaggccacagttttgattgaaacaataactgctgcttttgaaatggatgagattatcttcgagctaaaagaacattcggccgggcttaattgtggtcgatgggattatatatttagctttataaagaaatttagaaatcatcaaaattttctattaccaaacagaaccgaggtaacaatggagcggcattttctaaaaagctatgtcgacttgcttattcgcacatgccataaaagaaatgtacatgcgatg

SEQ ID NO: 237732 - DNA, 859 bp, Unknown
  Bacterial polypeptide expressing nucleotide sequence isolated from the Sargasso Sea
aattacgcgtagacttaatcaagatataaaatatacaaataatgagggaaaggaatctattttaaaaggaaggtcattaatgttaaatagaaatgttggacacttaatgactaacccaagtgtattagatagttctggaaatgaagttggagaaggattaatagatgcaatgtgtaccactcttatcgctatgcatgacttgtctaaatctgaaggtatgagaaattcaataaaagggtcagtatatatagtaaaacctaaaatgcatggccctgaagaagttgcttttactgaagaaattttttctcatgttgaaaatattctaggtttgccattaaacacggtcaagattggtattatggatgaggaaagaagaactagcgcaaatttaaaagaatgtattaggtctgcaaaatcaagagtagcattcattaatactggttttttagatagaactggtgatgaaatccatacttctatggaggcagggccatttatgagaaaaggagatatgaagtctactgactggatcaaatcttatgaagaaaggaatgtagatattggtttggattgcggattacagggaaaagctcaaattggtaaaggtatgtgggcaatgccagatttaatgcaagatatgcttgagcaaaaaatagcacatccaaaagctggagcaaattgtgcatgggtacctagccctactgcggcaacattgcatgctatgcattatcatattgtaaatgtttttgatgttcaaaatgatattattaaagttggttcaagaggaactttaaatgacttattaaaaatacctgtagctgatggacataattggtctaatgaagatattaagcaagaa

SEQ ID NO: 237733 - DNA, 835 bp, Unknown
  Bacterial polypeptide expressing nucleotide sequence isolated from the Sargasso Sea
gatggtgcggataaagttaattgttatagaaactggttaggtttgatgaagggagatttaaaaactgaggtcgtaaagaatggaaaaaaatttattcgaaaacttaaccctgatagaaattatacatcacccgatggatctaaaatagtcttgcatggacgatcgttgttacttaacagaaatgttggtcatttaatgaataatcctgcgataattttaaatgatggatcagaaattcctgagggtataatggatgcatttgtttcaactctgtgtgcaatacacgattttaaaaacaaaaaaaattctaggacaaattccgtttatatagttaaaccaaaaatgcacggtcctgatgaagttggattcactaatgacatattcaaaaaagttgaggaagttttaggtttaaaagagtttactattaaagttggaataatggatgaagaaagaagaacaactgtgaatttaaaagaatgtattagaaaagttaaggaaagagttgttttcatcaatactggttttttagatagaactggtgatgaaatgcatacctcttttgaagctggaccaatgatttttaagggtgatatgaaaaaatctaattggttaaatacttatgaaaattggaatgttgacattggtttatcttgcggattttctggtaaagcccagattggaaaaggaatgtgggctatgcccgataaaatgtctgagatgattgaacaaaaaataggtcatcctaaatctggtgctaattgtgcatgggttccttctccgacagccgcaacgcttcatgcaactcactatcacaaattagatgtatttaaaaaac

SEQ ID NO: 237734 - DNA, 880 bp, Unknown
  Bacterial polypeptide expressing nucleotide sequence isolated from the Sargasso Sea
agtggagaagaaatacccgaaggctttcttgatgcaatgatcacatctcttgcagctctccatgatatacaaggtaaaacgaaatattccaacagtagaactaaaagtatgtatatcgttaaacctaaaatgcatggccctgaagaagttgcctttacagtaaaattgtttgaaagaatagaagaagcactagggttacaaaaaaataccctcaaaattggaattatggatgaagaaagaagaacaacggttaaccttaagcaatgtatatatgaagcacgagaacgagtaatatttattaatactgggtttttagaccgtacaggtgatgaaatacatactagtatggaagcaggaccagttttgccaaaaggtgaaatacgaaatcaaccctggataaaagcttacgaagatcaaaacgttgacatagggattgaatcaggccttgttggcacagctcaaattggtaaaggcatgtgggctatgcccgatgaaatgaaagccatgatgtcagcaaaaatatctcatcctgaatctggtgctaatacagcatgggtaccttctcctactgctgcagcactccatgcaattcattatcatatggttaatgtaaatcaaattcaaaaagatatttcaacaagagattctatcaatttgaatgatatattaactccaccccttatggataagaaactttctgaacaagaaatccttcaagaattagaaaataatgctcaaggaatactaggttatgtctcaagatgggtcggccaaggaattggttgttcaaaaattcctgacataaataatattggcttaatggaagacagagccacacttagaatttctagccaacaccatttcgaactggttatatcac

SEQ ID NO: 237735 - DNA, 895 bp, Unknown
  Bacterial polypeptide expressing nucleotide sequence isolated from the Sargasso Sea
gatggaacaagctggaaaaatattgctggtttaaaagttgttaataaagatctaataatatctaaagatgattatgaatataaattaaaggataaagataaatttgttggacacagaggagacgcgaaccaacctagcgcaatcatattaaaaaataataacctgcattttgaaataataatcaatccaaaagcatttagtgctgctcatgatatagcaggtataagtgatgttattgcagaatcagctgtttcaactatttgtgataatgaagacagtgttgcagctgttgatgctgaggataaaattgtttgttataaaaattggttaggactaatgaaaggagatttgaagattcaatttgaaaaaaatggtaaaaaattagagagaaaacttaatcctgatagaagttacatttcaagagatggtaaggggttaaagctacacggtagaagtttgcttttaattagaaatgttggacatcttatgactaattctgcaataattttaaaagatggcagtgaaattccggaggggattatggatgctttttttacgactgcagctgcaatacaagatctcaagaaaaaaaagaactccagaaaaggttcaatatatattgttaaaccaaaaatgcatggacctgaagagactgcatttacagacacaattttttcaaaagttgaagaattatttggtttagagaagtacacctgtaaaattggaataatggatgaagagagaagaacttcttcaaatctaaaagaatgtattagaacactaaagaatagagtgttttttattaatactggatttttagataggactggtgatgaaatgcacacatctatggaagcaggaccaatgatcaaaaaaggagatatgaagtcatcaa

SEQ ID NO: 237736 - DNA, 964 bp, Unknown
  Bacterial polypeptide expressing nucleotide sequence isolated from the Sargasso Sea
acctcaactagtcgttccaataatgaatgcaagatacactctcaatgcagctaatgctagatgggtgagtttatatgatagtttatatggtacaaacattattgagtcagaagaagggggaagtgaaagatacgacccaaatagaggacaggaagtaataaagtatgtcagagagttttttgataaatatattccaattaatgggactagttggaaaaatatttctgcacttaaagtaaaaaataaaagtcttataattttaaaggaagataaagagtataaacttaaagatgaaaataaatttgtgggtcatagaggtgatataaataagccaacagcaataatcataaaaaataataacctgcattttgaaattattattaatccaaaagcatttagcgctgctcatgatatagccggaataagtgatgtgatagcagagtctgcggtttctacaatttgtgacaatgaagatagtgttgctgcagttgatgctgaagacaaagtagcatgttacagaaactggctaggtctaatgaggggggatctaaaagtacaattcgaaaaaaatggaaaaaaattagagagaaaacttaatcctgatagaagctacatttctaaagaaggaaaaggtcttaaattacatggaagaagtttgctcttaataagaaatgtaggccacttaatgaccaattcatcaataattttaaatgatggtagcgaggtgccagagggaataatggatgcttttataacaaccactgctgcattacacgattttaaaaagaagaagaattcaaggactggatcaatctacattgtaaaaccaaaaatgcatggaccagatgaaacagcatttaccgacttaattttttccaaagttgaggaattactcggcttacaaaagtatacttgcaaaattggtattatggatgaagaaagaagaacttcttcaaatctaaag

SEQ ID NO: 237737 - DNA, 889 bp, Unknown
  Bacterial polypeptide expressing nucleotide sequence isolated from the Sargasso Sea
aaaaatggaaagaaatttataagaaaacttaaccccgatagaacttttacgaaatttgatgggactaacattaccttaagaggtagagcactcatgttaaatagaaatgttgggcatctaatgacaaactcatcaattacattaagtgatggaagtgaaatacctgaaggaattatggatgctttcatttccactttgtgtgctttacatgattttaaaagtaaacaaaattcaattaagggatccatgtatatagtaaagcctaaaatgcacggccctgaggaagtggaatttacaaataacttatttgaggaagtagagactgccttgggtcttaagaaatatacaatcaaagttggaatcatggacgaggaaagaagaacaactgttaatttaaaagaatgtataagaaaagttcaagatagaatagtttttataaatacaggttttcttgacagaactggagacgagatgcatacgtcatttgaagctggtccaatgatatttaaaggcgaaatgaaaaaatctaactggctaaaagcttatgaggacctaaatgtagacattggtttagcttgtggattttctggaatagctcagataggtaaaggtatgtgggcaatgccagacaaaatggcggatatgatgactcaaaagagatctcatccggagtctggagctaactgcgcatgggtaccatctcctactgctgctactctacattcgacacactatcatcacgttaatgtttttgaaaaacataaatcactatcaggtcaaaaaagatctgatttagactcattgctagatattccagtagcagatagaccgaattggcaaattgaaaaaattaatagtgagcttgaaataatgctcaaagcattttagg

SEQ ID NO: 237738 - DNA, 811 bp, Unknown
  Bacterial polypeptide expressing nucleotide sequence isolated from the Sargasso Sea
actgggttttttagatagaactggtgacgaaatacatacttctatgcaagcagggtctttcctaaaaaaaactgatatgaaaaatgccaattggatatcagcatatgaaaatagaaacgtatatataggattacaatgtggattaaaaggtagagctcaaattggtaaaggtatgtgggcaatgccagatttaatgaatgaaatgataaaacaaaaaattgctcatccaaaatctggagctaattgtgcttgggtacccagtccaacagctgccacattacatgctcttcattatcaccaagtaaatgttagagaaattcaagaagttattaatgatagtggtttaactggttcaattgatgatttattaacattaccattacttaaaggaaaaaatttatcagatgaagaaattgctcgtgaagtagaaaataatacacaaggaattttaggatatgttgttcgttggattgatcaagggataggttgttcaaaagttcctgatatcaacaacgttggtttaatggaagatagggctacttgtcgaatctcttctcaagctcttgtaaactggattgagcatggcattatatctaaagatcaagtattgaaatcgctagtaaaaatggcaaaagtagttgataaacaaaatgcttatgacaaaaactacattccgatgaccaataacaataaatctattgcttttgaagcagctaaggaacttatttttgatggagtcaatcaaccatctggttatacagaacctattttacatcgcaaaagattagaatttaaattaaaaaataattaa

SEQ ID NO: 237739 - DNA, 831 bp, Unknown
  Bacterial polypeptide expressing nucleotide sequence isolated from the Sargasso Sea
ttacaattagtacaaaaaatgttgataaagaaatttccagtatatgtgctccccagcttgtttgtcccatatcaaatgctagattcatattaaatgctgcaaacgcaagatgggtaagtttatatgatagcttatatggtagtaatattatagagtctgaagagtctggaagtgaaagatatgatccggagagaggtctagaggtaataaaatatactaaagaatttctagataaatatttctctatagagcctgatagttggaaaaatgttaataagattgaaattaatggtaaagatttaaatttatatacatataaaaataaatctaaacttaaaaataaagagaaatttgttgggttcagaggaaatccagaaaagccaggagctataattttaaaaaataataacctacatatcgaaattataattaatcctaacgcatttagtgcaaaaagtgactcggctggaataagtgatattatagttgaatctgctgttacaacaatttgtgatcatgaggactcagttgctgcagttgatgctgaagataaagtattgggatatagaaattggttaggtcttatgaaaggtaatttacagaccagctttgtaaaatcaggtaaaatttatgtaagaaagctaaacccagaccgcaaatatatatcgccaaatagagaagaatttaggctaaatggaagatcattgttattatgcagaaatgtaggtcatctaatgactaattctgcaatacttttaaaagatgggtctgaaatacccgaaggaataatggactcgtttattacagttgcgtgtgcacttcatgattaaa

SEQ ID NO: 237740 - DNA, 859 bp, Unknown
  Bacterial polypeptide expressing nucleotide sequence isolated from the Sargasso Sea
cctgaaactgagggtgcggaaagaggaatttcctacaatcccctgagaggtgagaaggtttttaaattcgttcatggcatcctggacgcctcggcccctctggcagagggttcgttcagtaggattacaggattttccgtggatcaaggcagactgaggatgacattggagggaggtcacgatacaggacttcagaatccagaacagttcgcaggcttcaatggttctcctgaaaatccgaactccatcctgctcaagaaaaacggactgcacctggatatccaactggaccgcaatcattctgtcggcaaggaccatccagcaggaatctgtgacatcctcctggaatccgcagtcaccaccattcaggattgcgaggattcagtggctgccgtcgatgcttccgacaaggtccatgtctaccgcaactggctcggactgatgaaaggtgatctttcggctaaacttgataaaggcgggaaaatgatcacccgcaccctcaatcctgaccggaaatacaagacacccgaaggatcagaaatggtgctccctggacgttcccttatgctggttcgaaatgttggccacctgatgaccaccgatgccgttttggatgagcaaggaaatgaaatatttgaaggtatgctggatggaatgatgaccgcactcattagcctctatgagatacgaggtttgggaacattccaaaattcccgcagcggaagcatgtatatcgtcaaacccaagatgcacggtcccgaggaagtagcacttacagtggaactctttggaagaattgaaaaaacactcggcatggaagacggtacccttaaaattggaatcaggatgaagaacgacg

SEQ ID NO: 237741 - DNA, 789 bp, Unknown
  Bacterial polypeptide expressing nucleotide sequence isolated from the Sargasso Sea
atagaactggtgatgagatgcatacctcaatggaagctggaccaatgatcaaaaaaggagatatgaaagagtctaaatggattaaaacctatgagaacaataacgtagatataggcttaaaatgtggtttttcaggaattgctcaaataggtaaaggaatgtgggccatgccagacaaaatgaatgaaatgatggaacaaaaaattggacatgtgaatgctggtgcaaattgtgcttgggttccttcaccaactgctgctgcattgcatgtcatgcactatcatgaagtaaatgtttttgaaaagcaaaaagttatattaaaaagagagccgtcaaagttatctgatcttcttactattccaattgcggatcgtcctaattggtctgtcgatgaaattaatactgaaatttctaattctgctcaaactattttaggttatgtagtcagatggattaatcaaggtataggttgttccaaagtaccagatataaatgatattggattaatggaagatagagcaaccttaagaatttcatctcaacatattgccaattggcttcatcatggcttatgttcgaatagacaggttcttgaaattttaaaaaaaatggcaaaagttgttgataaacaaaataaagacgactctagctacgaaagtatgtctccagagtatgataaatctattgcttttaaagcagcatgtgaattaatctttcatggaaaatcacagccttctggctatacagaacctctcttgcacttaaacagattaattaaaaaaagttaat

SEQ ID NO: 237742 - DNA, 824 bp, Unknown
  Bacterial polypeptide expressing nucleotide sequence isolated from the Sargasso Sea
gattctatattcaaatgaagataaagagatccctgaaggaattatggatgcaatgttcaccatttgtattgcaatgcatgatttgaagcaaaaaggtaaatataaaaattccagagaaggaagtgtttatattgttaaaccaaaaatgcatggaccagaagaagttagatttacttgtgatttattttctaggatagaagaaaaactaaatcttaaacaaaacacagcaaaaataggaatcatggatgaagagagaagaactactatcaatcttaaggagtgcataagagaagctaaagaaagaatcatatttattaatacgggcttcctagacagaacaagagatgagattcacacaagtatggaagcaggacctatggtacccaagggcgatatgaagtcgcaaccgtggatcaattcgtatgaagacagcaacgtatatataggcttagaaacaggcttcaatggaaaagcacaaattggtaaaggtatgtgggccatgccagatgaaatgttagaaatgatcaaaaataaacaagtgcatcctgaatcaggcgctaattgtgcatgggttccttcaccaactgctgctactttgcatgctattcattatcatgagatttctgtaaatgaggaacaaaaaaaactagaaactagaaaaagagcatccttagacgatatcttaacgataccgttactaggagatgttaattcattaactgaggatcaaataaaatcggagatagaaaataatgctcaaggcatcctcggatatgtggttaggtggatagatcaaggggtagggtgttcaaggtaccagacat

SEQ ID NO: 237743 - DNA, 827 bp, Unknown
  Bacterial polypeptide expressing nucleotide sequence isolated from the Sargasso Sea
aaataactttgaagcactatcaaaaaaaggcacagggccttatttttatcttcccaagcttgaaaatcacctagaggcgagactttggaacgatgttttcttgcatgctcaagattttctgaatatcaatcgaggaaccattaaagcaactgttcttattgagacaatcacagctgcatttgaaatggatgagattatctttgagcttaaagatcattctgccggccttaattgtggccgctgggattatatattcagctttataaagaaatttagaaaccatgaagaatttcttttaccaaatcgaacagaggtaacaatggagcggcatttcttaaaaagttatgtcgatttacttatccaaacatgtcacaaaagaaatgttcatgcgatgggtggaatggcagctcaaattccaatcaggggtaatgaggaacaaaaccagattgccatggataaagttgcttcagataaatcaagagaggcaaatgctggccatgatggaacatggattgcacatcctggattatctgatgtagcgatgaatgcattcaatcaagcaatgggaacatctgcgaatcaaatatctaataaaagaaatgatgtttcagtatgcgctcaagatctcattaaggttccaaatggaagcatcacagaggaaggtttgaggcaaaacatatcaataggcattcaatacattgaggcatggctatcacgcaatggatgtgtaccaatacataatctaatggaagatgctgctacggcagagatatctcgctcccaaatatggcagtggattcatcatgctgcaaaaacaacagacacca

SEQ ID NO: 237744 - DNA, 903 bp, Unknown
  Bacterial polypeptide expressing nucleotide sequence isolated from the Sargasso Sea
attgcatggtcgagcattaatgttgaatagaaatgttggtcatcttatgacaaactcttctgtgctgcttcaagacaaatcagaaattcctgaaggaataatggatgcttttattactgttgccgcatcaatacatgacttcaaaagaaaaggtaactctagaactgaatcagtttatattgttaaaccaaaaatgcatggtcccgatgaagttgccttcaccaacaaaatttttgaaaaggttgaagatgttttttcgttaaaaagaaatactattaaaattggtattatggatgaagaacgtagaacaactgtaaatttaaaagaatgtattagagtagcaaaaaatagagttgtatttattaatacaggttttttagacagaacaggtgatgaaattcacacatcttttttagcaggtccaatgattaaaaaaggtgatatgaaaaaatctgcatggatttcagcttatgaaaattggaatgtggatattggactatcctgtggtttttctggagttgcacaaattggaaaaggaatgtgggcaatgcctgataaaatggccgatatgatggtgcaaaaaattaatcacccaaaagctggtgcaaattgtgcctgggttccatcaccaactgctgcaacactgcatgctatgcattatcacaaaatcaatatatttgaagagcaaaaaaagatttcatcacgagctaaagcaaaattatcggatatcttaaaaattcctatcgcagatcgtcctaattggtctgttgaagatataaatagagagctagaaaataatgcacaaagtattttaggctatgttgtaagatggattgaccaaggagttgggtgctcgaaagttcctgatatcaataacattggtttaatggaagatagggcaac

SEQ ID NO: 237745 - DNA, 727 bp, Unknown
  Bacterial polypeptide expressing nucleotide sequence isolated from the Sargasso Sea
tatgaaagagtctaaatggattaaaacttatgaggataataatgtagatataggcttaaaatgtggattttcaggggttgctcaaataggtaaaggaatgtgggctatgcctgacaaaatgaacgaaatgatggaacaaaaaattgggcatgtgaatgcaggcgcaaattgtgcttgggttccttctccaactgccgctgcattacatgttatgcactatcatgaagtaaatgtttttgaaaaacaaaaagcaatattaaaaagagagccatcaaaattatctgatcttcttactattccaatagcagatcgtcctaattggtctcttgatgaaattaatgctgaaatttcaaattctgcccaaactattttgggttatgtagtcagatggattgatcagggtataggttgttccaaagttccagatataaataatattggattaatggaagatagagcaaccttaagaatttcatctcaacatattgctaattggcttcatcatggcttgtgttcgaatagacaggttcttgaaattttaaaaaaaatggcaaaagttgtagataaacagaataaagacgactctaactacgaaagcatgtcaccagagtatgataaatctatagcttttaaagcagcatgtgaattaatctttcacggaaaatcgcagccttctggctatacagaacctctcttacacttaaacagattaattaaaaaaagttag

SEQ ID NO: 237746 - DNA, 676 bp, Unknown
  Bacterial polypeptide expressing nucleotide sequence isolated from the Sargasso Sea
tcagtttacatcgtaaaaccaaaaatgcacggaccagaagaagtttcttttacaaattctttatttgatagagtagaacaggttttaggaataaaaaaattttcaattaaagtagggataatggatgaagaaagaagaacaactgtaaatttgaaagaatgtattcgtcaagtgaaaaatagaatagtttttattaatacaggttttttagaccgtactggcgatgaaatgcatacctcttttgaagctgggccaatgatttttaaaggtgaaatgaaaaaatctacatggttaaatgcatatgaaaactggaatgttgatgttggtttaaaatgtggattttctggaaaggctcaaattggtaagggtatgtgggctatgcctgaccaaatgaatagtatgatggaacaaaagattaatcatccaagatctggagcaaattgtgcttgggtcccttcaccaactgctgcaactttacattctatacattaccatcaaataaatgtttttgatgaacaaagtaaaattgtgtctagaagtagtgcaaaagttaatgatattttagatattccaatagctgacagacccaattggccaatagaagatatcaatcgtgaattagaaaataatgcacaaggaattttaggatatgttgttaggtgggttgatcaaggta

SEQ ID NO: 237747 - DNA, 889 bp, Unknown
  Bacterial polypeptide expressing nucleotide sequence isolated from the Sargasso Sea
attggtagtaaaatttatcctaaagaaataatcttaagtcacaataatttttgtattagattaaaactagataaaacgcacccagttggcaaatcggatagttttcatctttgtgatgtcattgttgagtcagcaccctcagttattatggattgtgaagattcaattgtttctgttgatactaatgataaaatttcaactttcagaaattggcttgggttattagatgggtcaattaaagttgaaatctataaagataaagtttcttctgtaagaaaactttctaaaaatatatcttataaaaagccagacggtaaaactcatttcatgaagggattatcactacttttaataaggaatgttgggcaccttatgagttcatcttcaattatcgatgaaaataaaaatgggattggtgaaggaattatagacactcttcttactgcactctgttttttaaagacgataaatatttccaataactctgaatataaatcactttatatagtaaaacccaaaatgcatggtccggaggaagtgaaattttcaattgatacatttacaaaaattgaggaacttttaacaattccaaaaaatactattaaaattggaataatggacgaagaaagaagaacaactctaaacttaaaagaatgtattagagctgctaaagatagagttttttttataaatactggcttccttgacagaacaggagatgaaattcatacctctatggaagcaggtattatgattaaaaaaactgaaatgaagaatgtaggctggataaaagcatatgaaaattggaatgtagaaattggtttagattgtggtttttctggattagcacaaattggaaaaggtatgtgggctatgcctgatatgatgt

SEQ ID NO: 237748 - DNA, 897 bp, Unknown
  Bacterial polypeptide expressing nucleotide sequence isolated from the Sargasso Sea
tatgggtgaatataaaaaattttttaaacaaataggttatttaaaagatgagggacctaattttaagattgaaacaaaaaatgtagatgatgagattgccaagatagcaggacctcaacttgtggtaccaattatgaatgctagatatactctaaatgctgcaaatgcacgctgggttagtttgtatgatagcttatatggaacagacataattgagtctgaagagggaggtagcgaaagatatgatccaaatagaggtcaagaagtaataaaatatgtaagagagttctttgataaatatattcctattaatggcacaagctggaaaaatattgcaagtttaaaaattaaaaagaataaattgataattacaaaagataataatgaatataaacttgttgatgaaaataagttcatgggtcatagaggagatgtaaacaaacctgaagcaataatattaaaaaataacaatcttcattttgaaatcataattaacccaagagcttttagtgctgcacatgatattgctggaataagtgatgtaatagcagaatctgctatatcaactatctgtgataatgaagatagtgttgccgcagttgatgctgaggataaagttgtctgttatagaaattggttaggtttaatgaagggtgacttaaaaatacaatttgaaaaaaatggtaaaatcttagaaagaaaattaaatcctgataggagttttatttctaaagatggtaagggtttaaaactacatggtcgtagtcttcttctgattaggaatgttggacatcttatgactaatccctcaatattattaaatgatggaagtgaagtgcctgaaggaataatggatgcattcattactactgcagccgcattgcatgatttaaaaaa

SEQ ID NO: 237749 - DNA, 919 bp, Unknown
  Bacterial polypeptide expressing nucleotide sequence isolated from the Sargasso Sea
ttcagaggtactgttagttaacaacaatctccatttagaaattcaaatagatcctaatcatccagttggtaagactgataaagcaaatattaaagatattgttttggagtctgcagtttcaacaatccaagattgtgaggattcagttgccgcagttgatgctgaagacaaagtaattgtctatagaaactggcttggtttgatgaaaggagatctttctgaaacatttgaaaaaaatggaaaacaactgacaagagtcttaaatgaagatagagaatatttagatactaatggaaattctttttctcttcctggaagaagtcttttacttgttaggaatgttggccatctaatgcagaatccttcagtaatattggacaatggcgaagagatttttgaaggaatcttagatgctatgtttaccatatgtatcgccttatttgatctaaatcagttaaatacattgtcgaactcaaggaacaaaagtatgtatattgtgaaaccaaaaatgcatggttctgatgaggtagctttcacatgtgatttatttgatgcagttgaacgattatttaatctagaaaaaaatactgtaaaagttggaattatggatgaagagagacgaaccactattaatctaaaggcctgtatcgaaaaagctaaagaaagaataatttttataaatactggttttttggacagaacaggagatgaaatacatacgagcatggaagcaggtgctatggttcctaagtccgatatgaaagctcaatcatggataaacgcttatgaagattggaatgtagatataggtataagctgcggattaagcggcaaagcacagatcggaaaaggaatgtgggcaatgccagatgagatgaaagatatggtagagactaaaatagcccacccattatctggt

SEQ ID NO: 237750 - DNA, 868 bp, Unknown
  Bacterial polypeptide expressing nucleotide sequence isolated from the Sargasso Sea
agaaaatgaagatctaataatattaaaagataaaaatgaatataaattaaaagataagaataaatttataggacatagaggagatgttaataaacctagtgcagtaattattaaaaacaataatttacattttgagattattataaatccaaaggcatttagtgcagctcatgacatagctggaattagtgacgttataattgagtctgctatttcaacaatttgcgataatgaagatagtgtagcggctgtggattctgaggataaaattatttgctatcgaaattggcttggattaatgaaaggtgaccttaaaattcaatttgaaaaaaatggaaaaaccttagaaagaaaacttaaccccaatagaagttatatttcaaaaaaaggaaaaggtttaaaacttcatggaagaagtcttttacttataagaaatgttggccatctgatgacaaactcgtctattctcttaaaagataactcagaagtccctgaaggtattatggatgcttttatcactactgcggcagctttacatgatttaaaaagaaaaggtaattcaaaagcagggtccatttatattgtcaaaccaaaaatgcatggtccagatgaaacagcatttacagacttaatttttactgaagttgaaaaggttctaaacattaaaaataatacatgtaaaattggcatcatggatgaagagagaagaacttctgtaaatcttaaagaatgtattagatctcttaaaaatagagttttttttattaacactggatttttggatagaactggagatgagatgcacacctcaatggaagcgggtcccatgataaaaaagggtgatatgaaatcatccaaatgggattga

SEQ ID NO: 237751 - DNA, 768 bp, Unknown
  Bacterial polypeptide expressing nucleotide sequence isolated from the Sargasso Sea
tttgcacttagatgttttatttgatcaaaaaggtaatttagaagttaataatccagatgggaatcaagatccactcaaaatacatgatatctttttagagtcagcaattactacaatatgcgatcatgaggatagtgttgccgcagtagatgcagaagataaagttttaggttacagaaattggctttctttaatgaaagggaacttaatctcaaaatttaggaaaaataataaaactataataagaaaattaaaattagatagagaatatttatctccaaaaggtaaaaagtttaaactacatggaagatccttattgcttaacaggaacgttgggcacctaatgactaatccagcaattcttctaaaggatggatcagaatgtccagaaggaattttagacgcttttgttacatctgcagcatgtctccatgattttaaaagaaaaggaaattctagaaccaattcaatttatatcgttaaaccaaaaatgcatggtcctgatgaatgtgcatttacaaataaaatttttgaaaaagttgaaaaagttttaaagctcaaaaagaatcaaatcttatgtggaattatggatgaagaaagaagaacaactattaatttaaaagaatgtgttagagttttaaaaaaaagagtatttttcatcaatactggttttcttgatagaactggtgatgaaattcatacgtcaatggaagctggtccaatgataaaaaaaggagatatgaaatcctctaaatggattagagcata

SEQ ID NO: 237752 - DNA, 767 bp, Unknown
  Bacterial polypeptide expressing nucleotide sequence isolated from the Sargasso Sea
ttaaggacaggaagcatctacattgtaaaacctaagatgcatggtcctgaagaagttcagtttacttgtgatttatttgctgctgttgagcaagcacttgatctagatccattaaccgtcaaggttggaattatggatgaagaaagaagaaccactgtcaatctgaaagaatgtattagagcggctaaagatagagtgattttcattaatacaggatttcttgatagaactggtgatgaaattcataccagcatggaagcgggaccaatgatccctaaagctcaaatgaaacaacaaccttggatcaccgcatatgaagattggaatgtagatgttggattagaatctggattcaaaggaaaagcacagattggcaaaggtatgtgggcgatgcctgacgagatgttaggaatgtatgaaaataaatctatgcatcctgaagcaggagctaattgtgcttgggttccttcacctacagctgcaacattacatgctattcattatcatcaagttttagttagcgaaagacaggaaaccattaagtctagagaaaaagctgatcttaacgacattcttactattcctttgctagaagatgctgattcgttaagtgaaaaggatatacaagaagagttagacaataactgtcaaggaattttaggatatgtagttagatgggtagatttaggtgtaggctgttctaaggtacccgatatcaacaatgtaggtctgatggaagatagggcaacttgtagaatttctagtca

SEQ ID NO: 237753 - DNA, 763 bp, Unknown
  Bacterial polypeptide expressing nucleotide sequence isolated from the Sargasso Sea
aaaaaatatacaataaaaattggaataatggatgaagaaagaagaacaacagtaaacctaaaagaatgcattagagctgtaaaaaatagagtagtttttattaacactggatttttagatcgcacaggtgatgaaatgcacacctccatggaggcaggacctatgattaaaaaaggagatatgaaatcttctaaatggataagcgcatatgaaaataataatgttggtgtgggattagcgtgcggtttttctggtattgcccaaattggaaaaggaatgtgggctgccccagacaaaatggcagatatgatgtctcaaaaaattaatcatcctaaatctggagctaattgtgcttgggttccatcaccaactgcagctactcttcatgcattacattatcatcaagtagatgttttttctaaacagaaagaattaaaaaacaaaacccatgtaaaaatctctgacgacatacttaccattccaactgcaggcaggccaaactggtctatagatgaaattaataaagaactagaaaataatgcacagggtattttaggttatgttgtaagatggattgatcaaggagttggatgttcaaaggtgcctgatattaataatattggtttaatggaagacagggcaactttacgaatttcatcacaacatattgctaattggcttcatcataaaatttgcagcaaagaacaagtgcttaatacaatgaaaaaaaaggcaaaaattgttgataaacagaatattagag

SEQ ID NO: 237754 - DNA, 800 bp, Unknown
  Bacterial polypeptide expressing nucleotide sequence isolated from the Sargasso Sea
tttagacagaacaggcgatgaaattcatacctcgttttatgccggaccaatgataaaaaaaggtgatatgaaaaaatctaattggattttagcatatgaaaattggaacgtagatatagggttatcctgtggattttctggtgtagcacaaataggtaaaggcatgtgggcaatgccggataaaatgtatgatatgattgaacaaaaaatcaatcatccgaaagctggagcaaattgtgcttgggttccctcaccaaccgctgccaccttacactctatacattatcatcaaataaatatatttgatcagcaaaaaaaaatttcatctcgatcgcctgcaaaattatcggaaatattaatacttccaactattcaacgtcctaattggccagaacaagatgttattaaagaattagaaaataatgcacaaggaattttgggttacgtagtaaggtggattgatcagggagtgggttgttcaaaagttcctgatataaataatgtcggattaatggaagacagagcaactttacgtatatcttcccaacacatagcaaattggttacatcataaaatctgttctgaggaaacggtgatgcaagtaatgaaaaaaatggcatcagtggttgataaacaaaatataaatgatcctgactacaaaccaatgtctaaaaatttcgattcatccatagctttccaagcggcttgtgatcttgtctttaaaggtggaagccagccatctggttatactgaaccaatattacataaaagaagagttgaaaaaaaaactagtcactaac

SEQ ID NO: 237755 - DNA, 808 bp, Unknown
  Bacterial polypeptide expressing nucleotide sequence isolated from the Sargasso Sea
catttaatgacaaacccatccattattttagatgatggaaatgaagtaccagaaggtatcttagatgcatttataactacagctgcagcacttcatgatttaaagaaaaaaaataattcacgaactggatctgtatatattgttaaacctaaaatgcatggaccagacgaaacagcatttacaaatttaattttttcaaaagtagaagaagttttaggattaaaaaaatatacatgcaaaattggaataatggatgaagaaaggagaacctcttctaatttgaaagagtgtattaggtccttaaaaaatagagtattttttataaatacaggatttttagatagaactggtgacgaaatgcatacatcaatgatggcaggaccaatgatcaaaaagggagaaatgaagtcatcaaaatggattacagcttatgaaaatagaaatgtggatattggattaaaatgtggtttttctggtaaagctcaaattggtaaaggtatgtgggctatgcctgataaaatgaaagatatgatggaacaaaaaacaggccacttaaaagctggtgcaaattgtgcttgggtaccatctccaactgctgctgctcttcacgctctacattatcatgaaataaatatttttgatgaacagaaaaaaattttaaataggaatcaggcaaaaattgatgatcttctaacaataccagtagcagatagaactaattggtctgttgaagaaataaataatgaaataagtaattcagcccaaacattacttggatatgtggtgagatgggttgaccaaggaatag

SEQ ID NO: 237756 - DNA, 808 bp, Unknown
  Bacterial polypeptide expressing nucleotide sequence isolated from the Sargasso Sea
aacttaaaagagtgtgtaagaactcttaaaaaaagggtttgttttataaataccggctttttagatagaaccggcgacgaaattcatacatcaatggaaatgggaccaatggttttaaagaatgatatgaaatcaactaaatggttgttggcttatgaggataataatgtagatgttggcttatcttgtggtttttcaggtaaggcacaaataggaaagggtatgtgggcaatgccggacctattaaaaaatatgatgcatcaaaaaattttacatcctaagtctggtgcaaattgtgcttgggtaccttcaccaacagctgccggattacacgtacttcattatcatgagattgatgtattctctaagcataaagaaattaaaaaaagaaagcatgcgaaattagatgatttacttgaaatacctataaaatttaaacacaattggtctaaagaccaaatatcaaaagaacttagaaataatgcccaaggcatacttggttatgtagttagatggattgatcaatctgttggttgttcaaaagttcctgatataaatggtatcgggctaatggaagacagggcaacttgtagaattagcagtcagcatattgcaaactggttacatcacgggatttgcagtaaaaaacaagttctcgaaataatgaaaaaaatggcaaaagtagtagataatcaaaatttgaaagataaaagcatgcaagggcaagcaccttatcaacaaatggcaagtaattactatcaatctatagcttttaaaacatcatgtgatttaatttccacgggaaaaa

SEQ ID NO: 237757 - DNA, 843 bp, Unknown
  Bacterial polypeptide expressing nucleotide sequence isolated from the Sargasso Sea
aaagagtattttttatcaatacaggttttcttgatagaactggcgacgaaatacatacctctatggaaattggtccaatgataaagaaaggtgatatgaagtcatcaaaatggattggggcatatgaaaataataatgttgatgttggtttggcttgtggtttttctggaaaagcacaaattggaaaaggaatgtgggcaatgccagatttgttaaaagaaatgatggagcaaaaaatctctcatccaatttcaggtgccaattgtgcttgggtaccctcgccaactgcggcagcaatacatgttttgcattatcatgaagtaaatgttttttctattcataaaaaaataaaaaatagaaaaccagctaaattaaaagatcttcttacaataccaattgatactaagaaaaattggtctaaggaagaaattgagaaagaattaaaaaataatgctcaaggtattttgggttatgttgttagatgggttgatcaatctgtggggtgctcaaaagttcctgatataaatggaataggtttgatggaagacagagctacatgcagaataagtagtcaacatatagctaattggcttcatcacggtatatgcagtaaaaaacaagttttagaaattatgaagaaaatggctaaagtagttgattatcaaaacttaaaagatcgcggcatgaaagatcaagatccttatcagccaatggctggaaactttgaaagatcaattgctttcaaagcagcttgtgatttagtatttcatggaaagtttcaaccttctggatacactgaacctttgcttcattttaatagattgataaaaaagtcaatctgaa

SEQ ID NO: 237758 - DNA, 747 bp, Unknown
  Bacterial polypeptide expressing nucleotide sequence isolated from the Sargasso Sea
tcctatggttacaaaaagaagatatgaaaaaagaaaaatggatcagcgcatatgaagattggaatgttgatattggattagaaactggtttcaagtggaatgctcaaatagggaaaggtatgtgggcgatgccagatgagatgcttgatatgtataaatcaaaaaccatacatccaaaatctggtgcgaattgtgcatgggtaccctcaccaactgcggcgactcttcatgcaattcattatcatcaaatttttgtacaagatgaacaagataggatttcaaaaagagaaaaagctagcttagatgacattttatccatacctttaataacatcaaaaaatatgccaagtcgtcaggaaattcaaaaagaattagataacaatgctcagggtattcttggttatgttgttagatggatagatcagggagtaggttgttcaaaggtacctgatattaatgatattggtttaatggaagatagagctacatgtagaatctctagccaacatatatctaattggctatatcatggtctttgctcaaaagaacaagttattgatacgatgaagaagatggcaagaattgtagacatgcagaataaagatgatacaaattataggccgatggcaccttcctttgatggtatagcatttaaggcagcatgtgatctggctataaaaggcaaagatcaacctagtgggtacactgaacccattcttcatgaaatgagacttaaaagaaaataat

SEQ ID NO: 237759 - DNA, 851 bp, Unknown
  Bacterial polypeptide expressing nucleotide sequence isolated from the Sargasso Sea
gatgccgaggacaaaattattggggtatagaaattggctaggtttaatgaaaggtaatttaaaagtagaatttacaaaacaaagaaaaaaaatattaagaaaattaaattctgataaaaattatatttctcctgtgggaaaaaagtttaaactacacggaagaagtttattgcttaatagaaatgtcggtcaccttatgacaaatccagctattcttttaaaagatggaagtgaatgtccagagggtatactagatgcatttattacttcaacggcatgccttcatgattttaaaaataatggaaattctagaaccaactcaatctacatagtcaaaccaaaaatgcatggtcctgacgaatgtacatttactaacttaatttttgaaaaagttgaaaaagtcttaaatttaaaaagatatacaattaaatgtggaataatggatgaagaaagaagaactactctaaatctaaaagaatgcattagatccttaaaaaatagagtctttttcattaatacaggttttttagataggaccggtgatgaaattcatacctcaatggaagtcgggccaatggtaaaaaagggggacatgaaatcatcaaaatggattgccgcttatgaaaataacaacatagatgtaggtctagcttgtggttttttaggcaaatgccaaattggtaaaggaatgtatcctgcgcctgatttgatggccgtaatgatgaaacaaaaaatatcacatcctttagcgggagctaactgtgcatgggtgccctctccaacggctgccgcacttcatgtactccattatcatgatgttaatgtcttttctatacaaaaacaattattaa

SEQ ID NO: 237760 - DNA, 871 bp, Unknown
  Bacterial polypeptide expressing nucleotide sequence isolated from the Sargasso Sea
tattatggatgctgtcattactactctaatagcaacgtacgatttaaaaaacaggataacaaaaactcagaatacaaatctatttatatagtaaagccaaaaatgcatggtcctgaagaagtgcaatttactgatcaacttttttctgcagttgaaaaacttttagctctgccaaatagttctataaaaataggtattatggatgaagagagaagaacaagtgttaatttaaaagaatgtatacgtgcagcaaaatcaagagtggcttttattaatacaggatttttagatagaactggagatgaaatacacacttctatgcgagccggttcttttttaaaaaaagctgatatgaaaaacgctccatggatttcttcttatgaaaatagaaacgtacaaattggtttacaatgtggtctaaagggtaaagctcaaattggtaaaggtatgtgggcaatgccagatttaatggctgaaatgatgaaacaaaaaataggccaccctcaatctggagctaactgtgcttgggtaccaagtccaaccgctgctacattacatgcacttcattatcatgaagtaaatgttaaagaaattcaaaacagtattcttgaaaataaaaccactgactcactagatgatctactaactttacctttacttaaaggacaaaatttatcagaagacgaaataaatagagaagttgaaaataatactcaaagtattttaggttatgttgttcgctggattgatcaaggaataggctgctcaaaagttttagatataaataatattggtttaatggaagatagagatacatgtcgaatttcatctcaggctcttgcaaactggattgagcacggaattatatcaa

SEQ ID NO: 237761 - DNA, 397 bp, Unknown
  Bacterial polypeptide expressing nucleotide sequence isolated from the Sargasso Sea
gaaataaatttagaaatttcaaattcagcacaaacaatattaggttatgttgttcgatggatagatcaaggagttggttgctcaaaggttcccgatataaatgatgtaggcttaatggaagatagagcaactttaagaatttcttctcaacatattgcaaattggttacatcatggattatgttctaataaacaagtattagaaattatgaaaaaaatggctaaagtggttgatcaacaaaacaaaaatgatccaaattatatgaacatgtctccaaattatgataagtcaatagctttcaaaactgcttgtgaactaattttccaaggaagatcacagccttctggttacacggagccacttttacacttaaatagacttattaaaaaaaattaga

SEQ ID NO: 237762 - DNA, 404 bp, Unknown
  Bacterial polypeptide expressing nucleotide sequence isolated from the Sargasso Sea
ggaactagaaaataatgcgcaaggtatattaggttatgtagtaagatggattgaccaaggcgtcggttgttctaaagtgcctgatattaacaatgtaggtttgatggaagatagagcaactttacgaatttcatcacaacatattgccaattggctacatcatggaatttgcagcaaagaacaagtattaaaaactatgaaaaaaatggctaaaattgtcgatagtcaaaatattaaagatcccgctttaaaaggatacgctgcttatcgaaccatgtctgataattacgacaggtccattgcatttaaagctgcatgtgaattagtttttcatggaagaagccagccatctggttatacggaacctattcttcacttaaatagacttctaaaaaaaatctagt

SEQ ID NO: 237763 - DNA, 981 bp, Unknown
  Bacterial polypeptide expressing nucleotide sequence isolated from the Sargasso Sea
taaagaattgctcgatattagaaaaaaattacaaatggatatagataggtggcatttagataacaataaaaaagaatttaatcctgaagattataaatcatatcttaaaaaaattggctatttaaaaaaagaaggtcctgattttaatattaaaacagaaaatatagataatgaaatatcgaaaattgcaggccctcaacttgtagtccctataatgaatgctagatacgctttgaatgctgcaaatgcaagatggatgagtttatatgatagcttatatggaactgatattataacttcagaagagtcgagcagtgaaagatacgatcctgaaagaggagcacaagtaattgaatacacaaaaaactttttagacgaaaactttaaactaaaaaattcaagatggaaaaaagtaaataaaatatcaatcaaagatcataaattagaattatatttagataaaggtaatgcagagctagaaagtgatgaaaaatatattggatatagacttgaaaataaaaaagtttcagcagtaattttaaaaaataataatttacatatcgaaattttaattaatccaaacgcatttagcgctaaaagagatccagctggtatttcagatataatagttgagtcagcaatttcaactatatgtgatcacgaagactctgtggccgctgttgacgcagaggataaaattattggatatagaaactggctaggtcttatgaaaaaagatcttaaatctgaatttgaaaaaaatggtaaaaagttaattagaaaacttaatacaaatagaaattatattagcaaacttggtaaaaaggaaaatcttcatggaagatccttgcttctaaacagaaatgttggtcatttaatgacaaattctgcagttttattacaagatggatctgaaatacctgaaggtattttggatgcattttgtacttctctatgctctatgcatgacttaaaaaataa

SEQ ID NO: 237764 - DNA, 989 bp, Unknown
  Bacterial polypeptide expressing nucleotide sequence isolated from the Sargasso Sea
accaggaacaggtattgatcttgagagtttttggaaaggatttgctaatgcagttgaggagcttgccccgataaacaaaactttaattgaaaaaagggagttaattcaaaaaaaaattgacgactggcataaaaacaataagggtaaagactttaacaaaaaggagtatacaaattttttaagatcagtttcatatattgttgatgaaaaagaggactttaaaattgaaacagaaaatgttgataaggaaatttcttctattgcaggtccacaacttgttgttccagtagataatgctagatacgccttgaatgcagctaatgctagatggggaagtttgtatgactgtttatacggcactgacgtaatacctggaaaaaaatcagctggatataacatcgaaagagcaaacaaagtgattgaatacgttagaaattttttagacgagagtttccctcttttaaaatctagttggaaagaaatttcaaaaattcaaattgaggaaaataaaatagtttttttacttggaaaagaaaaagattatttaaaaaataaaaatcaatttattggttataatggtgaaaaagataatccaaaatcaattttatttaaaaataataatcttcatgttgatatctttattgatccaaaaagtgaggttggtaaaaatgataaagcatcgatctcagatgtagtactagaatcggctatatcaacaatagtggataatgaagactcggtggcagcagttgatgcagaggacaaagtaaagtgttaccggaattggcttggattaatgaaaggcgatttaacagctaatattgaaaaaaatggtaaagcttttgtcaggaaattaaatccgaaccgaacatatacttcagctgacggaaaaaaaatatctttacatggtagggcatttgcttctaatagaaatgttggtcacttaatgactaactctgccatattattaaaagatggaactgaaatac

SEQ ID NO: 237765 - DNA, 808 bp, Unknown
  Bacterial polypeptide expressing nucleotide sequence isolated from the Sargasso Sea
ttaaacgctgccaatgctagatggggaagtttatatgatgctttgtatggaactgattttcttgagtctaataaaggtttggatagtcactataatccctttagaggaggaaaagtaataaaatattgtcgagaaatattagataaattttttccattaaacgaaaatacttggaaaaaactagaacttataaaaataagtagcaataaaccagaatttattgttgatggaaaaaaaataaatttaaaaaatcaaagtcaatatgtgggttacagaggttctgaaaaaaaattaaagggtatacttttaaaaaataacaatctacacgttgaattagtaattaacccatacgcgtttgcggctagacgagatccaactggcataagtgatttagtaatagagtctgcagtaacaacaataatggatcatgaggatagtgtttctgctgtagattcagaagataagattttaggctatagaaattggcttggtctaatgaaaggaagcttaaaaactactttcgaaaaaacaggtaaactttttgaacgtaaacttaatactgatagaaaatatactggaacacaaggggaaaaaataatcttgcatggtagatctttacttttaaatcgaaacgttggtcatctaatgacaaattcctcaataatacttgaagatggatcagaaattcctgaaggaattatggatgcattctttacttctgctgcttgtctccatgacttgcaaaaaaaaaataactccagaacgggatcaatttatattgttaaacctaaaatgcacggtccagaag

SEQ ID NO: 237766 - DNA, 873 bp, Unknown
  Bacterial polypeptide expressing nucleotide sequence isolated from the Sargasso Sea
ttggttgggctaatgaaaaaagatcttgttactgagtttgaaaaggacggaaaaaaattaatcagaaaacttaatccaaatagaagctatatttccaaaacagggaaaaaagaaaatctgcatggaagagcactcttgcttaatagaaatgtaggacatttaatgacaaactcagcagttcttctgcaggatggatcggaaatacctgaaggaattcttgatgcttttataactacgttatgtgcaattcatgatataaaaaataaaaataactcaagaacgtcgtctatatacattgtaaaaccaaaacagcacggacctgaggaaaccgcctttactaatttgttattcacaaaagtagaagaagctttgggtttagaaaaattcacaattaagtgtggaattatggatgaggaaagaagaacaactgtaaatttaaaagagtgcattagatcattggaacatagagtcttttttataaatactggatttttagatcgaactggtgacgagatgcatacatctatggaagcgggaccaatgatgaaaaagggtgatatgaaaacttcagtttggataaatgcttatgaaaataataacgttgatattggtctagaatgtggattttcgggagttgctcagatcggcaaaggaatgtgggcaatgccagacaagatggctgatatgcttaaacaaaaaatttctcatctagaggctggagcgaattgtgcttgggtaccttctcctacagcagcagctcttcattctcttcactatcataaaatcaatatttttaacaatcataaaaaattacaaattagagacagggcaaaaacaagtgatttattaaatataccagttgtaaaaaaacct

SEQ ID NO: 237767 - DNA, 703 bp, Unknown
  Bacterial polypeptide expressing nucleotide sequence isolated from the Sargasso Sea
gaagactggaatgttgacgttggtttatcttgtggtttttctggaaaggttcaaataggaaaaggaatgtgggctatgcctgataggatggcagacatgatgagtcaaaaaatatctcatcctcaatcaggtgctaattgtgcgtgggtaccttcccctacagcagcaactcttcatgctacccactaccataaagttgatgtttttcagaaacagagtaaaataaaatctagaaagaaagctaacctcgaaaatatattaaaaataccaaaagcagacaggcctaattggtcagttgatgatatcaataaagaattagaaaataatgctcagggtattttgggatatgtagttagatggattgatcaaggagtaggttgctccaaagtaccagatattaataatgtaggtttgatggaagatagagcaactttaagaatatcatctcaacatatggcgaattggttacatcacaatatatgctcaaaggatcaggttatgggcgtaatgaaaaaaatggcaacgattgtagatcagcaaaataaagaggataaaaattatttgccaatgtccccaaattttgaaaaatctgtggccttctctgctgcttgtgacttagtatttaaaggtagagagcaaccttcgggatataccgagcccatactgcacaaaaaaaggttggaaaaaaaagctaatcattaga

SEQ ID NO: 237768 - DNA, 871 bp, Unknown
  Bacterial polypeptide expressing nucleotide sequence isolated from the Sargasso Sea
cttaaagagtggtattagagttttaaaaaaaagagtattttttattaatactggttttcttgataggactggtgatgaaatacatacatctatggaaattggtccgatgataaggaaaggagacatgaaatcatcaaaatggattagggcatacgaaaaaaataatgttaatataggattagcgtgcggtttttctggaaaggcacaaattggaaaaggaatgtgggcaatgccggatttgttaaaagagatgatggaacaaaaaatccttcatccaatgtcaggcgcaaattgtgcgtgggtaccttcaccaactgcagcggcaatacatgctttgcattatcatgcggtaaatgtattttctattcataaaaaactaaaaaatagaaatccagctaaattagatgatcttcttacaataccagtgaagaccaagaaagactggactaaagatgaaattgagaaagaattaaaaaataatgctcaaggtattttgggttatgttgttaggtgggttgatcaatctgtaggatgctcaaaagttcctgatatcaatggtataggtttgatggaagatagagctacatgtagaataagcagtcaacatatagctaattggcttcatcacggtatatgtagcaaaaaacaagttttagaaattatgaaaaaaatggcaagaattgttgattatcaaaatttaaaagatcgtggcatgaaagatcaggatccttatcaaccaatggctggaaacttcgaaaaatcaattgctttcaaagcagcttgtgatttaattttccatggaaagtatcaaccttcaggatacactgagcctttgcttcattttaatagattaataaaaaaatcaatctga

SEQ ID NO: 237769 - DNA, 869 bp, Unknown
  Bacterial polypeptide expressing nucleotide sequence isolated from the Sargasso Sea
ttctgtttatattgtaaaacctaaaatgcatgggcctgatgaagttgcttttactgatttaatttttgaaaaagtagaaaattttttaggtctaaaaaaatttactattaaaattggaataatggatgaggagagaagaacatctgtaaatttaagagaatgtataagagcagtaaaaaatagagttgtttttattaatacgggatttttagatagaacaggtgatgaaatgcatacatcaatggaagcaggacctatgataaaaaagggagatatgaaatcagcaaaatggatttccgcttacgaaaataacaatgttgatgtaggtttagaatgtggtttttctggcatagctcaaattggaaaaggaatgtgggccgcccctgataagatggcagatatggttaaccaaaaaattaatcatccaaaatcaggtgcaaattgtgcatgggttccttcaccaaccgcagcaactcttcatgtattacattatcaccaaataaatgttttttctttacaaaatgaattgaaaaaaagggaacctgcaaaaactacggatatactaacaattccagttgcagatagaccgaattggtctatagaagaaattaaaaaggaacttgaaaataatgcacaaggtattttgggatacgtagtaagatggatagatcaaggagttgggtgttctaaggtaccagatattaataatgttggcttaatggaagatagagcaactttaagaatttcgtcacagcatattgcaaattggcttcatcatggggtttgtagcaaagaacaagtattacaaaccatgaaaaaaatggcaaaaatcgttgataaacaaaatattaacgattcggaatataaaa

SEQ ID NO: 237770 - DNA, 727 bp, Unknown
  Bacterial polypeptide expressing nucleotide sequence isolated from the Sargasso Sea
tctacttggatttctgcatatgaaaataacaatgtagatataggtttgaaatgtggtttttccggcaaagctcaaattggaaaaggaatgtgggctatgcctgataaaatgaaagaaatgatggaagaaaaaattaatcatttaaaagcaggcgctaattgtgcttgggtaccttctccaactgcagcttctttacatgcactacattatcacaaaataaatatttttgaagaacagcagagaattttaaatcgagaccaagcaaaacttgatgacctattaaaaattcccacagctgatagacccaattggtctatgaatgaaattaattcagaaatttcgaattctgcacaaacactacttggttatgttgtaagatggattgatcaaggtataggatgttcgaaggttccagatattaataatatcgggcttatggaagacagggctactttaaggatatcttctcaacatatagccaattggatacatcatggaattacaacgaaaattcaagttacggagattctcaagcaaatggcaaatattgttgatcaacaaaatgagggtgaccctaattatgttaaaatgagtaataactttgaaaaatctctagcgtttcaaactgcgtgtgatttagtgtttaaaggaaaagatcaaccatcaggatataccgaacctttgctgcatttaaatcgattgaaaatgaagactaatcagaactaga

SEQ ID NO: 237771 - DNA, 781 bp, Unknown
  Bacterial polypeptide expressing nucleotide sequence isolated from the Sargasso Sea
acacacctcaatggaaattggcccaatgataaagaaaggtgatatgaaatcttcaaaatggatcaaggcctatgaaaataataatgttgatatcggtttagcctgtggtttttctggaaaggctcaaattggaaaaggaatgtgggcaatgccagatttattaaaagagatgatggaacaaaaaatttctcatccaatttcaggagctaattgtgcatgggtaccttctccaactgcagcggcaatacatgccttacattatcatgcagtaaatgttttttctattcatcaaaaaataaaatttagaaaatctgctaaaatagatgaccttcttacaataccagtagataacaaaaaaaaatggtctgaggaagatattgaaaaagaattaaaaaataatgcccaaggtattttgggctatgttgttagatgggtggatcaatcggtaggatgctcaaaagttccagatataaatggagtaggcttaatggaggatagggctacatgcagaataagcagtcagcatatagcaaattggcttcatcacggtatatgcagcaaaaaacaagttttagaaataatgaagaaaatggccaaagtagttgattatcaaaatttaaaagatcgtggtatgaaagatcaagacccttatcagcctatggctggaaactttgaaaaatcgattgcttttaaagcagcttgtgatttagtttttcacggaaagtttcaaccatcagggtatactgaaccattattgcattttaatagattaataaaaaaa

SEQ ID NO: 237772 - DNA, 947 bp, Unknown
  Bacterial polypeptide expressing nucleotide sequence isolated from the Sargasso Sea
aatggaatctgctgttactacaattcaggattgtgaagactctgtggctgctgttgatgcagaagataaaataattgtttacagaaactggctaggcttaatgaaaggaaatttaaaaagatcatttgataaaggcggtcagtttattacaagagaacttaatcctgatagaaaatatttactaaaaaatggaaaaatgatattacttcctggaagaagtctcatgctggtgagaaatgttggccatttaatgacaaatccagcgatcaaagataagaaaggcaatgaagtgcatgaaggaattattgatgcattctttacaatatgtattgccattcatgacattatcggtaatggagtttacaagaactcaaagacaaaaagtatttatattgtaaaaccaaaaatgcatggaccagaagaagttcaatttacttgcgatttattttctgaaatagaaaaaatatttgatttgcctgaaaacactgtcaaattaggaataatggatgaagaaagaagaacaacagtaaatttaaaagaatgtatagaggttgcaaaacatagagtaatttttattaatacaggatttcttgatagaacaggtgatgaaattcatacaagcatggaagctggaccaatggtcacaaaagcagacatgaaaatgcaaaaatggattaatgcatatgagaattggaatgttgatattggcttggagactggattcaaaggtaatgctcaaattggtaaaggaatgtggccaatgccagatgaaatgttggatatgtacaaaactaaaacagttcatcctaaagcaggagctaactgtgcatgggtgccgtctcccacagcggcaacaatccattcaatgcattatcatcaaatatcagtttcagatgaagcagataaaattttaaaaagagaaaaagcaaaactagatgatttactta

SEQ ID NO: 237773 - DNA, 907 bp, Unknown
  Bacterial polypeptide expressing nucleotide sequence isolated from the Sargasso Sea
aaaatagataaagcatcaatttcggatattattatggagtcagcagtttctactatagtcgataatgaagactctgttgcggctgttgattcagaagacaaagtcaagtgttatagaaactggcttggattaatgaaaggaaacctggaagcaaaggtaaaaaaaaatggaaaagaatttttaagaaaattaaatccagatagacattatactgctgtggatggttctaaaattattttacatggacgtgctttattacttaacagaaatgttgggcatttgatgactaaccctgcaataaaattaaaaaatggatctgaaatacctgagggtataatggatgcattcgtttcaaccatatgtgcattacatgactttaaaaataaaagaaattccagaacaaattctgtttatattgtaaaaccaaaaatgcatggacctgatgaagtagcttttacaaataaaattttttcaaaagtagaagatgtccttaatttaaaaaagtatactattaaggtaggtattatggacgaagaaagacggacaactgttaacttaaaagaatgtattcgacaagttaaagatagaattgtttttattaatacaggtttcttagatagaaccggtgacgaaatgcatacatcttttgaagcgggaccaatgatatttaaaggtgaaatgaaaaaatcagtttggttaaacgcttatgaaaattggaatgttgatatcggtttgtcttgtggtttttcaggcaaggctcaaattggaaaaggaatgtgggcaatgccagataagatgtctgatatgatgaaacaaaaaatatcacatcctgaatcaggagctaactgtgcttgggtaccctcaccaactgcggctactttgcactcaatgcactatcatagtgtag

SEQ ID NO: 237774 - DNA, 859 bp, Unknown
  Bacterial polypeptide expressing nucleotide sequence isolated from the Sargasso Sea
tgttccggtaatgaatgcaagatatgctttaaacgctgccaatgctagatggggaagtttatatgatgctttgtatggaactgattttcttgagtctaataaaggtttggatagtcactacaatccctttagaggaggaaaagtaataaaatattgtcgaggaatattagataagttttttccattaaacgaaaatacttggaaaaaactagagcttataaaaataaatagcaacaaaccagaatttattgttgatggaaaaaaaataaatttaaaaaatcaaagtcaatatgtgggttacagaggttctgaaaataaattaaaaggaatacttttaaaaaataacaatctacacgttgaattagtaattaacccatacgcgtttgcggctagacgagatccaactggcataagtgatttagtaatagagtctgctgtaacaacaataatggatcatgaggatagtgtttctgctgtagattcagaggataagattttaggctatagaaattggcttggtttaatgaaaggaagcttaaaaactactttcgaaaaaacaggtaaactttttgaacgtaaacttaatactgatagaaaatatactggaccacaaggggaaaaaataatcttgcatggtagatctttacttttaaatcggaacgttggtcatctaatgacaaattcttctataatacttgcagatggatcagaaattcctgaaggaattatggatgcattctttacttctgctgcttgtctccatgacttgcaaaaaaaaaataactccagaacgggatcgatttatattgttaaacctaaaatgcatggtccagaagaggttgcttttacaaatgaaata

SEQ ID NO: 237775 - DNA, 571 bp, Unknown
  Bacterial polypeptide expressing nucleotide sequence isolated from the Sargasso Sea
gccggtgcaaattgtgcatgggtgccatctcctactgcagcttctttacatgcaatgcactatcataaagtagatatttttgaacaacaaaaagagttaaaaagcaataaagtagattatattgataatttgttaacgatcccaatagcagacagaccaaattggagcaaagaggagataaataatgaattgtgtaactcggctcaaactattttaggttatgtagtaaggtgggtagatcaaggaataggatgctctaaagttccagatataaataatgttggattaatggaggatagagcaacgctaagaatatcttcacaacatatagctaactggctacatcatggtatttgctcaaatagacaagttttagaaattcttaagaaaatggcaaagatagttgataaacagaatgaaggagattcagaatatcaaaatatgtctcctaattacgataagtcaatttcttttaaagcagcatgcgaattgattttccatggcaagtcacaaccatcgggttacactgaacctttattacatttaaatagattaataaaaaaaagttaat

SEQ ID NO: 237776 - DNA, 722 bp, Unknown
  Bacterial polypeptide expressing nucleotide sequence isolated from the Sargasso Sea
aatggttataaaatatgggagagattttttagataagtactttccgttagctggattgagttggaacaaaattacaagctttgctgtaaaatttggaaaattaaaagttttaaaaggtgctgatatttttgatttggaaaacgaaaataaatttgttggacatagaggcgaaagcgataatccatctgcaattattctaaaaaataataatttacatattgaaattttaaaagactcgagagcttttgctgcccaacaagatcatgcaggtattagtgacataatactagagtcagcagtgtcaacaatttgtgataatgaagatagtgtagcggcagttgactcagaagataaaattatctgttatcgaaattggctaggtttaatgaaaggagatcttaagtcaaaatttgaaaaagaagggaaattatttgagagaaaattaaatccacacagaagttatatatcaaaagatggtaaaggtttaaaattacatggtaggagtcttttgcttgtaagaaacgttggtcatcttatgaccaacccttcaattttattgagtgatggaagtgagatacctgagggtattatggatgcgtttataactacagcagccgcactacatgatattaaaaataaaaataattcaagaactggatcagtttatattgtaaaacctaaaatgcatggtccagacgagacagcatttacagatttaattt

SEQ ID NO: 237777 - DNA, 859 bp, Unknown
  Bacterial polypeptide expressing nucleotide sequence isolated from the Sargasso Sea
aatggtgttaaatttaaattgcacggaagagctttgcttttaaatagaaacgttggtcatcttatgaccaatcctgcaataattttaaaggatggatctgaaattccagaaggaattatggatgcttttttttcaacaatgtgtgcattgcatgatttcaaaaataaaaaaaattctcgaacaggctcagtttatatagttaaaccaaaaatgcacggaccggatgaagcctccttcacaaatgacttgtttgaaaaagtagaggaaactttaaatcttaaaaagtacacaattaaagtaggcattatggatgaggagaggagaacaaccgttaacttgaaggaatgtattagaaaagtaaaagaaagaatagtttttatcaatacaggttttttagacagaacaggagatgaaatgcatacttctttcgaagcagggccaatgatttttaaaggagatatgaagaaatctgcttggctaaatacttatgaagattggaatgttgacacaggtctttcttgtggattttctggtgttgcccaaataggtaaaggcatgtgggcgatgccggatagaatgtcggatatgatgaagcaaaaaattgttcacccaaactcaggtgctaattgtgcatgggtgccatcaccaacggcggcaacacttcattcaatccattatcatgaggtaaacgtatttaaaaaacagattgaaattaaaaagagacaaaaagcaaaattggataaaattttagagatacctaccgcagataggccgaattggtctgtcgaagaaattaataaagaaatagaaaataatgcccaaggaattttagggtatgtagtaagatggatgaccaggg

SEQ ID NO: 237778 - DNA, 799 bp, Unknown
  Bacterial polypeptide expressing nucleotide sequence isolated from the Sargasso Sea
atttgtgataatgaagatagtgtagcagcagttgactcagaagataaaattatttgttacagaaattggctaggtttaatgcgtggagacctaaagtcaaaatttgaaaaagatggaaaattatatgaaagaaagctaaatccaaatagaagttatatttctaaggatggtaaaggtttgaaattacatggcagaagccttctacttgtaagaaatgttgggcatttaatgacaaacccatccattattttagatgatggaaatgaagtgccagaaggtattttagatgcatttataacgacagctgcagcacttcatgatttaaagaaaaaaaataattcacgaactggatctgtatatattgttaaacccaaaatgcatggaccagatgaaacagcgtttacagatttaattttttcaaaagtggaagaagttttaggattaaaaaaatatacatgcaaaataggaattatggatgaagaaagaagaacatcctctaatttgaaagaatgtattaggtccttaaaaaatagagtattttttataaatacgggatttttagatagaactggtgacgaaatgcacacatcaatgatggcaggacctatgattaaaaaaggagaaatgaagtcatcaaaatggattacagcttacgaaaacagaaatgtggatattggattaaaatgtggtttttctggtaaagctcaaattggtaaaggtatgtgggctatgcctgataaaatgaaagatatgatggaacaaaaaacaggtcatttaaaagctggtgcaaattgtgctt

SEQ ID NO: 237779 - DNA, 924 bp, Unknown
  Bacterial polypeptide expressing nucleotide sequence isolated from the Sargasso Sea
aaatgaatgaggataaaaaatttattgatgttaaaggcaatgaaaagtttctaaatggcagatctttattgttaattagaaatgttggacatttaatgaggagcaacacaattatattagataatggagaagaaatacctgagggtattttagatgcatttacaactgtgttatgtgctttacacgatttaagaattaaaaaaaattcaaaaaaaggctcaatttatatagtaaagccaaaaatgcatggtccaaaagaagtagcttttgcaaacacaatttttttgaaggttgaagatgtcttaaagcttaaacctaatacaatcaaaattggcataatggatgaagagagaagaacaactgtaaacttaaaagaatgtataagacatgtaaaaaaaaggattgttttcattaatactggatttttagatagaactggagatgaaatgcatacttcttttgaaatgggtgcaatgatttttaagggagacatgaaaaaatcaaagtggcttctagcatatgaaaattggaatgttgatattggattgttatgtgggtttacaggtaaagcacaaataggaaaaggtatgtgggctatgcctgataaaatgcaagatatgttagatcaaaaagcttcacatccacttgcaggtgcaaattgtgcctgggtgccttctccaactgctgcaacccttcactcaacacattatcataaaattaatgtttttgagagacaaaaggaactttcaaaaaggaagcgagcaaatatttctgatatacttacaatccccgtttcagataggcaaaactggtctaaagaggatataaattctgaaatcgcaaataatgctcaaggtatactaggatatgttgttagatggattgatcaaggtgttggttgctcaaaaagtacccagatataaa

SEQ ID NO: 237780 - DNA, 942 bp, Unknown
  Bacterial polypeptide expressing nucleotide sequence isolated from the Sargasso Sea
tagtttgtacggaactgacataattgagtcagaggaaggaggaagtgaaagatatgatcctaatcgaggccaagaagtaatcaaatatacgagagaattttttgacaattatattcctatagatggaacgagttggaaaaatattgctggtctaaaaatagtgaataaagaattaatcatatcaaaagatgattatgagtataaattaaaagataataacaaatttataggtcatagaggagatgcaactaaaccagaggcaattatattacagaataataaacttcattttgaaataataattaatcctagagcatttagtgctgctcatgatattgctggaataagtgatgttatagctgagtcagcaatttcaacaatctgtgataatgaagatagtgttgcagccgttgatgccgaagataaagttgcctgttataaaaattggcttggtctaatgaaaggtgatctcaaggttcaatttgaaaaaaaaggtaaaactttagagagaaagttgaaccctgatagaagttacatttcaaaagatggaaaaggtcttaaattacatgggagaagtttgttattgataagaaatgtcggtcatttaatgaaaaattcatcaataatattaaaagatggaagtgaagctcctgaaggaattatggatgcatttataacaacggctgctgctattcatgacttaaataaaaaaagaaattcaagaactgggtcaatttatattgttaaaccaaaaatgcatggaccagaggaaactgcttttactgacttaatttttacaaaagttgaggaaacattaaacttacaaaaatatacctgtaaaattggaataatggatgaagaaagaagaacctcagcaaatttaaaagaatgtatcagaacacttaaaaatcgagttttttttattaatacaggtttttttaa

SEQ ID NO: 237781 - DNA, 856 bp, Unknown
  Bacterial polypeptide expressing nucleotide sequence isolated from the Sargasso Sea
tcttggatatagaaactggttaggattaatgaaaggtgatttgcaatacgaaggagagaaaaatggaaaaaaacttgtaagaaaactaaatccagatcgagaatatatttctcccgatggaaataaaattaaattacatggaagagctttaatgctaaatcgaaacgtaggacatttaatgaccaactcttcaattttattagaagataaaacagaaattcctgaaggtattatggatgcatttattaccactgctgctgcaattcacgattttaaaaataaaggaaattcaaaaacaaattcggtttatattgtaaaaccaaaaatgcatggaccagaggaagttttatttacaaatttaatatttgaaaaagtagaaaaagttttaaatctaaaaaaatatactattaaaattggtataatggacgaagaaagaagaacaactgtaaatttaaaagaatgtattagagctgttaaaaatagagtcgtttttattaatacaggatttttagatcgcactggtgatgaaatgcatacttcaatggaagctggccccatgatcaaaaagggagatatgaagtcttcaaaatggatctctgcatatgaaaataataacgtagatgtaggattagaatgtggtttttcaggaatcgcacaaattggaaaaggtatgtgggccgcaccagataaaatggcagacatgattgaacaaaaagtcaatcatcctaaatctggagcaaactgtgcatgggtaccatcaccaactgccgccactcttcatgcgttacactaccaccaagtaaacgttttttctcaacaaaaagaattaaaaaatagaccgcgagcaaaagtttct

SEQ ID NO: 237782 - DNA, 835 bp, Unknown
  Bacterial polypeptide expressing nucleotide sequence isolated from the Sargasso Sea
agaagaagccttaaacttacctaaaaacaccttaaaaatgggtattatggatgaagaacgccgtacatctgtaaacttaaaagcatgtataaatgaagcaaaacaacgtgttgtatttattaacaccggctttttggaccgtacaggcgatgaaattcacacctcaatgcaagcaggtgttgcgctccctaaagctgaaataaaacaacagccttggataagtgcttacgaagatcgcaacgtagatattggtcttgcctgtggattaagccaaaaagctcaaataggcaaaggcatgtggcctatgcctgacaaaatggcgctgatgatggagcaaaagttagcacaccctaaatcgggcgctaatacagcttgggtgccctctcctacggccgcaacgctgcatgctatgcactaccatgatgttaatgtttttactgagcaatacgcaatcgctgagcgtacaatagcaagccttgacgacttacttactccgccactcatgcaagatacgtcaacactctctaaagaagacatacaaagcgaacttgaaaacaatgcacagggtattttggggtatgtagtgcgttggatagaccaaggtgtaggctgctctaaagtacccgatattaaccatgtagggctaatggaagacagagcaacacttagaatatctagtcaacatatggctaactggttattgcatggcatatgtacacaagagcaaattacatccacaatggcaaaaatggccaaggtagtagacggccaaaacgaacacgataaagcctataccccaatggcaagcagccctgaaacactaaaaaatagtatt

SEQ ID NO: 237783 - DNA, 826 bp, Unknown
  Bacterial polypeptide expressing nucleotide sequence isolated from the Sargasso Sea
tttattaatacgggatttttagatagaacgggcgatgaaatttatacttccatggaagctggtgtgatggttaaaaaaacacaaatgaaaaatgaaaattggataaatgcatatgaacagtggaatgttggagttgggctgcaatgtgggttttctcgattagctcaaataggtaaaggtatgtgggctatgcctgatatgatgtctaaaatgatggaagataaaatcaaccaatgtaaagctggagcgagtactgcttgggttccgtcaccaactgccgctaccattcatgctttgcattatcatatgataaatatttttgatattcataaaaatttaattactaaaaagacagcttctatagatgatctattagatatacctaaaattcataaacctaattggacaaaagaagaaattcaacttgagttagataataatattcaaggcattcttgggtatgttgtgaaatggataaataatggcattggatgttcaaaagtaactgatataaacaacgtaggacttatggaagacagagcaactttaagaatttcttcacaacatgttgctaactggttacatcacaatatttgtgataaaaaagaggtattagatacgttcaataaaatggcttttatagtagatgagcaaaataaacatgataaagattatattccaatgtccaataatctagacacatctattgcctttggtacggccaaatcactagttttcaatgggagagaacagccatctgggtataccgaaccaattcttcattctcaaagattaaggtttaagagtgaattcaaaattaaatgac

SEQ ID NO: 237784 - DNA, 706 bp, Unknown
  Bacterial polypeptide expressing nucleotide sequence isolated from the Sargasso Sea
attttagattgtgaagatagcgtcgcaacagtagatgctgatgataaaattttgtcatatagaaattggttaggccttatgaaaggtgatttaaaatctgaatttatcaaaaataataaattagttaatagaactttaaatcaggatatagattttttttctttaaacagagaaaagcaatttttaaagtctagatcattaatgttaattagaaatgtgggacatttaatgacaactcctgctattttaattaatgatcaagaaataggtgaaggattaatggatgctataattacaagcttaattgctcttcatgatattaaaaagcaagacggaatgattaattcgttaaaaaaatctatttatattgttaaacctaaaatgcatggtcctgaagaagtggaattcactgtttcattatttgaaaaaactgagaagcttttaaatcttaaaaaaaatacaatcaaaattggtattatggatgaagaaagaagaactagtataaacttaaaagagtgtatacgtgctgctaaatccagggtagctttcataaatactggatttttagatagaactggcgatgaaatacatacttcaatgtttgctggccctttcgttaccaaaggggaaatgaagaattctacttggattaaagcttatgaaaacagaaatgtaactataggtttaaagtgtggacttcagggta

SEQ ID NO: 237785 - DNA, 889 bp, Unknown
  Bacterial polypeptide expressing nucleotide sequence isolated from the Sargasso Sea
ttgcttgttagaaatgtaggtcatttaatgcagaatccttcagtaatattagataacggcgaagaggttttcgaaggaattttagatgctatgtttacgatatgtattgcgttatatgatctaaatcaattaaatacattgtctaattcaaggaacaaaagtatgtatattgtaaaaccaaaaatgcatggttctgaggaggtggcttttacgtgtgatttatttgatgcagtcgagagattatttaatctagaaaaaaatactgtaaaagtcggaattatggatgaggaaagaagaaccactatcaatctaaaggcctgcattgaaaaagctaaagaaagaataatttttataaatactggttttctagacaggacaggagatgaaatacatacgagcatggaagcaggtgctatggttcctaaatcagaaatgaaagctcagtcgtggataaacgcttatgaggattggaacgtagatattggtataagttgcggattaagtggcaaagctcagatcggaaaaggaatgtgggcaatgccggatgagatgaaagaaatggtagagaccaaaatagctcatccgttatctggtgcaacatgtgcatgggttccatcaccaacagcagcaacgcttcatgcaatgcattatcatcaggttgatgtgctatcaaaacaagatgagctatctacaagagaacaagctgatttggataagattttaactattcctcttttaaagaaggatatagatgaacagacaattaggagtgagatagcaaacagcgctcaaggtattcttggttatgtcgttagatggattgatcagggcattggatgttctaaagttccagatataaataatattgggcttatggaagatagagcta

SEQ ID NO: 237786 - DNA, 973 bp, Unknown
  Bacterial polypeptide expressing nucleotide sequence isolated from the Sargasso Sea
gatgattggcatattaaacacaaaggaaaagaaacaaaaattaacgattacaaaaaatttttaaaagaaataaattatctgcaagatgaaggaccagacttccaaattgaaactagtaatgttgatgaggagattgcaaaaatagctggtccacaattggtagttccaataatgaatgcaagatatgctttgaatgcagctaatgctcgttgggtaagtttatacgatagtctttacggaactaacataattgaatctgaagaaggtggaagtgaaagatatgaccctaatcgtggtcaagaggtaattaaatatgtaagagaattttttgataaatatattcctattgatggaacaagctggaaaaatattgctagtttaaaagtaattgacaaaaatttggtcatattaaaagacgattataaatacaaacttaaagatcataataaatttattggtcatagaggagatgctaataaaccagaggcgattatattacaaaataataatcttcattttgaaataatcattaatccaagggcttttagcgcagcacacgatattgctggaataagcgatgttatagctgaatctgcgatttcaactatttgtgataatgaagatagtgtagcagctgttgatgctgaagataaggtactttgttatagaaattggttaggtttgatgaaaggagatttaaaaattcaattcgaaaaaaatggtaaaaatttagagagaaaattaaatcctgatagaagttttatttcaaaagatggtaaaggtttaaaacttcatggaagaagcttgcttttaattagaaatgttggacatttaatgaccaacccctcaattcttttaaaggatggtaatgaagtaccagagggaataatggatgcatttatcacatctgctgcagcaattcatgatctaaagagaaaaaaaaatcaagaactggctctatttatattgttaa

SEQ ID NO: 237787 - DNA, 826 bp, Unknown
  Bacterial polypeptide expressing nucleotide sequence isolated from the Sargasso Sea
gtattttttataaatacgggatttttagatagaactggtgatgaaatgcatacatcaatgatggctggacctatgattaaaaagggagaaatgaagtcatcaaaatggattacagcttatgaaaatagaaatgtggatattggattaaaatgtggtttttctggtaaagctcaaattggtaaaggtatgtgggctatgcctgataaaatgaaagatatgatggaacaaaaaacaggtcatttgaaagctggtgcaaattgtgcttgggtaccatccccaactgctgctgctttacatgcgctacattatcatgaaataaatatttttgatgaacagagaaaaattctaaatagaaatcaagcaaaacttgatgatcttctaacaataccagtagcagatagaactaattggtcagttgaagaaataaataatgaaataagtaattcagctcaaacattacttggatatgttgtaagatgggttgaccaaggaataggttgttccaaagttccagatattaacaatgtaggtcttatggaggacagagcaactttaagaatttcctcgcaacatattgcaaactggatacatcacggaattactacagaaattcaagtaacagaaattatgaaagaaatggcaaaaattgtcgatgatcaaaataaaaatgactctaaatatatcaaaatgagtgatgactttgaaaactcaatagctttcaaaactgcatgtgatttagtatttaaaggtaagcagcagccctctggatatactgaaccgttattacatattaatagattagaaaagaaatctaatctgaattaga

SEQ ID NO: 237788 - DNA, 698 bp, Unknown
  Bacterial polypeptide expressing nucleotide sequence isolated from the Sargasso Sea
agaatgtataagaaaagtaaaaaatagaatagtttttataaatactggatttttggatagaacaggagatgagatgcacacttctttcgaaactgggccaatgatttttaaaggagaaatgaaaaaatcactctggttaaatgcttacgaaaattggaatgtagacattggtttgagttgtggtttttcaggcaaagctcaaattggtaaaggaatgtgggcgatgccagacaagatgtctcaaatgatggaacaaaaaattgttcatccaaaatctggtgcgaattgtgcttgggttccctctcctacggcagctacgttacatgccattcattatcatgagattgatgtttttaaaaaacaagttgaattaaaatcaagagagaaagcaaaattaaatgatatattggaaatacctaaagccgatagaccaaactggtctattgaagatattaataaagaattagaaaataacgcccagggtatacttggatacgtagttagatggattgatcaaggtgtaggttgttcaaaagtcccggatattaacaatgtagggttaatggaagatagagcaactctgaggatatcatctcaacatatggcaaattggttgtatcatggtatttgcacgaaagagcaagtaatgaaggtaatgaaaaaaatggctgcaatagttgataaacaaaacgcgaatg

SEQ ID NO: 237789 - DNA, 481 bp, Unknown
  Bacterial polypeptide expressing nucleotide sequence isolated from the Sargasso Sea
aaagaattagaaaaaagagagaaagcaaaattagatgatttattaaatattccagtgataaataggcctaactggactattgaagaaataaataaagaaatttctaattctgctcaaacaattctaggttatgttgttaggtggattgatcaaggcataggatgctcaaaagttcctgacattaataatgttggattaatggaagatagagcaacattgagaatttcatctcaacatatagcaaattggcttcaccatggaatatgcagtagaaaacaagttttagaaattatgaaaaaaatgtcaaaagttgtggatgagcaaaataaaaatgataagctttatcaaaaaatgtcgcctaaatatgataaatctatagcgtttaaaacagcttgcgaactagtatttcaaggtaaagatcaaccctctggttacactgaaccattgcttcatttaaatcgtttaattaaaaaaaattaat

SEQ ID NO: 237790 - DNA, 748 bp, Unknown
  Bacterial polypeptide expressing nucleotide sequence isolated from the Sargasso Sea
tatgaaatcatctaaatggattactgcttacgaaaacaacaatgttgatattggtttaaattgtgggttttctggtaaagctcaaattggaaaaggtatgtgggcaatgccagacaaaatgaaagatatgatggagcaaaaaacaggacacttaaaagcaggagcaaactgcgcatgggttccttcccctacagcagctgcgttacattctttacattatcatgaaataaatatttttaatgaacaaaaaaaattggtagatagggaaccagctaagcttgatgatctattaacaatcccaatagcagatagacctaattggtctgtagaggatataaataaagaaatttctaattctgcacaaactttattagggtatgttgtgagatgggtcgaccaaggtgtaggttgttcaaaagttccagatattaacaatattggcttgatggaagatagagcaactcttagaatttcatctcaacatatagcaaattggatacatcatggaattaccacaaaaattcaagttattaacataatgaaagatatggctaaaatagtagacgagcaaaataaaaatgatcctcaatatgttaagatgagtgaagactacgaaaactctttagcatttcaaactgcatgtgatttagtatttaaaggtaaagagcagccctctggttatacagagccattacttcatttaaataggttgaaaaaaaaatctaatctgagttcgaaatcaaattag

SEQ ID NO: 237791 - DNA, 735 bp, Unknown
  Bacterial polypeptide expressing nucleotide sequence isolated from the Sargasso Sea
cccaaacgtggattaaggcctatgaggactcgaacgttgatgttggactcgctgcccgctttcgaggtcgagctcaaataggaaagggaatgtggccaaaacctgacgagatggcggaaatgcttgatgttaaacgtggtcaccccgaagctggcgcgtcaactgcatgggtaccatctccaaccgccgcgtcgcttcacgctcttcattatcatgaaattgctgtctcctctattcaagaagaagtgtcacaaagaaggagtgcaagtgtggatgatattttgaagatacccttgcttgctggccaaaatttatcgtccgaagaggttcaaaaagagttggataacaatgtccaaggcattttggggtatgtggttcgttggatagaccagggaattggttgttctaaagttcctgatattaacgatgttggcctcatggaagacagagcgacgcttcgtatctccagtcagcatattgcgaactggttacaccatggcatctgctcgaaagatcaggttcaggaaacgctgcaaagaatggcttctgtagtggatcagcaaaatgaaggagacgctgaatatcgcaatatggcaccagactttggagatagtgtggcttttgcggctgcctgcgacttaatttttggtggtacagagcagcctagcggatataccgaaccggtgcttcatgctcgtcgtcgcgaggcgaaggctaaatatgctgaaaaataat

SEQ ID NO: 237792 - DNA, 689 bp, Unknown
  Bacterial polypeptide expressing nucleotide sequence isolated from the Sargasso Sea
atggatgcttttataacttctgcagcttgtattcatgatttgaaaagaaaaggtaattcaagaaaggggtcaatttatatcgtaaaaccaaaaatgcatgggcctgaggagacagcatttgctgatttaatttttacaaaagtcgaagaagttttaaaattagaaaaaaacacaattaagtgtggaattatggatgaagaaagaagaacatctgcaaatcttaaggaatgtattagaacacttaaagaaagagtattttttatcaacactggatttttggatagaactggtgatgaaatgcatacttcaatggaagctggaccgatgatcaaaaaaggagatatgaaagagtctaaatggattaaaacttatgagaataataatgtagatataggcttaaaatgcggattttcaggggttgctcaaataggtaaaggaatgtgggccatgcctgataaaatgaacgaaatgatggagcaaaagattggacatgtaaatgcaggcgcaaattgtgcttgggttccttctccaactgctgctgccttacatgttctgcactatcatgaagtaaatgtatttgaaaaacaaaaagaaatattaaaaagagagccatcaaaattatctgatcttcttactattccgatagcaaatcgtcctaattggtctgttgatgaaattaatactgaaat

SEQ ID NO: 237793 - DNA, 979 bp, Unknown
  Bacterial polypeptide expressing nucleotide sequence isolated from the Sargasso Sea
ggatgcatttataactacagcagctgcgcttcatgacattaagaataaaaataattcaagaactggttcagtttatattgtaaagcctaaaatgcatggtccagacgagacggcatttacagatttaattttttctaaagttgaagatgttctaaatttacctaaatacacttgtaagattggtattatggatgaagagagaagaacgtcagcaaatctaaaagaatgtattagaagtcttaaaaatagagttttcttcgtcaatactgggttcctcgatcgcacgggtgatgaaatgcatacatcaatggaagctggtcctatgattaaaaaaggtgatatgaaatcatctaaatggattatagcatacgaaaacaacaatgttgatattggtttaagttgtgggttttctggtaaagctcaaattggaaaaggaatgtgggcaatgccagacaaaatgaaagatatgatggagcaaaaaacaggacatttaaaagcaggagcaaactgtgcatgggttccttctccaacagcagctgcattacatgctttacattatcatgaaataaatatttttaacgaacaaaaaaaattaatagatagggaaccagcaaagcttgatgatctcttaacaatcccaatagcagatagacctaactggtctgtagaagatattaataaagaaatttctaattctgcacaaactttattgggttatgttgtaagatgggtcgatcaaggtgtgggttgttcaaaagttcctgatatcaataatattggcttaatggaagatagggcaacactaagaatttcttcacagcatattgccaattggatccatcatggaattacaacaaaaatacaagtaactgagataatgaaagatatggctaaaatagtagacgaccaaaataaaaatgatccgctatatgttaaaatgagtggtgattatgaaaactctatagcatttcaactgcgt

SEQ ID NO: 237794 - DNA, 907 bp, Unknown
  Bacterial polypeptide expressing nucleotide sequence isolated from the Sargasso Sea
ataaaaattgggtatttaaagaaacctggatcaaactttaaaattaaaactaaaaatgttgataaagaaatatcaagcatatgtggtccacagctagtttgtcctgtttcaaatgcaagatttttattaaacgcagcaaatgcaagatgggttagtttgtatgatagcttatatggtacagatgtaattccagaaactggaggtgctgtaaaaggaaaaacttataatccaataagaggtaaaaaagtaattgaatatgctcgtaatctattagataaatttgtacctttaagagaaaatagctggaaagatttagagaaaataccaaaagttataaataataaactagatttaaaacttaaaaattctaatcaatttgttggctataataaaaagttaaataaaattagttccttattatttgttaacaacaatcttcatatagacattttatttgatcaagatggaaaaatggaaataaacaatcctcagggcaatcaggataaaataaaaatacacgatatttttctagaatcagcaatttctactatttgtgatcatgaagatagcgtcgccgcagtagatgctgaagataaagttttagggtacagaaactggcttggtttgatgaaaggaaatttaaaagtagaatttataaaaaatggaaaaaaaaatttaagaaaattaaactcagaccgaaactatatttcatcaaaaggaaaaaaaataaaattacatggaagatcattattattaaacagaaatgttggtcaccttatgacaaatccatctattcttttaaaagatggatctgaatgcccagaaggcatgctagatgcttttataacttcttttgctagtattcatgattttaaaagaaaaggaaattctagagttaattcaattt

SEQ ID NO: 237795 - DNA, 817 bp, Unknown
  Bacterial polypeptide expressing nucleotide sequence isolated from the Sargasso Sea
attatggatgctttcatatctactttgtgtgctattcatgactttaaattaaagaataactctagaaaagaatccgtttacattgttaaaccgaaaatgcatggccctgaagaagttgaatttactaacaatttattttcaaaagtagaggatgctttaaaaataaaaaaatattcaattaaagtcggaataatggatgaagaaagaaggacaactgttaatttaaaagaatgtataagaaaagttaaggaaagagttgtttttataaatactggatttttagatagaactggggacgaaatgcatacatcatttgaagctggtccaatgatttttaaaggggatatgaaaaaatctaagtggttaaatacttatgaagattggaatgtagatattggtttagcatgtggtttttctggtaaggcccaaataggaaaaggtatgtgggctatgccagataaaatgtcagatatgatgaagcaaaaaattaatcatccaaaatctggcgcaaactgcgcttgggtaccgtctccaacagcagctacccttcatgcaacacattatcattactttgatgtttttaaaaaacaagatgaattaaaaaataagaagagagcaaagttagaaaacctactcgaaataccaaaggctgatagacctaattggtctttggatgacataaacaaagagcttgaaaataatgtacaggggattttaggctatgtagtaagatggattgaccagggtgtaggttgttcaaaagtacctgatataaataatattggtttaatggaggatagagcaactctaagaattt

SEQ ID NO: 237796 - DNA, 592 bp, Unknown
  Bacterial polypeptide expressing nucleotide sequence isolated from the Sargasso Sea
tcaggcgcgaattgcgcttgggtaccatcacctaccgcagcaacacttcatgcgttgcattatcataaagttaacgtttttgaaaaacaagctgaacttgttggaaagaaaagaagtaatttaagtgatattttatctataccaataactaaaaatacaaattggacaaaggttgaaataaataatgaattggaaaataacattcaaggaatacttgggtatgttgtaagatgggtagatcaaggtattggatgttcaaaggttcctgacataaatgatgtaggattaatggaagatagagcaaccttaagaatttcttcacagcatattgcaaattggctaaatcatggtatttgtaccaaagatcaagtcgttaaaatattaaaaaaaatggcgcataaagttgatgaacaaaatataagtgatgtaaactatgaaagaatgtccgataattttgaaatttcatattcatttaaagctgcatatgaattaatttttaatggcctgaatgaaccatctggttacacagaacccattttgcacaagatgagaattcagaaaaaaataaatttaggaaattccaatcaataaa

SEQ ID NO: 237797 - DNA, 862 bp, Unknown
  Bacterial polypeptide expressing nucleotide sequence isolated from the Sargasso Sea
aacttgaaagcttgcattaaggcggcatgcgaaagagtcgtttttattaacacggggtttcttgatcgcactggggatgaaattcacactagtatggaagcgggcccaatgatccctaaaaccatgatgaaggcgtcgagttggattaccgcttatgaagatagtaatgtagatatcggccttgcctgtggattgcaaggaagggctcaagtcggaaaagggatgtgggcgatgcctgatctaatggcggcgatggtagaacagaaaattaatcatcccgaatcaggcgctactacagcatgggttccttcaccgaccgcagcagtgcttcatgccatgcactaccatcgaataagtgtcttcgaccaacaggataaaattatgtcgagggtacctgcaagcatcgatgaaatcttaaacatacctctgttagaagacccaactagtttgacggctgaggagattcaaaccgagttagataacaatgctcaaggaattcttgggtatgttgttcgttggattgaccaaggtatagggtgttctaaggttccggatattaacgacattggattgatggaagatagggcaactctgcggatttcaagtcagcacattgctaattggctccatcacggtatttgcaaaaaagagcaagtccgagccacgatggaacgcatggccggggttgttgatgaacaaaacaaggaggaccctctttataatccaatgacgcgagatttagaaaattcagtcgcttttcaagctgcttgtgatctggtttatgatggatttaatcagcccagcgggtataccgagcctatcttgcatgctcgtcgattagaaaaaaaggctgaggtttaat

SEQ ID NO: 237798 - DNA, 559 bp, Unknown
  Bacterial polypeptide expressing nucleotide sequence isolated from the Sargasso Sea
tgtgcttgggttccctctcctacagctgctactcttcatgctcttcattatcataaggttaatgtttttgaagaacaaaaaaaaattaagaaaagatcaaaggcaaaaatagaaaatattttagagattcctatggcagatagaccaaattggtctacagaagatataaatcgcgagctagaaaataatgctcagggtattcttggttatgttgtgagatgggttgatcaaggtattggttgctctaaagttcctgatattaataacactggtcttatggaggacagagcgacactcagaatttcttctcagcatatagctaattggttacatcataaaatttgtagtgaggagcaagttatgaaaatcttaaagaaaatggctactatagtagataaacaaaatgagaaagatcaaaactatcttcccatgtctaaagattttaacaaatccatagcttttaaagcggcatgcgacttaatttttaaagggagagtacaaccatctggctatactgagcctcttttacatcaacgaagactcgaaaaaaaaagatagc

SEQ ID NO: 237799 - DNA, 850 bp, Unknown
  Bacterial polypeptide expressing nucleotide sequence isolated from the Sargasso Sea
cgtctacaccaaggccgacggcaacggcgagctgaccctgcatggccgctccctgctgttcatccgtaacgtcggtcacctgatgaccaacgatgccatcctcgacaaggaaggcaacgaggtgccggaaggcatcatggacggcctgttcaccagcctgatcgcggtgcacaacctcaacggcaacaccagccgcaagaacactcgcaccggctcgatgtacatcgtcaagccgaagatgcacggcccggaagaagtggccttcgccaccgagctgttcggccgcgtcgaggacgtcctcggtctgccgcgcaacaccctcaaggtcggcatcatggacgaggagcgtcgtaccacgatcaacctcaaggcctgcatcaaggaagcgcgcgagcgcgtggtgttcatcaacaccggcttcctcgaccgcaccggtgacgaaatccacacctccatggaagccggcccgatggtacgcaaggcggccatgaaggccgagaagtggatcggcgcctacgagaacaacaacgtcgacgtgggtctggcctgcggtctgcagggcaaggcgcagatcggcaagggcatgtgggccatgcctgacctgatggccgcgatgctcgagcagaaggtcggccaccccatggccggtgccaacaccgcgtgggtaccgtcgccaaccgcagccaccctgcacgccatgcactaccacaagatcgacgtgcaggcgcgtcaggtcgaactggccaagcgcgaaaaagcttccatcgacgacatcctcaccatcccgctggcgcaagacaccaactggagcgaggaagagaagcagaacgagctggacaacaactcgcag

SEQ ID NO: 237800 - DNA, 658 bp, Unknown
  Bacterial polypeptide expressing nucleotide sequence isolated from the Sargasso Sea
gattctgttgacaaagtgaaatgttataaaaattggcttggtttaatgaagggagatttaaaaacagaggtaaataaaaatggaaaaacatttacaagaaaattaaattctgacagaaattatatagggccagatgggtcaaaatttactttgcacgggagagcgttattacttaatagaaatgtaggtcatttaatgacaaatcctgcaataatattaaaagatggatctgaaatacctgaaggtatcatggatgctttcatatctactttgtgtgctatgcatgactttaaattaaagaataattcaagaaaagaatctgtatacatagttaaaccgaaaatgcatggccttgaagaagtcgagtttacgaacaatttgttttcaaaagttgaggaagctttgaaaattaaaaagtattctatcaaagttggaataatggatgaggaaagaaggacaactgtaaatttaaaagaatgtataagaaaagttaaggaaagagttgtttttataaacactggatttttagatagaactggggacgaaatgcatacgtcctttgaggctggtccaatgatttttaaaggggatatgaaaaaatctaagtggttaaatacttatgaagattggaatgtagatattggtttgtcatgtgttt

SEQ ID NO: 237801 - DNA, 902 bp, Unknown
  Bacterial polypeptide expressing nucleotide sequence isolated from the Sargasso Sea
aaaaaactctcaatatataaagaaaataaagaatataatttatcagatttagagaaatttattggtcatagaggggatgcggcaaaaccaaatgctataatcttaaaaaataataatcttcatcttgaaataattattaatcctagagcatttagtgctgcaagagatgctgctggtataagcgatattataattgagtctgctctatcaacaatttgtgaccatgaagatagtgtagccgcagtagatgctgaagataaagtaacttgttatagaaattggctaggattgatgaaaggaaatttaaaatcaatatttgaaaaaaatggtaaagaattagaaagaaaacttaatccagataggagttacactgcattgaatggtgaaaagttaaaacttcacggaagaagtcttttgcttgtgagaaacgttggacacttaatgacaaaccctgcaattactttaaaagatggatcagaagttcctgagggaataatggatgctttcataacttcagcagcttgtattcatgatttaaaaagaaaaggtaattcgagagaagggtcaatttatattgttaaaccaaaaatgcatggtccagaggaaacagaatttactaatttaatttttacaaaagttgaagaagttttaaaattggaaaaaaatacaattaagtgtggaattatggatgaagaaagaagaacatctgcaaaccttaaagaatgtattaggacacttaaagatagagtattttttataaacactggatttttagatagaactggtgatgagatgcacacctcaatggaagctggaccaatgatcaaaaaaggagatatgaaagagtctaaatggattaaaacctatgaggacaataacgtagatataggcttaaaatgcgg

SEQ ID NO: 237802 - DNA, 682 bp, Unknown
  Bacterial polypeptide expressing nucleotide sequence isolated from the Sargasso Sea
ggcttttctggtaaagcacaaataggtaaaggcatgtgggcaatgcctgatttaatgaacgaaatgatgaaacaaaaaattgtccatcctttatctggagctaactgtgcatgggtaccatcaccaacagctgcatcattacatgctatccattatcatattgttgatgtttttgcgaaacaaaaagaattatcaaaaagaaaaccggcaaaattatcttcactattaactattccaatagaaaaaaaacctcgctggaccatggaagaaattactaaagaattaaaaaataatgcacaaagtattttaggttatgtagtcagatgggtagatcaatctgtaggctgctcaaaagtacctgacattaatggtattggtttaatggaggatagagctacatgtcgaataagtagtcaacatattgctaattggctacatcatggaatatgtagcaagaaacacgttctagaaattatgaaaaaaatggctaaaattgtagataatcaaaacttaaaagatccaagtatgaaggggcattcaccttatataccaatgtcagacaacttttctaaatcggtttcatttaaagcagcttgtgagctggtatttcacggaaaaactcaaccctcaggttatacagaaccaattcttcatcttaatagattgcttaaaaagaattaat

SEQ ID NO: 237803 - DNA, 897 bp, Unknown
  Bacterial polypeptide expressing nucleotide sequence isolated from the Sargasso Sea
tttgaaaggtgctgatatttttgatttagaagatgaaaataaatttattggacacagaggtgaaagtgataatccatctgcaattattttaaaaaataataatttacatattgaaattctaaaagactcaagagcttttgctgcccaacaagatcatgctggtattagcgatataattttagaatctgcagtatcaacaatttgtgataatgaagatagtgtggcagcagtagactcagaggataaaattatttgttaccgaaattggctaggtcttatgaagggagatcttaaatcaaaatttgaaaaggaaggtaaattattcgagagaaaattaaatccacacagaagttatatctcaaaagatggtacaggtttaaagttacatggcagaagtcttttacttgtaagaaacgttggtcatcttatgactaactcatcaattttattaaatgatggaagtgaaatacctgaaggtattatggatgcatttataactacagcagccgcgctacatgatattaaaaataaaaataattcaagaactggatcagtttatattgtaaaacctaaaatgcatggtccagacgagacggcatttacagatttaattttttcgaaagtcgaggaagttctaaatttacctaagtacacttgtaagattggtattatggatgaggagagaaggacatcagcaaatttaaaagaatgtatcagaagtcttaaaaatagagttttttttattaatacaggattcttagatagaactggtgatgaaatgcatacttcaatggaagctggtcctatgattaaaaaaggtgatatgaaattatctaaatggattactgcatacgaaaacaacaatgttgatattggtttaagttgtggattttctgg

SEQ ID NO: 237804 - DNA, 523 bp, Unknown
  Bacterial polypeptide expressing nucleotide sequence isolated from the Sargasso Sea
tttaaagagcaagataaaattaaatctcgaagtaaagcaaagcttgatgatattttagaaattccaaaagctgatagacccaattggtctgtggatgatattaatcgtgaacttgaaaataatgctcaaggtattttaggctacgtagttcgatggattgatcagggggtaggttgttctaaagttcctgacataaataatgtaggtttgatggaagacagagctactttaagaatttcttctcaacacatagcaaactggttgcatcatgggatttgtacaaaagagcaagtgatgaaagtcatgaaaaaaatggccacaatagtagataaacaaaatgaaaaggatcctgcttattttcgtagtggtagatctggatataataaaatgtctgatgactttgaaagttcaatagctttttcagcagcttgtgatttaatttttaaaggcagagagcagccatctggatatactgagccacttctacatgaaaaaaggcttgagaaaaaatcttctatttaat

SEQ ID NO: 237805 - DNA, 824 bp, Unknown
  Bacterial polypeptide expressing nucleotide sequence isolated from the Sargasso Sea
gccgctcacagatcacgctggtataagcgatataatactggagtctgcaatatcaacaatctgtgataatgaggatagcgtagctgcggtagactcagaagataaaattatttgttatagaaattggttaggtcttatgaggggagaccttaaatcaaaatttgaaaaagaaggtaaattatttgaaagaaagttaaatccacacagaagttatatttccaaagatggcaaaggcttaaaattacatggcagaagtcttttacttgtaagaaatgttggtcatctaatgactaacccatcaattttattaggtgatggaagtgaaatacctgaaggtattatggatgcatttataactactgcagctgcactacatgatattaaaaacaaaaacaattcaagaactggatctgtttatatcgtaaagcctaaaatgcatggtccagaagagaccgcatttacagatttaattttttctaaagttgaggaagttctaaatttacctaagtacacttgtaagattggtattatggatgaagaaagaagaacatctgcaaacttaaaagaatgtattagaactctcaaaaatagagtttttttcatcaataccggtttcttagatagaactggtgatgaaatgcacacatcaatggaagcaggccccatgattaaaaaaggtgacatgaaatcatctaaatggattactgcttatgaaaataacaacgttgatattggtttaaattgtggcttttctggtaaagctcaaataggtaaaggaatgtgggcaatgccagataagatgaaagatatgatggaacaaaaat

SEQ ID NO: 237806 - DNA, 800 bp, Unknown
  Bacterial polypeptide expressing nucleotide sequence isolated from the Sargasso Sea
aattgcacttcatgatattaaaaaagaagatggaatgataaattcaacaaaaaaatcaatttatattgtaaagcctaaaatgcatggtcctgaagaagtagaattttcagtttcattatttgaaaagactgaaaaattactgaatcttcaaaaagatacaattaaaattggtataatggatgaagaaagacgtactagtgtaaatttaaaagagtgtatacgtgcagctaaatctagattagcttttataaatactggttttctagacagaaccggtgatgaaatacatacttctatgtttgctggtccctttgtaactaagggagaaatgaaaaattctacttggataaaagcgtatgaaaatttaaatgtaactataggtttaagctgtggtcttcaaggcaaagctcaaattggtaaaggaatgtgggcaatgccagataaaatgaaagaaatgattgatcaaaaaattaatcatttaaaggctggggctaattgtgcatgggtaccaagtccaacagctgctacattgcacgcactacattatcactatgtgaatgtaaatgaaattcaaaatgatataatcagtaaagaagagaaaaatttgatcgaagatttaatcaccttacctcttcttaacagacaaaatttatcagatgaagaaattaatgctgagatagaaaataatgcgcaaggaattcttggttatgtagtaagatggattgatcaaggtataggatgttcaaaagttcctgatataaataacattggcttaatggaagatagagctacttgtagaa

SEQ ID NO: 237807 - DNA, 833 bp, Unknown
  Bacterial polypeptide expressing nucleotide sequence isolated from the Sargasso Sea
ctatccccaataaataaaaatttaattgaaaaaagacaaatcattcaaaaaaaaattgacgaatggcataaaaaaaataaaggcaaggattttgataaaaaagaatataccgactttttaaaatctgcttcatatattgctgaagaaaaagaagatttcaaaattgaaacgtcgaatgttgatcaagaaattgcttctatcgcagggcctcagttagtggtgccagttgataatgcaagatacgcattaaatgctgcaaatgctagatggggaagtttgtatgatgctttatatggaactgatgttattcctggaaataaaagtaaagattttaatgaagagagagcaaaaaaagttattacctatgtaagaaactttttagatgcggccgctcctataaccgatactagttggaatgaaatatctggtataaaagtaaaagaaaaagatttggtttttctttctgctaacaaagagagtaatttaaaagataaaaatcaatttattggttttaatggagaaaaaaataaaccaacttcaattttaattaaaaacaataaccttcatattgacattttaattgatcctaatcatatgattggaaaatccgacaaagcgtctatttcaaatattattctggagtctgctttgtctacaattattgataatgaagactctgtggctgcagttgatggtgaagataaagttaaatgttatcgaaattggttagggttaatgaaaggtgacctaatagccaatatggagaaaaatggaaaaaaatttgttagaaaattaaatcctaatcgaaactacatttctagaaatggaaaaaa

SEQ ID NO: 237808 - DNA, 946 bp, Unknown
  Bacterial polypeptide expressing nucleotide sequence isolated from the Sargasso Sea
gttggatttaatggagaaaaaaataatccaaaatcaattttattaaaaaataataatcttcatatagacattataattaatccaaataatttagttggtaaaaatgaccctgcaaatataagtgatgtaataattgagtctgctatatcaacaattatagataatgaagactctgttgctgcagtagattctcaggataaaattaaatgttatagaaattggcttggcattatgaaaggaaatttagaatcagaaatagaaaaaaatggaaaaaaatttacaaggaaattaaattcagacagaagttataatgatgtagatggatcaaaattcaaattacatggcagagctctgctcctaaatagaaacgttggtcatcttatgactaacccttcgataatattaaaagatggttcagaaattccagaaggcataatggatgcttttttttcaactttgtgtgccttacacgacttaaaaaacaaaaataactcaagaactgggtcaatttatattgttaaaccaaaaatgcatggccctgaagaagtggaatttactgttaagttgtttgcaaaagttgaagaagttttagaaattaaaacgaatactctaaaaattggaataatggacgaggaaagaagaacaacattgaatttaaaagaatgtattagaagagcaaaaaaaagagtggtttttataaatactggatttttagatagaactggagatgaaatgcacacttcatttgaaattgggccgatgatttttaaaggtgatatgaaaaaatcactttggctaaatacttatgaaaattggaatgttgatataggtttaaaatgtggtttttcaggcaaggctcaaataggaaaaggaatgtgggctatgccagataaaatggcaaatatgatgcaacaaaaaattgatcatttaaaatcaggagctaatg

SEQ ID NO: 237809 - DNA, 859 bp, Unknown
  Bacterial polypeptide expressing nucleotide sequence isolated from the Sargasso Sea
aaacttaaaagaatgcataagacaagttaaagagagaattgtttttattaatacaggttttctagatagaacaggagatgaaatgcatacttcattcgagatagggccaatgatattcaaaggtgaaatgaaaaaatctatttggttaaattcttatgaaaactggaatgttgatgtaggtttaagctgtggtttttctggcaaagctcaaattggaaaaggtatgtgggctatgccagataagatgggagagatgatggatcaaaagattggtcaccctagatcaggagctaactgtgcttgggttccttcacctacagctgccactctccacgctattcattatcacaaagtaaacgtgtttgatgaacaaaaaaaaattgaatctagagaaaaagcgaaattacaagacatcttagaaataccaaaagcagatagagcaaattggtctgttgaagatataaatcgtgaactagaaaataatgcacaaggtattttgggttacgttgtaagatggattgaccaaggagttggttgttctaaagttcccgatataaataatattggcttaatggaagatagagcaacgcttcgaatttcttctcagcacatagctaactggttgcatcacaatgtttgtactaaagatcaagtaatgacagtaatgaaaaaaatggcaagtatagtggatgagcaaaataaaaatgatcctaattataaaaaaatgtccgatgactttgatggctcagtggctttttcagcagcttgtgatttagtttttaaagggagacttcagccttctgggtatactgagcctcttttacaccaaaaaaggttagagaaaaaaacatcgatttaa

SEQ ID NO: 237810 - DNA, 892 bp, Unknown
  Bacterial polypeptide expressing nucleotide sequence isolated from the Sargasso Sea
tttgaattaattttagataagttcgttcctaaaaataaagaattacttgaaattagaaataagatgaaaaaattaattgacgagttttatttaagcaatgctggaaaaacaattaaccaagatgaatacgttagttttttaaaaaaaattaattatatcgtacctgttggagatgattttaatattgaaacaaaaaatatagaccctgaactcgcaacaaaagcggggccacaattagtagttcctgtaacaaatgcaaggtatgcgctaaatgctgcaaatgctagatggggcagtttatatgatgctctttatggaaccgatgttatttctgatgaaggtaatgcaaataaaacaacttcatataacccaaaaagaggcgagaaagttgtaagttatgcaaaagattttctaaataaaagctttccattaaaaaatggatctcataaagaagtagtatcttataaaattaataataataatttaattttcactttaaatgataatagtttaaccgaatttgttaatcatgatcaatatataggttaccaaggtaatattgattcaccaacttctattctattgaaaaataataatttacacgttgaaattcagattaatagaagcggtagcattggttctgatgatcctgctggtattaatgatattttaattgaatctgcacttactacaattcaagattgtgaagactctgttgctaccgtagatgctgaagacaaggttttagcttaccgaaactggcttggacttatgaaagccgatttagaagatactttcgaaaaaaatggaaaaaatcttactagaagattaaatgcagataaagtttatattacttctaatggtgagtttaagctaccgggaagatctgtaa

SEQ ID NO: 237811 - DNA, 730 bp, Unknown
  Bacterial polypeptide expressing nucleotide sequence isolated from the Sargasso Sea
ggtatagaaaaatattcgatcaaagtagggataatggatgaagaaagacgaaccactgttaatttaaaagagtgtataagacaggtaaaaaatagaattgtatttatcaacactggtttcttggataggacgggtgatgaaatgcatacctccttcgaagctgggcctatgatttttaaaggagagatgaaaaaatctacatggcttaatacttatgaagattggaatgttgatattggcttaagatgtggtttttccggaaaagctcagataggaaaaggtatgtgggcgatgcctgaccaaatgggaaatatgatggagcaaaaaatatctcatccaaaatctggagctaactgcgcttgggttccttcacccactgcagcaactttacatagccttcattatcataaggtaaatgtttttaatgaacagttaaaaattagacaaagaaataaagctgaagtagaaaaaattttagaaattcctattgcagataggcctaactggtctcttgaagatataaatagagaattagaaaacaatgcccaagggatcttaggttacgtggtcaggtggattaatcaaggtgtaggttgttcaaaggttcctgacataaacaatgtgggtttaatggaagatagagcaacacttagaatatcttctcaacacattgccaattggttacatcacggtatttgtaaaaaggagagagtaattgaagtgatgaaaa

SEQ ID NO: 237812 - DNA, 832 bp, Unknown
  Bacterial polypeptide expressing nucleotide sequence isolated from the Sargasso Sea
ccagatagaagttacacttcattaaacggtgaaaagttaaaacttcacggaagaagtcttttgcttgtgagaaacgttggacacttaatgacaaaccctgcaatcactttaaatgatggatcagaagttcctgagggaataatggatgctttcataacctcggctgcttgtattcatgatttaaaaagaaaaggtaattcaagaacgggatcaatttatattgttaagccaaaaatgcatggaccagaggaaacggaatttactaatttaatttttacaaaagttgaagaagttttaaaattagaaaaaaatacaattaagtgtggaattatggatgaagaaagaagaacctctgcaaaccttaaagaatgtattagaacacttaaagatagagtattttttataaacactggatttttagatagaactggtgatgagatgcacacctcaatggaagctggaccaatgatcaaaaaaggagatatgaaagagtctaaatggattaaaacctatgaggacaataacgtagatataggcttaaaatgcgggttttcaggagttgctcaaataggtaaaggaatgtgggccatgcctgacaaaatgaacgaaatgatggaacaaaaaattggacatgtgaatgcaggcgcaaattgtgcttgggttccttctccaactgccgctgcattgcatgttatgcactatcatgaagtaaatgtttttgaaaaacaaaaagcaatattaaaaagagagccatcaaagttatctgatcttcttactattccaatagcaaatcgtcctaattggtctattgatgaaattaatactgaaattt

SEQ ID NO: 237813 - DNA, 844 bp, Unknown
  Bacterial polypeptide expressing nucleotide sequence isolated from the Sargasso Sea
cgtcgacggtgaacgccttgtactgccgggccgggcgctcatgctcgtcagaaatgtcggccatctgatgaccaatccggcaattctggacgccgaaggtaatgaagtctttgagggcattatggatgccgtcattacgggactgatcgccctgcatgatctcaaagaccctgcccaacgtaactcccggaccggcgcgatgtacgtcgtcaaaccgaagatgcacgggccggaagaaacagcgttcagcgtcgaactctttgagcgcaccgagcagcttctgggtatgactccaaagaccatgaagatcggcatcatggacgaagagcgacgtactacggtcaacctcaaagaatgtatccgcgccgcctctgaccgggttatctttatcaacaccgggtttcttgaccgtaccggtgacgaaattcatacctccatggaggcagggcccatgatccgaaaagcggacatgaaggccgaaccatggatcaaggcgtacgaagactggaatgtcgacgtaggccttaaatgcggcctgcccggccacgctcagatcggaaagggcatgtggcccatgccagatgaaatggcagccatgatgaaagccaagggagatcacccccgttctggcgccaacactgcctgggtgccctcacccacggcggcaacccttcacgccatgcactatcacgagaccgatgtgatcgcgcgtcaggatggactcaaaaaccgggcgcaggcgagccttgacgatattctgaagattccgctcagtgacagcccaaactggtcgacagaagagatcggtgaggagatcgacaacaattgtcaggggattctgggc

SEQ ID NO: 237814 - DNA, 876 bp, Unknown
  Bacterial polypeptide expressing nucleotide sequence isolated from the Sargasso Sea
tatgtaaaacttgaaaatctttcaatttctgaggatctttttaattttattaataatgaggcgttgccaggtctagatataactcaaaaaaaattttggcacggacttagtaaggttgcacatgaccttgcacctaaaaataaagaattactaaaagtaagaaaaagattacagatggatatcgatagatggcatttggaaaattatgaaaaagaatttaatattgatcactataaatcttacctcgaaaagattggttatctaaaaaaagaaggtccagattttaaaataaaaaccaaaaatatagataaagaaatatctaaaattgctgggccgcagcttgttgttccaattatgaattcaagatatgcattaaatgctgctaatgcaagatggatgagtctatatgatagtttatatggaacagatgttatttcttctgatgagtcaattagtgaaagatatgacccagagagaggtcttaaagtaatacaatatacaaaaaagtttttggatcaaaactttaaactcaaaaaatcttcttggaaaaatgttaataaaattttaattaagaaaaataatttagaaattcatactgagaaaggaattactgagattgaggacaaaagcaaatatgttgggtataggttggataaagataaaatttcagcaattatattaaaaaataattttctacacatagaaattataattaaccctagtgcattcagtgctaagggagaccctgcaggtatttcagatattattgttgaggctgcaatttctactatttgtgatcatgaggactctgttgcagcagtagacgctgaggacaaaattattggctatagaaattggctaggacttagaaaaaag

SEQ ID NO: 237815 - DNA, 793 bp, Unknown
  Bacterial polypeptide expressing nucleotide sequence isolated from the Sargasso Sea
agtgccagcggcgtcagcgatgtgctgcttgagtctgcgattacagtgatccaggattgtgaagactctgtggcagcagtggatgggccggacaaagcacaggtctacgccaactggctgggactcatgcgtggcacattgtccacgatcgtatccaaaggcggagaaactttcgaacgcaccttgaacccggatcgggaatacttgggcgtcgacggtgaacggcttgtactgccgggccgggcgctcatgctcgtcagaaatgtcggccatctgatgaccaatccggcaattctggacgccgaaggcaatgaagtctttgagggcattatggatgccgtcattacgggactgatcgctctgcatgatctcaaagatcctgcccaacgtaactcccggaccggcgcgatgtacgtcgtcaaaccgaagatgcacgggccggaagaaacagcgttcagcgtcgaactctttgagcgcaccgagcaacttctgggtatggctccaaaaaccatgaagatcggcatcatggacgaagagcgacgtactacggtcaacctcaaagagtgtatccgcgccgcctctgaccgggttatctttatcaacaccgggtttcttgaccgcaccggtgacgaaatccatacctccatggaggcgggaccgatgatccgcaaagcggatatgaaggccgagccttggatcaaggcctacgaagactggaatgtcgacgtagggcttcaatgcggcctgcccggccatgcccaaatcggcaaaggcatgtggcccatgccggatg

SEQ ID NO: 237816 - DNA, 780 bp, Unknown
  Bacterial polypeptide expressing nucleotide sequence isolated from the Sargasso Sea
gaacacttgtaaaattggaataatggatgaggaaagaagaacatcagcaaaccttaaagagtgtataaggtcactaaaaaatagagtattttttattaatactggtttcctagatcgaacaggagatgaaatgcacacttctatggaaagtggaccgatgattaaaaaaggtgaaatgaaatcatcaaagtggattttagcatatgaaaataataatgtagacattggtttagaatgcggtttttctggtaaagctcaaattggaaaaggaatgtgggctgctcctgatatgatgaaacaaatgatgaaagaaaaaattggacatttaaaagcaggcgcaaattgtgcttgggtaccatctccaactgccgcatctttacatgcacttcattaccatcaaatagatatatttaatgaacaaaaaaaaattttagatcgaaataaagcaaaattagatgatctactaacattgccaatagcagatagacctaattggtctgtggatgaaataaatgctgaaatttcaaattctgctcagactattttaggatacgttgtaaggtggatagatcaaggagttggttgttctaaagtccctgatattaataatattggcctaatggaagatagagcaaccctaagaatttcatcgcaacatatagcaaactggatccaccacggaattacaacaaaaatacaagtcacagaaatcatgaaagacatggcaaaaattgtagataaacaaaatgaaggagataaaaattatattaaaatgagtaa

SEQ ID NO: 237817 - DNA, 706 bp, Unknown
  Bacterial polypeptide expressing nucleotide sequence isolated from the Sargasso Sea
aatttagaagcagaagttaaaaaaaatggaaaaccttttgttagaaaattgagttctgatagaatttacactggcccagatgggtctaaagttgttttgcatggaagagctttgttgcttaatcgaaatgtaggtcacctaatgactaatccgtcaataactttaaaagatggctctgaaataccagagggtataatggatgcatttatatctactctttgtgccatacacgattttaaaaacaaaaaaaattctagaacaggatcaatgtatattgttaaacctaaaatgcatggtccagatgaagttagttttactaacgatatttttgaaacagttgaaaaagttttaggtttaaaaaaatattctataaaggttgggatcatggatgaagaaagacgtacaacagtaaatcttaaagaatgtattagaaaagtaaaaaatagagtggtttttattaatacaggttttctagacagaaccggagatgagatgcacacctctttcgaagctggtccaatgatttttaagggagaaatgaaaaaatcaacctggcttaatacttatgagaattggaatgtagatacaggtttagcttgtggtttttctggtaaagctcaaataggaaaagggatgtgggcaatgcctgacaaaatgggtgacatgatgaaacaaaaaaatcggacatccaaagtctggtgctaat

SEQ ID NO: 237818 - DNA, 904 bp, Unknown
  Bacterial polypeptide expressing nucleotide sequence isolated from the Sargasso Sea
gatgaagaaagaagaactacagtaaatttaaaagagtgtattagacaagttaaaaatagaatagtttttattaatactggatttttagatcggactggggatgaaatgcatacatcatttgaagcaggtccgatgatatttaagggtgatatgaaaaagtcaacctggttaaattcatatgaaaattggaatgtagatattggattgagttgtggtttttctggaaaagctcaaattggtaaaggtatgtgggcgatgcctgatcaaatggcaaacatgatggaacaaaaaattggacatcctaaatctggagctaattgtgcttgggtaccttcccctacagccgcaactttacattcaatgcattatcacaaggttgatgtttttgaacaacaggataaaattagatctagaaataaaacggatatagcaaatcttctagaaataccgagagctgatagacctaattggtctgtagaagacataaatcgtgaactagaaaataatgcgcaaggtatattaggatatgttgttagatggattgatcatggagttggttgctcaaaagtgccagatataaataatgtcggattaatggaagatagagctacgttaagaatttcttcgcaacatatagcaaactggcttcatcatgggatttgcactaaggatcaggtgataaaagttatgaagaaaatggctactatcgtcgataatcaaaatgaaaaagaccccgcctattctagaagcggaaggtcaaattataaaaaaatgtctgataacttcgacaattcaatagcattttcagctgcttgtgatcttgtatttaaaggaagagttcagccatcaggttatactgaaccccttttgcatcaaaaaagactagagaaaaaaaagtcgtaac

SEQ ID NO: 237819 - DNA, 860 bp, Unknown
  Bacterial polypeptide expressing nucleotide sequence isolated from the Sargasso Sea
gatggtgctgaaaaagttgtgcggatataaccctataagaggcgataaagtcatagactttgcaaagaattttttagatgagaccatccctcttgcaaatgggagttataaagatgtactaggttttgattttgttgatagagaactacaagctgttctacctgatgctgaaaagacccagttaaagaatccatctcaatatgttggatatagtgataatggtaatgatgcatatgctcttttgtttaaaaataataatttacattttgagattcagattgatgccactcatcctataggtcagactgataaagcaggcattaaagacattcttatggaatctgcaattacaacaattcaagattgtgaagattctgtagcagctgttgatggtgaggacaagacactagtttatagaaattggttaggattaatgaaaggagatttaaaagaatcttttgataaaaatggttcattactcacaagagagctaagccccgatagaacttatgtaactaaagatggtaaagatttaatcctaccaggcagaagccttatgttagttagaaatgtaggacacctaatgactaacccaggtgtattagattcacaaggtaatgaagtgcctgaggggattattgatgcaatgtttacaatttgcattgctatacatgaccttaataaaaatggcttatatcaaaattcaaaaactggaagtatttatattgtaaaaccaaaaatgcatggtcctgaagaagttcaattcacatgtgatttatttgcagctgttgaggaggcgcttggtttgcctcatttaactgcaaaagttggcattatggatgaagaaagaagaacaacgg

SEQ ID NO: 237820 - DNA, 898 bp, Unknown
  Bacterial polypeptide expressing nucleotide sequence isolated from the Sargasso Sea
gatgtgccgccagcgcggcccgtacttctacctgcccaagctgcagagcatggaagaggccgcgctgtgggaaaccgcgctgtcgcacatcgagggcatgctcggcctgccgcacggccagatcaaggtgaccgtgctgattgagacgctgccggcagtgttcgagatggacgagatcctgcatgcgctgcgcgaccgcatcgtcggcctgaactgcgggcgttgggactacatcttttcctacatcaagaccttccgccgccatcgcgacaaggtgctgcccgagcgcggccaggtgaccatgacccagccgttcctgaaggcgtactcggaactgctgatccagacctgccatcgccgtggcgcacacgcgatgggcggcatggccgcgcagattccgatcaatcacgatccggccgccaacgagcaggcgatggcaagggtgcgcgcggacaagctgcgcgaagtgagcgctggccacgacggcacctgggtcgcgcatccggcgctgattccggtggcccaggcgatcttcgatgcgcacatgcccgggccaaaccagcaccaggtgctgcgccgcgatgtgcaggtggatcgcgacgctttgatcgccaccccgaccggcaccatcacccgcgccggcttcgagggcaacgtggacgtgtgtgtgcgctacctggcggcctggctggatggcaacggctgcgtgccgatccaccaccttatggaggacgcggccactgccgagatcagccgcagccagttgtggcagtggctgcataccggcggacagcacctggacgacggtaccgccatcgacctggcgctgctcgacgccgcactggcccagctgcccgcgcgccttggcgaccgcagcgcgctgcccggcgcatcgcgc

SEQ ID NO: 237821 - DNA, 937 bp, Unknown
  Bacterial polypeptide expressing nucleotide sequence isolated from the Sargasso Sea
gaaagatgaaaataaattcattggtcatcgaggtgaggcagataacccgtcagcaataatattaaaaaataataatcttcacattgaaatactaaaaaatccaagagcttttagtgctcaacaagatcatgcaggtataagcgatataatattggaatctgcaatatcaacaatatgtgataatgaagacagtgttgcagcagtagatgctcaagataaagtgatttgttatagaaattggcttggattaatgaaaggagatcttgtaacacgatttgaaaaagagggaaaaacattagagagaaaacttaatccaaacagaagttatatttcgaaagagggaaaaggattaaaattacacggtaggagccttttattaattagaaatgttggtcatttaatgactaatccttcaataattttaagagatggaagtgaaattccggagggactgatggatgcttttataacaacagcagcagcccttcatgatattaaaaaaaaaggaaattcaagaactggttcaatatatatagtaaaaccaaagatgcatggtccagatgaaacagcctttacaaatgaaatttttactaaagttgaagaggtattaaaattaaaaaaatatgcctgcaaaattggaattatggatgaagagagaagaacctcatcaaatcttaaagagtgtattagaactttaaaacacagagttttctttataaacactggtttccttgatcgtactggtgacgaaatgcatacatcaatggaagcaggaccaatgattaaaaaaggtgatatgaaaacctcaaaatggattgaggcttatgaaaataacaatgttgacataggtttagcttgtggcttttcaggtaaagctcaaataggtaaaggaatgtgggctatgcctgataaaatgaaagatatgttagatcaaaaa

SEQ ID NO: 237822 - DNA, 898 bp, Unknown
  Bacterial polypeptide expressing nucleotide sequence isolated from the Sargasso Sea
aaatctttttatattgtaaaaccaaaaatgcatgggcctgatgaagtagcatttaccaatttaatttttgaaaaagtagaggaacttttaaatttagaaaaatttacaattaaaattggaataatggacgaagaaagaagaacgacgctaaatctgaaagaatgtattagagcagtaaaaaatagagttgtttttattaataccggatttttagatcgcaccggcgatgaaatgcacacatcgatggaagctgggcctatgattaaaaagggagacatgaaatcttctaaatggatttctgcatatgaaaataataatgttgatattggactagcttgtggattttcaggtatagctcaaatcggaaaaggaatgtgggccgcaccagataaaatggcagatatgatgtctcaaaaaattattcatcctaaatcaggagcaaattgtgcttgggtcccatcaccaaccgcagctactcttcatgctatgcattatcatcaggtagatgttttttctaaacaaaaagaattaaaaggcaaaaaacgttcaaaaatctctgaccttcttactattccgactgcatacagaccaaattggtctgcagaagaaattacaaaagaaatagaaaataatgcacaaagtattttaggttatgttgtcagatggatagatcaaggggttggttgttcaaaagttcctgatattaataatgtaggcttgatggaagatagagcaactttaagaatatcttcacaacatatcgctaattggcttcatcacggaatttgtaaaaaagagctagtgttagaaattatgaaaaaaatggcgaaaattgtagataaacaaaatattagagatccagacttaaaaggatatgctttatataagcgtatgtcag

SEQ ID NO: 237823 - DNA, 641 bp, Unknown
  Bacterial polypeptide expressing nucleotide sequence isolated from the Sargasso Sea
gtgggccatgccagacaagatggcggctatgttggaacagaaggtcagccatctcaacgccggcgctaacacagcttgggttccctcgccaaccgccgccacgctgcacgccactcattatcaccgcatcaacgtagccgaacgccagaatgctctgaaatcccgcgaaagggcgagcctggatgccattctgatgatccccttatcggagcgtgcgaattggaaccccgaagaggtgcagatggagttggataataacgctcagggaattcttggctatgtagtgcgctggatcgatcaaggggttggatgctcgaaggtgccggatatcaccgatgtgggtctcatggaagaccgcgccacgctgcgcatttccgcccaacacattgcaaactggctccaccatggcgtctgttccgaagagcaggtgatggagaccatgcagcgcatggctgccgtcgttgatcaacagaacgccgaggatccggtgtatcgcaacatggcgccaaacttcgacgcttccatcgccttccaggcggcttgcgacctagtattcaaggggcgcatccagccgaacggttatacggagccgatcctacacgctcgacgccaggaggcgaaggccaagttcgcggcctgaa

SEQ ID NO: 237824 - DNA, 871 bp, Unknown
  Bacterial polypeptide expressing nucleotide sequence isolated from the Sargasso Sea
ccgccacgcgcgctggggcagcctgtatgacgcgctgtatggcacggatgccatccccgagaccgatggcgccgaaaagggcaagggctacaaccccgtgcgcggcgccaaggtgatcgcgtttgcacgccaggtgctggatgacacggcgcccctggcctcgggctcgcacaaggactccaccggctatcgtgtagaaggcggccagttggtcgtgtcgctcgccaacggcagcaccacgggcctcaaggacgcgtcgcaattcaagggttaccagggcaatgccgccgcaccgtcgtcggtgctgctgcagcacaacggcctgcatctggacatccagatcgatcgcagcacgcccatcggccagtccgatgccgcgggcgtgagcgacctggtgctggaagcagccctgtccacgattctcgatctggaagactccgtggccgccgtggacgccgaggacaaggtgctgggctacagcaactggctgggcatcatccaggccacgctgaccgagcaggtcgccaagggcggcaagaccttcacgcgcggcctgaaccccgatcgcatctacaccggcccccaaggcggtgaagtgcgcctgcatggccgttcgctgatgttcctgcgcaatgtgggccacctgatgaccaacccggccattctgtggaaggacgcacaaggccaggtgcgcgagattcctgaaggcatcatggacgcggtggtgaccaccgccatcgcattgcacgacctgcaaggccacggcgccaacggtattcgcaacagccgcaagggcagcgtctacatcgtcaagcccaagatgcacggccctgccgaagtgggctttgctgccgagctgtttggccgcgtc

SEQ ID NO: 237825 - DNA, 785 bp, Unknown
  Bacterial polypeptide expressing nucleotide sequence isolated from the Sargasso Sea
tacaaatagccgtgagggtagcgtgtatatcgttaagcctaaaatgcacggtccagaagaagtggcgttttccaatgttttgtttgaacgtattgaagacatcatcgatgtaccgcgtaatacgcttaaaatgggcattatggatgaagagcgcagaaccagcgttaaccttcaagcctgcattgctgaagcacaatcgcgcgtagtatttatcaataccggctttttagatcgtaccggcgatgaaattcatacctctatgttggccggaccgtttgcagaaaaagcctcgttaaagacaatgtcgtggattaaagcctacgaaaccgcaaacgtagcagttggtttgcgctgtggattgtctggcaaagctcagataggaaaaggcatgtggccaacccctgatgaaatgcaaaacatgatggacgcgaagattggacacttaaaagccggcgcgaatacagcatgggtgccctctcctactgcagcaacactgcacgcccttcactatcacgatgtgaacgtgtttaacgtacaaaagcaattagacgaaaacttcgacggtttaaacgacattctcactatcccgcttttagcagacacttcaagcctaactcgtgacggtattaaacgtgagatagataacaatgttcagggaattttaggctacgttgttcgctgggtgcaccaaggtgtagggtgctcgaaagtacctgatattaatgacgtaggcttaatggaagacagagccacactgcgtatttcttcgctagcacattgctaat

SEQ ID NO: 237826 - DNA, 784 bp, Unknown
  Bacterial polypeptide expressing nucleotide sequence isolated from the Sargasso Sea
ccttggagaaattggtaaagattacaatgaggaaagaggaaataaagtaataaaatttacaagagaatttttagataactctttcccgataagtaatgctagttggaagaaaattacaaagattaaaattaatgaaaaaaacttagtttttcaagttaatgaaagtaattacaatttaaaagataattctcagtttgttggatatacaggtaatgaagaaaatataagttctttgctattaaaaaataacaatttacataccgatatcattataaatccaaacagcattattggaaaaaaagataaagctggcatctcagacttgatcgttgaatcagcagtctccactatagtcgataacgaagactcggtagctgccgttgatgctaacgataaagtaaaatgttatagaaattggcttggtctcatgaagggtgacttggaaaccgagattaaaaaaggtcaaaagaaatttataagaaaactaaaccctgatagaatttataaatcaccaaatggctctgaaatagttttgcatggaagagctttactactaaatagaaacgtaggtcatcttatgactaatccctcaattttattgaaggatggatctgaaattccagagggtataatggatgcatttatttcaacactgtgcgctctacatgactttaaaaataaaaagaattcgagaactgggtctgtttatatcgtcaaacctaaaatgcatggaccagaggaagtaggtttcacaaatgaaatttttgaaaatgttgagaaatgc

SEQ ID NO: 237827 - DNA, 787 bp, Unknown
  Bacterial polypeptide expressing nucleotide sequence isolated from the Sargasso Sea
catacatctatggaagcaggacctatgataaaaaagggtgacatgaaatcttcaaaatggataaatgcatatgaaaacaataatgtagatgtaggattggaatgtggtttttcgggtgtggcacagattggaaaaggaatgtgggctgctcctgataaaatggcagatatgatgttacaaaaaattaaccatcctaaatctggtgctaattgtgcgtgggttccttcaccaaccgctgccacgctccatgcaatgcattaccatcaggtagatgttttttctaaacataaaaaattgaaaaatcgaacaaaggcaaaaatttctgaaatgcttactattccgattgcagatagaccaaattggtctttagaagaaattacaaaagaattggaaaataatgctcaaggaattttaggttatgttgttagatggatagaccaaggagttggctgttcaaaagttcctgatattaacaatataggtttaatggaagatagagctactttaagaatttcatctcaacatattgctaattggctacatcatggagtttgtagtaaaaaacaaatattggagacaatgaaaaagatggcgcaaattgtagataaacaaaatattagagatccagacttaaaaggatatgcttcttacaaaagaatgtctgacgattttgaaaaatcaatagcttttaaaactgcttgtgaacttgttttttttggaagaaatcaaccttctggttataccgagcctttgctacatttaaatagattaattaaaaaaaactaat

SEQ ID NO: 237828 - DNA, 612 bp, Unknown
  Bacterial polypeptide expressing nucleotide sequence isolated from the Sargasso Sea
ttagtgctgtccaagatgctgcgggaataagtgacataattatagagtctgcaatatctacaatatgtgataacgaagatagtgttgcagcagtagactcggaagataaaatattatgttacagaaattggttaggtttgatgaaaggaactctaaaatctgtcttcgaaaaggatggtaaaactttagaaagaaaacttaatccagatagaagttatatttcaaaagataataaaaaagaaaaattacatggtagaagcttacttttaattaggaatgttggtcatctaatgactaattcagcaattattttagaagatggttctgaagtcccggaaggtatcatggatgcatttattacaactgctgcagcaattcatgatttaaaaagaaaaggtaactcaagaactggatctatatatattgtaaaaccgaaaatgcatggacctgaggagactgcttttacagataaaatattcacaagagttgaagaagtattaaaccttgaaaagaatacaattaaatgcggtattatggatgaagagagaagaacatctgtaaatttaaaagaatgtattagaacattaaaaatgcagggtttttttcattaat

SEQ ID NO: 237829 - DNA, 849 bp, Unknown
  Bacterial polypeptide expressing nucleotide sequence isolated from the Sargasso Sea
tgagataagtaccagcgatcaatcttctacagaattaaaggatgaatctcagttcataggttttacaggagactccgataatcctagtagtatattatttaaaaacaataacttacatatagaaattgaaattgatcctgaagattctgtaggcaaagatgatccggcaaatattaaagatgtttgtgttgaatcggctgtaactgccatccaagatcttgaagattctgttgcggctgtagatgcagaagataaatctttaggttatcgaaattggttaggtttaatgaaaggagatcttaaagaatcattttttaagggcggagaagagatgacaaggactctgaatgaggatagaaattattcagacaaaaatggtcaagaaattactctcccgggaagaagtgtacttttagtaagaaatgttggtcatttaatgacaaaccctgcaattcttgacggaagcaataatgaggtccccgaaggaattatggatgcaatgtttactatctgtataggtaagcatgatcttttgaaagaaggaaaacaatctaattcaagaactggaagtatttatatagtaaaaccaaaaatgcatggacctgaagaagttaagttcacatgtgatttattttcaaaagtagaacaggaattgggcttagatcctctaacagtaaaagttggtattatggatgaggaaaggcgaaccactgttaaccttaaagaatgcattagagcagccagcgatagagttatatttataaatactggtttcttagacagaacgggtgacgaaattcataccagtatggaagctggacctgtggtgcctaaagcagagatgaagaa

SEQ ID NO: 237830 - DNA, 949 bp, Unknown
  Bacterial polypeptide expressing nucleotide sequence isolated from the Sargasso Sea
tggctgggactcatgcgtggcacactgtccacgatcgtatccaaaggcgaagaaactttcgaacgcaccttgaacccggatcaggaatacatgggcgtcgacggtgaacggcttgtactgccgggccgggcgctcatgctcgtcagaaatgtcggccatctgatgaccaatccggcaattctggacgccgaaggcaatgaagtctttgagggcattatggatgccgtcattacggggctgatcgccctgcatgatctcaaagaccctgcccaacgtaactcccggaccagcgcgatgtacgtcgtcaaaccgaagatgcacgggccggaagaaacagcgttcagcgtcgaactctttgagcgcaccgaacaactccttgggatgactccaaaaaccatgaagatcggcatcatggacgaagagcgacgtactacggtcaacctcaaagagtgtatccgcgccgcctctgaccgggttatctttatcaacaccgggtttcttgaccgcaccggtgacgaaatccatacctccatggaggcgggaccgatgatccgcaaagcggatatgaaggccgagccttggatcaaggcctacgaagactggaatgtcgacgtagggcttcaatgcggcctgcccggccatgcccaaatcggcaaaggcatgtggcccatgccggatgaaatggcggccatgatgaaagccaagggagatcatccccgttctggcgccaatactgcctgggtcccctcacccacggcggcaacccttcacgccatgcactatcacgaaaccgatgtgatcgcgcggcaggatgaactcaaaaaccgggcgcaggcgagccttgacgatattctgaagattccgctcagtgacagcccaaactggtcgaccgaagagatcggtgaggagatcgacaacaattgtcaggggattctgggctacgtcgtca

SEQ ID NO: 237831 - DNA, 846 bp, Unknown
  Bacterial polypeptide expressing nucleotide sequence isolated from the Sargasso Sea
ctactcccttaatgaaaatacagcgacactgattgttagaccaagaggttggcatttaaatgaaaagcatatcctaataaacggtgaggaggtttcaggtagcttatttgattttgctctttacctttcaaataattatcaatcacttaacagcaaaggcagcggaccctatttttatttaccaaaacttgagagtcatctcgaagcgaggttatggaacgatgtttttgttgaagctcaagattttttgaaaattgaacaaggcactatcaaggcgactgtccttattgagactattttggctgcttttgaaatgaatgaaatactctatgaactaaaagatcattctgcaggacttaattgcggtcgctgggattatatttttagcttcattaaaagatttagaaatgatcctagttgtattttgccgaatagagatgaagttactatgacgagacatttccttaattcctatgttgatgaactaatcaagacttgccataaaaggaatgttcatgcaatgggtggaatggcagcacaaattccgataaagaatgatgcagaaaaaaataaattagccatggataaggttcaatctgataagcttcgtgaagcaaaagctggacatgatggaacttggattgcacacccaggtttgtcaacaatcgcaatggatgcatttgactcagtcatggccaataatccaaaccaaataagcaataagaggaatgatgtcaatacgacagctggtgatttattaaagattccaactggttcaattactcaacatggtataagagaaaatattagagttggcgtccaatatatagaagcttggttatcagg

SEQ ID NO: 237832 - DNA, 595 bp, Unknown
  Bacterial polypeptide expressing nucleotide sequence isolated from the Sargasso Sea
aaacaaaaaatttcacatctagaagcaggtgctaattgtgcgtgggtaccttcaccaacagctgcaggtcttcatgctcttcattatcataagataagtatatttgataaacaattggaattaaaaaaaagaaagaagactaatcaattagatattttgaaaatacctgtcgcagacagattaaattggtcaatagaggaaattaatgaagaaatatcaaattctgctcaaaccattttaggttacgtagtaagatggatagatcagggaattggatgttcaaaggttcccgatataaacaatataggattaatggaagatagagcgactctgagaatttcgtctcaacatattgcaaattggctttatcatggaatttgtagcagaaagcaagttctagaaattatgaaaaaaatggcaaaaattgtcgacaatcaaaataaaaatgacagtaaatatctaaacatgtctcccaattacgataaatctattgcttttaagacagcatgtgaactaatattccaagctagacatcagccatcaggttatacagagcctttacttcatttaaatcgattaattaaaaaaaattaat

SEQ ID NO: 237833 - DNA, 900 bp, Unknown
  Bacterial polypeptide expressing nucleotide sequence isolated from the Sargasso Sea
tctgcaattatttaagaaataataatttgcatattgaaattttaaaagactctagagcgtttgctgctcaacaagaccatgcaggtataagcgatataatagtagagtctgcagtatcaactatttgtgataatgaagacagtgtagcagcagttgactccgaagataaaattatttgttacagaaattggctaggtttaatgcgtggagatctaaagtcaaaatttgaaaaagatggaaaattatatgagagaaagctaaatccaaatagaagttatatttctaaggaaggtaaaggtttaaaattacatggcagaagccttctacttgtaaggaatgttgggcatttaatgacaaacccatccattattttagatgatggaaatgaagtgccagaaggtattttagatgcatttataaccacagctgcagcacttcacgatttaaagaaaaaaaataattcacgaactggatctgtatatattgttaaacctaaaatgcatggaccagatgaaacagcatttacagatttaattttttcaaaagtagaagaagttttaggattaaaaaaatatacatgcaaaataggaataatggatgaagaaagaagaacatcttctaatttgaaagagtgtattaggtccttaaaaaatagagtattttttataaatacgggatttttagatagaactggtgatgaaatgcatacatcaatgatggcaggacctatgattaaaaagggagaaatgaagtcatcaaaatggattacagcttatgaaaatagaaatgtggatattggattaaaatgtggtttttctggtaaagctcaaattggtaaaggtatgtgggctatgcctgataaaatgaaagatatgatggaacaaaaaacaggtcattgaa

SEQ ID NO: 237834 - DNA, 915 bp, Unknown
  Bacterial polypeptide expressing nucleotide sequence isolated from the Sargasso Sea
tgtgatcatgaagatagtgttgctgctgtagatgctgaagataaagtcattggatatcgaaatggtttgagattaatgaaaggaaatttaaaagtaaaatttttaaaaaaaggaaaaaaaattataagaaaattaaatactgatagaaattatatttcaaaggaaggtaagaaatttaaattacatggtagatcattgcttctaaatagaaatgttggtcatcttatgacaactccagcaatacttttaaatgacggatctgaatgtcctgaaggaattttagatgcattcgttatttctcttgctagcattcatgattttaaaagaaaaggaaattcaaaaactaattcaatttatatcgttaaaccaaaaatgcacggtccagaagaatgtgcttttaccaatttaatttttggaaaagttgaaaaagtattaaaattaaaaaaaaatcaaatactttgtggaattatggatgaagaaagaagaacttctgttaatttaaaagaatgtataagagttttaaaaaatagagtcttctttattaatactggatttttagatagaactggagatgaaattcatacatcaatggaatctggtcccatgattcttaagggaaacatgaaatcttcaaaatggatatcagcttatgaaaataataatgttgatataggtatttcttgtggtttttcaggaaaggctcaaataggaaaaggaatgtgggctatgccagacctaatgaaggacatgttaaagcagaaagttgctcatccttcatcaggagctaattgtgcttgggttccgtcccctacagcagcatcaattcacgctcttcactatcacgaaattaatgtctttgataaacataaagagttgtcaaaaagaaaacctgcaaaactttcagacttattaact

SEQ ID NO: 237835 - DNA, 826 bp, Unknown
  Bacterial polypeptide expressing nucleotide sequence isolated from the Sargasso Sea
ggtaaagatgaccctgcaggaataaaggatgtaatggtagagtctgctgtaacaacaatacaagatttagaggattctgttgctgcagttgacgctgaagataaaactatagcttacaggaactggctaggtttaatgaaaggagatttgaaagaaacatttgtaaagggagatcaagaaatgacaagatcccttaatgcagatagggaatattctagatcagatggcgagtcattaactttacctggaagaagcgttttgctggtcagaaacgttggacatcttatgactaaccctgctgtacttgataaagaaggtaatgagatccctgaaggaattttagacgccatgtttacaatttgtattgccaagcatgacttaatgaaaactggaagtcttagcaattcgagaactggaagtatttatatagtaaagcccaaaatgcacggtccagaggaagttcaatttacctgtgatttattttcggctgttgagaaagctcttgatataaagcccttaactgtaaaagttggcattatggatgaagaaagaagaacaaccgtcaatttgaaggaatgtattagggcggcgaaagacagagttatttttattaatacaggtttcttagatcgaaccggtgatgaaattcataccagtatggaagcaggacccatgattccgaaggctcttatgaaacaacagccctggataaatgcttatgaagactggaatgtagacgttggtcttgaagctggctttagtggaaaagcacaaaaaggtaaaggcatgtgggctatgcctgacgaaatgttaggaatgtatgaga

SEQ ID NO: 237836 - DNA, 707 bp, Unknown
  Bacterial polypeptide expressing nucleotide sequence isolated from the Sargasso Sea
agcttgtacgatgcgctttatggaacagatgttgttccgggggaaaaatttgaggaatataatcaaaaaagagccttggcggtaattaattatgtgagagatttttttgatacaaactttccattatcaaagatgagttggaaagaaattaacaaatttcaaatagaagaggataaattagtagtattaaaagggacagaaaaagataaattgaaaaataatgatcaatttattggttttaatggagaaaaaaaaaatccatcatcgtttttattaaaaaataacaatcttcatattgatatattcatagatcctcaaaacgaagttggaaaaaatgacaaagcatctatctcagatgtaattgtagagtcagctttatcaacaattatagataatgaagattctgtggcagcggtcgatgctgaagataaagtaaaatgttatcgaaattggcttggtttaatgaaaggtgatttaacagcgaatatagaaaaaaaaggaaaaaaatttgtaagaaaattaaataaagatagaacttatacttctaaatatggaaaaaaaattactcttcatggaagagctctgcttttaaacaggaacgtaggtcatttgatgacaaatccctccattattttaaaggacggatctgaaattcctgaaggaattatggatgcgtttatatctactttatgtgcattacatgattt

SEQ ID NO: 237837 - DNA, 631 bp, Unknown
  Bacterial polypeptide expressing nucleotide sequence isolated from the Sargasso Sea
tatgtgggctatgccagataaaatgagagatatgatagatcaaaaaatatcacatcttgaagctggtgcaaattgtgcatgggttccttctcctactgcagcctctttgcacgcgatgcattatcacaagttaaacatttttgaaaaacataaaaaattaaataataataaaataaattacattgatgacttattgtctattccgatagcagacagacctaattggagcaaagaggagataaataacgaattatgtaactcagctcagactattttaggatatgtcgtaaggtgggtagatcaaggaataggatgttctaaagttccagatataaataatgttggattgatggaggacagagcaacactaagaatatcttcacaacacatagctaactggctacatcatggtatttgctcaaacagacaagttttagaaattctaaaaaaaatggcaaagatagttgataaacaaaatgaaggagatccggagtatcaaagtatgtctccaaattacgataagtcaatctcttttaaggcggcatgtgaattgattttccatggcaagtcgcaaccatctggctatactgaacctctattacatttaaatagattgattaaaaaaaactaa

SEQ ID NO: 237838 - DNA, 890 bp, Unknown
  Bacterial polypeptide expressing nucleotide sequence isolated from the Sargasso Sea
aacgggccgtatgcgaactcacgggccggttccgtctatatctgtgaaacccaaaatgcacggtccggaagaagtggcctttgcgtctgaaatcttcgcctgcgtggaagacgcgctgggcctggaacgtaataccgtcaagatggggatcatggacgaagagcgccgcaccacggtcaacctgaaggaatgcatccgcgccgcgaaagaacgcgttgtgttcatcaatactggtttcctcgatcgcaccggcgacgaaatgcacacctccatggaagccggccccatgatccgcaagggcgacatgaaagcgtccgcctggatcaaggcctacgaagactggaatgtagacatcgggctcgaatgcgggctgcagggacgtgcgcaaatcggcaagggtatgtgggcgatgccggacttgatggctgacatgatggaacagaaacttggccatcccatggccggcgccaacacagcctgggtgccatcgccgacggcggcaacgcttcacgcactgcactatcacaaggtcaatgtgttcgatcgccagaatgagctgaaatcccgcggacgcgccagtctggacgatattctttcgctgcctgtggccgaccgtcccaactggtcgcccgacgatatccgccaggaactcgacaacaatgcccagggcattctgggttatgtcgtccgctgggtggagcaaggcatcggctgttccaaggtgccggatatcaacgatgtcggcctgatggaagaccgggcgacgctacggatttcaagccagcatatcgccaactggttgcaacacggcgtttgcaccgaggaacaggtacgcgaaaccatggaacgcatggcgggcgtcgtggacaagcaaaactccggcgatgccg

SEQ ID NO: 237839 - DNA, 781 bp, Unknown
  Bacterial polypeptide expressing nucleotide sequence isolated from the Sargasso Sea
aagtatgttggatatagagttgaaaataaaaaagtttcagcagtaattttaaaaaataataatttacatattgaaattataattaatccaaatgcatttagtgccaaaagagaccctgctggtatttcggatataattgttgagtctgcaatttctaccatatgtgatcatgaagactctgttgccgcggttgatgctgaggataaaattattggatatagaaactggctaggtcttatgaaaaaagatcttaagtctgaatttgaaaaaaatggtaaaaaattaataagaaaacttaatacaaacagaagttatattactaagcttggtaaaaaagaaagtcttcacggaagatctctgctattgaatagaaatgtcggccatttaatgacaaattctgcagttcttttacaagatggatccgaaattcctgaaggtattctagatgcatttgttacatccttatgttctatacatgacttaaaaaacaaaaataactcaagaacaggttcaatttatatagtaaaaccaaaacagcatggtccagaagaaacatcttttacaaatttattattttcgaaagtagaagaagtattaggtttgaaaaaatttacaattaaatgtggaatcatggatgaagaaagaagaacttctgtaaatttaaaagaatgcattagaacattagaatatagagttttctttattaacactggttttttagacagaacaggagatgagatgcacacatctatggaagccggaccaatgataagaaaggcga

SEQ ID NO: 237840 - DNA, 810 bp, Unknown
  Bacterial polypeptide expressing nucleotide sequence isolated from the Sargasso Sea
agttcccgaaggcatcatggatgcatttattacaactgccgcagctatgcatgatttaaaaagaaaaaaaaattcaagaactggatcaatttatattgttaaaccaaaaatgcacggacctgaagaaactgcatttactgatttaatatttacaaaagttgaagaaactttaggtttaaataaatacacttgcaaaattggtattatggatgaagaaagaagaacatcagcaaatcttaaagaatgtattagatctttaaaaaatagagttttttttatcaacaccggttttcttgatagaacaggagatgagatgcatacatcaatggaggcaggtcctatgattaaaaaaggtgatatgaaatcgtctaaatggatttctgcctatgaaaataataatgtcgatgtcggtttagcatgtggtttttctggaaaagcacaaataggtaaaggtatgtgggctgctcctgatatgatgaaacaaatgatgagtgaaaaaattggacatttaaaagctggagctaattgtgcctgggttccttcacctacagctgcttctttacatgcacttcattatcatgaaatagatatttttaatgaacaaaaaaaaattttaggaagagaaaaggctaaacttgatgatttattgacaattcctatagcagatagacctaattggtcagttgatgaaattaattctgaaatttcaaattcagctcaaacaattttaggctatgttgtaagatggatagatcaaggaattggttgttcaaaagttcctgacattaataatattggattaatggaaga

SEQ ID NO: 237841 - DNA, 589 bp, Unknown
  Bacterial polypeptide expressing nucleotide sequence isolated from the Sargasso Sea
aaaaattggacatgtaaatgcaggtgcaaattgtgcttgggttccttctcctactgctgctgcattacatgttatgcactatcatgaggtaaatgtttttgaaaaacaaaagttaatattaaaaagagagccatcaaagttatccgatcttcttactattccaatagcagatcgtcctaattggtctgttgatgaaattaataatgaaatttcaaattctgcccaaactattttgggttatgtagtcagatggattgatcaaggtataggttgttccaaagttccagatataaatgatattggattaatggaagatagagcaaccttaagaatttcatctcaacatattgctaattggcttcatcatggcttgtgctcaaatagacaagtccttgaaattttaaaaaaaatggcaaaagttgtagataaacagaatgaagacgactctaactacgaaagtatgtcaccagagtatgataaatctattgcttttaaagcagcatgtgaattgatctttcatggaaaatcacagccctctggctatacagaacctcttttacatttaaacagattaattaaaaaaagctaa

SEQ ID NO: 237842 - DNA, 898 bp, Unknown
  Bacterial polypeptide expressing nucleotide sequence isolated from the Sargasso Sea
cttttcaaagaaaggaaaaaaaattactagaaaacttaattcagatagaatttatgtttcaaaaaaggatggggaagaaatacgtcttcatggtagagctttattgcttaatagaaatgttggtcatctaatgacgaatccgtcaattattttaagtgatagatctgaaattcctgaaggtataatggatgcatttgtatccactttatgcgctttacacgattttaagaataaaaaaaattcaagaactggatccgtatatattgtgaagccaaagatgcatggtccagaagaagttgagtttacaaatactttatttgaaaaagttgaagaggctttaggtattaaaaaattttctataaaagttggtataatggatgaggaaagaagaactacagttaacttaaaagaatgtataagaaaagtaaaagatagaatagtttttataaatacaggattcctggatagaaccggtgatgaaatgcatacatcgtttgaagcaggtccaatgatttttaaaggtgacatgaaaaagtcaacttggttaaacacatatgaaaattggaatgtggatattggtttaaaatgcggttttgcaggaaaagctcaaatcggcaaaggcatgtgggctatgccagatcaaatgtcaaatatgatgcaacagaaaattaaccatccaaaagctggagcaaactgtgcttgggtgccatcacctactgcagcaactttacactctcttcattatcataaagtcaatgtatttgctgaacaagagaaaatgaaaactagggaaaaggctaaggtggaaaatattttagaaattcctaaagcggatcggcctaattggtcagttgatgacattaatcgtgaattagaaacaacgcacaaggaattttag

SEQ ID NO: 237843 - DNA, 802 bp, Unknown
  Bacterial polypeptide expressing nucleotide sequence isolated from the Sargasso Sea
aatgatcttgactggtaaagatattactggtttggcagtaaataataaaaaacttttaatttataaggaaaataaagaatataatttatcagatgcagagaagtttattggtcatagaggagatgtagccaaaccaaatgctataatattaaaaaataataatcttcatcttgaaataattattaatcctagagcatttagtgctgcaagagatgctgctggtataagtgatattataattgaatctgctgtatcaactatttgtgatcatgaagatagtgtagccgcagtcgatgctgaagataaagtaacttgttatagaaattggctaggattgatgaaaggaaatttaaaatcaatatttgaaaaaaatggtaaagaattagaaagaaaacttaatccagataggagttacacttcatcgaatggtgagaagttaaaacttcacggaagaagtcttttgcttgtaagaaatgttggacacttaatgacaaaccctgcaatcactttaaatgatggatcagaagttcctgagggaataatggatgcttttataacctcggcagcttgtattcatgatttaaaaagaaaaggtaattcgagagaggggtcaatttatattgttaaaccaaaaatgcatggtccagaagaaacagaatttgctaatttaattttcacaaaagttgaggaagttttaaaattagaaaaaaatacaattaagtgtggaattatggatgaagaaagaagaacatctgcaaaccttaaagaatgcattagaacacttaaagatagagtatttttt

SEQ ID NO: 237844 - DNA, 964 bp, Unknown
  Bacterial polypeptide expressing nucleotide sequence isolated from the Sargasso Sea
ttcttttaaagatggatctgaatgtccagaaggaattcttgatgcatttattacctctcttgcatgtttgcatgattttaataaaaaacaaaattctagagttaattctatatacatagttaagcctaaaatgcatggccctgaagagtgtagttttactaatttaatttttgaaaaagttgaaaaagttttaaatttaaaaaaaaatcaaattctttgtggaattatggatgaagaaagaagaacttcgataaatttaaaagaatgtataagagtattaaaaaatagagttttttttattaacaccggttttttagatagaactggagatgaaatccatacatcaatggaagttggtccaatgattaaaaaaagtgaaatgaaagcatcaaaatggattcttgcctatgaaaacaacaatgtagatattggtctagcttgtggtttttctggaaaatgccagataggcaaaggtatgtatgctgcgcctgatttaatgagtgatatgatgaaacaaaaagtagcacatcctttatcaggagctaattgtgcttgggtaccttctcctactgctgcatcattgcatgctctccattaccatgaaataaatgtatttttaaagcaaaaggaaatatcgaaaagaaaacctgcaatgctttctgatcttttaacaatcccagtatcaaaaaaccatgattggtctattgatgaagttactaaagaattaaaaaataattcacaaggcattttgggttatgtagttagatggatagatcagtctgttggctgttccaaggtacctgatattaacggggtcggattaatggaagatagagcaacttgtagaattagtagtcaacacatcgctaactggcttcatcatggagtttgtagtaagaaacacgtcttagaaattatgaaaaaaatggctaaagtcgtagatagtcaaaacctaaaagatcta

SEQ ID NO: 237845 - DNA, 661 bp, Unknown
  Bacterial polypeptide expressing nucleotide sequence isolated from the Sargasso Sea
cctggacgctgacggtaacgaggctccggagggaattgtcgatgctgtgtgctcggtgctcattgccttgcacgatctgaagggcacggggcctgtaacgaatagccgagctgggtcggtatatattgtcaaaccgaagatgcacggccctgaagaagccgcctttgcaaacgatctgttctgtagggtggaagacgccctggggctcgcgcgcaacacggtgaagatgggcatcatggatgaggaacgacggaccaccgtcaatcttatggagtgcatccgcgcggccaaggatcggatttgctttatcaatacggggtttctggaccgcactggtgacgaaatccatacctccatggaggctggcccaatggttcggaagaacgctgttaaggaaacggcctggatcgccgcttatgaggattggaacgtggacgtgggcttggcctgcggtctgcagggtaaggcgcagattggaaagggcatgtgggccatgccggacatgatgggggctatgctggaacaaaaggttggacatccgaaagccggcgctagtaccgcatgggtgccgtctccaacggctgctaccctgcacgccacacattatcatcgaatcaatgttgcagtccgtcaaaatgaattgaaaaatcgcgaaagggca

SEQ ID NO: 237846 - DNA, 943 bp, Unknown
  Bacterial polypeptide expressing nucleotide sequence isolated from the Sargasso Sea
ggtcgccgcaacgctggccgacttcatcgagcagcgcgcgctgccgggcacgggcattgatgccgacgccttctgggcgggcactgccgacatattggcgcgcttcacccccgacaatgcggcgctgctgcgcacgcgcgatgacctacaaacgcagatcgatgcctggcatcaggtgcgccgggggcaggcgcacaacgccgccgcctatcaggccttcctgcgcgagatcggctatctggtcgaggaaccggcgccgttcgcgatcggcagcgggaatgtcgatgccgaagtcgcccgtatggccgggccgcaactggtcgtcccgatcctcaacgcccgtttcctgctcaacgccgccaatgcgcgttggggcagcctctatgatgcgctctatggcaccgatgccattgcgggcgcggcttcgggcaagggctatgatgcggcgcgcggggcgcaggtcatcgcctgggccaaggcgtttctggacgatgcggttccgctggcaacgggacgctgggccgatctggcgggcggagaaatcgtcctggccgatccggcgcagtttgtcggcaccagcgcgaagggcaggctgtttcgccataatggcctgcatatcgaggttgtcttcgattccgcgcatccgatcggcgcgaccgatcccgcgggcatatccgacgtcatcctggaatccgcgctgaccaccatctgcgacctggaggattcggtcgcggcggtcgatgcggcggacaaggttaccgcctatgccaactggctggggctgatgcagggcgacctgaccgagacgttcgagaagggcgggaagccgatgacccgcgcgctcaatcccgatcgtgcctatagcgcgcccgatggcagcagcttcacgctgccgggccgcagcctgttgttcgtccgcaatgtcggtcatctgatgaccacg

SEQ ID NO: 237847 - DNA, 901 bp, Unknown
  Bacterial polypeptide expressing nucleotide sequence isolated from the Sargasso Sea
tttgctattaatgcagtaaatgcaagatggggcagtctatatgatgctctttatggaacagatgctttgggggaagttccacaaggaaatagttatgatgctgaaagaggaaataaggttgttggatatgctaaatcacatttagataaatttgctccactagaaaaaataaaatggagtgaaattaataaaattgaattgcaagataataaaattattttaggaagtataaaggaaaattcagtaaactttgtaaataaaaatcagcttataggttggaggtcttctaaagacggtcaactgctagaaataattttattaaaaaataaccttcattgcagaatattaattaatgaaaatgatgcgattggaaaaaatgatcctgcaaatatctcagatatattgttagagtctgcgatatctagtattcttgattgtgaagatagtgtagcaactgttgatgctgatgataaaattttagcataccaaaactggttaggtcttactaaaggagatttagaagctgaattcgtaaaaaataataaggctgtaaagagagtattaaataaagatattatttacactgcaacaaatcaaaaagatcaaatcttaagaggacgctctcttatgcttattagaaatgtaggtcacttaatgacaacacctgcaatattaagaaaaaataatgatgagataggtgagggtataatggatgcaattataacaacactcattgcaactcatgattttaaaaaatcagaaaatagaaattctaattataattctatttacattgtaaaaccaaaaatgcatgggcctgaagaagttgaatttactgatcaacttttttcacagattgaaaaacttttagatttaccaaatagtactatcaagataggta

SEQ ID NO: 237848 - DNA, 948 bp, Unknown
  Bacterial polypeptide expressing nucleotide sequence isolated from the Sargasso Sea
ggcagaagtttactattaattagaaatgtaggtcatcttatgaccaatccttcaattattttaaaagatggaagtgaagttcccgaaggaataatggatgcatttataacaaccgcagctgctattcatgatttaaaaaacaagaagaattcaaaaaaaggctcaatctatatagtaaaacctaaaatgcatggccccaaagagacagagtttacagatttaattttctctaaagttgaagaattatttggcttaaaaaaatatacttgcaaaattggtattatggatgaggagagaagaacctcagcaaacttaaaagagtgtataagatcactaaaaaatagagttttttttataaatacaggttttttagacaggactggtgatgaaattcatacatcaatggaagcagggccaatgattaaaaagggagaaatgaaatcatcaagatggattacagcatatgaaaataacaatgttgatattggtttaaaatgtggtttttctggaaaagctcaaattggaaaaggcatgtgggcaatgccggataaaatgaaagaaatgattaaagaaaaaattaatcacttaaaggccggcgcaaattgtgcttgggtgccttcgcctacagcagcttcattacatgctctacattatcaccaaatagatatttttaatgagcaaaaaaaaattaagttacgtgaaaaggcaaaattggatgatttattaaatattccggtttctaatagatcaaattggtctgtagatgaaattaattcagaaatttcaaattctgctcaaaccttgttaggatatgtcgtgaggtggattgatcaagggattggttgttcaaaagttccagatataaataatattggattaatggaagatagagcaacattacgaatttcatctcaacatattgcaaattggatacatcatggaataaca

SEQ ID NO: 237849 - DNA, 791 bp, Unknown
  Bacterial polypeptide expressing nucleotide sequence isolated from the Sargasso Sea
atccagttcgatccgaacagcccgatcggccagaccgatgctgctggcgtgaaggacctgctggtcgagtccgccgtttccaccatcctcgactgcgaagactcggtcgccgcggtggatgccgacgacaaggtgctggcctaccgcaactggctgggcatcgtgcaggtcaccctcagcgaggaagtcgccaagggcagctcgagcttcgtccgccgcctgaacccggaccgcgaatacagcgcgccgaatggtggtgagctgaagctgcacggtcgctcgctgttgttcatccgcaatgtcggtcacctgatgaccaacccggcgatcctgctggaagacggccgcgagatcccggaaggcatcatggacggcgtgttcaccagcctgatcgccaagcatgacctcaagcgcaagggcaactcgcgcaccggcagcgtctacatcgtcaagccgaagatgcacgggccgaaggaagttgccttcgccgacgagctgttcggtcgcgtcgaggacctgatcggtgtgcctcgctataccctgaaaatgggcatcatggacgaggagcgccgtaccagcgccaatctcaaggcctgcatcgcagccgccaagcaccgcgtggccttcatcaataccggcttcctcgaccgtaccggcgacgagatgcacacctgcatggaagccggccctgtgctgcgtaagggcgacatgaagtccactccgtggatccagtcctacgagcgcaacaacgtgctggtcggcctggcctgtggcctgcgcggcaaggcgca

SEQ ID NO: 237850 - DNA, 460 bp, Unknown
  Bacterial polypeptide expressing nucleotide sequence isolated from the Sargasso Sea
tatgcactatcatgaagtaaatgtatttgaaaaacaaaaagaaatattaaaaagagagccatcaaaattatctgatcttcttactattccgatagcaaatcgtcctaattggtctgttgatgaaattaatactgaaatttcaaattctgctcaaactattttgggttatgtagtcagatggattgatcaaggcataggttgttccaaagttcctgatataaatgatattgggttaatggaagatagagcaactttgagaatttcatctcaacatatcgcgaattggcttcatcatggcttatgttcgaatagacaggttcttgaaattttaaaaaaaatggcaaaagttgtagataaacagaatgaagatgactctaactacgaaagtatgtcaccagagtatgataaatctattgcttttaaagcagcatgtgaattaatttttcatgaaagtcacaac

SEQ ID NO: 237851 - DNA, 712 bp, Unknown
  Bacterial polypeptide expressing nucleotide sequence isolated from the Sargasso Sea
gaaggaaatcaagatccgcttaaaatacatgatatttttttagagtcggcaatttcaacaatatgcgatcatgaagatagtgtagctgcagtagatgctgaagataaagttttaggatatagaaattggctttctctaatgaaaggaaacttaacctcaaaattcagaaaaaataacaaaactattctaagaaaattaaatttggatagagaatatttgtctttgaaaagtaaaaaatttaaattacatggtagatcgttgttgctcaacagaaatgttggacacctgatgacaaatccagcaattcttttaaaggatggatctgaatgtccagagggaatattggatgcttttgttacatctgcggcatgtcttcatgacttcaaaagaaaaggaaattcaagaactaaatccatttatattgttaagcccaaaatgcatggaccagatgaatgtgcatttacaaataaaatttttgaaaaagttgaaaaagttttaaaactcaaaaagaatcaaattttatgtggaattatggacgaggagagaaggacaactgttaatcttaaagaatgtattagagttttaaaaaaaagagtattttttattaatactggttttcttgataggactggtgacgaaattcatacctctatggaaattggtccaatgataaaaaaaggagatatgaaatcctcaaaatggattaaagcat

SEQ ID NO: 237852 - DNA, 853 bp, Unknown
  Bacterial polypeptide expressing nucleotide sequence isolated from the Sargasso Sea
gttgttaattagaaatgttggtcacctaatgacgaacccatttataattttaaaagatggtagtgaaatacctgagggaattatggacgcctttattacaacagctgctgcacttcatgatttaaaaaaaaaaagaaattcaaaaaaaggctctatatatattgtaaagccaaagatgcatggcccagaggaaactgcttttacagatttaatttttttaaaagttgaacaattactcaaattagaaaaatatacttgtaaaattgggattatggatgaagaaagaaggacatcagcaaacttaaaggaatgtataagaacattaaaagatagagtttttttcattaatactggttttttggatagaactggtgatgaaatgcatacatcaatggaagcaggtccaatgataaaaaaaggagatatgaaattatcaaaatggatatcagcttatgaaaataataatgttgatattggtttaaaatgtgggttttcaggtaaagcccaaatcggcaaaggaatgtgggcaatgccagacaaaatgaaagaaatgatggaagataaaatcaatcatttaaaggcaggagcgaattgtgcatgggtaccttctcctaccgcagcatcattgcatgttttacattatcatcaaataaatatttttgatgaacaaaaaaaaatccaaaatagaaaaatatcaaaattagatgatcttttaaatattcctatagctgatagaccgaattggtcagttgacgagattaattcagaaatatctaattcttcacaaactttattagggtatgttgtcagatggattgatcaaggtgttggctgttctaaagtccctgatata

SEQ ID NO: 237853 - DNA, 793 bp, Unknown
  Bacterial polypeptide expressing nucleotide sequence isolated from the Sargasso Sea
cttctcggcctcgaggcgaacatcatcaagatcggcatcatggatgaggaacgccgcaccacggtgaacctcaaggaatgtatccgcgccgccaaatcgcgtgtcgtcttcatcaacaccggcttcctagacaggaccggcgacgagatccacacctcgatggaggccgggccgatgatccgcaaggccgacatgaaaggcgccacctggatcggcgcctatgaggactggaatgtcgatgtcgggctgtcctgcggactggccggaaaggcgcagatcggcaagggcatgtgggccatgccagaccgcatggcggacatgctggagcagaagatcggccatccgatggccggcgcgaactgcgcctgggtgccctcgccgacagccgcgacgctgcatgcgctgcattatcacaaggtcgatgtcgccgcgcgtcaggcggaaatcgcgggtcgtgccaaagcaagccgcgacgacatcctgtcggttccggtggccgtgcgcccgaactggtcggaagacgatatccgggcggagcttcgcaacaacgcgcagggcatcctcggctatgtggtccgctgggtggaccagggcgtcggctgttccaaggttccggacatccatgatgtcgggctgatggaagaccgcgccacactgcggatttcatcgcagcatatcgccaactggcttcgccacggcgtctgctccggaccacttgtccgcgaggtgatggaggaaatggcagccgtcgtcgaccgccagaacgagggcgatgccggctacagcccgatgg

SEQ ID NO: 237854 - DNA, 817 bp, Unknown
  Bacterial polypeptide expressing nucleotide sequence isolated from the Sargasso Sea
agagaatatttatctataaaaggtaaaaaatttaaattacatggaagatctttgttgcttaataggaatgttggacacttaatgacaaatccggcaattcttctaaaagatggatcagaatgtccagagggtattttagatgcttttgttacatctgcagcatgtctccatgatttaaaaagaaagggaaattctagaacaaagtctatttatattgttaaaccaaaaatgcatggaccagatgaatgtgtatttacaaataaaatttttgaaaaagttgagaaggttttaaaactcaaaaagaaccaaatcttatgtggaattatggatgaagaaagaaggacaagtattaatcttaaagaatgtattagagttttaaaaaaaagagtatttttcattaatactggttttcttgatagaactggtgatgaaatacatacctctatggaaattggtccaatgataaagaagggagatatgaaatctacaaattggattagagcatatgaaaataataatgttgacgtaggattaatttgtggtttttccggaaaggcacaaattggaaaaggaatgtgggcaatgccagatttgttaaaagagatgatggaacaaaaaatctctcatccaatgtcaggtgctaattgtgcttgggtaccttcacctactgcagcagccatacatgctttacattatcatgcggtaaacgtattttctattcatcaaaaattaaaaattagaaaaattgccaagttagatgatattcttacaataccagttaagaccaaggaaaattggtctaaggatgaaatgagaa

SEQ ID NO: 237855 - DNA, 847 bp, Unknown
  Bacterial polypeptide expressing nucleotide sequence isolated from the Sargasso Sea
caggtggcagccgacctagatcgtttcatcaacgagcaggctctgccgggcaccggcgtcgacgaaagcgccttctgggccggtgtcgatgctctatttcacgatttgaccccgaaaaaccgccagctgctcgaagagcgcgacacgctgcaagaaaagctggacgcttggcaccgtgaaaaccccggcccggtcagcgacatgcccgcctaccgcagcttcctgaaagaagtgggttacttggtagacgcgccaaatagcgtgaaagccaccacggccaatgttgaccgcgaagtcgccacgcaagcaggcccgcagctggtggtgccggtgagcaacgcccgctacgccctgaacgcggccaacgcccgctggggcagcctgtacgacgcgctgtatggcaccgacgccatctccgaagaggacggcgcggaaaaaggcaccagcttcaacccgaaacgcggcgaaaaagtcatcgcttacgcccgtggcgtgctggaccgtgccgccccgctggccactggctcgcaccgggatgccgtgaagtacaccatccgcgacggccacttggtcgtcagtctggaaggcggtcgtgaaaccggcctaaaagactccggtaagctgattggttttaacggtgatgcttccgccccccaatcgattctgctggccaacaacggcctgcacctggaaatccagatcgacgccagccaccccatcggcaagaccgacccggcacacgtcaaagacgtcgtggttgaagccgcgctgaccgccatcatggattgcgaagactccgttgcggcggtggattctgaagataaagtcggtgtgtacagcaactggc

SEQ ID NO: 237856 - DNA, 789 bp, Unknown
  Bacterial polypeptide expressing nucleotide sequence isolated from the Sargasso Sea
aaaaactctcaatctataatgaaaataaagaatataatttatcagatttagagaagtttgttggtcatagaggggatgcagccaaaccaaatgcaataatcttaaaaaataataatcttcatcttgaaattattattaatcctagagcatttagtgctgcaagagatgctgctgggataagcgatattattgttgagtctgctgtttcaacaatatgtgaccatgaagatagcgtggctgcagtagacgctgaagataaagtaacttgttataggaattggctaggattgatgagaggaaatttaaaatcaatgtttgagaaaaatggtaaagaattagagagaaaacttaatccagataggagttacacttcattgaatggtgaaaagttaaaacttcatggaagaagtcttttacttgtgagaaacgttggacacttaatgacaaaccctgcaatcactttaaatgatggatcagaagtacctgagggaataatggatgcttttataacttcagcagcttgtattcatgatttgaaaagaaaaggtaattcaagagaagggtcaatttatatcgtaaaaccaaaaatgcatgggcctgaggagacagaatttgctaatttaatttttacaaaagtcgaagaagttttaaaattagaaaaaaatacaattaagtgtggaattatggatgaagaaagaagaacatctgcaaaccttaaggaatgtattagaacactcaaggatagagtattttttatcaacactggatttttggatagacactggtgat

SEQ ID NO: 237857 - DNA, 965 bp, Unknown
  Bacterial polypeptide expressing nucleotide sequence isolated from the Sargasso Sea
tataattgagtctgccgtatcaacaatttgtgaccatgaggatagtgtggctgcagtcgattctgaagataaagtaacttgttatagaaattggctaggattgatgaaaggaaatttaaaatcaatatttgaaaaaaacggtaaagaattagagagaaaacttaatccagatagaagttatatatcattgaatggtgaaaagttaaaacttcacggaagaagtcttttacttgtgagaaatgttggacacttaatgactaaccctgcaatcactttgaatgatggatcagaagttcctgagggaataatggatgcttttataacttcagcagcttgtattcatgatttgaaaagaaaaggtaattcaagagaagggtcaatttatatcgtaaaaccaaaaatgcatgggccagaggagactgaatttactaatttaatttttacaaaagtcgaagaagttttaaaattagaaaaaaatactattaagtgtggaattatggatgaagaaagaagaacatctgcaaaccttaaggaatgtattagaacacttaaagatagagtattttttatcaacactggatttttggatagaactggtgatgagatgcacacttcaatggaagctggacctatgatcaaaaaaggagatatgaaagagtctaagtggattaaaacttatgaggataataatgtagatataggcttaaaatgcggattttcaggggttgctcaaataggtaaaggaatgtgggctatgcctgataaaatgaacgaaatgatggaacaaaagattggacatgtcaatgcaggcgcaaattgtgcttgggttccttctccaactgctgctgcattacatgttatgcactatcatgaagtaaatgtatttgaaaaacaaaaagaaatattaaaaagagagccatcaaaattatctgatcttcttactattccgatagcaaatcgtccta

SEQ ID NO: 237858 - DNA, 819 bp, Unknown
  Bacterial polypeptide expressing nucleotide sequence isolated from the Sargasso Sea
tagaggtgctaaagtcattgattatgcaagagaaattttagataagtatatttttttaaaaaatcaaagttggaaaaatctaaaaaaaataccatatgttaaaaatggtatacttagtattaatctcaaaaatcctaaacaatttttaggttttagaaaacaaaaaaataaaatcttttcacttttatttaaaaacaataatttacatttagatattttatttgatcaaaaaggcaatttagaagtaaacaatcctgatggaaatcaagacccattgaaaattcatgatattattttagaatcagcaatttccacaatttgtgaccatgaggatagtgtagcggctgtagatgcggaagataaggtgctaggatatagaaactggctatctttaatgaaaggaaatttaacatcaaagtttaaaaaaaataataaaacaatccttagaaaattaaacttagatagacaatacttgtcaccaaaaggtaaaaaaatagtattacatggaagatccttgttgcttaatagaaatgttggacaccttatgactaatcctgcaattttattaaaagatggatctgaatgtccagaaggcattttagatgcatttgtaacatctgctgcttgtattcatgattttaaaaggaagggaaattctagaacaaattcaatttatattgttaaacctaaaatgcatggtccagatgaatgctcatttacaaataaaattttcgaaaaagttgaaaaagttctaaaatttaaaaaaaatcaaattttgtgtggcataatggatgaagagaggagaacgagtgttaattt

SEQ ID NO: 237859 - DNA, 865 bp, Unknown
  Bacterial polypeptide expressing nucleotide sequence isolated from the Sargasso Sea
atgacaaacccttctattcttttaagagatggttctgaatgcccagaaggaatacttgatgcatttataacctctcttgcttgcttgcatgattttaaaaaaaaaggaaattccagagttaattctatttatatagttaagccaaaaatgcatggccctgaagagtgcgattttactaatttaatttttgaaaatgttgaaaaagttttaaatttaaaaaaaaatcaaattctatgtggtattatggatgaagaaagaagaacatcggttaatttaaaggaatgcatcaggtctctaaaacatagagttttttttattaatactggttttttagatagaactggcgacgaaattcatacatcaatggaagctggagctatgatgaaaaaaagcgatatgaaattatcaaaatggattggagcttatgaaaataataatgttgatattggtttagcttgtggcttttctgggaaatgtcagataggaaaaggcatgtatcctgctccagatttgatggatgaaatgatgaaacaaaaaatcgcccaccctctagcaggagcaaattgtgcatgggtaccgtcaccaactgctgcagcattacatgctatccattatcatcaggtagaagtatttgctaaacaaaaagagatatctaaaagaaagtcagcgaatttgtctgatcttttaactattccaataacaaaaaaaactaattggtctattgaagaaattactaatgaattaaagaataatgctcaaggtattttgggttatgtagttagatgggtagatcaatcggtgggttgttctaaagtgccagatattaatggaataggtttaatggaagatagggccacatgtcgaa

SEQ ID NO: 237860 - DNA, 637 bp, Unknown
  Bacterial polypeptide expressing nucleotide sequence isolated from the Sargasso Sea
gatgtgggcaatgccagacaggatgtcggatatgatggatcaaaaaataggccatccaaaatccggtgcaaactgtgcgtgggtaccatcgccaacagctgcaacacttcattcaattcactatcacaaaattaatgtttttgaaaaacaatcagaaattagtaaaagaaaaaaagctgacattaaaaatattcttgaaataccaaaagcggatagaccgaattggtcaatggaagatattaataaagaattagaaaataatgctcagggtattttaggttatgttgttagatggattgatcagggtgttggttgctcaaaggtaccagatattaataacataggtttgatggaggatagagctacattaagaatatcttctcaacatatggctaattggctacaccataatatttgtacaaaagatcaagtaatgaaagttttaaaaaaaatggcaacaattgtagataagcaaaatgccaatgataaaaactacattccaatgtcacaaaattttgagaagtcgtttgcatttgcggcggcttgtgatttggtttttaaaggaaaagatcaaccgtctggatatactgaacctttacttcacaaaaaaagacttgaaaaaaaagctagtcactag

SEQ ID NO: 237861 - DNA, 881 bp, Unknown
  Bacterial polypeptide expressing nucleotide sequence isolated from the Sargasso Sea
tgttggtcatctaatgacgaactcatctattttgctaaaggacggctctgaatgtccagaaggacttatagatgctgtcataacatctttagcttgtcttcatgattttaaaaaaaaaagaaattccaaaactaaatcaatatatatagttaaaccaaaaatgcacgggcctgatgaatgtaaatttactaattttatatttgaaaaagtagaaaaattattaaagcttaaaaaatttacaatcaagtgtggaattatggatgaagaaagaagaacttctataaatttaaaagaatgtattagacaattaaaaaatagagttttcttcattaacacaggattcttggacagaactggggacgaaatccacacttcaatggaagcgggacctatggttaaaaaaaatgaaatgaaaaaagaattgtggattaaagcttatgaaaataacaatgtggacattggcctggctactggcttttcgggcaaatgtcaaattggcaaaggaatgtacgctgccccagatttaatgaaagaaatggtaatacagaaaattgcccatccactttcaggagctaattgtgcatgggttccaagtccaacagcagcagctcttcatgcactacattaccataaagtaaatgtttttgataaacaaagaaaacttattaaaagaaaacctgcaaaattaagtcatctattaacgattccggtaacaagaaaaaaaggttattctaatgaagaagttactaaagaattaaaaaataatgctcaaggaattctgggatatgtggttcgttggatagaccaatcagttggttgttctaaagttcctgatattaatggaattgggctaatggaagatagagcgactttaagaatat

SEQ ID NO: 237862 - DNA, 842 bp, Unknown
  Bacterial polypeptide expressing nucleotide sequence isolated from the Sargasso Sea
tacttcgcgcgttgtgttcattaacacgggtttcttagacagaactggtgacgaaattcatacctcaatgcttgcagggcctttcgcagaaaaagccgcgctcaagtctatggcgtggattaaggcttatgaaactgcaaacgtcgcagtaggccttcgttgtggtctttctggcaaagcgcaaattggtaagggcatgtggccaatacctgacgaaatgcaaaatatgatgaccgccaaaataggtcaccctaaggctggcgctaatactgcttgggttccctcacctactgcagcaacactgcacgcgcttcattaccacgatgtaaatgtgtttgacgttcaaaagtcgctagatgaaaactttagtggccttgctgacatacttaccattccattgttagaagatgcctccactctgacgcgtgaaagtattaagcgtgaaatcgacaataatgttcagggcattttaggctacgttgtacgctgggttcaccaaggcgtaggctgctcgaaagttcctgacatcaacaatgtaggcttgatggaagaccgggcgacgttgcgtatttcatcgcagcatatcgccaactggctagagcacggcattgtaagtgtagatcaggtaaaagagtctttggctcgtatggctgtcttagtagatgagcaaaatgcgggggatcctgagtatatccctatggcacctgatttagacagctcaattggcttcttagccgcaagcgatctaatcttcaaaggtaaagagcagcctagcggttacacagaacctttactgcacgcccgtcgccgcgaaatgaaggcaaaacttgcggcgagctagt

SEQ ID NO: 237863 - DNA, 724 bp, Unknown
  Bacterial polypeptide expressing nucleotide sequence isolated from the Sargasso Sea
tgctaataaaccaacagcaattataattcaaaataacaatcttcattttgaaattataatcaatccaaaagcgtttagtgccgcgcatgacattgctggaataagtgatgtaattgctgagtcagctatttctactatttgcgataatgaagatagtgtagcagctgtagatgcaaatgacaaaattgtttgttataaaaattggctgggtttaatgaaaggaaatttaaaaattcaatttgaaaaaaatggtaaaaacttagaaagaaaattaaatcctgatagaagttatatttcaaaagagggtaaaggtttaaaactacatggtagaagcttactattaataaggaatgtcggccatcttatgacaaatccatctattatcctaaaagatggaagtgaagttcctgagggaattatggatgctttttttacaactgcagcttcactccatgatttaaagctaaagaaaaattcaagaaagggctccatctatattgtgaaacctaagatgcacggaccggatgaaacaaaatttactgatacaattttttctaaagttgaggatctttttaaattgaaaagatatacttgcaaagtcggaataatggatgaagagagaagaacttcagccaatctcaaagaatgtataagatcacttaaaaacagagttttttttattaatacaggctttttagatagaactggagatgaaatgcacaca

SEQ ID NO: 237864 - DNA, 874 bp, Unknown
  Bacterial polypeptide expressing nucleotide sequence isolated from the Sargasso Sea
atggacattgctaatataagtgatgttattgttgagtcggcaatttctacaattgtggacaatgaggattcggttactgctgtagatgccgaagataaagttaaatgttatagaaattggcttggccttatgaagggtgacttaaaagcgaatatggaaaaaaatggaaaaaagtttgttagaaaattaaacccagatagaagatatatgtcaaaagatggaaaaaaaataaccttgcatgggagagctttacttttaaatcgaaatgttggtcatttaatgactaactcagcaattatcttaaaagatggatccgaagttcctgagggaatattggatgcatttgtatctactttatgtgccttacatgattttaaaaataaaaataattcaagaacaggctctgtttatattgttaaaccaaagatgcatggacccgaggaagttgcttttactaataatctttttggaaaagtagaggaaattttaggtattaaaaaattttctattaaagtaggaataatggatgaagaaagaagaactacggttaatttaaaagaatgtattagggaggtaaaaaataggatagtttttattaatactggttttttagaccgaactggggatgaaatgcatacttctttcgaagcgggtccaatgatttttaagggtgatatgaaaaaatcaacttggctaggaacatatgaaaattggaatgtcgatattggtttatcatgcggtttttctggtaaagcacagattggtaaaggtatgtgggcaatgccagacaaaatgaatgagatgatgaagcaaaaaatttctcatcctaaatccggagcaaattgtgcctgggttcctctccaacagccgcaac

SEQ ID NO: 237865 - DNA, 799 bp, Unknown
  Bacterial polypeptide expressing nucleotide sequence isolated from the Sargasso Sea
caaaaagatgttgatgaagagatagcaaaaattgcaggacctcaattggtagtaccagttatgaacgcaagatatgcactaaatgctgcaaatgctagatggatgagtttgtatgatagtctttacggaacagatattatcgatcaatcagaagatagcgtttcagagagatatgatcctctaagaggtgaaatggttattaagtatggtagagattttttagacaaatattttgcattgaaagatttgagttggaaaaaaataacaagctttgctgtaaaggatggaaagctaaaaattcttaaaggtgctgatttagtcagcttgatagatgaagataaatttattggtcacagaggtgaaagcgataatccttctgcaattattttaaaaaataataatttgcatattgaaattttaaaagactctagagcattcgctgctcaacaagatcatgcaggtataagtgacataatagtagagtctgcagtatcaactatttgtgacaacgaagatagtgtagcagcagttgactcagaagataaaattatttgttacagaaattggctaggtttaatgcgtggagacctgaagtcaaaatttgaaaaagatggaaaattatatgaaagaaagctaaatccaaatagaagttatatttctaaggatggtaaaggtttgaaattacatggcagaagccttctacttgtaagaaatgttgggcatttaatgactaacccatccattattttagatgatggaaatgaagtgccagaaggtattttagatgcatttataacaa

SEQ ID NO: 237866 - DNA, 808 bp, Unknown
  Bacterial polypeptide expressing nucleotide sequence isolated from the Sargasso Sea
gagataaataaaaatggaaaaaaatttacaagaaggctcaatcctgaccgagaatatatcgcaccagatggaaataaaattaagctaaacggaacagctttgatgttaaatcgtaatgtgggtcatctaatgacaaattcctgtattttattaaaagatggtttagaaataccagaaggtattatggatgcatttataacaactacagcagcaatccatgacttcaaaaatagaggcaattcaaaaacaaattctgtttatattgtaaaacctaaaatgcatggtcctgacgaagttgcttttactgatttaatttttgaaaaagtagaaagttttttaggtttaaaaaaatttactattaaaattggaataatggatgaggagagaagaacatctgtaaatttgagagaatgtataagagcagtaaaaaatagagttgtttttattaatacgggatttttagacagaacaggtgatgaaatgcacacatcaatggaagcaggaccaatgataaaaaaaggagaaatgaaatcagcaaaatggatttctgcttatgaaaataataatgttgatgttggtttagaatgtggtttttctggtatagctcaaattggaaaaggaatgtgggccgctccagataaaatggcagatatggttagccaaaaaattaatcatccaaaatcaggtgcaaattgtgcatgggttccgtcacctgtcgcagcaactctacatgcattacattatcaacagataaacgttttttctgtaaaaaatgaattaaaaaaaagagaacctgcaagaaccatag

SEQ ID NO: 237867 - DNA, 918 bp, Unknown
  Bacterial polypeptide expressing nucleotide sequence isolated from the Sargasso Sea
attattgagcaatcagaagatagtgtttcagagagatatgattcactaagaggtgaaatggtcattaagtatggcagagattttttggacaaatattttccattaaaagatttaagctggaaaaaaataacaagctttgctgtaaaagatggaatgctaaaaattcttaaaggtgctgatttaattaacttgatagatgaaaataaatatattggtcacaggggcgaaagcgataatccctctgcaattattttaaaaaataataatttacatgttgaaattttaaaagactctagagcgtttgctgctcaacaagatcatgcaggtataagtgacataatagtggagtctgcggtatcaactatttgtgataatgaagacagtgtagcagcagttgactcagaagataaaattatttgttacagaaattggctaggtttaatgcgtggagacttaaagtcgaaatttgaaaaagatggaaaattatatgagagaaaactaaatccaaatagaagttatatttctaaagatggtaaaggtttaaaattacatggcagaagcctactacttgtaagaaatgttgggcatttaatgacaaacccatcagttatattagatgatggaaatgaggtgccagaaggtattttagatgcatttattacaacagccgcagcacttcatgatctaaagaaaaaaaataattcaagaactggatctgtatatatagttaaacctaagatgcatggaccagaagaaacagcatttacagatttaattttttcaaaagtagaagaagttttgggattaaaaaaatatacatgtaaaataggaataatggatgaagaaagaagaacatccgataacttgaaagagtgtattaggtccttaaaaaatagagtattttttataaatacagga

SEQ ID NO: 237868 - DNA, 388 bp, Unknown
  Bacterial polypeptide expressing nucleotide sequence isolated from the Sargasso Sea
gctcaagggattttgggatatgttgtaagatggatagatcaatcggtaggttgctcaaaagtaccagacattaatggaattggcctaatggaagatagagccaccctaagaatatcttctcaacatattgcaaattggttacatcatggagtttgtagcaaaaagcaggtattagaaattatgaaaaaaatggcaaaaattgtagataatcaaaatataaaagatccagcattaaaaggccatgccccatatcaagctatgtctggaaatttcgataaatctattgcttttaaagcagcttgtgaacttgtttttcatggcagagcacagccatcaggttatactgagccaattctacatctaaatagattgcttaagaaaaattaat

SEQ ID NO: 237869 - DNA, 825 bp, Unknown
  Bacterial polypeptide expressing nucleotide sequence isolated from the Sargasso Sea
aattatagagtctgcaatatctacaatatgcgataacgaagatagtgttgctgcagtagattcggaagataaaattttatgttacagaaattggttaggtttgatgaaaggaactctaaaatccatcttcgaaaaagatgggaaaactttagaaagaaaactcaatccagatagaagttatatttcaaaagaaaacaaaaaagaaaagttacacggtagaagcttgcttttaattaggaatgttggtcatctaatgaccaactcagcgattattttagaagatggttctgaagtcccagaaggtatcatggacgcatttataacaactgctgcagcaattcatgatttaaaaagaaaaggtaactcaagaacaggctctatatatattgtaaaaccaaaaatgcatgggccagaagaaactgcttttacagataaaatatttactagagttgaagaaatcttaaaacttgaaaaaaatacgattaaatgtggtattatggatgaagaaagaagaacatctgtaaacttaaaagaatgtattagaacattaaaaagtagagttttttttataaataccggctttttggatagaactggggatgaaatgcatacgtcaatggaagcaggtccaatgataaaaaaaggagacatgaaaaaatcaaagtggataaaggcttacgaagataacaacgtagatattggtttaaaatgtggattttcaggtgttgcacaaataggtaaaggtatgtgggctatgccagataaaatgaaagatatgatggaacaaaaaatatcacatcttgaagctggtgcaaattgcgcatg

SEQ ID NO: 237870 - DNA, 865 bp, Unknown
  Bacterial polypeptide expressing nucleotide sequence isolated from the Sargasso Sea
gtaaatctcaaagataaagatcaatatgtaggttaccaagataaaggagagggcgcttatggcttattatttaaaaacaataatttacattttgaaatacaaattgataaatctcacccaattggtcaggaagacttagcaaatataaaggatatcctaatggaatcagcaattacaactattcaggattgtgaagattcagtggcagcagttgatgctgaggataaaataattgtttatagaaattggcttggtttaatgaagggcaatcttaaaagatctttcgataaggctggaaaatttattacaagagaattaaattctgatagaaaatatcttcttaaaaacggcaaaatgattttacttccaggaagaagtttaatgcttgtcagaaatgttggacatctcatgacaaaccctgcgataaaagataataaagataacgaagttcctgagggcatcatggatgcattttttacaatatgcattgcaatacatgacattattggaaacggaatttataaaaattctaaaactaaaagcatttatattgttaaacctaaaatgcatggtccagaagaagtaaggtttacttgtgatctattctctgaaattgaaaagatttttaatttaccagaaaatacagtcaaattaggaataatggatgaagaaagaagaactactgtaaatcttaaagaatgtattgaagtagcaaaacatcgagttatttttataaacactggttttcttgatagaactggagatgaaatacacactagcatggaagcagctccaatggttactaaatctgacatgaaaaaagaaaagtggataaatgcatatgaaaattggaacgttgatatag

SEQ ID NO: 237871 - DNA, 946 bp, Unknown
  Bacterial polypeptide expressing nucleotide sequence isolated from the Sargasso Sea
ttacgaaagcatgtaacgatcaatgatcaacccgtatctgcatcactttttgatttcgctgtctacctttcaaataactatgaagccctttcaaaaaaaggcacaggaccttatttttatcttccgaagcttgaaaatcatcttgaggcgagactctggaacgatgttttcgtgcatgctcagaattttttaaatattgatcgaggcacaatcaaggccacagttttgattgaaacaataactgctgcctttgaaatggatgagattatcttcgagctaaaagaacattcggctgggcttaattgtggtcgatgggattacatatttagctttataaagaaatttagaaatcatcaaaattttctattaccaaacagaaccgaggtaacaatggagcggcattttctaaaaagctatgtcgacttgcttattcgcacttgccataaaagaaatgtacatgcgatgggtggaatggcagctcagattccaatcagaggcgatgaagaacaaaatcaaattgccatgaataaagtttctttggataagttaagagaggcaaatgctggtcacgacggcacatggattgctcatcctggattatctcaggttgcaatgaatgcgtttaatcaagccatgggatcatctcccaatcagattcccaataagagaaatgatatttcagtgaatgctcaagatcttatcaaggtccctgatggcaatattaccgaagatggtttgagacagaacatatcaataggaattcagtacattgaggcatggctctcgggcaatggttgtgttccaattcataatctaatggaggacgctgctacagcagaaatatcgcgttcacaaatctggcaatggattcatcatcgtgcaaaaaccacagattcaaataagactataaccgaaagagtatttcatcaagacgctcgaggatgaa

SEQ ID NO: 237872 - DNA, 850 bp, Unknown
  Bacterial polypeptide expressing nucleotide sequence isolated from the Sargasso Sea
aatattgatgaagaaatatctaaaattgctggtccacagttggttgttccaataatgaatgcaagatatgcattaaatgctgctaacgctagatggattagtttgtacgactcgctatatggtactgatgttatacctgaaacaaaaggagcggttcgtggaaaaacatacaatccgataagaggagcaagggtaatagagtatgctcgagaatttttagataaatatgttcccttaaaagaaaaaagttggaaagagcttgcgaatgttccagaaattaacaataataaattaagtttaaaacttaaaaatccagagcaatttgttggctactctaaaagatcaaattttctttcttctcttttatttgtaaataataatcttcacatagaaattttatttgatcaggaaggtttgttagaaattaataaccctgatggaaaccaagataaaattgcaatacatgacattattttagaatctgcaatttcaactatatgtgatcacgaagatagtgtggcagcagtagatgccgaagataaagttctaggatataaaaattggttgggtttaatgaaatttgatcttcatacagagtttgaaaaaaatggaagaaaaactattagaaaattaaacactgatagagaatatattaataaaaatggtaaaaaaattaaactgcacggacgggctttacttttaaacagaaatgtaggtcatttaatgacaagtcctgcaatattacttgatgatggatctgaaattccagaaggtattatggatgcatttataacttctcttgcttgtttacatgacttcaaaattaaaggaaattcgagaacgcagtcta

SEQ ID NO: 237873 - DNA, 790 bp, Unknown
  Bacterial polypeptide expressing nucleotide sequence isolated from the Sargasso Sea
tttgaagaaagagggaccagattttaaaatagagactaaaaatgtagatgatgaaattactcaaattgccggacctcaactagtcgttccaataatgaatgctagatacactctcaatgcagctaatgctagatgggtcagtttatatgatagtttgtatggtacaaatattattgagtcagaagaaggagggagtgaaagatatgacccaaatagaggacaagaagtaataaaatatgtcagagaattttttgataaatatattccaattgatgggactagttggaaaaatatatctgcacttaaaataaaagataaaaatcttataattttaaaagaagataaagagtataaacttagagatgaaaataaatttgtaggtcacagaggtgatgtaaataagccaacggcaataatcataaaaaataataacctgcattttgaaattattattaatccaaaagcatttagcgctgctcatgatatagctggaataagtgatgtgatagcagagtctgcagtttcaactatttgtgacaatgaagatagtgttgcggcggttgatgctgaagacaaagtagcatgttacagaaactggctaggtctaatgaggggagatctaaaagtacaatttgaaaaaaacggaaaaaaattagagagaaaacttaatcctgacagaagctacatttctaaagaaggaaaaggtcttaaattacatggaagaagtttgcttttaataagaaatgttggtcacttaatgaccaattcatcaataattctaaatgatggt

SEQ ID NO: 237874 - DNA, 811 bp, Unknown
  Bacterial polypeptide expressing nucleotide sequence isolated from the Sargasso Sea
agaaagttaaatcctgatagaaaatatatttcaaaagatggcaaaggtttaaaacttcatggaagaagtttactcttaataagaaatgttggtcatttaatgactaatccatctataattcttaatgacggctctgagatacctgagggcatcatggatgcattttttaccactatagctgctattcatgatttgaaaagaaaaagaaattctagaactggttctatttatatagttaaacctaaaatgcacggtcctgaggagactgcttttactaatacaattttttctaaagtagaagaattattaggtttagaaaaatttacttgtaaaattggaataatggacgaggaaagaaggacttcagctaatttaaaagagtgcatcaggacccttaaaaatagagttttttttatcaatactggttttttagatagaactggagatgaaatgcatacctctatggaagccggaccaatgattaaaaaaggagacatgaaatcttcaagatggattaccgcttatgaaaataacaatgttgatgttgggttaaaatgtggcttttctgggaaagcacaaataggaaaaggtatgtgggcaatgccagatcaaatgaaagaaatgatgaaagaaaaagtaaatcatctaaaatctggagcaaattgcgcctgggtgccttctccaactgcagcttctttacatgcactacattatcatcagattaatatatttgaagaacaacaaaaaattaaaaaacgtgaaaaggcaaaactagatgatcttttaaatatcccaattataaataaaccaa

SEQ ID NO: 237875 - DNA, 869 bp, Unknown
  Bacterial polypeptide expressing nucleotide sequence isolated from the Sargasso Sea
aggagactttaagtctaaatttgaaaaagaaggaaaattatttgagagaaaattaaatccaaacagaagttatatctcaaaagatggtaaaggtttaaagttacatggtaggagccttttacttgttagaaacgttggacatttaatgacaaacccttcaattttattaagtgatggaagtgaaatacctgaaggaattatggatgcttttataactacagcagctgcacttcatgatattaaaaataaaaataattcaagaactggatcagtttatattgtaaaacctaaaatgcatggtccagacgagacagcatttacagatttaattttttctaaagttgaggaagttctaaatttacctaagtacacatgtaagattgggattatggatgaagagcgaagaacatcagcaaatttaaaagaatgtattagaagtcttaaaaatagagttttttttatcaatactggtttcttagatagaactggtgatgaaatgcatacatcaatggaagctggtcctatgattaaaaaaggtgatatgaaatcgtctaaatggattaatgcatatgaaaataacaatgttgatattggtttaaattgcggattttctggtaaagctcaaattggaaaaggaatgtgggcaatgcccgacaaaatgaaagatatgatggagcaaaaaacaggacacttaaaagcaggtgcaaactgcgcatgggttccttctccaacagcagctgcgttacatgctttacattatcatgaaataaatatttttaacgaacaaaaaaaattaattgatagagaaccagctaagcttgatgatctcttaacaattccaatagcagacagacctaattgtctgtaga

SEQ ID NO: 237876 - DNA, 872 bp, Unknown
  Bacterial polypeptide expressing nucleotide sequence isolated from the Sargasso Sea
atggactgcgaagactccgtcgccgccgttgatgccgacgacaagaccgttgtctacagcaactggctgggcctgatgaaaggtgacctggccgagtccgtcaacaagggcggcagcaccttcacccgcaccatgaacccggaccgcgaatacaccaaggccgacggcaccaccctgaccctgcacggtcgctccctgctgttcgttcgcaacgtcggccacctgatgaccaacgacgcgatcctggaccaggacggcaacgaagtgccggaaggcatcatggacgcagcggtcaccagcctgatcgccatgcacaacctgaacggcaacaccagccgcaagaacacccgcaccggttcggtctacatcgttaagccgaagatgcacggtccggaagaggtggcgttcaccaccgagctgttcggccgcgttgaagacatgctgggcctgccgcgcaacaccctgaaagtcggcatcatggacgaagagcgtcgcaccaccgtcaacctgaaagcctgcatcaaggccgccagcgagcgcgttgtgttcatcaacaccggcttcctcgaccgcaccggtgacgagatccacacttccatggaagccggcgcgttcatccgcaagggcgaaatcaagggcgcagtctggatcggtgcctacgagaacaacaacgtcgacatcggtctggccaccggcctgaaaggtcgtgcgcaaatcggtaaaggcatgtgggccatgcccgacctgatggctgccatgctggagcagaagatcggtcacccgatggccggcgccaacaccgcctgggttccgtccccgaccgccgctaccctgcatgccctgcactaccacaaggtgaacgtcgccgagcg

SEQ ID NO: 237877 - DNA, 521 bp, Unknown
  Bacterial polypeptide expressing nucleotide sequence isolated from the Sargasso Sea
aaattggctaggtttgatgaaaggaactctaaaatctgtcttcgaaaaagatgggaaaacttttgaaagaaaactcaatccagatagaagttatatttcaaaagataataaaaaagaaaagttgcatggtagaagtttgctattaattagaaatgttggtcatctcatgaccaattcagcaattattctagaagacggttctgaaatcccagagggtattatggatgcatttattacaacagctgcagcaattcatgatttaaaaagaaaaggtaattcaagaacaggttccatatatattgtaaaaccaaaaatgcatggcccagaggagactgcttttacagataaaatatttactagagttgaagaagttttaaaacttgaaaaaaatacaattaaatgcggtattatggatgaagaaagaaggacatctgtaaatttaaaagaatgtattagaacattaaaaagcagagtttttttcattaatacaggttttttagacagaactggagatgaaatgc

SEQ ID NO: 237878 - DNA, 778 bp, Unknown
  Bacterial polypeptide expressing nucleotide sequence isolated from the Sargasso Sea
aaaatatgtaagggaattttttgataaatatataccaattaatggaattagttggaaaaatatatctgcactgaaaattaaagacaaagaactaaaagtcttaaaaggaaataatgaatacaatcttaaggataaaaataaatttattggatatagaggggacattagcaaacctgaagcggttattttaaaaaataataaccttcactttgaaattataattaatcctaaagcatttagtgctgctcatgacatagctggaataagtgatgtaatagctgagtctgcagtttctaccatttgtgataatgaagatagcgtagcagcagtcgacgctgaagataaggtgatttgctatagaaattggctaggtttgatgaaaggagatttaaaaattcaatttaaaaaaaaaggcaaaagtttggaaagaaaattaaatcctgatagaagctatatctctaaagaaggtaaaggtttaaagttacatggtagaagtttgttacttattagaaatgttggccacttaatgactaactcatctattatcctaaaagatggaactgaagtgcctgagggtattatggatgcttttataactacgactgctgcattacacgatttaaaaaaaaagaaaaattctagagctggttcaatttatattgtaaaaccaaaaatgcatggtccagacgaaacagcattcacagacttaattttttctaaagtagaggagttgcttggtttaaaaaaatacacttgtaaaattggtattatggatgaa

SEQ ID NO: 237879 - DNA, 714 bp, Unknown
  Bacterial polypeptide expressing nucleotide sequence isolated from the Sargasso Sea
attttaaaagatactagagcgtttgctgcccaacaggatcatgcaggtatcagtgatataatagtggagtctgcagtgtcaacaatttgtgacaatgaagacagtgtagcagcagttgactcagaagataaaattatttgttacagaaattggttaggtttaatgcgtggagacctaaagtcaaaatttgaaaaggatggaaaattatatgagagaaagctaaatccaaacagaagttatatttctagagatggtaaaggtttaaaattacatggtagaagccttctacttgtaagaaatgttgggcatttaatgacaaacccatcaattattttaaatgatggaaatgaagtgccagaaggtattttagacgcatttataacgacagctgcagcacttcatgatttaaagaaaaaaaataactctcgaactggatctgtatatattgttaaacccaaaatgcatggaccagaagaaacagcatttacagatttaattttttcaaaagttgaagaagttttaggattaaaaaaatatacatgcaaaataggaataatggatgaagaaagaagaacatcctctaatttgaaagagtgtattaggtcattaaaaaatagagtattttttataaatacaggttttttagatagaaccggtgatgaaatacacacatcaatgatggcaggacctatgattaaaaaaggcgaaatgaag

SEQ ID NO: 237880 - DNA, 953 bp, Unknown
  Bacterial polypeptide expressing nucleotide sequence isolated from the Sargasso Sea
acaagactgtgaagattcagtagcaactgtagacgcagaagataaagtattagcctatagaaattggttaggtctaatgaaaggtaaccttgaagatacttttgaaaaaaatggtaagacaataacaagaaaattaaatccagataaaacttacattacttcttctggagaatataaacttccaggtagatctgtaatgttaatccgtaatgttggacaccttatgacaaacccagctattttgttaaaaaatggtgaagaaatacctgaaggtattatggatgcaatgattacatcattaattgcaattcatgatattaaaatcaataaaatgaactctaggactggatcagtttatattgttaaacccaaaatgcatggcccagatgaagtaaagtttgcatgcgatatctttggagctgttgaagatgctctagaactagaaagaaacactctcaagataggtattatggatgaagaaagaaggacaactgttaatttaaaagagtgtatcagaatggcgagtgaaagaactgtatttattaatactgggttcttagatagaacaggcgatgaaatacatactgcaatggaactgggtccaattataccaaaaggtgaaatcaaaaatgcgaaatggatttcagcatatgaaaataataatgtaaaaattgggcttgaatgtggactttctggcaaggctcaaataggaaaagggatgtgggcaatgcctgatctcatgaatgaaatgttacaacaaaaaattaatcatccaaaaagcggtgcaaataccgcctgggtacctagtccaacagcagctacgcttcatgcgttgcactatcacgagattaatgtctttgatatccaaaaagataagtctaatgataataataattacttaagcaatatactttctgtcccagtttcaaaaggttacaactggtcccaagaaa

SEQ ID NO: 237881 - DNA, 898 bp, Unknown
  Bacterial polypeptide expressing nucleotide sequence isolated from the Sargasso Sea
ataggtattatggatgaagagagaagaacaagtataaatctaaaagaatgtattagggcagctgaatcaagagtggcttttatcaatacgggttttttagacagaacaggtgatgaaattcatacagcaatgcaagcaggttcttttttaaaaaaagctgacatgaaaaatgctccttggatatcatcttatgaaaaaagaaatgttagtattggattacaatgtggactaaaaggtaaggcacaaattggcaaaggtatgtgggcaatgccagacttaatggctgaaatgatgaaacaaaagattggacatccaaaatcaggagctaactgtgcttgggtcccaagcccaactgctgctacacttcacgctcttcactatcatgaagtaaatgttaaggaagttcaggaagatataatgagctccagattaacagggacacttgatgatttgttaactttacctttgttaaaaggggcaaatttatcagaagatgaaatttttagagaagttgaaaataatgcacaaggaatattagggtatgtagtccgttggattgatcaaggtataggttgctcaaaagtactagatattaataatattggattaatggaggatagagcaacatgtcgaatttcttctcaagcacttgctaactggattgaacatggaattgtttcaaaagaaaaagccttaaaagtacttaaaaaaatggccaaggtagttgatcagcaaaatgcagatgataaaaattatatacctatgtctggaaatgaagactcaatagcgttcaaagcagctagggatttggtttttgaaggaataaatcaaccatcaggttatacagaacctatccttcatcgtagaagattagaatttaaattaaaaaataattaag

SEQ ID NO: 237882 - DNA, 961 bp, Unknown
  Bacterial polypeptide expressing nucleotide sequence isolated from the Sargasso Sea
agattcgcattaaatgcaaccaatgcaagatggggtagtttatatgatgctctttatggtactgatatgattagtgaatcagatggtgctataagagagggcggatataaccctataagaggtaatagagtaatagcatttgcaaaaaattttttagatgaaacatttccattaaaaaatggtacctttaataaggtagttaattttgaatttattaaaagtgaaatagcttttactttggaagataattcaaaaacagtgcttttaaataaagatcaatatgtgggatatatggataagggccaaggatcatatggacttttatttaaaaataataacttgcatattgaaatacaggtagatagatcacatccaattggtcaagatgatccagcaggcataaaagatatattagttgaatctgcaattacaacgatacaagattgcgaagactctgtagcggcggttgatgccgaagataagattgttgtatatagaaattggttagggcttatgaagggtgatttaaaaagatcctttaataaaaatggtaaatatttaacaagagaattaaatggagatagaagatacttattaaaaaatggaaaaatgatactccttccaggaagaagtcttctcttagttcgtaatgttggtcatttgatgaccaatcctgcagttaaagatcaaaatagtaatgaaattccagaaggaataatggatgcattttttacaatatgcgcttcaatccatgacattgtaggcaatagcatatttaaaaactctaagactaagagtatatatatagtaaaaccaaaaatgcatggtccagaagaagtccagtttacatgtgatttattttcagaaattgaagacatatttaatctacctagaaatactgtgaaacttgggattatggatgaagaaagaaggacaacagttaatttaaaagagtgcatag

SEQ ID NO: 237883 - DNA, 754 bp, Unknown
  Bacterial polypeptide expressing nucleotide sequence isolated from the Sargasso Sea
tgagataccagaaggtattttagacggatttatatcaagtctttgtgcattgcatgattttaaaagtaaacagaactcaagagctggctcagtttatattgttaaaccaaaaatgcacggacctgaggaagtttcatttacaaataccttatttgaaaaagtggaaacagttttaggtatggaaaaatattcaattaaagtcggaataatggacgaggagagaagaacaacggttaatttgaaagaatgtatcaggcaagtaaaagatagaattgtatttattaataccggatttttagatcgcacaggtgatgagatgcatacatcttttgaagctgggccaatgatttttaaaggagaaatgaaaaaatctatttggcttaacagttatgaagattggaatgtagatattggtttaagttgcggtttttccggaaaagcacaaataggaaaaggtatgtgggctatgccagatcaaatgtcaaatatgatggatcaaaaaattagtcatccaaattctggagccaattgcgcttgggttccttcgccaactgcagcaactttacactctctgcattatcacaaagtaaatgtttttgatgttcaaaataaattaaaagctaggactaaaaccaaggtagaaaatattttagaaattcctaaagctgatagacctaactggtctattgaagatataaatcgtgaattagaaaacaatgcccaaggtattctaggatatgtagtgagatggatt

SEQ ID NO: 237884 - DNA, 787 bp, Unknown
  Bacterial polypeptide expressing nucleotide sequence isolated from the Sargasso Sea
tcaggaagtaattaaatatgttagagaattttttgataaacacattcctattaatggaactagctggaaaaacattgctaatttaaaggtagtaaacaaagatttgattatatctaaagatgactatgaatataaattaaaagatgtagataaatttgtaggacatagaggagaagctaacaaaccatcagcaataataattcgaaacaacaagcttcattttgaaataataattaatccaaaagcatttagcgctgctcatgatattgctggaattagtgatgtaatcgctgagtcagctatttcaactatttgtgataatgaagatagtgtggcagctgtggacgcagaagataaaattatttgttataggaattggcttgggttaatgaaaggagacttaaaaattcaattcgaaaaaaatggtaaaaagttagaacgaaaattaaatcctgacaggagttatatttcaaaagatggtaaaggattaaaactacacggcagaagtttgcttttaattagaaatgtaggccatcttatgacaaatccatctatcattttaaaagatggaagtgaaattcctgaaggaattatggatgccttttttacaacagctgccgcactttacgatttaaaaagaaaaaaaaattcgagaaaaggttcaatttatattgtaaaacctaaaatgcatggcccagaagagaccgcattcacagatttaattttctcaaaagttgaagatttatttaagttacaaaaatatacatgtaaaattggtataatggat

SEQ ID NO: 237885 - DNA, 916 bp, Unknown
  Bacterial polypeptide expressing nucleotide sequence isolated from the Sargasso Sea
tattgataatgaagactcggttgctgcagtagatggtgaagataaagttaattgctatagaaattggttgggattgatgaagggagacctaaccgctaacatggaaaaaaacggaaaaaaatttgtaagaaaattaaatccaaatagaacttatttatcaaaagatggtaaaaaaatatcacttcatggtcgagctttacttcttaatcgaaacgtagggcatttaatgacaaatcctgcaattatcttaaaggatggttctgagataccagagggaattatggatgctttcgtatctactatgtgtgctttacatgatttcaaaaataaaaataattcgagaaccggttctatttacatagtaaaaccaaaaatgcacggaccagaagaggttgcttttacagataaattatttggcaaagttgaggaaacattaggtttaaaaaaatataccatgaaagttggaataatggatgaagagagaagaacgactgtaaatttaaaagagtgtattagacaggttaaagatagaatagtttttataaacactggttttttagaccgaactggtgacgaaatgcacacttcttttgaagcaggtccaatgatttttaaaggtgatatgaaaaagtctacctggttaaactcatatgaaaattggaatgtagatattggattagattgtggtttttctggtaaagcccaaattggtaaaggtatgtgggctatgccagaccaaatggctaatatgatggatcaaaaaattgggcatccaaaatctggggctaactgcgcatgggttccctctcctacagctgcaactttacactcaatgcattatcacaaagtaaatgtttttaaagaacaggataaaattaagtctaggaataaaactaatatacaaaatattttagaa

SEQ ID NO: 237886 - DNA, 853 bp, Unknown
  Bacterial polypeptide expressing nucleotide sequence isolated from the Sargasso Sea
gatattactggtttagcagtaaataataaaaaactctcaatttataaagaaaataaagaacataatttatcagatttagaaaagtttattggtcatagagggaatgcagccaaaccaaatgctataatcttaaaaaataataatcttcatcttgaaataattattaatcctagagcatttagtgctgcaagagatgctgccgggataagtgatattatagttgagtctgccgtttcaacaatatgtgaccatgaagatagtgtagccgcagtagatgctgaagataaagtaacttgttatagaaattggctaggactgatgaaaggaaatttaaaatcaatatttgagaaaaatggtaaagaattagaaagaaaacttaatccagataggagttacacttcattgaatggtgaaaagttaaaacttcacggaagaagtcttttacttgtgagaaacgtaggacacttaatgacaaacccttcaatcaccttaaatgatggatcagaagtaccagagggaataatggatgcttttataacttcagcagcttgtattcatgatttgaaaagaaaaggtaattcaagagaagggtcaatttatatcgtaaaaccaaaaatgcatgggcctgaggaaacagaatttgctaatttaatttttacaaaagtcgaagaagttttaaaattagaaaaaaatacaattaagtgtggaattatggatgaagaaagaagaacatctgcaaaccttaaagaatgtattagaacacttaaagatagagtattttttataaatactggatttttagatagaactggtgatgagatgcatacctcaatggaagctggaccaatgatca

SEQ ID NO: 237887 - DNA, 778 bp, Unknown
  Bacterial polypeptide expressing nucleotide sequence isolated from the Sargasso Sea
attcacaccagtatgcaagctgggccgatgcttcgaaaaagcgatatgaaaaccacgtcctggatacaggcatatgaaaacagaaatgtcgaagtaggtctaaaatgtggattgcagggaaaagcccaaatcggaaagggcatgtgggcaatgcctgatcaaatgtcagacatgctcaacgaaaaggtacaacacccactggctggcgctaattgcgcttgggttccgtcaccaacagctgccaccttgcacgcgacccattatcacaaaattaatgtccaacaccgacaagacgaaataaggtcacttgctgtgcaaagctccctagacgacttactgcagatacctttacagtcgggtgaaaaattgacggaaagtgaaattcaaagtgaaattgaaaacaattgccagggcattttgggatatgttgttcgctgggttgatcaagggattgggtgttctaaagttcctgatatcgacaatgtacagctgatggaagacagggcaacctgtagaatatcctctcaaagcttgagtaattggctttgccataatttcgtggatcatgatctggttgttaatacgcttaaaaaaatggcagctattgtggactcacaaaatgccagtgatattaattatagacctatgtcgcctacttttgatactgaagctttcctagctgcgtatgatttaatatttagcggtgagacccagccctctggttatacagagccaattctgcatagatggcgtttggaacttaaacgcaaaatgtgat

SEQ ID NO: 237888 - DNA, 799 bp, Unknown
  Bacterial polypeptide expressing nucleotide sequence isolated from the Sargasso Sea
gttaatttgaaagaatgcattagggcggctaaagacagagttatttttattaatacaggctttttagatcgaacaggtgatgaaattcataccagcatggaagccggacccatgattccgaaagctcttatgaaacagcagccctggataaacgcctacgaagactggaatgtagacgttggtcttgaaactgggtttagtggcaaagcgcaaataggtaaaggaatgtgggcgatgcctgacgaaatgttaggaatgtatgagagtaaatcgatgcatccagaggcaggtgctaattgtgcttgggtaccttcacctactgcagctacacttcatgccattcattatcaccaagttttggtgagcgaaaggcaagaaacaattaaatccagaagtaaggccgatcttaatgacattcttaccatacctttacttgaggatgcttcttcattaagcgaaaaagatatacaagatgagctagataataactgccaaggcatattaggttatgtcgtgagatgggtagatttaggaataggttgctccaaggtgcccgatattaataatgttggtctaatggaggatagggctacttgtagaatttctagtcaacacatagcaaactggttacatcacgaaatttgctcggaagaacaggttatagaaacaatgaaaaagatggcagttattgttgataagcaaaatgaaggtgattctgaatatacaaatatgtctccaagttatgaagggctagccttttctgcagcttgtgagttagctttgcaaggaaggattcagc

SEQ ID NO: 237889 - DNA, 814 bp, Unknown
  Bacterial polypeptide expressing nucleotide sequence isolated from the Sargasso Sea
gaaagaagaacatctgtaaacttaaaagaatgtattagaacactaaagagtagagttttttttataaatactggctttttggatagaactggagatgaaatgcacacgtcaatggaagcgggtccaatgataaaaaaaggtgacatgaaaaaatcaaagtggatagctgcatatgaagataacaatgttgatgttggtttaaaatgtggattttcaggtgttgcacaaataggtaaaggtatgtgggctatgccagataaaatgaaagatatgatagatcaaaaaatatcacatcttgaagctggtgcaaattgcgcatgggttccttctcctaccgcagcgtctttgcacgcgatgcattatcacaagttaaatatttttgaaaaacataaaaaattaaataataataaaataaattacattgatgacttattatcgattccaatagcagatagacctaattggagcaaagaggagataaataacgaattatgtaactcagctcagactattttaggatatgtagtaaggtgggtagaccaaggaataggatgctctaaagttccagatataaataatgttggattgatggaggatagagcaacattaagaatatcttctcaacatatagctaactggctacatcatggtatttgctcaaatagacaagttttagaaattctaaaaaaaatggcaaagatagttgataaacagaatgaaggagatccagaatatcaaaaaatgtctccaaattacgataagtcaatttcttttaaggcggcatgtgaattgattttccatggcaagtcgcaac

SEQ ID NO: 237890 - DNA, 883 bp, Unknown
  Bacterial polypeptide expressing nucleotide sequence isolated from the Sargasso Sea
acaaattataggatttagaaaacaaaaaggtaaaatattctcactactttttgttaacaataatttacacttggatattttatttgatcaaaaaggtaatttagaagtaaataatcccgatggaaatcaagatccactaaaaatacatgatatatttttagagtcagcaatttctacaatatgcgatcatgaggatagtgttgctgcggtagatgctgaagacaaagttttaggttatagaaattggctttctttaatgaaaggaaacttaacctcaaaatttaggaaaaataataaaaccataataagaaaattaaattcggatagagaatatttatctctaaaaggtaaaaaatttaaactacatggaagatctttgttgcttaacagaaatgttgggcacttaatgacaaatccggcaattcttctaaaagatggctcagaatgtcctgaaggaattttagatgcttttgttacatctgcagcatgtcttcatgattttaaaataaagggaaattctagaactaactcaatttatattgttaaaccaaaaatgcatgggcctgatgaatgtgcatttacaaataaaatttttgaaaaagttgaaaaggttttaaaactaaaaaaaaaccaaattctatgtggaattatggatgaggaaagaagaacaactattaatcttaaagaatgtattagagttttaaaaaaaagagtattttttattaatactggttttcttgatagaactggtgacgaaatacatacctctatggaaattggtccaatgataaagaaaggggatatgaaatcctcaaaatggattaatgcatatgaaaataataatgttgatgtaggattggcttgtggtttttctggaaaagca

SEQ ID NO: 237891 - DNA, 641 bp, Unknown
  Bacterial polypeptide expressing nucleotide sequence isolated from the Sargasso Sea
ggaaaaggaaatgtgggcaatgccagatcagatggcaaatatgatggagcaaaaaataggacatccaaaatcaggagctaattgtgcatgggttccttcaccaactgcagcaactttacactcaatgcactatcacaaaatagatgtctttaaagagcaagataaaattaaatcgagaggtaaagcaaaactagtagatattttagaaataccaaaagccgatagaccaaactggtcaatggaagatattaatcgagagttagaaaataatgctcaaggtattttaggctatgtagttagatggatagaccagggcgtaggttgttctaaagttccggacattaataatgtaggtttaatggaagatagagcgacattaagaatttcttcgcaacatatggcaaactggctacaccatgggatatgtaacaaagaacaagtattgaaaataatgaaaaaaatggcagcaattgtggacaaacaaaatgcgcaagataaaaattacgaaccaatgtctaaaaattttgaaaaatccatagcttttatggctgcttgcgatttggtatttaagggtaaggaccaaccttcgggatatactgaaccattattgcataaaagaaggttagaaaaaaaacactaaa

SEQ ID NO: 237892 - DNA, 941 bp, Unknown
  Bacterial polypeptide expressing nucleotide sequence isolated from the Sargasso Sea
ggatgcttttgtatccctctttgtgcccttcatgattttaaaaaccaaaataattcacgtactggatctgtttatatcgttaagccaaaaatgcatggaccagaagaagttgcatttactaacaaactttttggaaaagttgaagaggttttaggaataaagaaatattctattaaagttggaattatggatgaggaaagaagaaccactgtaaatttaaaagaatgtataagacaagttaaaaacagaatcgtttttattaatactggtttcttagatcgaactggagatgagatgcacacttcttttgagtctggtccgatgatttttaaaggagagatgaaaaaatcgacctggctcaatacttatgaaaattggaatgtagatattggtttaagctgtggtttttctggtaaagctcaaataggaaaaggaatgtgggcaatgcctgatcaaatggcaaatatgatggaacaaaaaataggtcatccaaagtctggggctaattgtgcatgggttccttcaccgactgcagcaactttacattcgatgcattaccacaaaatagatgtctttaaagaacaagataagattaaatctcgaagtaaagcaaaattagaggatatattagaaataccgaaggcagatagacctaactggtcaatggatgatattaatcgagagttagaaaataatgctcaaggtattttaggctacgttgttagatgggttgaccaaggcgtaggttgttctaaagttccagacataaataatgtaggtttaatggaagacagagcaacgctaagaatttcttcacaacatattgctaattggttgcaccatggagtttgtaaaaaagatcaagttatggatgtaatgaaaaaaatggctaagatagtagatgatcaaaataaaaacgatcctagctatcaaaaatgtct

SEQ ID NO: 237893 - DNA, 727 bp, Unknown
  Bacterial polypeptide expressing nucleotide sequence isolated from the Sargasso Sea
aagtcgacttggttagggacttacgaaaactggaatgtagatattggtttaagttgtggtttttctggtaaagctcaaattggtaaaggtatgtgggctatgcctgatcaaatggcaaatatgatggatcaaaaaattggacatccgaaatcaggtgctaactgtgcttgggttccatcacctacagcagcgacgttgcattcgatgcattatcacaaggtcaatgtatttgatgaacaaaatattataaaattaagaaaaaaagctaaattagatgatattttagaaataccaagagctgatagacctaactggtcagaggaagatattacacgagaattggaaaataatgcacaaagtattttggggtatgttgtaagatggattgatcagggtataggttgttctaaagtaccagatattaataatgttggattaatggaggatagagcaacacttagaatttcatctcagcatatagcaaattggttacatcataagatttgcacaaaagatcaagttttaaatgtgatgaaaaaaatggcaaaaatagttgatggccaaaataaaaatgacttaaattataaatcgatgtcagaaaattttgataactcaactgctttttcagctgcttgtgatttagtttttaaaggaagatatcagccttcaggatatactgagccgcttttacacaaaaaaagattagaaaaaaaatctattcattagt

SEQ ID NO: 237894 - DNA, 877 bp, Unknown
  Bacterial polypeptide expressing nucleotide sequence isolated from the Sargasso Sea
agaagcctcatgcttgtaagaaatgttggacatctcatgactaatccagcaattcttgataaggatggtaatgaggtgcctgagggaataatggatgcaatgttcacaatttgtattgcaatgcatgatattaatggtaagggagagataaaaaattctaggactggcagcatttatatcgtgaaaccaaaaatgcatggacctgatgaagtgcagtttacttgtgatttattttcagcagttgaaaaagccttaaatcttgatcagttgacagtcaaagtagggatcatggatgaagaaagaagaaccactgtaaatcttaaagaatgtattcgagttgctaaggaaaggataatttttattaacactggatttttagataggactggagatgaaattcataccagcatggaggctggtcctatgattcctaaggcagacatgaaacagcagccttggattcttgcttatgaagactggaatgttgattcaggtcttgaaactggatttaaaggcaacgcacaaattggtaaaggcatgtggccaatgcctgacgaaatgttaaacatgtatgcaaccaaaatcatgcatccagaatctggagcaaactgtgcatgggtaccatcacctactggcgccactctccatgcaatgcattatcatcaaatcttagtttctaatagacagcaaagtatccttgagcgacctaaggccagtattgatgatattctcaccattccattaatggaaaatccagaagaactatctgctgaagatattcaaaaagaattagataataatgctcaaggtattcttggttatgttgttagatggattgatcaaggagtaggttgttctaaggtccctgatattaaca

SEQ ID NO: 237895 - DNA, 874 bp, Unknown
  Bacterial polypeptide expressing nucleotide sequence isolated from the Sargasso Sea
gttggacacttaatgacaaaccctgcaatcactttaaatgatggatcagaagttcctgaaggaatattggatgctttcataacctcagcagcttgtattcatgatttaaaaagaaaaggtaattcgagagaaggatcaatttatatcgttaaaccaaaaatgcatggtccagaagaaacagaatttactaatttaatttttactaaagttgaagaagttttaaaattagaaaaaaatacaattaagtgtggaattatggatgaagaaagaagaacatctgcaaaccttaaagaatgtattagaacacttaaagatagagtattttttataaacactggatttttagatagaactggtgatgagatgcacacctcaatggaagctggaccaatgataaaaaaaggagatatgaaagagtctaagtggattaaaacctatgaggacaacaacgtagatataggcttaaaatgtggtttttcaggagttgctcaaataggtaaaggaatgtgggccatgcctgacaaaatgaacgaaatgatgaaacaaaaaattggacatgtgaatgctggcgcaaattgtgcttgggttccttccccaactgctgctgcattgcatgttatgcactatcatgaagtaaatgtttttgaaaaacaaaaagcaatattaaaaagagagccatcaaaattatctgatcttcttactattccaatagcagatcgccctaattggtctatcgatgaaattaatactgaaatttcaaattctgctcaaactattttaggttatgtagtcagatggattgatcaaggtataggttgttccaaagttccggatataaatgatattggattaatggaagatagagcacctttaa

SEQ ID NO: 237896 - DNA, 557 bp, Unknown
  Bacterial polypeptide expressing nucleotide sequence isolated from the Sargasso Sea
agaaaattaaatccacatagaagttatatctcaaaagatggtaaaggtttaaaattacatggaagaagtcttttgctagtaagaaatgttggtcatctgatgactaacccttcaattttattaagtgatggaagtgaaatacctgaaggaattatggatgcttttataactacagcagctgcgcttcatgatattaaaaataacaataattcaagaactggatcagtttatattgtaaaacctaaaatgcatggtccagacgagacagcatttacagatttaattttttctaaagttgaggaagttctaaatttacctaagtacacatgtaagattgggattatggatgaagagcgaagaacatcagtaaatttaaaagaatgtattagaagtcttaaaaatagagttttttttatcaatactggtttcttagatagaactggtgatgaaatgcatacatcaatggaagctggtcctatgattaaaaaaggtgatatgaaatcatctaaatggattaatgcatacgaaaataacaatgttgatattggtttaagttg

SEQ ID NO: 237897 - DNA, 925 bp, Unknown
  Bacterial polypeptide expressing nucleotide sequence isolated from the Sargasso Sea
taaagatgaaaatggtgatgaagtacctgaaggaatcatggatggattttttactatatgcgcttcaatacatgatcttattggtaatggtttatacaagaattctaaaactaaaagtatttacatagtaaagcctaagatgcatgggccagaagaggtgcaatttacatgtgatttattttcagcaattgaagatatatttgatcttccacgaaatactgtaaagcttggaattatggatgaagagcgaagaactaccgttaacctaaaagaatgtatcgaagttgccaaacacagagtaatttttattaatacaggctttcttgatagaactggcgatgaaatacatacaagcatggaagctggtccaatggtcacaaagggtttgatgaaggagcaaaaatggattaatgcttatgagaattggaatgttgatattggactagaaactggttttaaaggaaacgctcaaataggaaaagggatgtgggcaatgcctgatgagatgttagaaatgtataagtcaaaaacaatacatcctaaatctggcgcaaattgtgcatgggtaccatcaccaactgctgcgacgattcatgcaattcattatcatcagatctctgttcaagatgaacaagataaaattataaaaagggaaaaagctaaattagaagatatcttgtctatacccttgataagctctgatagtgtaccaagtccccaagagatacaaaaagaattagataacaatgcacaaggtatccttgggtatgttgttaggtgggtagatcaaggagtaggttgttcgaaagttcctgatattaatgatgttggcttaatggaagatagagcaacttgcaggatttcaagtcagcatatttctaattggttatatcatgatctttgttcagaagagcaagtcatagat

SEQ ID NO: 237898 - DNA, 394 bp, Unknown
  Bacterial polypeptide expressing nucleotide sequence isolated from the Sargasso Sea
tgtaactcaggctcaaacaattttaggatacgttgttagatgggtagatcaaggaataggttgttccaaagttccagatataaataacgttggattaatggaggatagagcaacacttagaatatcatcacagcatatagctaactggttacatcacggtatatgctcaaataggcaggttttagaaattcttaagaaaatggcaaagatagttgataaacaaaatcatggagatcctgaatatcaaaacatgtctccaaattacgacaaatcaatatcttttaagacggcatgtgagttgattttccatggtaaatcacaaccatcaggctatactgaacctctattacatttgaatagattaattaaaaaagttaattatagaaacttataa

SEQ ID NO: 237899 - DNA, 651 bp, Unknown
  Bacterial polypeptide expressing nucleotide sequence isolated from the Sargasso Sea
gggaacattccaaaattcccgcagcggaagcatgtatatcgtcaagcccaagatgcatggtcccgaggaagtagcgcttacagtcgaactcttcggaagaatcgaaaaagctctcggcatggaagaaggaacccttaaaatcgggattatggatgaagaacgacgaacaaccgtcaacctcaaggaatgcatccgtgtggcaagggatcgtgtgattttcatcaacaccggttttctagaccgaactggagatgaaattcatacctcgatgaaggccggaccaatggttcgtaagactgacatgaaaggtcagaaatggatccaaagttacgaggattggaacgttgatgtcggcctggcttgcggcttttccgggaaagctcaaatcggcaagggcatgtgggcgatgccggatgaaatggcagacatggtgaaaaacaaaatcgggcaccccatggccggtgccaactgcgcctgggtcccatcccctactgctgcgactctgcatgccattcattatcatcgggtgaatgtgcttgaacgccaaaaggaactcatggagcgtgagcctgcaaatttagacgatatcctcaaaatccctttagaggagcaaccaaactggtcagaagaagaaatccgaaaggaactgga

SEQ ID NO: 237900 - DNA, 811 bp, Unknown
  Bacterial polypeptide expressing nucleotide sequence isolated from the Sargasso Sea
gggaaattctagaactaactcgatttatattgttataccaaaaatgcatggaccagatgaatgtgcatttacagataaaatttttaaaaatgttgaagaagttttaaaacttaaaaaaaatcaaattctttgtggaattatggatgaagagagaagaacaaccattaatcttaaagaatgtatcagagttttaaaaaaaagagtattttttatcaatacaggttttttagatcgaacaggagatgaaatacacacatcaatggaaattggaccaatgataaagaaaggtgatatgaaatcttcaaaatggattaaggcctatgaaaataataatgttgatatcggattagcctgtggtttttctggaaaggctcaaattggaaaaggaatgtgggcaatgccagatttattgaaagagatgatggaacaaaaaatttctcatccaatttcaggagctaattgtgcatgggtaccttctccaactgcagcagcaatacatgctatacattatcatgcggtaaatgttttctctattcaccaaaaaataaaatttagagaatctgctaaattagatgatcttcttacaatacctgtagataacaaaaaaaagtggtctaaggaagaaattgaaaaagaattaaaaaataatgcccaaggtattttaggctatgttgttagatgggtcgatcaatcggtaggatgctcaaaagttccagatataaatggaataggcttaatggaagatagggccacatgcagaataagtagtcaacatatagccaattggcttcatcacggtatatgcagcaaa

SEQ ID NO: 237901 - DNA, 855 bp, Unknown
  Bacterial polypeptide expressing nucleotide sequence isolated from the Sargasso Sea
aatgggtcaaattaatttatatgatctctggagaggtcagattgattttctcgatccaaataatggaaaagaatataaattaaatccagacccagctgtattaatcgtcagaccaaggggttggcatcttgaggaagctcatattgaaattgatggagtaagaatttcaggcggtatatttgattttgctgtttatctttttcataatcacgagaaattaaaagagaatggaacaggcccgtatttctatctaccaaaaatggaaacatatctagaggcaagattatggaatgaagtgtttgtatatgcccaagaaaaacttggtattgaaaatggaacatgtaaagcaacaattttgattgagacactacctgcagcattccaaatggatgaaatattatatgaattaaaagatcacatagttggtttaaactgtggccgttgggattatatatttagctatattaagagattagctttaaacccgaactatattcttccagaccgttcgcaagttattatgggagatgcttttttaaactcttactcattactgttgataaaaacttgtcacaaaagaggtgcctttgctatggggggtatggctgctcaaattcctgtaaagaataatgatgaagaaaatgataaagcatttgaaaaagtaagaaatgacaaggaacgagaagttaacaatggtcatgatgggacatgggttgcacatcctgggttagtacctgtggcgatggaaatttttgataaacagttatctggtgataatcagctagatgtttctttagataatataacaattactcaagacgatttactagaagtgcataaaggacaaagaactga

SEQ ID NO: 237902 - DNA, 928 bp, Unknown
  Bacterial polypeptide expressing nucleotide sequence isolated from the Sargasso Sea
attgaatggtgaaaaatcaaaacttcatggaagaagtcttctgcttgtgagaaatgttgggcacttaatgacaaaccctgcaatcacattaaatgatggttcggaagttcctgagggaataatggacgctttcattacttcagcagcttgtattcatgattttaaaagaaaaggcaattcaagaacaggatcaatttatattgtaaaaccaaaaatgcatgggccagaagaaacagaattcactaatttaatttttacaaaagttgaagaagttttaaaattagaaaaaaatacaattaagtgtggaattatggatgaagaaagaagaacatctgcgaaccttaaagaatgtattagaacacttaaagatagagtattttttataaacactggatttttagatagaactggtgatgagatgcacacctcaatggaagctggacctatgataaaaaaaggagatatgaaagagtctaagtggattaaaacctatgaggacaataacgtagatgtaggcttaaaatgtggtttttcaggagttgctcaaataggtaaaggaatgtgggccatgccagacaaaatgaacgaaatgatggaacaaaaaattggacatgtgaatgctggtgcaaattgtgcttgggttccttccccaactgccgctgcattgcatgttatgcactatcatgaagtaaatatttttgaaaaacaaaaagcattattaaaaagagagccatcaaaactatctgatcttcttactattccaatagcagatcgtcctaattggtctgttgatgaaattaatactgaaatttcaaattctgcccaaactattttgggttatgtagtaagatggattgatcaaggtataggatgttccaaggttccagatataaatgatattggattaatggaagatagagcaacctaa

SEQ ID NO: 237903 - DNA, 936 bp, Unknown
  Bacterial polypeptide expressing nucleotide sequence isolated from the Sargasso Sea
tacaaatcagttttgtggctatcaaggttcaccagatcaaccttcaggagtactgcttaaaaaccataacttgcatgctgagattcaaattgatgcaagtcactcggttggagcaacagatcctgccggcattaaagatgttttacttgaatctgctataactactattcaagattgcgaagattcagttgcagcagttgatggtgaagataaagtgactgtttatcgaaattggttaggcttgatgaagggtgatctgcaggaaaccttccttaaagggggcgccgagatgactcgttctctcaaccctgataggagttatattgcaccagacggatctaaccattctctttcaggtcgaagtctgatgcttgtaagaaatgtaggacatttgatgacaaatcctgcaattcttgatcaaaatgataatgaggttcctgaaggaattttagatgcaatgtttaccatttgtattgcgatgcatgacttgaatgggaatagcatcgtaaaaaactctcaagctgggagtatttatattgtgaagccaaaaatgcatggtcctgatgaggtgcaatttacttgtgatctattttcagccgttgagaaatcattaaatcttaatcagcttactgccaaagttgggatcatggatgaggagaggagaactacggtaaatcttaaagagtgtatccgtgttgcaaaggatagagtaatttttattaatacaggtttcttagatagaactggagacgaaatacatactagtatggaggctggacctatgattccgaaagcacaaatgaaacagcagccatggattcttgcttatgaagactggaatgttgactgcgggctcgagactggttttaaaggtaatgcacaaataggcaaaggcatgtggccaatgcctgatgaaatgctcaacatgtatgaaac

SEQ ID NO: 237904 - DNA, 896 bp, Unknown
  Bacterial polypeptide expressing nucleotide sequence isolated from the Sargasso Sea
tttgaaatcacaacagcaaaatgttgataaagaaattgcaagacaagcaggccctcagctggttgtcccagtcaaaaatgctcgttttgcattgaatgctgtaaacgcaagatggggtagcttctatgatgctctgtatggcactgacgttatttctgaggacgatggtgcggaacgggccggcggttataatgagcgaaggggagctcgcgttatagattttgctaaaagctttctagatcaaacttgcccattggcagagggatcacataaggaggctaccggttattttgtagaagaaggtgtcttaaaaataaaccttggctcagtggtaactgagctaaacgatggaacgaaatttcaaggctacgaggttgaaggggagcaactaaaaagagtactgctactcaatcatgatttacacatcgagattcagtttgatagaaatacaccagtaggctctgcagaccaagccggaatcgcagatgtgatacttgaagctgctgtaacaactatacaagattgtgaggattcggtcgcagcagtggatgctgaagacaaagtcgagatctataggaattggcttggtttgataaatggtgatctgtccgacaccttcataaaagaaggtaatcctaagacacgtgtgcttcggcgtgataaagaattcatttcaccgtccggtgaaaattttagcctccctggcagaagtatgcttttggttaggaatgttggccacctaatgcgtaacagtgctatcaagcatgatggagctgaaatttacgaggggattttggatgcggttgtaacaagtgcggttgcagtccttgatgttgaaaacagaaacctcctatccaactcaagaacgggtagtgtttatattgtaaaactctaaa

SEQ ID NO: 237905 - DNA, 935 bp, Unknown
  Bacterial polypeptide expressing nucleotide sequence isolated from the Sargasso Sea
gcaggatttatattaaatgcagcaaatgcaagatggataagtttatatgatagcctgtatggagcagatataatttcagagactcaaggagctttaaaaggaaaaacttataatccaataagaggaaaaaaagtaatagaatattctcgaaacatattagataagtatatacctttaaaaagtttaagttggaaagatttagaaaaaattccagaagttaaaaataataaattaaacttaaaactaaagcatcctaatcagtttgtaggatataataaaaaatcgagttacctttcttcacttttatttgtaaataataatcttcatatagatattttgtttgatcaaggtggaaatatggaaattaacaatccagatggcaaccaagacaaaataaaaatacatgatattattttagagtctgcgattactactatttgtgatcacgaagatagtgtagccgccgtagatgcagaggacaaaattttaggttatagaaattggttaggtttaatgaaaggagatttaaaagaggaatttataaaaaatggaaaaaataatttaagaaaactaaatccagatagaaattacacatctcccctgggaaaaaagtttaaattgcatggcaggtcattgttattaaatagaaatgtgggacacctcatgaccaatccggccattcttttaaaagatggttcagaatgcccagaaggcattcttgatgcatttattacatctgtcgcttgtcttcatgattttaaaaaaaaaatgaattctaaaacaaactctatttatatagttaagcctaaaatgcatggaccagaagaatgtaaatttaccgacataatttttaataaagtagaaaaagttttaaatttgaaaaaaaatcaaattctaattggtataatggatgaggaaagaagaacttcagtaaa

SEQ ID NO: 237906 - DNA, 388 bp, Unknown
  Bacterial polypeptide expressing nucleotide sequence isolated from the Sargasso Sea
atcaaactctgctcaaacgcttttggggtatgtagtaagatggatagatcaaggtataggttgttcaaaagtaccagatattaataatgttggtttgatggaagatagagcaactttaagaatatcttctcaacatattgctaactggttacatcatggagttacaactaaaatgcaagttatagaaataatgaaagaaatggctaaaattgttgataaacagaatcaaaatgatcctcaatatatcaaaatgagtaatgattttgaaaactctattgcattcaaaacagcatgtgatttaatttttaatggtacaaatcaaccttcgggctatacagaaccattattgcatttaaaccgtttaaaaaaaaaaacacttaagaattag

SEQ ID NO: 237907 - DNA, 880 bp, Unknown
  Bacterial polypeptide expressing nucleotide sequence isolated from the Sargasso Sea
aaagataaagtttcttctataagaaaactctctaaaaatatatcttataaaaagccagacggcaaaactcatttcatgaagggattatcactccttttaataagaaatgttgggcaccttatgagttcatcttcaattatcgatgaaaataaaaatgaaattggtgaaggaattatagatactcttctttctgcactctgttttttaaagacgataaatatttccaataactctgaatataaatcactttatatagtaaaacccaaaatgcatggtccggaagaagtggaattttcaattgatacatttacaaaaatagaggaacttttaacaattccaaaaaatactattaaaattgggataatggacgaagaaagaagaacaactctaaacttaaaagaatgtattagagcagctaaagatagagttttttttataaatactggcttccttgacagaacaggagatgaaattcatacctctatggaagcaggtactatgattaaaaaaaatgaaatgaagaatgtaggttggataaaagcatatgaaaattggaatgtagaaattggtttaaattgtggtttttctggattagcacaaattggaaaaggtatgtgggctatgcctgatatgatgtcaaaaatgatggaagaaaagattgtccattgtcaatcaggagcaaatacagcttgggttccttcacctacagcagcaacacttcatgcgttacattatcataaagtagatgtaatggaactacataaaaaaaatattaaaaaaagaattgctacaatagatgatttaatagatttaccaattgtaaataatccaaactggacagaaaaagaagttaaaactgaacttgaaaataatattcagg

SEQ ID NO: 237908 - DNA, 748 bp, Unknown
  Bacterial polypeptide expressing nucleotide sequence isolated from the Sargasso Sea
aaaaagggggatatgaaatcatcaaagtggataagtgcatacgaaaatataaatgtagaaattggtttaaagtgcgggttttctggtaaagctcaaataggaaaaggaatgtgggctatgcctgataaaatgaaagatatgatggatcaaaagactagccacttaaaagcaggtgcaaattgtgcatgggtcccttctccgactgcagctgcattacatgcattacattatcatgatataaatatttttgatgaacaaaaaaaaatattagatagggataaggctaaacttgacgacctattaacaattccaactgcaaatagaccaaactggtccgtggaagaaataaataaagaaatatgtaattctgctcaaactttgttgggatatgttgttaggtgggttgatcaaggcgtaggttgttctaaagttcctgatattaataatgttggtttaatggaagacagagcgactctaagaatttcatctcaacatatcgccaattggatacatcacggaataacaaccaaactacaggttactgagataatgaaagatatggctaaaatagtagatgatcaaaataaaaatgatcctaattacatcagaatgagtgaaaattatgataaatcaatagcatttaaaactgcatgtgatttagtatttatgggtaaagaacagccttcaggttatacagagcctcttctgcatttaaacagaatagcaaaaaagtctagtttgaattgat

SEQ ID NO: 237909 - DNA, 337 bp, Unknown
  Bacterial polypeptide expressing nucleotide sequence isolated from the Sargasso Sea
gttggatgctcgaaggtgccggatatcaccgatgtgggcctaatggaggaccgcgccacgctgcggatttctgcccaacacattgctaactggcttcaccacggcatttgttccgaagagcaggtgatggaaaccatgcagcgcatggctgtcgttgttgatcaacagaatgccggcgatccagcctattgcaacctggcgccggactttgacgcctccatcgccttccaggcagcctgcgacctggtgttcaaggggcgtgcgcagccgaatggttatacggaactggtcctgcacgctagacgccaggaggcgaaggcgaagttcgcggcctgaa

SEQ ID NO: 237910 - DNA, 894 bp, Unknown
  Bacterial polypeptide expressing nucleotide sequence isolated from the Sargasso Sea
ttaaaagatggaactgaagtgccggaaggtattatggacgcttttataactacagcagcagcaatccatgatttgaaaaaaaaaagaaattctagaaaaggctcaatttatatagtgaaacctaaaatgcatggaccagacgaaactgcattcacagatttaatttttacaaaagttgaagaggtattaaatttaaaaaaatacacatgcaaaattggtattatggatgaagaaagaagaacatcagctaatttaaaagagtgcataagaactcttaaaaatagagtattttttattaacactggatttttagacagaactggggatgagatgcatacatcaatggaagctggtccaatgattaaaaaaggtgatatgaaattatcaaaatggattaaggcgtatgagaataataatgttgatataggtttaaaatgtggtttttctaataaagcacaaataggaaaaggtatgtgggctatgccagataaaatgaaagaaatgatggaagacaaaataagtcacttaaaatcaggagctaattgtgcgtgggttccctctccaacagcagcatctttacatgctctacattatcaccaaattaatatttttgatgagcaaaaaaaaatacttaatagagaacaatccaaattagatgatcttttaagtatacctatagctgataggccaaattggtcagtagaggaaataaataaagaaatttcaaactctgcacaaactctacttggatatgtcgtaagatggatagatcaagggattggttgttcaaaagttccagatataaataacattggtcttatggaagatagagcaactttaagaatatcttctcaacaatattgcaaattggatacatcatgggatcacaacaaa

SEQ ID NO: 237911 - DNA, 809 bp, Unknown
  Bacterial polypeptide expressing nucleotide sequence isolated from the Sargasso Sea
aatgaaaaaatattctttaaaagttgggattatggatgaagagagaagaacaactgtcaatttaaaagagtgcattagacaagttaaaaatcgaattgtttttattaacactggttttttagatagaactggtgacgaaatgcatacgtcttttgaggcaggaccaatgatttttaaaggcgaaatgaaaaaatctacttggctaaacagttacgaaaattggaacgttgacattggattaaaatgcggtttttctggtaaagctcaaataggaaaaggaatgtgggcgatgccagatcaaatggcaaatatgatggagcagaaaattagccatccaaaatctggtgcaaattgcgcttgggtaccttcgcctactgcagcaactttacactcaattcattatcataaagttaacgtttttgatgagcaagataagataaaaaatagaaaaaaagcacaagtaaaagatattttagaaattcctattgctgatcgtccaaattggtcaacagaagacattaatcgtgaattagaaaataatgtgcaaggaatattagggtatgtagttagatgggtcgatcaaggtattggttgctctaaggtacctgatataaataatgttggtttaatggaggatagagcaactttaagaatatcatctcagcatatagcaaactggttgcatcatggaatttgttccaaagaaaaagttaccgaggtgatgaaaaaaatggcaaaaatagttgataatcagaatataaacgatcctgaatacattaaaatgtctgataattttgaaaattcgatag

SEQ ID NO: 237912 - DNA, 905 bp, Unknown
  Bacterial polypeptide expressing nucleotide sequence isolated from the Sargasso Sea
aaatttacttgtgatttatttgcagcagtagaaaaagctgtaggtttagatcctctaacagtaaaagtaggcatcatggatgaagaaagaagaacgacggttaacttgaaagaatgcatcaaggttgcgaaagacagagtgatatttatcaatactggctttttggatagaactggcgatgaaattcatacaagcatggaggctggaccatttattaagaaatctgaaatgaaacaacaaccatggatagctgcttatgaagattggaatgtagatactggattagaaactggttttaaaggaaaagctcaaatcggaaaaggaatgtggccaatgcctgatgaaatgttgaatatgtatgaaacaaaaacaatgcatccggaagctggagcagactgcgcttgggtgccatctcccactgcagcaactttgcatgctctgcattatcatcagttgaatgtaccatctgttcaagaagatttgataaagagggcaaaggcgagtttggaagatattcttgaaattcctttactaaaaaatccagaagaattatctgcagaagaaattcaggctgagttagataacaatgcccaaggcatattaggatatgttgttcgttgggttgatcagggcgtaggttgttcaaaagttccagatattaacaatgtcggattaatggaagatagagcaacttgtagaatatctagtcagcacattgctaattggttgcatcatggtttgacaaatgaagatcaagtaattgaaacgatgaaaaagatggcaaaagttgttgatgatcaaaataaaggtgatccaaaatatgaaaatatgtcacctgactattccgggtatgcttttaaagcagcctgtgcattagttttagagggcagaaaccaaccaagcgg

SEQ ID NO: 237913 - DNA, 813 bp, Unknown
  Bacterial polypeptide expressing nucleotide sequence isolated from the Sargasso Sea
cctgctcaagaaaaacggactgcacctggatatccaactggaccgcaatcatcctgtcggcaaggaccatccagcaggaatctgtgacatcctcctggaatccgcagtcaccaccattcaggattgcgaggattctgtggctgccgttgatgcttccgacaaggtccatgtctaccgtaactggcttgggctgatgaaaggtgatctttcggcaaaacttgataaaggcgggaaaatgatcacccgcaccctcaatcctgatcggaaatacaagacacccgaaggatcagaaatcgtgctccctggacgttccctgatgctagttcgaaatgttggccacctgatgaccaccgatgcagtgttggatgagcaaggaaatgaaatatttgaaggtatgctggatggaatgatgacctcactcattagcctctatgatatacgaggtttgggaacattccaaaattcccgcagcggaagcatgtatatcgtcaaacccaagatgcatggtcccgaggaagtagcgcttacagtcgaactctttggaagaatcgaaaaagtcctcggcatggaagaaggtacccttaaaatcggaatcatggatgaagaacgacgaaccaccgtcaacctcaaggaatgcatccgtatggcaagggatcgtgtgatttttatcaataccggttttttagaccgaactggagatgaaattcatacctcgatgaaggccggaccaatggttcgtaagactgacatgaaaggtcagaaatggatccaaagttacgaagattggaacgttgacgtcggcctagcttgcgg

SEQ ID NO: 237914 - DNA, 907 bp, Unknown
  Bacterial polypeptide expressing nucleotide sequence isolated from the Sargasso Sea
gttgcgactgttgacgcagaggataaagtattagcttataaaaattggttggggttaatgaaaggagaccttgaagatacttttgaaaaaaaaggtaaaatccttactagaaaacttaatcaagacaaagtctataccacaactagaggggaatatacgttaccaggtcgttcagtaatgttaattagaaatgttggtcatttaatgactaatcctgcaattttaatgaaaaatggagaagaaattccagagggtataatggatgccatgatcacttcattaatagctattcacgatattaaaaatagtaaaatgaattctagaactgggtctgtttacatagtgaaacccaaaatgcatggaccagaggaagtaaagtttgcttgtgatgtcttttctgccgtagaagaagctcttaatttagataaatacactcttaaaattggaattatggacgaagaaagaagaaccacggttaatttaaaagaatgtattagggctgctaaagaacgaactgtttttataaatactggatttttggatagaacaggtgacgaaatacatacagctatggaagctggaccaataattcctaaaggtgatataaaaaatgcaaaatggatttcagcatatgaaaataataatgttaaaattggccttgactgtggtttgtctgggaaagctcaaataggtaaaggtatgtgggcaatgccagatttaatggatgagatgttaaaacagaaaattaatcatcctaaaagtggggctaatactgcatgggttccaagtccgactgctgccactcttcatgcacttcattatcacgaggtagatgtatttaatattcaaaaacaaaagtctaatgatggaaataattatttgtatgatattcttgatgtgcctattt

SEQ ID NO: 237915 - DNA, 738 bp, Unknown
  Bacterial polypeptide expressing nucleotide sequence isolated from the Sargasso Sea
attggataaaagcatacgaaaacaataatgttaagattgggctagaatgtggtttttcaggtaaggcacaaattggaaaaggaatgtgggctgcgccagataaaatgcaagatatgttggatcaaaaaattggtcacccgaaatctggagccaattgtgcctggacaccgtcccctaccgccgcaactttgcatgcaatgcattatcacaaagtaaatgtttttgatgttcacaaaaaaatcgaaaaaaaaataaaatttgacttagatagactgttgtcaatccctataatatctaaaccaatttggaatatggacgaaataaaaaatgagctagaaaataactgtcaaggaattttaggttatgttgttaggtggatcaacagcggcataggttgttcaaaagtgccagacataaataacataggattaatggaagacagagcaactctaagaatatcttcacaacacattgcaaattggcttcatcacaacatatgtactacttttcaggttttagaaaccttaaaaaaaatggcgaaaatagttgatgatcaaaataagaatgatccaaaatatgaaaaaatgtcagcaaattttgataaatctatagctttcaaaacagcatgtgatttaattttcaaaggaaaagatcaaccttcaggttatacagaaccattgttacatgctaatagacatttaaaaaaattaaatctgtaccctgtttttaaaagctgaa

SEQ ID NO: 237916 - DNA, 913 bp, Unknown
  Bacterial polypeptide expressing nucleotide sequence isolated from the Sargasso Sea
ttaaaaaaattttttattaaagttggaataatggatgaagaaagaagaaccactgtaaatcttaaagaatgtattagaaaagttaaaaatagagtagtttttataaacaccgggtttttagatagaacgggagatgaaatgcatacgtcatttgaagctggacctatgatctttaaaggggaaatgaaaaaatcaacttggttaaatacatacgaagactggaatgttgatattggtctgttgtgtggattttctggtaaagcacaaattggcaagggtatgtgggctatgccagatagaatggctgacatgatgaaacaaaaaattggtcatcccaaatccggtgctaattgtgcgtgggttccttcgccaacagcagcaacattgcacgcaattcattatcacgagctaaatgtttttaaaaaacaaaaagagctacactctaggaaaaaagctaaacttcaaaatatattaaagattcctaaagctgataggcctaattggtctgttgatagtataaataaagagttagaaaataatgcacaaggtattttgggttatgttgttagatgggttgaccaaggtattggttgctcaaaagtccctgatataaataatataggtctaatggaagatagagcgactttaagaatatcttctcaacatatagcaaattggcttcatcataatatatgcacaaaagaacaagtaatgaatgttatgaaaaaaatggcgtctgtagttgataaacaaaatattaatgataaaaattatttagcaatgtcccaaaattttgaaaaatctgtagctttctcagctgcttgtgatctggtatttaaaggtagagagcaaccatctggttatacagaacctttacttcatgcaaaaaggatagaaaaaaaatctaatcact

SEQ ID NO: 237917 - DNA, 796 bp, Unknown
  Bacterial polypeptide expressing nucleotide sequence isolated from the Sargasso Sea
aatgaatgcaagatatacattgaatgctgcaaacgctcggtgggtaagtttatatgacagtttatatggcacaaatatcattgagtcagacgaaggtggcagtgaaagatatgatcctctaagaggtcaagaggtaataaaatatgtaagagagttttttgacaaatatattccaattaaaggaacaagttggaagaatattgcttcattaaaggttgtaaataaaaatttaattatatcaaaggatgattatgaatatgaattggtagatgaaaataaatttgtaggtcataggggtgattcaaaaaaacctagtgcaataataataaaaaataacaatcttcattttgaaataattattaaccctaaggcatttagcgcagctcatgatatagccggaatcagcgatgttatagctgagtcagcaattacaaccatttgtgataatgaagatagtgtagctgcggtagatgcagaagataaggttgtttgttataaaaattggttaggtctaatgaaaggtgatttaaaaattcaatttgaaaaaaatggtaaaaatttagaaagaaaattaaacccagacagaagttatatttctaaaaatggaaaagagttaaaattacatggtagaagtttactgttaataagaaatgttggtcacttaatgacaaatccgtctattattttaaaagatggaggtgaaattcctgaaggaattatggatgcatttataacgacagctgctgcgcttcatgatttaaaaagaaaaaaaaattctaaaaatggttcaatttat

SEQ ID NO: 237918 - DNA, 948 bp, Unknown
  Bacterial polypeptide expressing nucleotide sequence isolated from the Sargasso Sea
caatggaagttataatccagaaggaaatcaagacaaaataaaaatacacgatatttttttagaatcggctatatctaccatttgtgaccatgaagatagtgttgctgcagtagatgctgaggataaagttttgggatatagaaattggcttggcttaatgaagggaaatttgaaagttgaatttataaaaaatggaaaaaaaaatttaagaaagttaaatttagatagaacctatgtttctacaaaaggaaaaaagttaaaattacatgggagatctttgttattaaataggaatgtgggacatcttatgacaaacccagccattcttttaaaagatggatcagaatgtccagagggaatacttgatgcttttgtaacttctcttgcgtgcttgcatgattttaaaaaaagggggaattccagagttaattctatttatatagtcaaacctaaaatgcatggaccagaagagtgtttatttacccaattaatttttgaaagtgttgaaaaagttttaaatttaaaaaagaatcaaattctttgcggaattatggatgaagaaagaagaacatcaattaatttaaaagagtgcataagagctttaaagaatagagtattttttatcaatacaggatttttagatcgcactggtgatgaaattcatacatcaatggaggttggtccaatgattaaaaaaggtgatatgaaattatctaaatggatcctagcttacgaaaataataatgtcgatattggattggactgtggtttttctggaaaatgtcaaatagggaaaggtatgtttgccgctcctgatttaatgagagaaatgatgaaacaaaaaattgctcaccctttagctggagctaactgtgcatgggtaccatcaccaactgcagcagcattacatgctatccattaccatgaggttgatgtttttgtgaaaca

SEQ ID NO: 237919 - DNA, 790 bp, Unknown
  Bacterial polypeptide expressing nucleotide sequence isolated from the Sargasso Sea
ggatggaaaatatcacctaatggtgaattaaaagaattaattttatcaaaaaataatcttcgctgcagaatagtaattaataaaaatgatatcattggaaaaaatgataccgcaaacatttcagaaatattaattgagtctgctatatctactatccttgattgtgaggatagtgttgcaaccgttgatgctgatgataaaattttagcatatcaaaattggctaggtttggtaaaaggaaatttagaaagtaattttttaaaaaataataaaaatatcaaaagagtaattaataaagattttaaatttactggaacagatcaaaaagagaaaatattaaaaggacgctctctaatgcttattagaaatgtaggtcatttaatgacaacacctgcaattttaaacaaagataacaaagaaattggtgaaggcataatggatgctattattacaacacttattgcgacttatgatttcataaaaaaagaaaataaaaattctaattacaactcaatttatatagttaagccaaaaatgcatgggcctgaagaagttaaatttactgatgaacttttctctcaaattgagcaattattagatttgccaaatagcacaatcaaaatagggattatggatgaggaaagaagaacaagtgtaaacttaaaagaatgtattagggcagcccaatcaagagttgcttttattaacacaggatttttagatagaaccggagatgaaatccatactggaatgcaggctggatctttcatgaaaaagaatgatatgaaaa

SEQ ID NO: 237920 - DNA, 475 bp, Unknown
  Bacterial polypeptide expressing nucleotide sequence isolated from the Sargasso Sea
gcaaaacttaatgatgttctaacaataccgattgctgatagacctaattggtcagttgaggagataactaaagagctagaaaataatgctcaaggtattttaggttatgttgtaagatggattgatcaaggcgttggttgttctaaagtgcctgatataaataatgtaggattaatggaagatagagccaccctaagaatttcctctcagcacatagcaaattggcttcatcatggtgtttgtagtaaagaacaagtgttaaaaacaatgaaaaaaatggcagagatcgtagacaagcaaaatataagagatccagatttaaaaggatacgcttcctacaaagctatgtctgataattacgataaatcgactgcttttaaagctgcatgtgatttagtttttatgggaagaaatcagccttcaggatatacggaacccattcttcatttaaataggcttttaaaaaaaatttagt

SEQ ID NO: 237921 - DNA, 915 bp, Unknown
  Bacterial polypeptide expressing nucleotide sequence isolated from the Sargasso Sea
tgtgtgattttgaggattcttgctcacctacatggaataatattattcaaggtcatttgaatgtcagagatgccgttgaggaaagcatcgaatttacaagagagtccgatggcaaggtttataggctcaatgatgatattgctacattaattatcaggccaagaggctggcatctcgatgagaaacatataacaatcaatgatcaacccatatccgcatcactgtttgattttggtgtttatctttcaaataactttgaagcactctcaaaaaaaggcacaggcccttacttttatcttcccaagcttgaaaatcacatagaggcgagactctggaatgatgttttcttgcatgctcaagattttcttaatatcgaccgcggaaccatcaaagccactgttctcattgagacaatcacagctgcatttgagatggatgaaattatctttgaacttaaagatcattctgccggcctgaattgtggtcgctgggattacatattcagctttataaagaaatttagaaaccatgaaaaatttcttttaccaaatcgaactgaagtaacaatgggacgacatttcttaaaaagttatgtcgaattactgattcaaacttgtcataaacgaaatgttcatgcgatgggtggaatggcagctcaaattccaattagaggagatgaggaacaaaatcgaattgctatggataaggttgcttcagataaatcaagagaggcaaatgctggccatgacggaacatggattgctcatcctggattatctgaggtggcgatgaatgcattcaatcaagtaatgggaaaatctgctaatcaaatatctaataaaagggatgatgtttcagtatgcgctgaagatctcatcaaggttccaattggcagcatcacagaggaaggttgag

SEQ ID NO: 237922 - DNA, 926 bp, Unknown
  Bacterial polypeptide expressing nucleotide sequence isolated from the Sargasso Sea
gttaggtttaatgaagggtgatctttccgagtcatttaaaaagaatggaaaacaaataacacgaattttaaaagatgacagagagtacaaagatattgaaggtaatactttttctcttcctgggagaagtcttctgcttgttagaaatgttggacatttaatgcaaaacccatcagtaattttagaaaatggtgatgaggtatatgagggtattttagatgcaatgtttacaatttgtatttcactatatgatttgaaaaacctaaatacattatcgaactcaaaaaataaaagtatgtatatcgtcaagccaaaaatgcatggctccgaagaggttgctttcacatgtgacttatttgaagctattgaacagatttttaatttagaaaagaatactgtaaaagtcggaattatggatgaggaaagaagaactacgattaatcttaaatcctgtattgaaaaggctaaagaaagaataatttttataaataccggtttcttagatagaactggtgatgaaatccatacaagcatggaagcaggtgccatggttcctaaatctgagatgaaatctcaagcatggattaatgcttacgaagattggaatgtagatattggaattagttgcgggttaaatggtaaagctcaaattggaaaagggatgtgggcaatgccagatgaaatgaaagaaatgttaatgaataaaatagttcacccattatctggtgcaacatgtgcttgggtaccatcacctacagctgcaacccttcatgcaatgcattaccatgaagttgatgtgttaactagacaagatgaactttcttctcggcaattagcagatatagataagatcttaacaatacctctcctaaaagaagaattagataaagatttaataaggaatgagatagcaaatagtgcacagg

SEQ ID NO: 237923 - DNA, 900 bp, Unknown
  Bacterial polypeptide expressing nucleotide sequence isolated from the Sargasso Sea
cgcaggcttcacggttctcctgaaaatccgaactccatcctgctcaagaaaaacggactgcacctagatatccaactggaccgcaatcatcctgtcggcaaggaccatcctgcaggaatctgtgacatcctcctggaatccgcagtcaccaccattcaggattgtgaggattctgtggctgcggtcgatgcttccgataaggtccatgtctaccgcaactggcttgggctgatgaaaggtgatctttcggcaaaacttgataaaggcgggaaaatgatcacccgcactctcaatcctgatcggaaatacaagacacccgaaggatcagaaatggtgctccccggacgttccctgatgctggttcgaaatgttggtcacctgatgaccaccgataccgtgttggatgaacaaggaaatgaaatatttgaaggtatgctggatggaatgatgaccgcactcattagcctctatgatatacgaggcctgggagcattccaaaattcccgcagcggaagcatgtatatcgtcaaacccaagatgcatggtcccgaggaagtagcgcttacagtcgaactctttggaagaatcgaaaaagccctcggcatggaagaaggtacccttaaaatcggaatcatggatgaagaacgacgaaccaccgtcaacctcaaggaatgcatccgtgcggcaagggatcgtgtgatttttatcaataccggttttttagaccgaactggagatgaaattcatacctcgatgaaggccggacctatggttcgtaaaactgacatgaaaggacagaaatggatccaaagttacgaggattggaacgttgatgtcggcctggcttgcggcttttcgggaaagcccaaatcggcaagggcatgtgggcgatgccggatg

SEQ ID NO: 237924 - DNA, 793 bp, Unknown
  Bacterial polypeptide expressing nucleotide sequence isolated from the Sargasso Sea
tgtcgaggagggtgatgatttctcgttggaaacaagcaaggtcgatccggagatcgccggcattgccggaccgcagcttgtcgttccgatcaccaatgcgcgttatgcgctgaacgccgcgaatgcgcgtttcggcagcctgtatgatgcattctacggaaccgacgccattccggccgaagagacgcaggtgtccggctatgacccggtgcgcggcggcaaggtgatcgcacgagtccgcgccttccttgacgaggcgtttccgctcgacaatgtcagctggaccgaagtgaccggtctgtcggtgtcgaacggcgccctcgtggcacagctcggcgatgtgtccagaacactgacaaacaccaccggatttgtcggccatatcggcaatgcggatgccccgcaggccctggtgctgaaaaacaacggcctgcatgtcctgatcagggtcgaccgtgagggcgtgatagggcgcaacgatgcggcgggcatcaatgacgtgatcgctgaatcggccatgtccagcatcatggattgcgaggactccgtcgcctgtgtcgacgccgaggacaaggtcctcgcctatcgcaactggcgcggcctgatggacggcacgctcgaggagaacttcgagaagggcgggcgcaccgtcacccgcaagcttgccgacgatatctcctacaccgccgccgacggcagcgccgctagcctgaaggcgcgcgcgctgatgctggtccgcaatgtcggccacctgatgacaaacccagccatccggctttccgacggcagcgag

SEQ ID NO: 237925 - DNA, 927 bp, Unknown
  Bacterial polypeptide expressing nucleotide sequence isolated from the Sargasso Sea
aaattaaaactttaaatggagaagataaaatacttaagggaagatcattaatgctagttagaaatgtaggtcatttgatgacaacccctgtaatattaaataaagataatattgaaattagcgaaggtattatggatggagtaattactgctttaattgccattcatgatttaaaaaagacatctaatcaaaattccatttataattctatttatatcgtcaaaccaaaaatgcatggaccggaagaagttgaatttacagtaaatctttttaagcgcatagaagaaatcttaaatttacccaataatacaattaaagtaggtattatggatgaagaaagaagaacaagtattaatttaaaagaatgtataagggtagcaaaatctaggttagcttttataaatacaggatttcttgatagaacaggtgatgaaatacatacttcaacccaagctggttcatttataacaaaggcagatatgaaaaatgctgcttggataaaatcatatgaggatagaaatgtagatattggattacagtgcggattaaaaggaaaagcacaaattggtaagggaatgtgggctatgcccgatctaatgttggaaatggttgagcaaaaaatttcacatccaaaagcaggtgcaaattgttcatgggtacctagtcctactgcagccactcttcatgcaatgcattatcattatgtaaatgtttttgatattcaagatgaaattaaagctaaaggcaaaagaggtacattaaatgatttacttacattacctttattaaataagaaaaatttatctgaagaagaaattaataaagaaatagaaaataatgctcaaggaattttaggatatgtagttagatggattgatcaaggaattggttgttcaaaagtaccagatataaacaatatggattaat

SEQ ID NO: 237926 - DNA, 830 bp, Unknown
  Bacterial polypeptide expressing nucleotide sequence isolated from the Sargasso Sea
tgtacctttaaaaaacacaaaatggaaaaacttatctcaaactataaaaataaataaaaataaaattaatttaaaattaaaaaatcctaaacaatttattgggtatagaaaaaaatcaaataaactatcctcacttttatttatcaataataaccttcatattgatattttgtttgatctaaccggaaaaatggaaattaataatccagatggcaatcaagataaaataaaaatacatgatattattttggaatctgcaatttctactatttgtgatcatgaagatagtgtggctgctgtagacgctgaagataaaattcttggatatcgaaattggctagggttaatgaaaggaaatttaaaagctgaattttcaaaaaaaggaaaaaaaattataagaagattaaataatgatagagaatatgtgtctaataaagggaaaaaatttaaattacatggacgatcacttctattaaatagaaatgttgggcaccttatgactaacccagccattcttttaaaagatggatcagagtgtccggaaggaatccttgatgcttttattacatcacttgcatgcttgcatgattttaaaagaaaaggaaattcaagaactaattcaatttatatagtcaaaccaaaaatgcatggtcccgaagaatgttcttttactaatcaaatttttgaaaaagttgaaaaagttttaagtttaaaaaaatatcaaattctttgtggtattatggatgaagaaagaagaacttcaattaacctaaaagagtgtataaggtctttaaaaaacagagtttttttcattaataccggattttaga

SEQ ID NO: 237927 - DNA, 896 bp, Unknown
  Bacterial polypeptide expressing nucleotide sequence isolated from the Sargasso Sea
aatgactgagcgcatgaccgtaggtgatctgcaggtcgctacctgcctttacgacttcgtcaatgaagaagcactgcccggaaccgaaatagatgaagcggaattttggcatgcagtgaatgatattctgcgggatctggcccccaaaaatcgtgaactgctggcgcgtcgggacgacctgcaatctaggatcgatgcctggcaccgtaatcgtaggggtcaggaattcaatgtcggctcatacaaatcatttctgcaggaaatcggttatctggtcgacgagggcgccgactttacggtcgaaacggatcgggtcgatcccgaaatttccgctattgcgggtccgcagctcgtggtgccggttatgaatgcacggtatgcgctcaatgcagccaatgcgcgttggggaagcctctacgatgcgctttacggtaccgacgtaataccggaagacgacggtgctgacatgggcaagtcgtacaacccggtccgcggcaccaaagtcattgcttacgcgcgcaccttcctcgatcaggccgctccgctcgacggagccagtcacgccgacgctgcaggttacagcgttgaaaacggtaagctcagcgttgctctgaccggcggatcgtcagttgggctggccgatgaagaaaatttcgccggttacactggagatcctggatctcctgagaagcttgcgttcgtcaacaacggaattcatttcgagatttgtatcgactgggatcatcctattggtatggatgacgccgcgggcgtcgctgacgtcgttctcgaatcggcgatcacgaccatcatggattgcgaagattccatcgccgccgtggatgccgaagacaaggttgtggtgtatcgcaactggctcggtctaatgcgtggcg

SEQ ID NO: 237928 - DNA, 909 bp, Unknown
  Bacterial polypeptide expressing nucleotide sequence isolated from the Sargasso Sea
agatggaaaattagttgtaaagaaaggttcagttaaagattatctaaaaaacaatagtcaatttataggctttaatggggataaaaacaatccaaagtcaatcttgttaaaaaataataatttacacattgatatcgtaattgatccgaacagtgttgtaggtaagaacgatcaagcatctatttctgatgtagttgttgagtcagctttatctacaattatagataatgaagactcggttgctgcggttgatgctgaagataaagtgaaatgttacagaaattggttaggcctaatgaaaggtgacttggtggcaaatttcgaaaaaaatggaaaaaagtttacaagaagattaaatccagacaaaacttatatttcaaaagaaggtaagaaaattattttacatggccgcgctttgcttttaaatagaaatgtcggacatttgatgacgaacccttccattatattaagagatggatctgaaattcctgaaggtatattagatggatttgtttccaatttatgtgctttgcatgatttcaaaaataaaaaaaattcaaggactggatccacttacatagtaaaaccaaaaatgcatggtccaaaggaagtggctttcacagataagttatttgaaaaaatagaggaagtcctaggtatgaaaaaatattcaataaaagttggtataatggatgaagagagaagaacaacggtgaacttaaaagagtgtataaggcaagtaaaaaatagaattgtttttataaacacaggttttttagatagaaccggggatgagatgcatacctcttttgaggctggaccaatgatatttaaaggggacatgaaaaaatcaaaatggttgaatgcatatgaaaattggaatgtcgatgttggacttgaatgtggttt

SEQ ID NO: 237929 - DNA, 949 bp, Unknown
  Bacterial polypeptide expressing nucleotide sequence isolated from the Sargasso Sea
agtctagcatgcctccatgattttaaaaataaaggaaattccagagtcaattctatttacatagttaagccaaaaatgcatggcccagaagaatgtgactttactaatttaatttttgaagatgttgaaaaagttttaaatttaaaaaaataccaaattctttgtggtataatggatgaagaaagaagaacctcagttaatttaaaagaatgtattagagctttaaaaaatagagttttttttattaatactggttttttggatagaacaggagacgaaattcatacatcaatggaagttggtccaatgattaaaaaaggtgatatgaagtcatctaagtggatacttgcttatgaaaataataatgtagatgttggtttggaatgtggtttttctggaaagtgccagattggcaaaggcatgtatcctgccccagatttaatgcatcaaatgatgaaacaaaaaattattcaccctttgtctggagctaattgtgcatgggtgccttccccaacagctgcagcactacatgcacttcactatcatgaaattgatgtatttatgaaacaaaaagaattatcaaaaagaaagccagcgaagctctcagatcttttaactataccaatcgcaaaaaaacctaattggtctatggaagaaattaataaagaattaaaaaacaatgcacaaggtattttgggatatgtagttagatgggtagatcagtcagtaggatgttcaaaagtgccagatattaatggaatcggtttaatggaagatagagctacctgccggataagtagtcaacatatcgctaattggttacatcatggtatatgcagtaagaaacacgtattagagattatgaaaaagatggctaaagtagtagataatcaaaatttgaaagatccaaagtatgaaagggcattctccttacataccaagtcaaaaa

SEQ ID NO: 237930 - DNA, 907 bp, Unknown
  Bacterial polypeptide expressing nucleotide sequence isolated from the Sargasso Sea
atgaaaaagaatacaatcaaaattggaataatggatgaagaaagacgaacaagtgctaatttaaaagagtgcattagaaatgtaaaaagaagagttgtctttattaatactgggtttttagatcgaactggtgatgagatacatacatctatggagtcgggtccagtaattaaaaaaggtgatataaaaaattctgattggattaaagcatatgaaaacaataatgttgttgttggattagaatgtggtttttctggtaaagcacaaattggaaaaggaatgtgggctgcaccagatagaatggcagatatgttaagcgaaaaaataggacatccttcttctggagcgaattgtgcctggactccttcacctactgcagcaactttacatgcaactcattatcacaaagtgaacgttttcaaagttcataaaaaactatctaataaaagaaaattcgacttagacaatcttttgaaattaccaattattcgaggtccaaactggtcgatggatgaaattaaaactgaacttgaaaataattgccaaggtatattgggatacgttgtaagatggatagatagtggtgtaggttgttcaaaagttcctgacataaacaatatcggtctcatggaggatcgtgcaactttaagaatttcttctcagcatattgctaactggttacaccataatatatgtactcctaatcaggtattagaaacattaaaaaagatggcaaaaattgtagatgatcaaaacaaaaatgatcctgaatacaaaaaaatgtctgataattttgataattctattgcctttaaaactgcttgtgacttggtttttaaaggtaaggaccaatcatcaggttacacggaacctttgttacacttgaacagatctataaaaaaaaatt

SEQ ID NO: 237931 - DNA, 587 bp, Unknown
  Bacterial polypeptide expressing nucleotide sequence isolated from the Sargasso Sea
gatggccggcgcgaactgcgcatgggtgccctcgccgacggccgccacgcttcatgcgctgcattatcacaaggtcgatgtgccggcgcgccaggcagagcttgcggggcgcgccaaggccagccgcgaagacatcctgtcggttccagttgccgtgcgcccgaactggtcggaggatgatatccggtccgaacttcgcaacaacgcgcagggtattctcggctatgtggtccgctgggtggaccagggtgtcggctgctccaaggttccggacatcaatcatgttgggctgatggaagaccgcgccacgctgcggatttcatcgcagcatatcgccaactggcttcaccacggcgtctgctccaaaacccttgtccgcgaggtgatggaggaaatggcagccgtcgtcgaccgccagaacgagggtgatgccggctacaacccgatggcgccaatgttcgagagttcggtagctttcaaagctgcctgcgatcttgtattccgcggtcgcgagcaaccctcaggctacaccgaaccggtactccacgcgcgccggctggaaaagaaagcggtggatgccgtttaac

SEQ ID NO: 237932 - DNA, 967 bp, Unknown
  Bacterial polypeptide expressing nucleotide sequence isolated from the Sargasso Sea
ctcacctgaatatttttggagctcatttcaagaaattttaaataacttctctcaaaaaaataaagaattattagataaaagaaaagatttacaagaaaaaatcgatcactggcacatagaaaacaaaaacaaagattttgaaatagggcaatataaaacatttcttactgatatcggataccttcatcctagaagtaataatttttcaattaaaacatcaaatgtcgaccctgaggtaagaaagattgcaggccctcagcttgtggttccggtcatgaatgcaagatttgcattaaatgctactaatgcaagatgggggagtttatatgatgcgctgtacggcactgatatgataagtgaatctgaaggcgctattagagaaggtggatataatcctattagaggtgatagggtaattgcatttgctaaaaattttttagatgaaacgttccctcttgagaatggaacttttaataaggcaaccaattttgaattcatcgacagtgaaattgttgtgacgctcgttgatggatcaaagacgcatcttttaaataaagatcaatatataggctacatggataagggagagggcgcttatggactgctctttaaaaataataatttacatattgagattcaagttgatagatctcatccaattggtcaagatgacttggcaggcattaaagatatattagtagaatctgcaattaccacaattcaagactgtgaagactcagttgcagcagttgacgatgaagacaaaattatcgtttatagaaattggctaggccttatgaaaggagatttaaaaagatcttttaataagaatggtaagtacctaacaagagaattaaatggggacagaaggtatttattaaaaaatggcaaaatgatactccttccaggaagaagtttattattggttcgaaaatgttggtcatttgatgacaaatcctgctattaa

SEQ ID NO: 237933 - DNA, 853 bp, Unknown
  Bacterial polypeptide expressing nucleotide sequence isolated from the Sargasso Sea
ggcgggcggttacaacgaacggcggggggctcttgttattgacttcgctaaggggtttttagatgaaagttgtccgctgaagactggttcacacaaagaagcgactggatatagcgtagaggagggcgctctaaaagttcacctcggagcgaagacgactgaactcagtgatggatcaaaatttaaaggctatcgaggtgaaaaagcacaacctggtagtgttctgctattgaataatgatttacacatagagattcaatttgataaagaatcaccgataggctcaacagacatagcaggtatcaaggatataatgttagaggcagccatcacgaccatacaagattgcgaggattcggttgcggcggttgatgctgaggataaggtagagatttacaggaactggctggggcttatcaacggcgacctatcagatacttttattaaagggggtagtccaaaaactcgcgtgcttcagcgggatagagaattcagctcaccgatagatgaaaaattacatctaccaggtagaagcatgttattggtaagaaatgtgggccacctaatgcgcaatggagccatcaaggaagataatggagcggaggtctatgagggaattatggatgccgttgttactagtgctgcagccgtgcttgacgttgaggataagaaccttctgcccaactcaaggactggtagtgtttatatcgttaaaccaaaaatgcatggtccaaaagaagtgaaatttacttctgatttatttgaagcggttgaagaattgttgggtttgagacgtaatacacttaaagtcggaattatggacgaagagcgaagaacaacccttaatttgaaa

SEQ ID NO: 237934 - DNA, 670 bp, Unknown
  Bacterial polypeptide expressing nucleotide sequence isolated from the Sargasso Sea
agaaactggtttcaaaggaagagcacaaattggaaaaggaatgtgggcgatgccagatgagatgctgggtatgtatgaaaacaaatccatgcatcctgaagctggagctaattgcgcttgggtcccttcaccaacagcagcaaccttacatgcaatccattaccatcagatatctgtctcagatagacaagaagagctttcttcccgcaacaaagcttcgctggaagacattctttcgatacctatactggagaatccagaagatttaactgatgaggaaatacaatcagagttggataacaattgccaaggaattttaggctacgtggttagatgggttgacttgggggtgggatgctccaaagttccggatataaataatgttggtttgatggaagatagagctacctgtcgaatttcgagtcaacatattgcaaattggcttcaccatggaatatgctcaaaagatcaagtgatagacactatgaaaaaaatggctgcaattgtagatgagcagaattctggtgatcctgagtatactaatatgtcacctcattttgatggattggcattttcagctgcagtagatttagctgtcgaaggaagaaatcagcccagcggatatactgaaccaattcttcatgccaagagactagagtataaatcttag

SEQ ID NO: 237935 - DNA, 912 bp, Unknown
  Bacterial polypeptide expressing nucleotide sequence isolated from the Sargasso Sea
aataaaaaaaagaaaaactttacaaactaaaattgatgattggcacattaaaaataaatccaaggaatttaaactagaagaatataaaaattttttgagagaaataggttatattcaagaggaaggacctgactttaaaattaaaacctctaatatagatgatgaaatatcctctatagctggacctcaattggtagtaccaatcatgaatgcgagatatactttaaatgcggctaacgccagatgggtaagtttatatgacagtttgtacggaacaaatataatagagtcagaggaaggtggtagtgaaagatatgatccaaaccgaggtcaagaagttatcaaatatgtcagagaattatttgataagattattccgattaataaaacaagttggaagaatatttcctctttaaaagtaagcaataaaaacttagtaatctctaaaggagaaaaagaatacaagttaaaagatctaaataagtttgtagggcacaggggagatgcaaacaaaccttcagcaataatattaaaaaataataatctccattttgaaataatcataaaccctaaagcatttagtgctgctcatgatattgctgggattagcgatgtgattgcggagtctgctatttcaacaatttgtgataatgaagacagtgttgcagctgtggatgcagaagataaaattgtctgttataaaaattggctaggtttaatgaaaggagatttaaaaattcaatttgaaaaaaatggaaaaaaattagaaagaaaattaaatcctgacagaagttatatatcaagagatggtaaaggattaaaacttcacggcagaagtttgcttctaataagaaatgttggccacctaatgacttctccatctattattttaaaagatggaaaagagatacc

SEQ ID NO: 237936 - DNA, 841 bp, Unknown
  Bacterial polypeptide expressing nucleotide sequence isolated from the Sargasso Sea
gaggttggaaaaaacgataaagcaaatatttcagatataataatggagtcagctttatctacaattgtagataatgaggactccgtggcggctgttgatgcagaagataaagtaaaatgttacagaaattggttgggcttaatgaagggagatttagtggcaaattttgaaaaaaacggaaaaaaaattttaagaaagttaaatcccgatagaacttataattcgaaagaaggaaagaaaattacgttacatggtagagcattgcttttaaaccgaaatgttgggcatcttatgactaatccctctattattttaaaggatggatcagagattcctgagggtattttagatgcgtttatttcaaatttatgtgcattacatgatttcaaaaataagaaaaattctaggaccggatcaacctacatagttaaaccaaaaatgcatgggcctgaagaagtggcatttacaaataaattatttgaaaatgttgagaagacgctaggaattaaaaaatattctataaaagttggaattatggatgaggaaagaagaacaactgttaatttaaaagaatgtattagggaagttaaaaatagaatcgtatttattaatactggtttcctagatcgaactggagatgaaatgcatacttcttttgaagctggacctatgattttcaaaggtgagatgaaaaaatcgatttggcttaatacttatgaaaattggaatgttgatgttggacttagctgtggtttctcaggtaaagctcagattggaaaaggtatgtgggctatgcctgatcaaatgtcaaatatgatggagcaaaaaattggtcatccaa

SEQ ID NO: 237937 - DNA, 852 bp, Unknown
  Bacterial polypeptide expressing nucleotide sequence isolated from the Sargasso Sea
aatgaggctattcctcgggaccaatatatctaaagatgaattttggaaaggactaagtagtgtaacacatgagcttaatccgaaaaatattgaactcttaagagaaagaaaaaaattacaaatggacatagatagatggcatttagaaaattatcagaatgaatttgatattaaaaaatataaatcgtatttagaggatattggatatataaaaaaacaagggccaaattttagaattaaaacagaaaacattgatcaagaggtttcaagtatcgctggtccacaattagttgttcctataatgaatgctagatatgccttaaatgctgctaacgcaaggtggatgagtttatatgatagtttatacggaacagatgttatttcctctgaagaatcaataagtgaaagatatgaccctgaaagaggtttgcaggtaataaggtatacaaagaaattcttagatgaacattttaaattaaaaaactcatcatggaataaagtagataaaatatctattaaggatcacaaattagaattacatactgataaaggaaacacagaactattacatagtgataaatatgtcggctatagattagataaacaaaaaatatcagccattattttaaagaataataagcttcatattgaaattataattaatccaagtgcatttagtgcaaaaggagatcccgcaggaatttcagatataatagtagaggcagcaatttcaacaatttgtgatcatgaagactctgttgctgcagttgatgctgaagataaaattacaggctacagaaattggttgggactaatgaaaaaagatcttgtggctgtatttgaaaaagatgg

SEQ ID NO: 237938 - DNA, 745 bp, Unknown
  Bacterial polypeptide expressing nucleotide sequence isolated from the Sargasso Sea
agtcttcaaatggataaaagcgtatgaaaataataatgtagaagttggattatcctgtggtttttctggtaaagctcagattggtaaaggaatgtgggcgatgccagacctattgcatgacatgatgaatcaaaaaatttctcatccagagtctggagctaattgcgcatgggttccatcaccaactgcagctgcgatacatagtttgcattaccatcaagttgatgttttttctaaacaaaatgagataatgaaaagaaaaaaagcaaaattagatgatttgctagaaattcccattaattctccaaaaaataagtggtcaaaatctcaaatatcaaatgagcttaaaaataatgcacaaggtattttggggtatgtagtcagatggattgatcaatctgttgggtgttcaaaagttccagatataaatggtataggattaatggaagacagagcaacatgcagaataagtagccaacatatagcaaattggttgcaccacggagtatgtagtaaaaaacaagttttagaaattatgaaaaagatggccaaaattgtagataatcaaaatctgaaagacaaaagtatgaaagggcaagccccatatcaatcgatggggaaaaattatcatcaatctatagcttttaaaactgcttgtgaccttgtttttcatgggaagagtcaaccctcgggttacactgaacctttacttcattttaatagaattatgaaaaaatcaatctga

SEQ ID NO: 237939 - DNA, 945 bp, Unknown
  Bacterial polypeptide expressing nucleotide sequence isolated from the Sargasso Sea
aattatctgttatagaaattggctaggtctgatgaaaggtgatctaaaatcaaaatttgaaaaagaaggaaaattatttgagagaaaacttaaccctaatagaagctatatttcaaaagatggaaaaggtttaaagcttcatggaagaagtttactgctagttaggaatgttggtcacttaatgactaatccttcaataattttaaaagatggtagtgaagttccagaaggaataatggatgcgttcattactacagctgcagctcttcatgatattaagaaaaaaaccaattcaagaactggctctatttatatcgtgaagccaaaaatgcatggaccagatgaaactgcatttactgatttacttttctcaaaagtagaagaagttttaggtttgccaaaatacacctgtaagattggaataatggatgaagaaagaagaacctcagctaatttaaaagagtgtattagatcgttaaaaaatagagttttctttataaatacaggttttctagacagaactggtgatgaaatgcacacctctatggaagctggtccaatgattaaaaaaggtgacatgaaaacttcaaaatggattacagcctatgaaaacaacaatgttgatattggtataaaatgtggattttctggaaaagctcaaattggaaaaggtatgtgggcaatgccagacaaaatgaaagatatgatggagcaaaaaactggacatttaaaggcaggtgcaaattgtgcatgggttccatctccaactgctgcagctttgcatgcgctacattatcatgaaataaatatttttgatgaacaacaaaaaattaaaaatagggaacacgcaaggcttgatgatcttttaacaatacctactgctgatagaccaaattggtctgtggatgaaattaataaagaaatttctaactcagctcaaacttt

SEQ ID NO: 237940 - DNA, 681 bp, Unknown
  Bacterial polypeptide expressing nucleotide sequence isolated from the Sargasso Sea
gtttgtcaggaaaagcgcaaattggaaaaggtatgtgggctatgccagatttgatggatgaaatgatgaaacaaaaaatttctcatcctttatcgggagctaattgtgcatgggtaccatcaccaactgctgcatcactacatgctctacactatcatgaggttgatgtttttgctaaacagaaagaattgttaaaaagaaaacctgtaaaattatctgatatattaactattccgttagaaaaaaaaccaaactggtctaaggaagaaataactaatgaattaaaaaataatgcacaaggtattttaggttatgtagtaagatgggtagatcaatctgttggatgctcaaaggtgcctgacattaatggaattggtttgatggaagatagagctacatgtcgaataagtagtcaacatattgcaaattggttacatcacggcatatgtagcaaaaaacaagtcttagaaattatgaaaaaaatggcaaaaattgtagataatcaaaacttaaaagatccaagtatgaagggatatgcaccttataagcaaatgtctgaaaattttgataagtcaactgcatttaaagctgcatgcgaacttatatttcatggtaaaactcaaccttctggatatacagagccaattcttcatctcaatagacttcttaaaaaaaattaat

SEQ ID NO: 237941 - DNA, 1051 bp, Unknown
  Bacterial polypeptide expressing nucleotide sequence isolated from the Sargasso Sea
actgcagcagcaattcatgatttaaaaagaaaaggtaattcaagaacaggttctatatatattgtaaaaccaaaaatgcatggacctgaagagacagcttttacagataaaatatttactagagttgaagaagttttaaaacttgaaaaaaatacaattaaatgcggtattatggatgaagaaagaagaacatctgtaaatttaaaagaatgtattagaacattaaaaagcagggtttttttcattaacacaggttttttagacagaactggagatgaaatgcatacatcaatggaagcaggtccaatgataaaaaaaggtgacatgaaaaaatcaaaatggatagctgcttatgaagataataatgttgatgttggtttaaaatgtggattttcaggtgttgcacaaataggtaaaggtatgtgggctatgccagataaaatgaaagacatgatagatcaaaaaatatcacatcttgaagctggtgcaaattgcgcttgggtaccatctcccacggcagcctctttacacgcaatgcattaccataagttaaatatttttgaaaagcacaaaaaattaactgataataatataaagtacattgatagcttattaacaattccaatagcagacagacctaactggagtaaagaagagataaataaagagttatgtaactcagctcaaacaatattaggatatgttgttagatgggtcgaccaaggaattggatgctctaaagttccagatataaataatgttggattaatggaggatagagcaacacttagaatatcgtcacaacacatagctaattggctacatcatggtatttgctcaaatagacaggttttagaaattcttaagaaaatggcaaagatagttgataaacaaaatcaaggagatccagaatatcaaaatatgtctccggattacgacaagtcaatatcttttaaagcagcttgtgagttgatttttcatggtaaatcacaaccatcgggttatactgaacctctattgcatttaaataggttaattaaaaaaagctaat

SEQ ID NO: 237942 - DNA, 590 bp, Unknown
  Bacterial polypeptide expressing nucleotide sequence isolated from the Sargasso Sea
gatgactgaacgcgttcaagtcggtggcctgcaggtcgccaaagccctgtacgacttcgtgaacaacgaagccattcccggtaccggcatcgctgccgaccagttctgggccggtgccgctgcggtcatcaaggacctggcgccgaagaaccgtgccctgctggccaagcgcgacgagctgcaggcacagatcgatgcctggcaccaggcgcgcaagggtcaggcccatgacgccgctgcctacaaggccttcctccaggaaatcggctatctgctgccagagctggaagacttccaggccaccactgccaacgtcgacgaagagatcgcccgtctggccggcccgcagttggtggtgccggtgatgaacgcgcgcttcgccctgaacgcttccaacgcccgctggggctcgctgtacgacgcgctgtacggcaccgacgtgatcagcgaagaaggtggcgccgagaagggcaagggctacaacaaggtccgtggcgacaaggtcatcgccttcgcccgcgccttcctcgacgaggccgcgccgctggctgccggctcgcacgtcgactccaccggttatgccatcgtcg

SEQ ID NO: 237943 - DNA, 1411 bp, Unknown
  Bacterial polypeptide expressing nucleotide sequence isolated from the Sargasso Sea
atttctcacaaatataggttacataaaaaagaaaggtaagaaatttaaaataaaaactaaaaaaattgacgaggagatctcaaaaatatgtggtccacaattggtttgtccagtctcaaactcaagatttttattaaatgcagcaaatgcaaggtgggttagtctttatgatagtttatacggcaccgatattattccagaaactgggggggcggtaaaagggaaaacttataatccaataagaggtaaacgagtaatagaatattcaagagatttgctagacaaatatattcctctaaaaaaaggtagttggaaaaatctcaataaaatacctgaggtaaataataataaactattaatagatttaaaatttccaaaacaatatattggttataaaaaaaaacttaataaaactgcatcattattatttaaaaataataatcttcatatcgatatattgtttgatcaagatggagcattagagataaataatccagaaggaaatcaagataaaattaaaattcacgatatttatttagaatctgctatttcaactatttgtgatcacgaagatagtgttgctgcagtagatgcggaagataaaatattgggttatagaaattggcttggtttaatgaaaggtaatttaaagacagattttttaaagaaaggaaaaaagattcaaagaaaattaaataaagatagacattacatttcatcaaatggaagtaaaattaaattgcatggtagatcattattgctaaatagaaacgtgggtcatcttatgactaatccagcgatactactaaaagatggatcggaatgtcccgaaggcatacttgatgctttcataacgtctttagcatgtattcatgatttcaaaaacaaaacaaactcgagagtaaataatatctacattgttaaaccaaaaatgcatggaccagaagaatgtaattttacaagtcaaatttttgaaaatgttgaaaaagtactcgggcttaaaaaaaaccaaatactttgtggtattatggatgaggaaagacgcacaactataaatttacaagaatgtataagagctttgaaggatagagttttttttattaatactgggtttttagataggacaggagatgaaatccatacatcaatggaagttgggcccgttgtaagaaaagctgaaatgaaaaagactaaatggataaacgcttatgaaaataataacgtagatgttggtttaacttgtggattttcaggtaaatgccagattggaaaaggcatgtttgcagctcctgacatgatggcagatatgcttaaacaaaaaattattcacccaaaatccggagctaattgtgcatgggttccttcccctactgcagcagctttacattcccttcattatcatgaaataaat

SEQ ID NO: 237944 - DNA, 2188 bp, Unknown
  Bacterial polypeptide expressing nucleotide sequence isolated from the Sargasso Sea
gatggagcagtcgatgactcagatgaacccgcgcggtggactgcaagtcgccgccaacctcgaccagttcgtcgaaaccgaagccctgcccggcaccggactcgacagcgccgcattctggtcaggtttcgacgccctcgtgcacgagctggcgcccaggaaccgtgcgctgctcgccgagcgcgaccgcctgcaaaccgaactcgacacctggcaccgtgccaatccgggtccggtacgcgatctgcgcgcgtaccgcgccttcctcgaaggcattggctacatcgtgccgtcgccgacgagcgtcaaagccacgaccgaccacgtggacaccgaaatcgccgaacaggccggcccccaactcgtggtgccgctgtcgaaccagcgctatgcgctcaacgccgccaacgcacgctggggcagcctgtacgacgcgctgtacggcaccgatgcgatccccgagagcaatggcgcggaaaagcagaaggctttcaatccggtgcgcggcgccgcggtgatcgcttatgctcgcaagtttctcgatcaggccgccccgctcgcgaacggctcgcacgccgacgccacgtcgtatagcgtcgaagacggcaagctggtcgtcacgctgaagagcgacaagaccgaattgaagacgcccgcgcaattcatcggctatcaaggcgatgcaagcgcgccgtccgccgtgttgctgaagcataacggcctgcacttcgaaatccagatcgacgcgaacgattcgatcggcaagaccgattcggcgcacgtgaaagacgtgctgctcgaggccgcggtgagcaccatcatcgactgcgaagactcggttgcagccgtggatgcggacgacaaggtccagctctatcgcaactggctcggcctgatgaccggcgatctgacggaagaagtcacgaagggcggcaagaccttcacgcgccgtctgaatgccgatcgcgtgtacaccgccgcgaacggcaccgcgccggtcgtgctgcacggccgctcgctgctgtttatccgcaacgtcggccatctgatgacgaatccggccgtgctgaccaaagacggccaggagattccggaaggcattctcgacgccgtcatcaccacgctgtgcgcgttgcacgaccgcaagcaccagttgaattcgcgcaccggctcgatctatatcgtgaagccgaaaatgcacggcccggccgaagtcgccttcgcgagcgaactgttcgcgcgcgtcgaagacctgctgaagctgccgcgcaacacgatcaagatgggcatcatggacgaggagcgccgcaccagcgtcaacctgctcgcctgtatcggcgaagcgtccgagcgtgtcgcgttcatcaatacgggtttcctcgaccgcaccggcgatgaaatgcactcggcaatggaagccggcccaatgatgcgcaagggcgacatgaagtcgagcgcgtggattgccgcgtacgagcgcagcaacgtgctggtcggtttgagcgcgggcctgcgcggccgctcgcagatcggcaagggcatgtgggcaatgcccgacctgatgcacgcgatgctcgaacagaagatcgcgcatccgaaggccggcgcgaacaccgcatgggtgccctcgccgaccgccgcgacgctgcacgcgctgcattaccatcaagtcgacgtgcaagcggttcagcaggaactcgaacgcacggactacgcgagcgtgcgcgacgaactgctcgacggcctgctgacgattccggttgttgccgaggcaaagtggaacgccgacgagatccgcagcgaactcgataacaacgtgcagggcattctcggctacgtggtgcgctggatcgatcagggcgtgggctgctcgaaggtgccggatattcacaacgtcggtttgatggaagatcgtgccacgctgcgcatctccagccagcacatcgcaaactggctgtatcacggcgtggtgacccgcgaactggtcgaagaaactttcagacgcatggcgaaggtggtcgacgagcagaacgcgggcgatcctcactacaaaccgatggcgcctggcttcgacacgctggcgttcaaggccgcgcaggcgctggtgttcgaaggacgtcaacagccgagcggctatacggaaccgttgctgcataagttccgcctggaagtgaagaaggcgcagtaa

SEQ ID NO: 237945 - DNA, 743 bp, Unknown
  Bacterial polypeptide expressing nucleotide sequence isolated from the Sargasso Sea
tatgaaatcgtcggcgtggatcgcggcttacgagcgctataacgtactggccggcctaagctcgggattgcgcggacgcgcgcagatcggcaagggcatgtgggcgatgcccgacctgatgcacgcgatgctcgaacagaagatcgcgcatccgaaagcgggcgcgaacacggcctgggtgccgtcgccgaccgccgcaacgctgcacgcgctgcactaccatcaagttgacgttcaggccgtgcagcaggagctggaaacgacgggctacgacagcgtacgcgatgaactgctcgatggcttgctgaccatacctgtggtcgaaaaggcgcagtggtcggaggaggaaatccgcgaggaaatcgagaacaacgcgcaagggattctgggttacgtggtgcgctggatcgatcagggcgtcggatgctcgaaggtgccggatattcacgatatcggtctgatggaagaccgcgcgacgctgcgcatttcgagccagcacattgcgaactggctgcatcacggggtggtgtcggaggcgctggtgaacgaaacgttcaagcgcatggcgaaagtggtggatgcgcagaacgccaacgacccgcagtaccagcccatgaccggtcacctggacacatcgctcgccttcaaagcggcgaaggcgctggtttttgaagggcgcgcgcagcctgccgggtatacggagccattgctgcacaagttccggctgggcgcgaaggcttagg

SEQ ID NO: 237946 - DNA, 1078 bp, Unknown
  Bacterial polypeptide expressing nucleotide sequence isolated from the Sargasso Sea
agtttatatggaacaaatataattgagtccgatgaaggaggaagtgaaagatatgatcccctaagaggacaagaagtcataaagtatgtgagagaattttttgataattttatacccattaacggcaccagttggaaagatattgctagcttaaaaattattaataaagacttagtaataaaaaaagataacaatgaatatgtattaaaagataaaagtaaatttatcggacacagaggagatgcaagtaaacctacagcaataattttaaagaataataaccttcattttgaaataataatcaatccaagagcttttagtgccgcccatgatattgctgggataagcgatgtaataatagaatctgctgtttctactatctgtgataacgaagacagtgttgcggcagttgacgctgaagacaaagtatcttgttacaaaaattggttaggattaatgaagggaaatttaaaagtagagtttgtaaaaaatggaaaaaatttagagagaaaacttaatcctgatagaagttatgtttcaaaagatggtaaaggcttaaaattacacggacgaagtctgcttttaattagaaatgtaggacacttaatgaccaatccatcaatcattttaaaagatggaagtgaggtcccagaaggtatcatggatgcatttataactactgcagcagcacttcatgatttaagaaaaaagaaaaattcaagaaaaggttcagtttatatagtaaaaccaaaaatgcatggtcctgaagaaactgcttttactgatttaattttttcaaaagttgaagaattatttggattagaaaaatatacttgcaaaattggaattatggatgaggagagaaggacctcggttaatcttaaggaatgtataagaacactaaaaaatagagtattttttattaatacaggctttttagatagaactggggatgaaatgcacacatcaatggaagcaggaccaatgattaaaaaaggagatatgaaatcctcaaaatggatttctgcctatgagaataacaatatcgatataggattaaagtgtggattttatggta

SEQ ID NO: 237947 - DNA, 1594 bp, Unknown
  Bacterial polypeptide expressing nucleotide sequence isolated from the Sargasso Sea
atgagcaccccgatcacgctgccgcaaggcatggcgatcaccggcgaaatcaagccgggttacgaagcaatcctgacgcctgaagcgctcgcactcgtcgcagcgctgcaccgcacgttcgagccgcgccgccaggcgctgctgcaggcgcgcgtcgagcgcacgaagcgcctcgacgcgggcgagcgccccgacttcctggccgagacgaaggcgatccgcgaaggcgactggaaggtcgcgccgctgccggccgacctgcaatgccgccgtgtcgagatcacgggccccgtcgagcgcaagatgatcatcaacgcgctgaactcgggcgccgattcgtacatgacggacttcgaggattcgaacgcgccgagctggacgaaccagatcgacggccagatcaacctgaaggacgcggtgcgccgcacgatctcgctcgagcagaacggcaagtcgtaccggctgaacgacaaggtcgcgacgctgatcgtgcgtccgcgcggctggcacctcgacgagaagcacgtgacggtcgacggccagcgcgtgtccggcggcatcttcgatttcgcgctgttcctgttccacaacgcgaaggaactgctcgcgcgcggctcgggcccgtacttctacctgccgaagatggaaagccatctcgaggcgcgcctgtggaacgacatcttcgtcgccgcgcaggaaggcgtcggcgtgccgcggggcacgatccgcgcgacggtgctgatcgagacgatcctcgccgcattcgagatggacgaaatcctgtacgaactgcgcgaacacagctcgggcctgaacgccggccgctgggactacatcttctcggccatcaagaagttcaagaacgaccgcgacttctgcctcgccgagcgctcgaagatcacgatgacggtgccgttcatgcgcgcgtacgcgctgctgctgctgaagacctgccacaagcgcaacgcgccggcgatcggcgggatgagcgcgctgatcccgatcaagaacgatccggaagcgaacgacaaggccatgggcggcgtgcgctcggacaagcagcgcgacgcgaccgacggctacgacggcggctgggtggcccacccgggcctcgtgccgatcgcgatggaagagttcgtgaaggtgctcggcgacaagccgaaccagatcgcgaagcagcgcgacgacgtgcaggtcgaaggcaagaacctgctcgacttccagccggaagcgccgatcaccgaagccggcctgcgcaacaacatcaacgtcggcatccactacctgggcgcatggctcgacggcaacggctgcgtgccgatccacaacctgatggaagacgcggccacggccgaaatctcccgttcgcaggtgtggcaatggatccgctcgccgaagggcgtgctcgacgacggccgcaaggtcaccgccgaactcgtgcgtgaattcgccaaggccgaactcgacaacgtgaagcgctcggtcggcggcaacacgcagccgtacgagcgcgccgcggcgatcttcgagcagatgtcgacgtcggaaggcttcaccgaattcctgacgctgccgctgtacgaggaaatctgac

SEQ ID NO: 237948 - DNA, 1131 bp, Unknown
  Bacterial polypeptide expressing nucleotide sequence isolated from the Sargasso Sea
tattaaaagatggttcggaaattccagagggaattatggacgcgtttgtttctaccatgtgtgctttacatgactttaaaaacaaaaataattcaagaactggttctatctatatagttaaacctaaaatgcatggtccagaggaagtcgcatttacagataaattgtttagcaaagtggaagaagtattagatttaaataagtatacgatgaaagtcggaataatggatgaagagagaagaactacggtaaatttaaaagagtgtattaggcaggtaaaaagtagaattgtttttattaatactggatttttagatcgaactggtgatgaaatgcatacttcatttgaagcaggtccgatgatatttaaaggtgaaatgaaaaaatctacttggttgaactcttatgagaattggaatgttgatattggattaagctgcggattttctggaaaagctcaaataggtaaaggtatgtgggcaatgccagatcaaatggcaaatatgatggagcagaaaatcggtcacccaaaatctggtgcaaactgtgcttgggttccttctcctactgctgcgactttacattcaatgcattaccataaagtggatgtttttaaagaacagaataaaatcaaatctagaaataaaacaaatttggaaaaacttttagaaataccaagggctgacagacctaattggtctgttgaagacattaatcgtgaattagaaaataatgcacaaggtatacttggatatgttgttagatggatcgaccatggagtaggttgttcaaaagtaccagacataaataatattggtttaatggaagatagagcaacattgagaatttcctctcaacatatagctaactggcttcatcatggaatatgcacaaaagatcaggttttgaaagtaatgaaaaaaatggctactattgttgataatcaaaacgaaaaggatcctgcatatacaagaggaggaagatcaagttataaaaaaatgtctgatgactttgaaaattcaatagccttctcagctgcttgcgatttaatatttaagggaagagttcaaccatctggttatactgagccccttttgcatcaaaaaagacttgagaaaaaaagcgcttaac

SEQ ID NO: 237949 - DNA, 693 bp, Unknown
  Bacterial polypeptide expressing nucleotide sequence isolated from the Sargasso Sea
ataacaatgtaaatgttggaattgattgtggttttactggtgttgctcaaattggaaaaggtatgtgggccatgccagacaaaatggcagaaatgatgaagcaaaaaatttctcaccttgaagcaggagccaattgtgcatgggttccttcgccaactgcggcaggtctgcacgctttgcattatcataaaattaatgttttcgataaacaactagaaattaaaaatagaaaacctacaaaccaattagatattttaagaatacccattgcggatagacctaattggtcaatagaagagattaactcggaaatatcaaactcagctcaaactattttgggatatgttgttagatggatagatcaaggcatcggatgttcaaaagttcctgatattaataacattggattaatggaagatagagctacactaagaatttcatcacaacatattgccaattggcttcaccacggcgtttgtagcaaaaaacaagttttggaaataatgaaaaaaatggcaaaaattgtagataaacaaaacaaagatgataataaatatcaaaatatgtcaccaaattacgataggtctattgcatttaaaactgcttgtgaattaatttttcaagcaaagcatcaaccctctggttatactgagccacttttacatttaaatagattaatcagaaaaaattaat

SEQ ID NO: 237950 - DNA, 1477 bp, Unknown
  Bacterial polypeptide expressing nucleotide sequence isolated from the Sargasso Sea
tcaaaaaagagaaataatacaaaaaaaaatagatgattggcataagtccaaaaaaggtaaagactttaataaaaaagaatatgtgaattttttaaagtcaattgattatttaattgatgaaaaaaatgactttaagatagagacaaccgatatcgatgaagaaatttcctctattgcaggacctcagttagtggttcctgtagacaacgctcgttatgcattgaatgctgcaaatgcacgatgggggagtttgtacgatgcactttatggaacagatattataccaggtagtataggaaaaagttgggatcaagagagagcaaaaaaagtaataaattttgtaagagattttttagacgaaagaattccgttggcacaaatcagctggaaaaatgtttcaaaattcaaaatagaggaaaataaacttgttatattttcggactccaagaaatattttctcaaaaataatgagcagttcatagggtataaaggtgataaagaaaatccaagttcaattttaataaagaataataatcttcatatcgatatttttataaactctgaaaccatggttggaaaaattgataatgcggccatctcagatatagtggtagagtccgccctatcaacgattgtagataatgaagattctgtagcggctgttgatgctgaggacaaagttaagtgctatcgaaattggttgggtttaatgaaaggagatctatcttctacttttgagaaaaaaggtaaaaagattgtcagaaaactcaaccaagatagagagtatgtctctaaaaatggagaaaaaattaatcttcatggcagagcattattacttaataggaatgtaggacatttaatgaccaaccctgcgatacttttaaaagatggagcggaaataccagagggaattttggatgcgtttgtatctacattatgtgctctgcatgacttcaaaaataaaaagaattcgagaacaggctcagtttacattgttaaacctaaaatgcatggaccagaggaagtagctttcacaaatactttatttgaaaaagttgaagaaacactgggtatcaaaaagtactctattaaagtcggaattatggatgaggagagaagaacaactgtaaatttaaaagaatgtattagacaagttaaaaatagaattgttttcattaacactggctttttggatagaactggagatgaaatgcatacatcttttgaagcaggaccaatgatattcaagggagaaatgaaaaaatcaacttggctgaatacttatgaaaattggaatgtggacataggtttaaaatgtggtttttcaggtaaagctcaaattggtaagggaatgtgggctatgccagatcaaatggcaaatatgatggaacaaaaaattggtcatccaaaatctggtgcaaactgtgcttgggtgccatctccaactgcagcgacactacattctcttcattaccat

SEQ ID NO: 237951 - DNA, 847 bp, Unknown
  Bacterial polypeptide expressing nucleotide sequence isolated from the Sargasso Sea
aggattgtttttattaatactggatttttagaccgaactggcgacgagatgcatacttcatttgaagcaggtccaatgatttttaaaggtgagatgaaaaaatcaacttggttaaactcttatgagaattggaatgttgatattggactaagctgtggattttctggaaaagctcaaatcggtaaaggcatgtgggcaatgccggatcaaatggcaaatatgatggatcaaaaaattggtcatcctaactcgggtgcaaattgtgcttgggttccttctcctactgctgcaaccttacattcaatgcattaccacaaagtggatgtttttaaaaaacaggataaaattaaatctagaaataaaacaaatttagaaaaccttttagaaattccaagggctgataggccaaattggtctattgaggacattaatcgtgaattagaaaataacgcacaaggtatacttggatatgttgttagatggatagaccatggagtaggttgttcaaaagtaccagatataaataatgtgggtttaatggaagatagagctacattaagaatttcttctcaacatattgctaactggcttcatcatggaatatgtacaaaagatcaggttatgaaagtaatgaaaaaaatggctactattgttgataatcaaaacgaaaaggaccctgcctatacgagaagtggaagatccagttataaaaaaatgtctgatgactttgaaaattcaatagccttctcagctgcttgcgatttagtatttaaaggaagagtacagccatctggatatactgaaccccttttacatcaaaagagactagagagaaaaaaattataat

SEQ ID NO: 237952 - DNA, 1276 bp, Unknown
  Bacterial polypeptide expressing nucleotide sequence isolated from the Sargasso Sea
aatgaaaggagatctcctaacaagatttgagaaagaaggaaaaacattggagagaaaacttaatccaaacagaagttatatttcaaaagaaggaaaaggattaaaattacacggtagaagtcttttattgattaggaatgtcggtcatttgatgactaatccctcaataatattgaaagatggaagtgaaattccagagggattgatggatgcttttataacaactgcagcagctcttcatgataagaaaaaaaggggaaattcaagaactggttcaatatatattgtaaaaccaaagatgcatggtcctgacgaaacagcatttacaaatgaaatctttactaaagttgaagaggtacttaaattaaaaaaatatacctgcaaaattggaattatggatgaagagagaagaacctcatcaaatcttaaagagtgtatcagaaccttaaaacacagagttttctttattaataccggtttccttgatcgtacaggtgatgaaatgcacacatcaatggaagcaggaccaatgattaaaaagggtgatatgaaatcctcaaaatggattggggcttatgaaaataacaatgttgatataggtttagcttgtggcttttcaggtaaagctcaaataggaaaaggaatgtgggctatgcctgataagatgaaagatatgtttgatcaaaaaactgatcatcttaaagcgggagcaaattgtgcgtgggttccgtctccaactgcagcagctattcatgcattacattatcatgaaattaatatttttgatgttcaaaaaaagttagctaaaagagataaggcaaaaatcgatgatctacttactattcctattgcagatagaccaaattggtcagttgatgaaattaataaagaaatctcaaattctgctcagacattacttggttatgtagtaagatggattgaccaaggtgtaggttgttctaaagtaccagacataaacaatgttgggttgatggaagacagggcaactttaagaatttcttctcaacacatcgctaactgggtacatcacggagttacaacaaagttacaagtcatagaaataatgaaagaaatggcaaagattgttgacagacaaaatgagaatgatcgaaattacgaaaaaatgagtactgattatgacaggtccatagcatttcaaactgcatgcgaacttatttttaagggaaaagatcaaccttcaggatatacggagccactattacatttaaatcgattaaaaaaaaaattaacttga

SEQ ID NO: 237953 - DNA, 821 bp, Unknown
  Bacterial polypeptide expressing nucleotide sequence isolated from the Sargasso Sea
aagaagagtaatctttataaatacaggatttttagatagaacaggtgatgaaattcatacaagtatggaagctggtcctatggttccaaaggctgatatgaaaaacgaagaatggatcaaggcttatgaaaattggaatgtagacataggtttggaaactggatttttgggaaatgcacaaattggaaaaggtatgtggccaatgccagacgaaatgttagaaatgtataaaacaaaaacggtccatcccttagctggagctaattgcgcatgggttccgtctccaacagcagcaacccttcatgctatccattaccatcagatttttgttaaaaatgagcaagaaaagttacttaaaagagagaaggctaatttagatgatttgttaaaaataccttgtataaaagaagataaatttccatcaaaagaagatatacaagatgagttagaaaataatgctcaggggatattagggtatgtagttagatgggtagatcaaggtataggttgttcgaaagttcctgatattaataatgtaggtttaatggaagatagagcaacatgcagaatatcaagtcaacatatcgctaactggctgcatcataatctatgtactgaaaaggacgtaattaatgtaatgaaaaagatggctgttgtagtagatgaacaaaataaaaatgatgtagattataaaaatatgtcaccttcttttgatggcattgcttttaaggcagcttgcgatcttgcaataaaaggtaaataccaaccaagtggatatactgaaccaattcttcataaaatgagattaagaagaaaataaa

SEQ ID NO: 237954 - DNA, 1230 bp, Unknown
  Bacterial polypeptide expressing nucleotide sequence isolated from the Sargasso Sea
ttgttagaaaattaaacccaaatagaaaatatatttcaaaagacggtaaagaaatttctttgcatggaagagctttgttattaaacaggaatgttggtcatttaatgactaatccaggtattctcttaaaagatggttcagaaattcccgaaggtattatggatgcatttatttcaactttatgtgcattacatgactttcaaaataaaaaaaattcaagaactaactctgtttatatagttaaacctaaaatgcatggtccagaagaagttactttcacaaacgaattatttaaaaaagttgaggatgcattaggtataaaagaatattcaataaaagttgggataatggatgaagaaagaagaactacagttaatttaaaagaatgtatcagacaggttaaaaataggattgtttttataaatacagggtttcttgatcgtacaggtgatgagatgcatacatcttttgaagctggcccaatgatttttaaaggagatatgaaaaaatctaagtggttaaatacttatgaaaattggaatgtagacataggattgaagtgtggtttttctggagtagctcaaattggaaaaggtatgtgggcaatgcctgaccaaatgcataatatgatggagcaaaaaataaatcatccaaaatcaggggcaaattgtgcgtgggttccatctccaacggctgcaactttacatagtcttcactatcacaatattaatgtttttagtgagcaaaaaaaaattaaattaagagaacaatctagagtcgaagatatactagaaattccaaaagctgatagacctaattggtcaatggaagatatcaatcgtgaattagagaataatgcacaaggaattttaggatatgtagtaagatggattgatcaaggtattggatgctctaaagtgcctgacataaataatgttggattgatggaagatagagcaacattgagaatctcatctcaacatatagctaattggttgcatcacggtatttgtaaaaaagaccaagtaatgcatgtgatgaagaaaatggccaagaccgttgatgaacaaaataaaaaagatccaaattacgaaaaaatgtctgataactttgataattcaatagctttctctacagcttgtgatcttgtttttaaaggtagaactcaaccttctggttatactgaacctttgttgcaccagaaaagactaaaaagaaagaaaatttagt

SEQ ID NO: 237955 - DNA, 1456 bp, Unknown
  Bacterial polypeptide expressing nucleotide sequence isolated from the Sargasso Sea
agatctttgttacaagatcaaatctctacttggcataagaataatgattttaatttaaatgaatataaagtctttttacaagagataggttacttagaagaagtacctgcagattttaaaatcaaaacgaggaatacagatcctgaaatctcatgtattccaggacctcagcttgttgttcctatcatgaatgcaagatttgcattgaatgccacaaatgcaaggtggggtagtctttatgatgcactttatggaacggatgtaatttcagaagatggaggtgcatcgaaacagggttcgtacaatgcaattagaggaaataaggttattgatttttcaaagcaatttttagacgactgtttcccaattaaggatcttagttatatagatattacaaatatttcaattaaggaccaaagattactttttcatgctgagcaagatcaaattacttatttaaaaaatgaaaatcaattcaaaggatttaatggatctcctaaaaatccatcagagattctattggttaataacaatctccatttagaaattcaagtagatcccaatcatcctgttggtaagactgataaagcaaatataaaagatattgttttagagtctgcagtttcaacaatccaagattgtgaggattcagttgccgcagttgatgctgaagataaagtaatcgcctatagaaactggcttggtttaatgaaaggagatctttctgaaacatttgaaaaaaatggtaaacaactaacaagagtcctaaaagaagatagagagtatttagatattaatgggaattcttttgctcttccgggaagaagtcttttactcgtaaggaacgtaggacatttaatgcagaatcctgctgtgatattagacaatggcgaagaagtttttgaaggaattttagatgcaatgtttactatatgtatagccttatatgatctaaatcagttaaatacattgccgaactcaaggaacaaaagtatgtatattgttaaaccaaaaatgcatggttcagaggaggttactttcacatgtgatttatttgaagcagttgaacaattatttaatctagaaaaaaatactgtaaaagttggaatcatggatgaggagagacgaactactattaatctaaaggcctgtatcgaaaaagcaaaagaaagaataattttcataaataccggttttttagacagaactggagatgagatacatacgagcatggaagcaggtgctatggttcctaaatcagagatgaaggctcaatcatggataaacgcttatgaagactggaatgtagatattggaataagttgcgggttgagtggcaaagctcaaattggaaaaggaatgtgggcaatgccagacgaaatgaaggatatggtaaaaactaaaatagctcatccattatctggtgcaacatgtgcatggggtcccatcactactg

SEQ ID NO: 237956 - DNA, 1193 bp, Unknown
  Bacterial polypeptide expressing nucleotide sequence isolated from the Sargasso Sea
tatgaaattttttaaaaatatcctaactatatttagttctaaaaaaaatgagataaaagaaatctcactaaagatttctccagctctagaagaatttgttagaagcgaaatgttgcctggcttgagtatttctgaaaattatttctggagttcgtttgagaacttgttaaataaatttcaacaaagaaacaaagatttattagatataagaaagcagttacaagcaaaaattaatggctggcatcttgaaagaaaagataaagatataaatattggtgagtataaagatttcttagaagatattggctatttgcatccaagaagcaaagacttttccatcagaacatggaatgttgatcctgaaataagaaagattgctggacctcagctagttgtgccagttatgaatgctaggtttgctcttaatgctgcaaatgctagatggggcagcctttatgatgccttgtatggtactgatattattaatgaagataatggagctgttagggagggaggatataatcccatcagaggagataaagtaattgccttttctaaaaactttcttgatgaaaccattcctttaaaaaatggtaactatgacaaggtaacaaactttgagtttgttgatagtgaattacttataacattacaagataacacaaaaacttcattggttgataaggataaatatattggctacatggataaaggtgaaggagcatacggtttattatttaagaataataatcttcattttgagatacaaattgatagatcacatcctattggtcaaaatgatttatcaggtatcaaggatattctaatggagtctgccgttacaacaatacaagattgtgaggattctgtagcagcggttgatgcagatgacaaaataattgtttatagaaattggcttggcttgatgaaaggtaatttaaaaagatcttttgataaaaatggaaagtttattactagggagcttgctaaagataggaaatatctcttaaaaaatggcaagatgattttactgcccggaagaagcctaatgttgataagaaatgtaggacatttaatgacaaatcctgctatcaaagatgataggggtaatgaggtgccggaaggaattatggatgcattttttacttcttgtatttctattcatgacatcattggcaatggcacttataaaa

SEQ ID NO: 237957 - DNA, 1084 bp, Unknown
  Bacterial polypeptide expressing nucleotide sequence isolated from the Sargasso Sea
gaacttaaattagaaacttataaacattctaccgatttaaaaagtaaaaaaaaatttgttggctatagaggagataaagaaaatcctttagctataattcttaaaaataataatttgcatgttgaaataataataaatccaaaagcttttagtgccaaaagtgatgcggcaggaataagcgatattattcttgagtcagctttaactactatttgtgataatgaagatagtgtagcagcagttgatgctgaagataaagttgcatgttatagaaattggctaggattaatgaaaaaagatctaactgctgaatttattaaaaatgggaaaatttataaacgtaaactaaatccagatagaagttttttttcaccatcaggtaaaaaattaaaacttcatggtagatctttattacttaacagaaatgttggtcatttaatgactaatccatgtattcttttaaaagatggatctgaggttcctgaaggaattcttgatgcatttattacttctgcagcatgtatccatgattttaaaataaaaaataattcaagaaaaggatctatctatatcgttaaacctaaaatgcatggaccggatgaagcagcttttactaatcttatatttaacaaagtagaggaagctttaaatctaaaaaaatatactattaaatgtggtataatggatgaggaaagaagaacttcagtaaatttgaaagaaactattagagcccttaaagatagagtattttttattaacactggatttttagatcgaacaggtgatgaaatacatacatctatagaagctggaccaatgataaaaaagggagatatgaagctatcaaaatggatatctgcttatgaaactaataatgttgatattggaattgaatgtggatttaccggagtcgctcaaataggtaaaggtatgtgggcaatgccagataaaatggcagatatgatgaagcaaaaaatttctcatttagaagcaggagctaattgcgcatgggttccttctccaactgcagcaggacttcatgctcttcattatcataaagtagatgtttttaaaaacaattaga

SEQ ID NO: 237958 - DNA, 1018 bp, Unknown
  Bacterial polypeptide expressing nucleotide sequence isolated from the Sargasso Sea
tcttatttacatagttaaaccaaaaatgcatgggcctgaagaatgctcatttacaaacttaatttttgaaaaagtggaaaaggttttaaatttaaaaagaaatcaaatactttgtggaataatggatgaagaaagaagaacatctgttaatcttaaagaatgtattagggctctaaaaaatagagttttttttataaatacaggttttttagatagaactggagatgaaattcatacttctatggaggcaggtcctatggttttcaaaggagacatgaaatcctcaaagtggatatctgcttatgaaaatagaaacgttgatattggtctatcatgtggtttttcaggtaaagcacaaattggtaaaggaatgtgggcaatgccagacttaatgaaagatatgatgaaacaaaaaatcgtacatcctcaatcaggagctaattgtgcttgggtgccctcaccgacagctgcagcattacacgctcttcattatcatgagatcgatgtctttgctaaacaaaaaaaattatcaaaaagaaaaattgcaaaactctcagatcttttaactattccagttgataatagaacgaactggtcaatggatgatattacaaaagagttaaaaaataattctcaaggaattttaggatatgtagttagatgggttgatcaatcagttggttgttcaaaagttcctgacattaatggtattggtcttatggaagatagagcaacttgtagaataagtagtcaacatattgctaattggttgtatcatggtgtttgcagtaaaaaacaagttttagaaattatgaaaaaaatggctaaggttgttgatagtcaaaatttaaaagatccgagcatgaaaggtcaagctccatatcaaacaatgtcaggcaactttgaccgatcagtagcttttaaagcagcttgtgatttagtttttcatggaagattacaaccttctggttatacggaaccaatccttcatcttaataggcttcttaaaaaaaactaa

SEQ ID NO: 237959 - DNA, 1336 bp, Unknown
  Bacterial polypeptide expressing nucleotide sequence isolated from the Sargasso Sea
aatgaaaaaaagagaaaaattcataaaaattagtgatttatcagtatcaaaattacttttagattttgttaataaggagttattgcctggaacaggtatttcaaaaaatcgattttggaaaggattcaacgatgctgttcattatttagcaccaaaaaataaaagacttattgaaactagagaaaaaattcaaaaatctatagacacttaccatcttgatagaaaaggtaaaaaatttaattttaatgaatacaaagtttttttaaaaaaaatcggctaccttaaaaaatcaggtaaaaattttaaaattcaaactaaaaatgtagataaagaaatttcaagtatttgtggatctcaattagtctgtccagttagcaatgaaaggtttttattaaatgcagccaatgcaagatgggttagtttgtatgatagtttatatggagcaaatattatccctgaaaccaaaggtgccttaaaaggtaaaacctataatcctattagaggaaataaagttattacatatgctaaaaatcttttagataaatatgtgcctctaaaaaataaaagttggaataatttggataaaataccaaatttaactaatggaaaattaaatattgaattaaaaaatcaaaaacaatttattggatacagaaaaagcaaaaataaattatcatctcttttatttataaataataatcttcatatagatatattatttgatcaaagtggaaatttagaaataaataatccagaaggaaatcaagatcctttaaaaattcatgatatatatttagagtcggcaatttcaacaatctgtgatcatgaagatagtgttgctgcagttgatgctgaggataaagttttaggatacagaaattggttacttttaatgaaaggaagcctgaattcaaagtttaaaaaaaatggaaaaataattttaagaaaattaaacccagacagagaatatctttcagttaaaaataaaaaaattaaattacatggaagatcattattattaaatagaaatgttggtcatctaatgacgaaccctgcaatccttttaaaagatggatcagaatgtccagaaggaattttagatgcctttataacttctgctgcatgtcttcatgattttaaaagaaaaggaaattcaagatgtaattctatttatattgttaaaccaaaaatgcatggtccagaagaatgttcattcacaaatctgatttttgaaaaagttgaaaatgttttaaagttaaaaagaaatcaaatcctatgtggaattatggatgaagaaagaagaacatcagttaatcttaaagaatgtattagaatt

SEQ ID NO: 237960 - DNA, 660 bp, Unknown
  Bacterial polypeptide expressing nucleotide sequence isolated from the Sargasso Sea
tttccgggaaagcccaaatcggcaagggcatgtgggcgatgccggatgaaatggcagacatggtgaaaaacaaaatcgggcaccccatggcgggtgccaactgcgcctgggtcccatcccccactgctgcgactctgcatgccattcattatcatcgggtgaatgtgcttgaacgccagcaggaactcatggaacgtgagcctgcaaatatagacgatatcctcaaaattcctttagaggagcaaccaaactggtcagaagaagaaatccgaaaggaactggagaacaactgccagggaatcctgggatacgtggtgcgctggatcgaccagggtgttggctgttccaaggtcccagacatccaggatgtcggtctcatggaagatcgtgcgactttaagaatctccagccagatgcttgcaaattggctgttgcatggaatcgtcagcgaagaacaggtgacccatgcacttgagcgtatggcaactgttgtcgatcggcaaaatgcaggagatcctctctaccaaccgatggctccctcctttgaggggatagcctttcaggctgccagtgatcttgtctttaaaggaacagaaatccccaacggatacaccgaaccaacccttcatgcaaggagaagggaattgaaatccgcttagt

SEQ ID NO: 237961 - DNA, 1400 bp, Unknown
  Bacterial polypeptide expressing nucleotide sequence isolated from the Sargasso Sea
gaaagatatgatcctgaaagaggtgaagaagtaataaaatattcaaaaaagtttttagataaacattttactttaaagaaaaaaaactggtcacaagtttctgagatatcaattgataaaagtaatttagttttaaatctaataagcgaaaaaactactattaaagataaaaacaaatttattggttatagaggtaaaacaaataaaccttctgcaataattttaaaaaataataatcttcatgttgaaattataattaatcctgaagcttttagtgcaaaaagtgatccagcaggtattgctgatataataatggaatcagctgttactactatttgtgaccatgaagactcagttgctggagtagacgcaaaagataaggttcttggttacagaaattggttaggattaatgaaaggaaatcttagagctgaatttgaaaaaagtgggaaaaaattaataagaaaattaaacccagatagaaaatttgttttgaaaaatggagatttatctcatttacatggaagatcacttttattaaataggaatgttggacatttgatgactaatccttcaattcttttatctgatggatcagaaattcccgaaggtattatggatgcttttataatatctgccgcttgtttacatgatttaaaaattggcaaaaattcaagaaaaggatcaatttatatagttaagcccaaaatgcatggtccaaaggaagcaaaattcactgatttaatttttagtaaagttgaaactacatttggtttaaaaaaaaatactattaaatgcgggataatggatgaagaaagaagaacatcggttaatcttaaagaatgtataagagctcttaaacatagagtattttttattaatactggttttctagatagaactggtgatgaaatgcatacatcaatggaggcaggcccaatgataaaaaaaggtgatatgaaaacgtcctcttggataaatgcatatgaaaataataacgttgatgttggtttgtcctgcggtttttctggtttagcgcaaattgggaaaggaatgtgggctatgccagataaaatgtcagatatgatgaaacaaaaaatatctcatttagaggctggagctaattgtgcatgggtaccatctcctacagcagcagctctacattctctacattatcatgatatagatgtttttaaaaaacaagacgaattaaaaaaaagaaaaaaaactcaagttgccgaacttttaaatattccaattattaaaaatccaaattggtcagtagatgatataaataaagaaatatcaaatagtgcacaaacaatacttggatatgttgtaagatggattgatcagggtattggttgctcaaaagttcctgatataaacaatatcggata

SEQ ID NO: 237962 - DNA, 904 bp, Unknown
  Bacterial polypeptide expressing nucleotide sequence isolated from the Sargasso Sea
atgatacatttagaaaacaaatttggtatacaaatttcaactgaatttattgattttattgagcaagaggttttgccggaaataactattgcgtcagatacgttttgggctggccttgcaaaagtggttaaggagctcactccgacaaataagcaactgttggaaaggcgaacttattttcaacgtcaaataaatgaatggcacagggcgaacaaggacagggaatttaactccgctgactacaaaagttttttatattcgattggctacatcgtaccagagaaggagccattttctatcgatactaaacaagtagatcctgaaatatcaaaaattgcaggtcctcagctagttgtgccaattatgaatgcccgctttgcattaaacgcagcaaatgctcggtggggctctctatacgatgctctctacgggactgatgcaatagaaccagtcgcaaaaacaatagattatgactttgagagagggcaaaaagtaatacaatggtgccgtagatttcttgatgatgcctttccactaattgatggttcttggagcgaaataactgaggtggctgtaaaggatggtcgtcttgatttatccggtaaacagttgcggttggtaaatagttttattggatatgtcggacaccctcaccaacccacctgcttagttttaagcaataacaatttacacgtacggatcgaatttgatcgaaatagcgaggttgggcagtccgatttagctggaatatcagatatcgtaattgagtcagctatatcaactattatggattgcgaggacagtatttctgccgttgatgcttcagacaaaattattgcttatcgaaactggctaggaatgatgaaaggcaatctaactgaggaagtatcaaagggagataaaa

SEQ ID NO: 237963 - DNA, 1156 bp, Unknown
  Bacterial polypeptide expressing nucleotide sequence isolated from the Sargasso Sea
tatgaacgcaagatatgcactaaatgctgcaaatgctagatggatgactttgtatgatagtctatacggaactgatattattgagcaatcagaagatagtgtttcagagagatatgacccactaagaggtgaaatggttattaagtatgggagagattttttagacaaatattttccattgaaagatttaagctggaaaaaaataacaagctttgccgtaaaagatggaaagttaaaaattcttaaaggtgctgatttagttagcttgatagatgtagataaatttattggtcatagaggcgaaagtgataatccttctgcaattattttaagaaataataatttgcatattgaaattttaaaagactctagagcgtttgctgctcaacaagaccatgcaggtataagtgacataatagtagagtctgcagtatcaactatttgtgataatgaagatagtgtagcagcagttgactcagaagataaaattatttgttacagaaattggctaggtttaatgcgtggagacctaaagtcaaaatttgaaaaagatggaaaattatatgaaagaaagctaaatccaaatagaagttatatttctaaggatggtaaaggtttgaaattacatggcagaagccttctacttgtaagaaatgttgggcatttaatgacaaacccatccattattttagatgatggaaatgaagtgccagaaggtattttagatgcatttataacgacagctgcagcacttcatgatttaaagaaaaaaaataattcacgaactggatctgtatatattgttaaacccaaaatgcatggaccagatgaaacagcgtttacagatttaattttttcaaaagtggaagaagttttaggattaaaaaaatatacatgcaaaataggaattatggatgaagaaagaagaacatcctctaatttgaaagaatgtattaggtccttaaaaaatagagtattttttataaatacgggatttttagatagaactggtgacgaaatgcacacatcaatgatggctggacctatgattaaaaaaggagaaatgaagtcatcaaaatggattacagcttatgaaaatagaaatgtggatattggactaaaatgcggtttttctggtaaagctcaaattgggtaa

SEQ ID NO: 237964 - DNA, 514 bp, Unknown
  Bacterial polypeptide expressing nucleotide sequence isolated from the Sargasso Sea
aatgcttattagaaatgtgggtcatttaatgacaacacctgcaattttaaatgaagatagcgatgaaattggtgagggaattatggatgccattataacaacactcattgcgactcatgatttctcaaaaaaagataataagaactctaattacaactcaatttatatagttaagcctaaaatgcatggacctgaagaagttaaatttactgatgaacttttctctgaaattgaaaaattattagatttgccaaatagtacaatcaaaataggcatcatggatgaagagaggcgaacaagtataaacctaaaagaatgtattagggctgcacaatcaagagttgcttttatcaatacaggatttttagatagaactggagatgaaatccatactggcatgcaggctggttctttcatgaaaaaagctgatatgaaaaatgctccttggattacttcctatgagaagagaaatgttagtattggtttagaatgtggacttaaaggtaaggcacaa

SEQ ID NO: 237965 - DNA, 2161 bp, Unknown
  Bacterial polypeptide expressing nucleotide sequence isolated from the Sargasso Sea
atgaaaataaattatgaaactgtaaataatttaaaagtttcgaataaattacttaaattcgttaacgaagaagtattaaaagatacaaatattctaccaacaaagttctggtctggttttgacaaatatgtccacgaacttgctcctaaaaataaagaattacttaaaataagagaaaatttacaaaaaaaaattgacgattggcatattaagaataaagaaaataaaattaattttgatgaatataaaaaatttttaagagaaattggttatttaaaagatcaaggttcagattttcaaattgaaacaaacaatgtagatgaagaaatctctaaaatagcaggtccacaattagtagtgcctattatgaatgcaaggtatgctctcaatgctgcaaatgctagatgggtgagtatctatgatagcttatatggtaccaatgttattgagtcagatgagggaggaagtgaaagatatgatcctgcaagaggtcaagaggtaataaaatatgtaagagaatttttcgacaaatatatcccaatcaatggaacaagttggaaaaatatagctggtttaaaagtagttaacaaggatttaatcatctctaaagatagtcaagaatataatttaaaagataaaaataaatttattggtcatagaggggacgccaataaaccttcggcaataattattaaaaataataatcttcattttgaaataataattaatccaaaagcatttagtgcagcacatgatattgcgggcataagtgatgttattgccgagtcagcaatctcaactatttgcgataatgaggacagtgttgctgcagttgacgatgaagacaagttagtttgttataaaaattggttaggtttaatgaaaggaaatttaaaaatacaatttgaaaaaaatggtaaaaacttagagagaaaattaaatcctgatagaagttatatttccagagacggtaaaggcttaaaattacatggaagaagtttgctattaattagaaatgtaggacatcttatgactaacccttctattcttttgaaagatggaagtgaagtgcctgagggagtcatggatgcatttattactacagcctgtgcagtacatgatttaaaaagaaaaagaaattcaagatctggttctgtttacattgtaaaacctaaaatgcatggaccagatgaatgcgcattcactgatttaatttttactaaagttgaagaggttttggaattaagaccaaatacaataaaaataggtttgatggatgaggaaagaagaacttcagctaatctcaaggaatgtattagagctctttcaaaacgtattgtgttccagaatactgggtttctcgatcgtacaggtgatgaaatgcacacgtctatgcaagcaggcccaatgataaaaaagggtgatatgaaatcttctaaatggatacaagcttatgaaaataacaatgtggatttaggtttaaaatgtggtttttcaggcaaagctcaaattggtaaaggtatgtgggctgcgcccgacgaaatgaaaaaaatgatgaaagaaaaaatagcgcatttagaagctggagctaactgtgcttgggttccatctccaacagctgcctcattacatgctctgcactatcatgagattgatgtttttgatgtacaaaaaaaactagcttcaagatctccagcaaaattggatgatcttttaacaattccaatagctgatagacctaattggtcagttgatgaaataaattctgaaatttcaaattctgctcaaactctattaggatatgttgtaagatggattgatcaaggaattggctgttcaaaagttcctgatataaataatattggtcttatggaagatagagcgactttaagaatttcatctcagcatattgcaaattggatacatcacggtattacaacaaaaatgcaggtagttgaaataatgaaacaaatggcaaaaattgtcgatgaacaaaataaaagtgataaaaattatgtcaaaatgagtgatgattttgataattcaatagctttcaatacaggatgtgatctcatttttaaaggaaaagaacaaccatcaggttatactgagccacttcttcacctaaatagattaacaaaaaaaactattcagaattaga

SEQ ID NO: 237966 - DNA, 2194 bp, Unknown
  Bacterial polypeptide expressing nucleotide sequence isolated from the Sargasso Sea
aatgaatcttttttctaaattttttaaatcctccaatcattctgctaatgaaattaatttaaaaatatcatcatctttagaagattttacaaagaatgaagttctgcccggtctaaacatttcacctcattatttttggagctcttttgaaaatcttgttgaaaagttttctagtcgaaataaaaatctattaattaaaagaagtgaattacaagaaaagattgatcattggcacattcaaaatagaaataaagaatttaatttagatgaatataaaaattttttaactgatattggttatttacatccaagagcaggtaattttaagatcaagacatggaatgtagatccagagattagaaagattgctggtcctcaattggttgtacctctcatgaatgcaagatttgccttaaatgcagcaaatgcaagatggggaagtctttatgattctttatatggaacaaatataattaccgatgaggatggtgctactagagagggaggttataacccaataagaggaaacaaagtaatagaatttgctaaaaaatttcttgatgaaacaataccaatgcaatcaggctcatacgatcaggttatccagttccaatttattgatagtgagctatcaatgaaattagaggatggaaaaaaagtatatttaaaggatattgatcaatatgtaggttataaagatgagggtatgggcgcatatggacttctatttaaaaacaataatcttcactttgaaatacaaattgataggtctcatccaataggtcaagaggataaggcaggcataaaagatattttaatggaatctgctgttacttcaattcaggattgtgaggactctgtagctgctgttgatgcagaagataaaattattgtttacagaaactggctaggcttaatgaaaggaaatttaaaaagatcttttgataaagatggtaagtttattacaagagaacttaatcctgatagaaaatatttactgaaaaatggaaaaatgattctgcttccaggaagaagccttatgctggtaagaaatgttggccatttaatgacaaatccagcaatcaaagataagaaaaacaataatgttcctgaaggaattatggatgcattctttactatatgtattgccattcatgacattattggtaatggcatttacaaaaactctaaaacaaaaagtatttatattgtaaaaccaaaaatgcatggaccagaagaagttcaatttacttgcgatctattttctgaaatagaaaaaatatttgatttgcctgaaaacactgtcaaattaggaataatggatgaagagagaagaacaacagttaatctaaaagaatgtatagaaattgcaaaacacagagtcatttttattaatacaggatttcttgatagaacaggcgatgaaattcatacaagtatggaagctggaccaatggttacaaaagcagatatgaaaatgcaaaaatggattaatgcatatgagaattggaatgttgatattggcttggagactggatttaaaggtaatgctcaaattggtaaaggaatgtggcctatgccagatgaaatgttggatatgtataaaactaaagcagctcaccctaaagcaggagctaactgtgcatgggtaccgtctccaacagctgcaacaatccatgcaatgcattatcaccaaatatcagttcaagatgaacaagataaaatcataaaaagagaaagagcaaaactagatgatttgcttttgattccatttatgaaaaaaaatgaattgccaacagataaagaaattacagcagaacttgaaaataatgctcaagggatcttgggttatgttgtgcgatgggtagaccaaggtattggatgttcaaaagttcctgacataaatgacgtaggtttaatggaggatagggctacatgtagaatttcaagtcaacacatatcaaattggttacatcatggattatgctcagaggttgagatccttgaaataatgaaaaagatggcaaaagttgttgatagtcaaaataaagacgatgttaattatcgtaaaatgtcaccttcattcgatagcattgcatttaaagctgcatgcgagcttgctattaaagggaaataccaaccaagcggttatactgaaccaatacttcacaaaatgagattaagaagaaaataa

SEQ ID NO: 237967 - DNA, 1405 bp, Unknown
  Bacterial polypeptide expressing nucleotide sequence isolated from the Sargasso Sea
tatgagagagcaatacatcaaaatccacagcttatctgtagcaaaagaactagctgattttgtcaaaaatgagcttttactggatactaacgttggtcctgacgagttctggaaaggttttgacaaagtggtgcatgaattagcgcctaaaaataaaaaattactcgaaatcagagaaacattacaacaagaaatagatctgtggcataaaaaaaatagagaccaagagattgactataataaatataaaaattttttggaagaaataggttatttaaaaaaagaaggtgaagattttaaaataacaactaaaaatttagatgaagaaatatcaaatatagcaggaccacaattagttgttccaataatgaattctagatatagcttgaatgctgctaatgcaagatgggtaagcttatatgacagtctttatggatcaaatataatagagtctgaagaaagtggaagtgaaaaatatgatcctttaagaggacaagaagtaattaaatacactagaaactttttgaacaaatattttccaataaatgatcttgactggaaagatattacaggtttagcagtaaataataaaaaactctcaatctataaggaaaataaagaatataatttatcagatttagagaagtttattggtcatagaggggatgcggccaaaccaaatgctataatcttaaaaaataataatcttcatcttgaaataattattaatcctagagcatttagtgctgcaagagatgctgcaggtataagcgatattatagttgagtctgctatatcaacaatttgtgaccatgaggatagtgtggccgcagtagatgctgaggataaagtaacttgttatagaaattggctaggattgatgaaaggaaatttaaaatcagtatttgagaaaaatggtaaagaattagagagaaaacttaatccagataggagttacacttcattgaatggtgaaaagttaaaacttcacggaagaagtcttttacttgtgagaaacgttggacacttaatgacaaaccctgcaatcactttaaacgatggttcagaagttcctgagggaataatggatgctttcataacctcagcagcttgtattcatgatttaaaaagaaaaggtaattcgagagaaggatcaatttatattgttaaaccaaaaatgcatggtccagaagaaacagaatttactaatttaatttttactaaagttgaagaagttttaaaattagaaaaaaatacaattaagtgtggaattatggatgaagaaagaagaacatctgcaaaccttaaagaatgtattagaacacttaaagatagagtattttttataaacactggatttttagatagaactggtgatgagatgcacacctcaatggaagctgga

SEQ ID NO: 237968 - DNA, 1310 bp, Unknown
  Bacterial polypeptide expressing nucleotide sequence isolated from the Sargasso Sea
tatgattcaaaaaaaaaatattaaggttaatgaaaaactatacaattttatcaataatgaagttctaaaagacatcagtattgaagaaaataaattctggaatggtttttcagatattgttgatatttattatccaaaaaatatataccttttggaaaaacgaaaaagcttacaaaataaaatcaacaaatggcataaagaaaataagtctaaaaatattgaacttgaagaatacaagaaatttttaaaagatatagattatatagttgaagaagggccaaactttaaaattacaacttctaatattgatgaggaaatctcaacaatttgtggtccacaactagtggtaccaatcacaaatgaaagatttgctataaatgcagttaatgcaagatgggggagtttatatgatgctctttacggaactgatgcgataggagaagctcctaaaggaggagcctatgataaagaaagaggagataaagttgtaaaatttgcaaaatcacatttagataaatttgctccacttaaagaaagcaagtggattgaggttaataacattcaaataaaagacaatagtgtaatatttaacacattaacaaacgacaatgttgagcttgtacatgctgaacaacttttgggttggagaatatcaaaagatgctgaattaagtgaattaattttatcaaaaaataatcttcgctgcagaatcataattaataaaaatgatattattggtaaaaatgatattgcaaatatatcagatatattaatggagtctgctgtatctactatccttgattgtgaagatagtgttgcaacggttgatgcagacgataaaattttagcatacagaaactggttaggacttattaaaggaaatttagaaagtaattttttaaaaaataataaaaatattaaaagggtgttgaacaaagattttcatttcactggatttgatcaaaaagaaaaaactttaaaaggccgctctctaatgcttattagaaatgtaggtcatttaatgacaacacctgcaattttaaacaaagataacaaagaaattggtgaaggcataatggatgctattataacaacacttattgcgacttatgatttcataaaaaaagaaaacaaaaattctaattacaactcaatttatatagttaaaccaaaaatgcatgggcctgaagaagttaaatttactaatgagcttttctctcaaattgaacaattattatatttgccaaaaagcacaatcaaaatagggattatggatgaggaaagaagaacaagtataaacttaaaagaat

SEQ ID NO: 237969 - DNA, 1153 bp, Unknown
  Bacterial polypeptide expressing nucleotide sequence isolated from the Sargasso Sea
attggttcgaaatgttggtcatttgatgacaaatcctgctattaaggatgaaaatggtaatgaagttcctgaaggtattatggatgggttttttactatttgcgcttcaatacatgatcttattggtaatggcttatataagaattctaaaactaaaagtatttatatagtaaaacctaaaatgcatggaccagaagaagtacaatttacatgtgatttattttcagcaattgaagatatatttgatcttcctcaaaatacagtaaagctaggaattatggatgaagagcgaagaactaccgttaatctaaaagaatgtatcgaagttgccaaacatagagtaatttttattaatacaggctttcttgatagaactggtgatgaaatacatacaagtatggaggctggtccaatggttacaaagggttcgatgaaagaacaaaaatggattaatgcttatgagaattggaatgttgatattggactagaaactggttttaaagaaaacgctcaaataggaaaagggatgtgggcaatgcctgacgagatgttagaaatgtataagtcaaaaacaatacaccctaaatctggtgcaaattgtgcatgggtgccatcaccaactgctgcaacgattcatgcaattcattatcatcagatttctgtgcaagatgaacaagataaaattatgaaaagggaaaaagctaaattagaagatattttgtctatacccttgataagctctgataatgtcccaagtccccaagagatacaaaaagaattagataacaatgctcaaggcatcctcggatatgttgttaggtgggtagatcaaggagtaggctgttcaaaagttcctgatattaatgatgttggtttaatggaagatagagcaacttgcaggatttcaagccagcatatttctaattggttatatcatgatctttgttcagaagagcaagtcatagatactatgaaaaagatggctagaattgtagatttacaaaataaggatgataccaactataggccaatggccccatcgtttgatggaatagcttttaaagctgcatgtgatttagctataaagggaaaagatcagcctagcggatacacagaaccaattcttcacgagatgaggttaaaaagaaagtaa

SEQ ID NO: 237970 - DNA, 589 bp, Unknown
  Bacterial polypeptide expressing nucleotide sequence isolated from the Sargasso Sea
aaaatttcccatctagaagctggggcaaattgtgcttgggtaccttcgcctacagcagctgcacttcatgctctccattaccatcaaataaatatatttgataagcacaaagaattagaaaatagagagaaggcaaaattagatgatttattaaaaattccagtaataaataggcctaattggtctattgaagaaataaataaagaaatttctaattccgcacaaacaatcttaggttatgttgttagatggatagatcaaggcataggatgctcaaaagttccggacattaatgatgttggattgatggaagatagagcaacattgagaatttcatctcagcatatagcaaattggcttcaccatggagtatgtagtagaaaacaagttttagaaattatgaaaaaaatgtcaaaagttgtcgataaacaaaatagaaacgataaactttatcaaaaaatgtcacctcaatatgataaatctatagcatttaaaacagcttgtgaactagtttttcaaggaaagaatcaaccctctggttatactgaaccattgctacatttaaatcgtttaattaaaaaaaattaat

SEQ ID NO: 237971 - DNA, 985 bp, Unknown
  Bacterial polypeptide expressing nucleotide sequence isolated from the Sargasso Sea
atgtcaaaaagaattacacatggtagtctgaaggtatcacaagaacttgataattttttaacagacgaacttcttccaggtttggatattaaccccgatgctttttggggatcttttgagcgagttcttgatgagtttggtcctcgcaataaggaactcttagcaaaaaggactgagattcaaaaaacaatcgataattggcacatttcaaaaaaaggctctccacataatcatgatgaatatgtaaatttcctaaaagaaataggttatttattggaagaaggagatgattttgaaataactactcaaaatgtagatgaagaaatctcgctcgttgcaggcgctcaattagttgtacctattatgaatgcaaggttttctttaaatgctactaatgcaagatggggtagtctctatgatgctctttatggaacagatatgatttcggaagaggaaggcgctgaaaaatctggaccttataatcctattagaggaaataaagtcatagaattttcaaaaaatttcttagatgagtctgtaccattatcttcaggaaaatacgctgatgtaacaggctttaagataaataagggaagtcttgagataagtaccagcgatcaatcttttactgaattaaaggatgaatctcagtttataggttttacaggagactctgataatcctagtagtattttatttaaaaacaataacttacacatagaaattgaaatcgactctgaagactctataggcaaagatgatcctgcaaacataaaggatatttgtgttgaatcggctgtaactgccatacaagatcttgaagattctgttgcggctgtagatgcggaagataaatccttaggttatcggaactggttaggtttaatgaaaggagatctcaaagaaacattttttaagggcggagaagagatgacaaggactctgaatgaggatagaaattatcagacaaaaatgtcaagaaata

SEQ ID NO: 237972 - DNA, 1632 bp, Unknown
  Bacterial polypeptide expressing nucleotide sequence isolated from the Sargasso Sea
aatgcaagaatatataaagtttcatgatcacaatatagataaatctttacatgattttatttgtaaagaacttaaaagtgaaaaaattaaattagataaaatcttttggaaaaatttaagcaatataatttcagaattagaaaataggagaataaatttaattgaaaaaagagcattcttgcaaaacaaaatcacaaattggcataaaaagaacaaaggtaagttttttaataaaaatgattataaaaaatttctatttgagataggctacatagttgaagaaaaaaaagattttaaaattaatactagtaatattgatccagaaatctcatccatccctagcccacaattagtagttccactatctaatacaagatacgcaattaatgctgcaaatagtaggtggggtagtttatatgatgcaatatatggaactgatataattccaaataaaaacaaatttaaaattactaaaaattataatgaaagccgaggaagagaagtaataaagcttgcgaaagctcacctaaatactttctttccaatagatagttgttcttatgaagaagtaacaaaaattcaaattattaataatgaattaattttcagtgacaaaaactctaatttaaagaaattgctaaatcctagtcagttttatggttatattggatttgagttaaaccctgacgaaattattcttgaaaaaaatagtcttcgtgttcgtcttcaactagataaaaagcatccgataggtaaaattgatagctttcatcttaaagatatagttatagagacggcgctatcagtaattatggactgtgaagattctattgtctctgtagacaccaatgataaaattgcaacttttagaaattggataaggctattaaatggcactattcaaactgaggttaaaaagaataatgtttcttttataaggaaactgtctaaagatataagttacaaaaagcctaatggggaagctgataatatgaaaggtttatcacttcttttaattagaaatgttggccatctgatgacttcttcttcaataatagatcaaaataaaaatgaaattggcgagggaataattgataccttacttactgcattatgttttttaaaaactattgataattctgaaaactctaaatttaaatcgctttacattgtaaaaccaaaaatgcacggccctgaggaagtaaagttttctgttgatacgttttcaataattgaaaaacttctaaaacttccagaaaatacaattaaaatcggaataatggatgaggaaagaagaacaacacttaacttaaaagaatgtattagagccgcaaaaaatagagttttctttatcaatacaggctttcttgatagaactggagatgaaattcatacctctatggatgcaggtacaatgataaaaaaaactgaaatgaaaaatgtaaattggatacaagcatatgaaaggtggaatgttgaaattggtttaaaatgtggtttttcaggattggctcaaattggaaaaggcatgtgggcgatgcctgatatgatgtcaaaaatgatggaagagaaaatttcccattgtcaatctggtgcaaatactgcttgggttccttcgcctacagcggccac

SEQ ID NO: 237973 - DNA, 622 bp, Unknown
  Bacterial polypeptide expressing nucleotide sequence isolated from the Sargasso Sea
gatggcagatatgatgaaacaaaaaattgaccatcttaaagcaggtgcaaattgtgcttggacaccaagcccaacggcggcaacattacatgctcttcattaccatgatgtaaatgtatttgaagttcaagataaattaaaaaatagagagaataataatttagaaaatcttttaaaaatacctgttgctgataggcccaattggtcagtggaagaaattgttaaagagttagagaataattcgcaaggaatacttggatatgtagttagatggattgatcaaggagttggatgttcaaaggttcctgacataaataatgttggccttatggaagatagagccactttaagaatttcatctcaacatattgctaactggctaaaatataatatttgtacaaaaatacaggttatcgatataatgaaaaaaatggctaaaatagtagatgatcaaaataaaaatgataaaagctatattagaatgtcagatgattttgaaaattctgtagcatttaacacagcttgtgatttagtgtttaaaggagctgaacaacaatctggttatactgaaccacttttacacataaatagaattcataaaaaaagtttaaataaaaactga

SEQ ID NO: 237974 - DNA, 670 bp, Unknown
  Bacterial polypeptide expressing nucleotide sequence isolated from the Sargasso Sea
atgtggattgtcaggaaaagcacaaataggaaaaggaatgtgggcgatgccagatcaaatgagcaatatgatgtctcaaaaaataaatcatcctaaatcgggtgctaattgtgcttgggtgccctcaccaacagcagcgacgttacactcaatgcattaccacaaagttgatgtctttaaaattcagtcaaaaattaaagatagatctcaagcaaatattgctgatattttaacaattcctctggctgatagacccaattggtcaaaagacgatattaataaagagctagaaaacaatgcacaaggaattttgggttacgtagtgcgatggattgatcaaggtgttggttgttccaaagttcctgatataaataatatagggcttatggaagatagggccactcttagaatctcatcacaacatatggctaattggttacatcacgacatttgcacgaaagaccaagttatggatgttatgaaaaaaatggctaaaattgttgaccaacaaaataaagctgacaaaaactataaaccgatgtcaccagattttgataattctatagctttctcagcagcatgtagcttagtatttgatggcaaagatcaaccttcaggctatacggagccccttcttcataaaaaaaggttagaaaacaaatctatttag

SEQ ID NO: 237975 - DNA, 577 bp, Unknown
  Bacterial polypeptide expressing nucleotide sequence isolated from the Sargasso Sea
gctggcgctaattgcgcttgggttccgtcaccaacagctgccaccttacacgcgacccattatcacaaaattgatgttcaacaccgacaagatgaaatacggtcacttgctatgcaaagttctctagacgacttattgcaaatacctctacagacgggtgaaaaactgacagaaagcgaaattcagagcgaaattgaaaacaattgccaaggaatcttgggatatgttgttcgttgggttgatcaagggattgggtgttctaaagttcctgatatccacaatgtgcagctaatggaagaccgggcaacctgtagaatatcttctcagagtttgagtaattggctttgccataattttgtggatcatgatttggtggttaatacgcttaaaaaaatggcagctattgtggactcacaaaatgccgatgatatgaattatagacccatgtcgcctacatttgataacgaagctttcctagctgcttatgatttaatatttagcggcgagagccaaccttctggttatacagagccaatcctgcatagatggcgtttggaacttaaacgcaaattgtgat

SEQ ID NO: 237976 - DNA, 1573 bp, Unknown
  Bacterial polypeptide expressing nucleotide sequence isolated from the Sargasso Sea
tctgcgcatccagggcgagacgcatcccgattacgcgcaaattctgacgccggatgcggtggccctggtatccgaactggtggaacgctttgctccccaacgggacgaattgttgaaacaacgtgttgcgcgccaggcccgcatcgacggcggtgagctgcccgattttctgcctgaaaccgcccacatccgcgccggagactggacggtgcgcggtattcctgccgacctgcaagatcgccgtgtggagatcaccggcccggtcgagcgcaagatggtgatcaacgccctcaacgccaacgtcaaggtgttcatggcggacttcgaggattcgctggcaccggcctggaacaaggtgatcgagggtcagatcaacctgcgcgatgcggtcaacggcaccgtctcctacaccagcccggaagggaaggcttataccctgaacgccgatccggccgtactcatctgccgggtgcgcggtctgcatctgccggaaaaacatgtcaccttcgatggagcccccattcccggcggcctgttcgacttcgctctctacttcctgcacaactatcaggcgctgctggccaagggttccggcccctacttctacgtacccaagctgcagagccatctggaagggcgctggtggagcgaggtattcgcctggaccgaggacaagttcggcctgccccgcggcaccatcaaggccaccgtgctgatcgaaaccctgccggcggtgttcgagatggatgagctgctctatcagatgaaggatcacatcgtcgccctcaactgcggtcgctgggattacatctttagctacatcaagaccttgaagaaccaccctgatcgcgtcctgccggaccgccaggtggtgaccatggacaaacccttcctctccgcctattcgcggctgctgatcaagacctgccacaagcgcggcgcgctggcgatgggtggcatggcggcctttatcccggcgaaagatccagccgtgaatgaacaggtatttgccaaggtgaaggcggataaagagcgtgaagccaacaacggccacgacggcacctgggtggcccaccccggcctcgccgataccgccatggcggtgttcaacgccgccatcccggctggcgccagcaaccagatcggcgtgctgcgcgagcaggatgcccccatcacggccgccgagctgctggccccctgtgagggcgaacgcaccgatgcgggcatgcgcaccaacatccgggtggcgctgcaatatctggaagcctggatcaacggcaatggctgtgtgcccatctacggtctgatggaagacgccgccaccgccgagatctcccgcacctccatctggcagtggatccgccacggcaagagcctgtcgaatggcaaggtggtgaccaaagatctgttccgccagatgctggccgaggagcaggaggtggtcaaagccgaagtgggggcagagcgttggcaggctggtcgcttcgccgaggcgagcgagctgatggaacagatcacctgcgccgatactctgatcgattttctgacgctgcccggttacgagcggctctga

SEQ ID NO: 237977 - DNA, 1160 bp, Unknown
  Bacterial polypeptide expressing nucleotide sequence isolated from the Sargasso Sea
tatttcaccgaaaggcggtaaattttatcttccaggaagaagtttaatgcttgtaagaaatgttggccacttaatgacgaacccagcagttatcgataagaaaggagaggaagtaccagaggggattctcgatgcactatttaccatttgtattgccaaacatgatttattaaataatggtaaatttaacaattcccctaaaggaagtatttatattgtaaaacctaaaatgcatggtcctgaagaagttaaattttcgtgtgatctttttgaagcaattgaaaaggcattggacataaaaccaaataccgtaaagattgggattatggatgaagaaagacgtacaacagtaaatttaaaagaatgtatcaaagttgcaaaaaatagagttatttttataaacactggcttcttagacagaactggtgatgagatacatactagtatggaagcaggacctatggtaagaaaagatgatatgaaaaaagaaccatggattaaagcttatgaaaactggaacgttgatattggtctggaatcaggttttaaaggtaatgctcaaattgggaaagggatgtggcctatgccagatgaaatgttgcaaatgtatgagacaaaaacaatgcatccaaaagctggtgcaaactgtgcgtgggtgccatcaccaacagctgcctcaattcatgcaatgcattatcatcaaatatttgtagagaaagaacaaaataaaattttatctagagacagagctgaaattgatgatattttaaacattccaattatacgagacttcaacttatctaaagatgatattaatgatgaaattgaaaataactgtcagggtatattaggatatgttgtaagatggattgatcaaggcattggttgttctaaagttccagatattaataatataggtttaatggaagatagagcaacctgcagaatttctagtcaacacattgctaactggcttcatcatggtatttgtaataagaaagacgttattaaagcgatgaagaagatggcgcttgtagttgatgaacaaaattcaaatgatccatcttataccccaatgtcgccatcttttgatggaatagcatttccagctgcatgtgatttagctattaaaggcagatcaccacctagtgggtatactg

SEQ ID NO: 237978 - DNA, 1078 bp, Unknown
  Bacterial polypeptide expressing nucleotide sequence isolated from the Sargasso Sea
atgtcagatagaattacacatggtagtctgaaggtatcacaagaacttgataattttctaacagacgaacttcttccaggcttggatattagcccagatgctttttgggaatcttttgaacgagttcttgatgagtttggtcctcgcaatgcggaactcttagcaaaaagaactgagattcaaaaaacaatcgataattggcatatttcaaaaaaaggctctccacataatcatgatgaatatgtaaatttcctaaaagaaataggatatttattggaagaaggagatgattttgaaataaccactcaaaatgtagatgaagaaatcgcactcgttgcaggtgctcaattagtcgtacctattatgaacgcaaggttttctttaaatgctactaatgcgagatggggtagtctctatgatgctctttacggaacagatatgatttcagaagaggagggtgctgaaaaatcaggaccttataatcctgttagaggaaataaagtcatagaattttcaaaaaatttcttagatgagtctgtaccattatcttcaggaaaatacgctgatgtaacaggctttaagataaacaagggaagtcttgagataagtaccagcgatcagtcttctactgaattaaaggatgaatctcagtttataggttttacgggagaatccgataaccctagtagtatattgttaaaaaacaataacttacatatagaaattgaaattgatcctgaagactcaataggcaaagatgatccagcaaatattaaagatgtttgtattgaatcggctgtaactgccatacaagatcttgaagattctgttgcggctgtagatgcagaagataaatctttaggttatcgcaactggttaggtttaatgaaaggagatctcaaagaaacattttttaagggcggagaagagatgacaaggactttgaatgaggatagaaattattcagacaaaaatggtcaagaaattactcttcccggaagaagtgttcttttggtgagaaatgtcggtcatttaatgacaaatcctgcaatcctcgatggaaacaataatgaggtcc

SEQ ID NO: 237979 - DNA, 677 bp, Unknown
  Bacterial polypeptide expressing nucleotide sequence isolated from the Sargasso Sea
atgtggtttttctgcaaaagcacaaattggtaaaggtatgtgggccgcacctgatgaaatgaaaaaaatgctagaagaaaaaattgggcatctcaaagctggcgctaattgtgcttgggttccatcacctacggctgcttcattacatgctctacattatcatgagattaacgtttttgatgttcaaaaaaaacttacctctagatcgccatcaaaattagaagatcttttaacgattccagtagctgatagacccaattggtcagttgatgagatcaattccgaaatatcaaattctgctcaaactcttctaggatatgttgtaagatggattgatcaaggtgtcggttgctcaaaagtacccgatattaataatattggattaatggaagatagagcgacattaagaatctcatctcagcatattgcgaattggttacatcatggaataactacaaaaattcaagtcaaagaaataatgaaagaaatggcaaaagtggttgataaacaaaacgaaggtgacaaaaaatatgtaaaaatgagtgacaattttgaaaattccatcgcctttaaagctgcttgtgatttaatttttaaaggtaaagagcaaccatctggatatactgaaccacttcttcacttaaatagattggaaaaaaaaattagtcagaattaga

SEQ ID NO: 237980 - DNA, 2131 bp, Unknown
  Bacterial polypeptide expressing nucleotide sequence isolated from the Sargasso Sea
atggattcttatataaacataggtaaataccaagtagcacaaggctaccattctttgatgactgacaaagtgttaagtcgaatcggggtgcccagcaatcaattttgggaggatgtgtcgacgcttttagatgaactgattcctgtgaatgaaaaattgctagaaaaacgagaacaattacaaagcaggatcgatgcttggcatctaaaaaatccagcaccttttgcatttgaagattacaaacagatgcttctggatattgggtatttaatccccgaaaatgaagatttccaaatttccacatccgaagtagacccagaaattagtactattgcagggcctcaattggtagtccccatcactaatcctagatacgcattaaatgcagctaatgctagatggggaagtctgtacgacgcattatacggtactgacatcatacctgagagccccggtttggagaaaggaagcaaatacaatcctaatagggggttagaggtgataaaccgcgccaaatctattatggatgcgtctgttcctttggctaaagggaaatatatggatgtggtgaaatttatcatcaaagacgagcaatttacttgtctgctttcagacgattcagtagtcagcttagaagatacagagagttttgccggctggactggtgatttaaactccccgaagtctatcgtgttgaagcgacatgggttgcatatagaattaatgtttgaccgcgacagcgtggtggggaaacaagatcctactggattgtctgatatcttgttagaatccgctgtcactacaatcatcgatcttgaagattctgttgccacagtagattcagaagataaagtcgccgcttatagtaactggcttggtctaatggatggttcattgtcctcgtcgtttaagaaagatggtgtggttgttgacagaacactgaatcctgacaaagtcattacacgtccaaatggagaggagggccaactccggggtcgatcattgttgctaatccgtaacgtgggccacttgatgaccactaatcttatgaagactcgtgaagggaaagaagttccagaaggaattatcgatgccataacaacggttgctattggaatggttgacgtcactggggatcgaatgaattcacctgcaggttccatatacatcgttaaaccgaaaatgcacggcccagaggaagtgaaatttgccaacgacacattgtccaaaattgaacacatgcttggattacccgctaacaccgtgaaaatgggcatcatggacgaggaacgcaggactacagtaaacctgaaagaatgtatacgtgcggctcgaactcgagtagctttcataaatacaggattcttagataggactggagatgaaattcacacatctatggaagctggtcctatggtgcgaaaaggagacatgcggcaagctggttggatctcatcatatgaagactggaatgttgacataggaatagaatgcggtctggtaggcaaagctcaaatcggtaagggtatgtgggccatgcctgatctaatgaatgctatgctagaacaaaagaaaggccatccaagagcgggagccaacactgcatgggtgccttcccctacggcagcgacgatccatgcattgcattatcatgaaattgacgtagcagctacccagaagaaattatctttaagagagcgaagtagtgttgacagtattttgaatataccaattgaacttaatccctcttggtctgaggatgagattacagctgagttagagaataatgcccaagggatcttgggttatgttgttcgttgggtagatcaggggataggatgctcgaaagttcctgatataaatgacgttggattaatggaagatcgagctacgctgaggatttctagccaacacatagcgaactggctacatcacggtatatgcactgaagaacaggtcaataatgtgtttgagcatatggctggagttgtcgacaggcagaactcgtctgactcagagtacaagttgatgtcaggtaacacagagacaaatattgcttatcaagcggcgaaagctttggtgttcgatgggttaacgcagccttctggttacactgaaccgattcttcaca

SEQ ID NO: 237981 - DNA, 457 bp, Unknown
  Bacterial polypeptide expressing nucleotide sequence isolated from the Sargasso Sea
cttaccattccattgttagaagatgcctctacattgacgcgtgagagtattaagcgtgaaatcgacaataacgttcagggcattttaggctacgttgtacgctgggttcaccaaggcgtaggctgctcgaaagttcctgacatcaacaatgtaggcttgatggaagaccgcgcgacgttgcgaatttcatcgcagcatatcgctaactggctagagcacggcattgtaagtgtagatcaggtaaaagagtctttggctcgtatggctgtcttagtagataagcaaaatgcgggggatcctgagtatatccctatggcacctgatttaaacagctcaattggtttcttagccgcaagcgatctaatcttcaaaggtaaagagcagcctagcggttacacagaacctttactgcacgcccgtcgccgcgaaatgaaggcaaaacttgctgcgagctagc

SEQ ID NO: 237982 - DNA, 1087 bp, Unknown
  Bacterial polypeptide expressing nucleotide sequence isolated from the Sargasso Sea
tatgaaatttattagtaaaaatgatttaaaaattaatcagactttgtttgattttataaacaaagaggtacttcctggaacagaagtaaatcaagatagtttttggataaaattttcaaaagtagtccatgaactctctccgataaatagaaagcttattgaaaaaagagaaaaaattcaaaaacaaatagatgagtggcatttaaacaatcctaaagaaaaatttaataaagataattatattcaatttcttaaatcaatttcttacttagtagaagaaggtgatgattttaaaattaacacttcaaatgtggatgatgaaattgcaagaattgctggtccgcaattagtggttccagtagataatgctagatacgcattaaatgcggctaatgctcgttgggggagtttatatgactctttatatgggactgacgtaatacctggagaaaaaggaagcacttttaataaagaacgagccaacaaagtaataacatatacgagaaactttcttgatgaaatctttacattaaataaaggtagttggaaaagtgtagaaaaaattcaaatagaaaataaaaagttaattttaaatataaatggagagaagagtaatctaaaaaatgaaaatcaatttgtaggttttaatggtgataagtcatctccgacttcaatattattaaaaaataataaccttcattttgatataattatagatgctaatagcccaataggaaaaaatgataaggcaaatatatctgacttaattttagagtctgctatatcaacaattatagataacgaagactcagttgcggcggttgatggggaagataaagtaaattgttatagaaactggttgggtcttatgaagggagacttaactgcaaatatggaaaaaaatggaaaaaaatttgtaagaaaattaaatccaaatagaacttacttttcaaaagaaggtgaaaaaatatccttgcatggcagagccctacttctaaatcgtaatgtaggacatttgatgactaatcccgcgattactcttaaagatggttctgaaattcctgaagggattatggatgcttttgta

SEQ ID NO: 237983 - DNA, 1219 bp, Unknown
  Bacterial polypeptide expressing nucleotide sequence isolated from the Sargasso Sea
gatagtgtatccgaaagatatgaccctttaagaggtgaaatggttataaaatatggaagagattttttagataagtatttttcattagcaggattaagttggaataaaattacaagttttgctgtaaaatttggcaaattaaaagttttaaaaggtgctgatatttttgatttggaggacgaaaataaatttgttggacatagaggcgaaagtgataatccatctgcaattattctaaaaaataacaatttacatattgaaatcctaaaagactcaagagcttttgctgctcaacaagatcatgctggaattagcgacataatactagaatctgcagtgtcaacaatttgtgataatgaagatagtgtggcagcagttgactcggaagataaaattatttgttatcgaaattggctaggtctgatgaaaggagaccttaagtcaaaatttgaaaaagaagggaaattatttgagagaaaattaaatcctcacagaagttatatctcaaaagatggtaaaggtttaaagttacatggtaggagccttttgcttgtaagaaatgttggtcatcttatgacaaacccttcaattttattgagtgatggaagtgaagtacctgagggtattatggatgcatttataactacagcagctgcgctacatgatattaaaaataaaaataattcaagaactggatcagtttatattgtaaaacctaaaatgcatggtccagatgagacggcatttacagatttaattttttctaaagttgaggaagttctaaatttacctaagtacacttgtaagattggtattatggatgaagagagaagaacatcagcaaatttaaaagaatgtattagaagtcttaaaaatagagttttttttattaatactggattcctagatcgaactggtgatgaaatgcatacatcaatggaagccggtcctatgattaaaaaaggtgatatgaaatcgtctaaatggattaatgcatacgaaaataacaatgttgatatcggtttaagttgtgggttttctggtaaagctcaaattggaaaaggaatgtgggcaatgcccgacaaaatgaaagatatgatggagcaaaaaacagtacacttaaaagcaggagcaaactgtgcatgggttccttctccaacagcagctgcgttacacgctttacattatcatgaaataaatatttttaatgaacaaaaaa

SEQ ID NO: 237984 - DNA, 431 bp, Unknown
  Bacterial polypeptide expressing nucleotide sequence isolated from the Sargasso Sea
agctgacaggcctaattggtcgattgaagatatcaatcgtgaattagaaaataatgctcaaggtatactaggttatgtagtgcgttgggttgatcaaggagttgggtgttctaaagttccagatattaataatattggcttaatggaagatagagctactttaagaatatcatctcaacatattgctaactggctgcatcatggaatttgtaaaaaagagcaggtaatggaaattatgaaaaaaatggcaaaaactgttgatgaacaaaacaaaaatgaccccaattataaaaaaatgacgggtaattatgaaaattctatagcattctctgctgcgtgtgatcttgtatttaaaggaagaactcagccgtctgggtatacagagccactgttacaccaaaaaagattagaaacaaaaagttctatttaac

SEQ ID NO: 237985 - DNA, 991 bp, Unknown
  Bacterial polypeptide expressing nucleotide sequence isolated from the Sargasso Sea
tctttcaaaaaaaggcacaggaccttatttttatcttccgaagcttgaaaatcatcttgaggcgagactctggaacgatgttttcgtgcatgctcagaattttttaaatattgatcgtggcacaatcaaggccacagttttgattgaaacaataactgctgcctttgaaatggatgagattatcttcgagctaaaagaacattcggccgggcttaattgtggtcgatgggattatatatttagctttataaagaaatttagaaatcatcggaattttctactaccaaacagaaccgaggtaacaatggagcggcattttctaaaaagctatgtcgacttgcttattcgcacttgccataaaagaaatgtacatgcgatgggtggaatggcagctcagattccaatcagaggcgacgaagaacaaaatcaaattgccatgaataaagtttctttggataagttaagagaggcaaatgctggtcacgacggcacatggattgctcatcctgggttatctcaggttgcaatgaatgcgtttaatcaagccatgggatcatctcccaatcagattcccaataagagaaatgatgttttagtgaatgctcaagatcttatcaaggtaccagacggaaatataacagaggatggtttgagacagaacatatcaataggaattcagtacattgaggcatggctctcgggcaatggttgtgttccaattcataatctgatggaggacgctgctacagcagaaatatcgcgttcacaaatctggcaatggattcatcatcgcgcaaaaaccacagattcaaataagactataaccgaagagtatttcatcaagacgctcgaggatgaaatggatcaactgaagacagcaagaggttctgaaggcgattaccttcaaccggcaattaatttattcaaggagatgtctacggattcagaattcgatgaattcttgacattgccagcatataaacacctctaa

SEQ ID NO: 237986 - DNA, 1356 bp, Unknown
  Bacterial polypeptide expressing nucleotide sequence isolated from the Sargasso Sea
gatgaaatttctttcaaaattatttaattccagtaaacattcgtcaaaagatattagtttaaaaatttcttcaagtttacaagactttgttagagacgaaattttaccaggcttggatatatctcctgattattattggagctcatttgaaaatttactaaataaattttcagatagaaataaagatttacttaataaaagaaaggaattacaagatcagataagtgaatggcatattaaaaacaggaattcggaatttaatttagaggagtataagaagtttttaaatgatattggatatcttcatcaaagaagtggtgatttcactattaaaacatttaatgtagatccagaaattagaaaaattgcaggtcctcagctcgttgtccctgtaatgaatgcaagatttgcattaaatgctgcaaatgcgcggtggggaagtttatatgatgctttgtatggtacaaatattattaatgaggaagatggagcaaaaagagaggggggttataacccaataagaggtgagaaggttattgctttcgcgaaaaaatttctagatgaaacaatcccaatggaagaaggcacatataacgatgctattaaatttgaatttatagacagtgaattacttataactttaaaagatggtttatgtgtgagtttaaaagataaagatcagtatgtaggctataaggacaagggagaaggggcatatggccttttatttaaaaataataatctccattttgaaatacaaattgatagatcaagtccaattggtcaagaggatttagcaggcataaaagatattttaatggagtctgcaataacaacaatacaagattgtgaagattcagtagctgcagtagatgcagaagataagattatcgtttatagaaattggttgggtctgatgaaaagcaatttaaagagatcatttgataagggcggtaaatttatcactagagaattaaatcctgatagaaaatatttactaaagaatggaaagatgatacttcttcctggaagaagtctaatgttagttaggaatgttggccacttaatgactaacccagctattaaagataacaaaggaaatgaagttccagaaggaataatggatgcattttttacaatatgtatatcaatacatgacattattggcaatggcatatacaaaaattctaagacaaagagcatatatattgtaaaaccaaaaatgcatggtccagatgaagttcaatttacttgcgatcttttttctgaaatagaaaagatattcaacctacctgaaaatactgtcaaattgggtattatggatgaagagagaagaacaactgtaaatctcaaaga

SEQ ID NO: 237987 - DNA, 1021 bp, Unknown
  Bacterial polypeptide expressing nucleotide sequence isolated from the Sargasso Sea
ttatataagaattctaaaactaaaagtatttatatagtaaaacctaagatgcatggaccagaagaagtgcaatttacatgtgatttattttcagcaattgaagatatatttgatcttccacaaaatactgtaaagcttggaattatggatgaagagcgaagaactaccgttaatctaaaagaatgtatcaaagttgccaaacatagagtaatttttattaatacaggttttcttgatagaactggcgatgaaatacatacaagcatggaggctgggccaatggtcacaaaaggttcaatgaaagaacaaaaatggattaatgcttatgagaattggaatgttgatattgggctagaaactggttttaaaggaaatgcccaaataggaaaggggatgtgggcaatgcctgatgaaatgttagaaatgtataagttaaaaacaatacatcctaaatctggtgcaaattgtgcgtgggtgccatcaccaactgctgcaacgattcatgcaattcattatcatcagatttctgttcaagatgaacaagataaaattatgaaaagggaaaaagctaaattagacgatattctgtctatacctttgataagctctgataatgttccaagtccccaagagatacaaaaagaattagataacaatgcacaaggtatccttggatatgttgttaggtgggtagatcaaggagtgggttgttcgaaagttcctgatattaatgatgttggcttaatggaagatagagcaacttgcaggatttcaagtcagcatatttctaattggttatatcatgacctttgttcagaagagcaagtaatagaaactatgaaaaagatggctagaattgtagatatacaaaataaggatgatactaattataagccaatggcaccatcatttgatggaatagcttttaaggctgcatgtgacttagctataaaaggaaaagatcagcccagtggatacaccgaaccaattcttcatgagatgagattaaaaagaaaataaa

SEQ ID NO: 237988 - DNA, 907 bp, Unknown
  Bacterial polypeptide expressing nucleotide sequence isolated from the Sargasso Sea
atgagagagcaatttatcaaaatccataacttatctgtagcgaaagaactggctgatttcatcaaaaatgagcttttgttggataccaatgttagtcctgatgaattttggaaaggctttgataaagtggtgcatgaattagcacctaaaaataaaaaattactcgaaatcagagaaacattacaacaagaaatagatctgtggcataaaaaaaatagagatcacgagattgactataataaatataaaaattttttagaagaaataggttatttaaaaaaagaaggtgaagattttaaaatagcgactaaaaatttagatgaagaaatatccaatatagcagggccacaattagttgttccaataatgaactccagatatagcttgaatgctgcgaatgcaagatgggtaagcttatatgacagtctttatggatcaaacataatagagtctgaagaaagtggaagtgaaaaatatgaccctttaagaggacaagaagtgattaaatatactagaaactttttgaacgaatattttccaataaatggtcttgactggaaagatattactggtctagtagtaaataataaaaaactttcaatttataaggaaaataaagaatataatttatcagatttagaaaagtttattggtcacaggggtgatacagccaaaccaaatgctataatcttaaaaaataataatcttcatcttgaaataattattaatcctagagcatttagtgctgcaagagatgcggctggtataagcgatattataattgagtctgccgtttcaacaatttgtgaccatgaagatagtgtggccgcagtcgatgctgaagataaagtaacttgttatagaaattggctaggattgatgaaaggaaatttaaaatcaatatttg

SEQ ID NO: 237989 - DNA, 1528 bp, Unknown
  Bacterial polypeptide expressing nucleotide sequence isolated from the Sargasso Sea
ccagccacatgcattcatgaggcctataaaaattatttaaaggagatcggttatctggttgatgagggtgagagttttttaattgaaacagaaaatgttgatccggaaatttccagcatagctggtccgcaactcgtagtaccatcgaccaatgctcgttacgctcttaatgcagcgaacgcgagatggggaagtttatacgacagtttatatggtactgacgcaatgggggcatttgaccaggctgagggttatgatcggggcaggggcgctcgtgttgttgcccgtgcaagagtatttttggataatgcatttccaatcattggtgctagtcatgcagatgttaagcgatattatgttagagataagcaacttttagtagatgaccttccattggtctcaccagaaaagtttattggctattcgggcaatccgaaggcgccaaattctgttcttttgaagaataacggtcttttcgtcgtgcttgtcttcgatcgagcacatgttgtcggcagtagggatcaggcaggtctggcagatgttcggatagagagcgctctatccgccataattgatttagaagattctgtagcatgtgttgatggtgaagataaggtaaatgcatactcaacatggttaggtctaatgaaaggagaccttacttctgagtttgagaaaaacggagaaaaagtcgttaggtgtctcaattctgacttgtcttttatttctccctctggtgatgattttagcattagggctagagcattactttggatcagaaatgttggtcatttaatgactacaccagctgtacttgattcaaatggtgacgagatattcgagggcttgctggatgctatggttaccacaatgctcggaatgcatgatttgaaaaaggctgatggcaattcaagacatggttcaatttacattgtaaaacccaagatgcatggccccgctgaagtggattttgccgataaaatattttccaaggtagagagttttttaggtatagagcaatattctgtaaaattgggaataatggatgaagaacgccgaacctctgttaacctaaaagagtgtatccgcgccgcaaaaagacgagtagccttcataaatactggatttctcgatcggactggagatgaaattcacactagcatggaagcaggcccatttagcaggaaagattttataaaacgaaagtcttggatagtaggatacgaaaatcaaaatgttgacattggtttagagtgtgggctttccggacgagcccaaattggaaaaggtatgtgggctatgccggatttaatgtctgctatgctggagcaaaaaatagagcatccaaaatcaggagcaaattgtgcctgggtaccatcccctactgctgccacattgcatgccttgcattatcaccaagtggatgtctttgcagttcaagaaattttaagaaaaaacggccgaagagcctatgttgatacacttcttgacattcccctggctgcttacagaaaatggtcgcacgagc

SEQ ID NO: 237990 - DNA, 1512 bp, Unknown
  Bacterial polypeptide expressing nucleotide sequence isolated from the Sargasso Sea
tatgcaagaaaaatacattaaaattaataatcttcaagtatctgaaaagctatcaaactttgtaaatgatgaattattaaaaaatacaaatgtatcttcagaaaatttttggtcaggtctagaaaaaacactcgatgaacttgcgccaaaaaataaagaattaattaaatttagggaagatttacagaagaaaatagatgattggcatatcaaaaataaaggtaaagagtttaatttagatgagtacaaaaaatttttattagaaattggttatttaaaaaatgaaggacctaattttaaaatagaaactgaaaatgttgatgaagaaattgcaagtatagctgggcctcagttagttgtgcctgtcatgaatgcaaggtatgcattaaatgccgcgaatgcaagatggatgagtttatatgatagtctttatggtacagatgtaattgaacaatctgaagatagcgtatctgaaagatatgatcctttaagaggtgaaatggttataaaatatggaagggattttttagataagtacttttcattagctggactaagctggaataaaattacaagctttgctgtaaaatatggaaaattaaaagttttgaaaggtgctgatatttttgatttggaggacgaaaataaatttgttgggcacagaggcgaaagtgataatccttctgcaattattttaaaaaataataatttacatattgaaattctaaaagactcaagagcttttgctgctcaacaagatcatgcaggtattagtgatattatactagaatcagcagtgtcaacaatttgtgataatgaagatagtgtagcagctgttgactcagaagataaaattatttgttatcgaaattggctaggcctaatgaaaggagaccttaagtcaaaatttgaaaaagaaggaaaattatttgagagaaaattaaatccacatagaagttatatctcaaaagatggtaaaggtttaaaattacatggaagaagtcttttgctagtaagaaatgttggtcatctgatgactaacccttcaattttattaagtgatggaagtgaaatacctgaaggaattatggatgcttttataactacagcagctgcgcttcatgatattaaaaataaaaataattcaagaactggatcagtttatattgtaaaacctaaaatgcatggtccagacgagacagcatttacagatttaattttttctaaagttgaggaagttctaaatttacctaagtacacatgtaagattgggattatggatgaagagcgaagaacatcagcaaatttaaaagaatgtattagaagtcttaaaaatagagttttttttatcaatactggtttcttagatagaactggtgatgaaatgcatacatcaatggaagctggtcctatgattaaaaaaggtgatatgaaatcatcgaaatggattaatgcatacgaaaataacaatgttgatattggtttaagttgtgggttttctggtaaagctca

SEQ ID NO: 237991 - DNA, 2176 bp, Unknown
  Bacterial polypeptide expressing nucleotide sequence isolated from the Sargasso Sea
tatgcaagaaaaatacattaaaattaataatcttcaagtatctgaaaagctatcaaacttcgtaaatgatgaattattaaaaaatacaaatgtatcttcagaaaatttttggttaggtctagaaaaaactcttgatgagttagcaccaaaaaataaacaattaattaaattaagggaagatttacagaagaaaatagatgattggcatatcaaaaataaaagtaaagaatttaatttagatgagtacaaaaaatttttattagaaattggttatttaaaaaatgaaggacctgattttaaaatagaaaccaaaaatgttgatgaagaaattgcaagcatagctgggcctcagttggttgtacctgtcatgaatgcaaggtatgcattaaatgcagcgaatgcaagatggatgagtttatatgatagtctttacggtactgatgtaattgaacagtctgaagacagtgtatctgaacggtatgaccctttgagaggcgaaatggttataaaatatggaagggattttttagataagtattttccattagctggattaggttggaataaaattacaagctttgctgtaaaatatgggaaattaaaagttttaaaaggtgctgatatttttgatttagaggatgaaaataaatttgttgggcaccgaggcgaaagcgataatccgtctgcaattattctaaagaataataatttgcatattgaaattctaaaagactcaagagcttttgctgctcaacaagatcatgcaggtataagtgatattatattagaatctgcagtgtcaacaatttgtgataatgaagatagtgtagcagccgttgactcagaagataaaattatttgttatcgaaattggctgggtctaatgaaaggagacctcaagtcaaaatttgaaaaagaaggaaaattatttgagagaaaattaaatccacacagaagctatatctcaaaagatgggaaaggtttaaagttacatggcagaagtcttttacttgtaagaaacgttggtcatctaatgactaacccttcaattttattgagtgatggaagtgaaatacctgagggtattatggatgcatttataactacagcagccgcgctgcatgatattaaaaataaaaataattcaagaactggatcagtttatattgtaaaacctaaaatgcatggtccagacgagactgcatttacagatttaattttttctaaagttgaggaagttctaaatttacctaagtacacttgtaagattggtattatggatgaagagagaagaacatcagcaaatttaaaagaatgtattagaagtcttaaaaatagagttttttttattaatactggattcttagatagaactggtgatgaaatgcatacatcaatggaagctggtcctatgattaaaaaaggtgatatgaaatcatctaaatggattactgcatacgaaaataacaatgttgatattggtttaagttgtgggttttctggtaaagctcaaattggaaaaggaatgtgggcaatgccagataaaatgaaagatatgatggagcaaaaaacaggacacttaaaagcaggtgcaaattgtgcgtgggttccatctccaacagcagctgcattacatgctttacattatcatgaaataaatatttttaacgaacaaaaaaaattaattgatagagaaccagctaagcttgatgatcttttaacaattccaatagcagatagacctaattggtctgtagaggatataaataaagaaatttctaattctgcacaaactttattagggtatgttgtaagatgggtcgatcaaggtgtaggttgttctaaagtgccagatattaacaacataggtttgatggaagacagggccactcttaggatttcatctcagcatatagcaaactggatacatcatggtattacaacaaaaatacaagtaactgaaataatgaaagagatggccaaaatagtagatgatcagaacaaagatgatccactatatgttaaaatgagtagtgattatgaaaactctatagcatttcaaactgcttgtgatttagtgtttaaaggtaaagaacaaccttcaggttatactgaaccattacttcatctaaatagattaaaaaaaaaatctaatctgagttcgaaaccaaattag

SEQ ID NO: 237992 - DNA, 1969 bp, Unknown
  Bacterial polypeptide expressing nucleotide sequence isolated from the Sargasso Sea
atgccaggatatattactagaggccgactacaggttgccgaacagctcgataactttattaatgaacaggcacttcctggcacaggcgtagataaagacaccttttggcaaggtgcagaaaccctcttcgaaaaattcattcctcaaaatcgcgcactattagaaaagcgagaacagcttcagcgcgctattgacgattatcataaagctggtaacccggtaaacggaaacgaatataccgacttcctaaaaagcattggttaccttgttgagcagccatcacaagtaagtgcacaaacacaaaatgtagacgccgaaatagcgacaatggcaggccctcagttagtcgtgccaatcaacaacgctcgctatgcacttaacgcggtaaatgcccgttggggaagcctttacgacgcactatacggcactgatgtcatcaacaatgaaggtggcgcagaagcgggaaaaagctacaaccccgtacgcggcgccaaagtagttgcgaaagcgaaagactatctagatagcatgataccgcttgcgaaaggcagccacgctgacgttactgagtataagattgaatcaggtaaattggcgataactcttgtcgacggcgatgaaaccaccttagcaaacacagagcaatggctaggataccaaggtgacattagcgcaccgtcaagcctgctatttgcacacaacggtctgcattttgaaattcaaatagacccgactcaccctattggcgagagcgatgccgcaaacgtaaaagacgtactggttgaagctgcattaaccaccattatggactgcgaagattccgtcgctgctgttgacgctgaagacaaaaccttggtgtatagcaattggcttggcttgatgaaaggcacgctaagcattgaaatgacaaaaggtggtaaacagttagttcgtgctatgcatgaagatagaagctatcagccgtctaaacacgcttcacaagacgaactaaaagacggcaaacttgtactttctggtcgcagtcttatgtttgttaggaatgtgggtcaccttatgactaataatgccatgctctttgacggcgaagaagtaccagaggggatcatggacggtttagtcacttctcttattgcaaagcatgatctattaggaaacagcaaatttaaaaacagccgcgaaggtagtatttatattgttaaacctaaaatgcacgggccagaagaagttgcattctctaacgcgttgtttggtgctatcgaagcgattatcgatgttccagccaacacccttaaaatgggcataatggatgaagagcgccgtacgagtatcaatctacaagcttgtattgccgaggctacttcgcgcgttgtgttcattaacacgggtttcttagacagaactggtgacgaaattcatacctcaatgcttgcagggcctttcgcagaaaaagccgcgctcaagtctatggcgtggattaaggcttatgaaactgcaaacgtcgcagtaggccttcgttgtggtctttctggcaaagcgcaaattggtaagggcatgtggccaatacctgacgaaatgcaaaatatgatgaccgccaaaataggtcaccctaaggctggcgctaatactgcttgggttccctcacctactgcagcaacactgcacgcgcttcattaccacgatgtaaatgtgtttgacgttcaaaagtcgctagatgaaaactttagtggccttgctgacatacttaccattccattgttagaagatgcctctactctgacgcgtgaaagtattaagcgtgaaatcgacaataatgttcagggcattttaggctacgttgtacgctgggttcaccaaggcgtaggctgctcgaaagttcctgacatcaacaatgtaggcttgatggaagaccgggcgacgttgcgtatttcatcgcagcatatcgccaactggctagagcacggcattgtaa

SEQ ID NO: 237993 - DNA, 1417 bp, Unknown
  Bacterial polypeptide expressing nucleotide sequence isolated from the Sargasso Sea
tctgccagattttctagacgatactaaagaaataagagaatcagaatggcaagtgaggccaataccaaaggatcttcttgacaggagagtagagattacaggcccagtagatcgaaagatgattatcaacgctttaaattcagatgtgaaagtatttatggcagattttgaagactcactaagtcccacatgggaaaacgtagctaatggacaaaaaaatctcttcgatgctgtaagacgaacaatttcttttgaaaatcctgagaatggaaaaaaatataaattgaatgatgagattgcaacattaatgtgtagggtcagaggcattcatttaaaagagaaaggtttgacaatcgatggctctcagccatatgggtgcttggtcgattttggatattatctctttcataatgctaaagaattgatgaataaaaatactggaccttacttttacatcccaaaacttcaatctcatttagaagcaagactttggaacgatatcatttcttttgctgaggaaaatctaaatattccaaaaggaactgtgagagtgacatgtctcattgaaacgcttccagcagtttttgaaatggaagaaattttgtatgaactaaaagatcacattgttggacttaactgtggtagatgggattatatttttagttacattaaaacctttcaaaagcattcggataaattattaccagacagatatcaggtaggaatgaatcaaccttttttaaacgcgtactctagattgcttatcaaaacctgccataaaagaggtgcctttgctatgggggggatggcagccttcataccatcaaaagatcctgacgaaaacaaaattgttaccgaaaaagtaatgggagataagcttcttgaaacgtctaatggacatgatggaacttggattgcccaccctggtttatctgatattgcaaataatgttttctcaaatgcattcgaaccaggaagaacaaatcagatgcatattcttagagaggacgatcatattaacgctaaagatcttattactccttgtgaaggaaattttacggaagagtgcttccgttcaaatattagagtctgtttgagatatattgaagcctggcttagaggtattggatgtgtaccaatttatggacttatggaagacgcagctacagctgaaatatcaagaagttctctatggcaatgggttaagcattcagtagaactagatacaggtttagtatgttcggagcaaacatttgaaaaaattttagatgaagaatacaatgtcgttcaagaagagattgggcaagactctttggcttcaggtaagttttccgaggctaaatcacttttaaaagatttagttcaaagcggagaattaactgattttcttacattgccagcatataggagtatttaa

SEQ ID NO: 237994 - DNA, 2146 bp, Unknown
  Bacterial polypeptide expressing nucleotide sequence isolated from the Sargasso Sea
atgaaaaaaataaccataaataatttgaagattgacgaaaatcttatcaaatttattaatgacgaagccattcctggaaccggcttagattcagatcatttctggaaagaatttagtaatgtagttcatgaattagcccctaaaaataaaaatttaatcaaaaaaagagaagaaatacaaaaaaaaattgacgactggcatttgtcaaacaaggatagtgcattagataaaaataaatataccgaattcttaaaatctattaattacattgtagaagaaaaagataatttcaagatcaatacgtcaaatgttgatgaagagatttcttctatagcgggacctcaattagttgttccagttgataatgctagatatgctttgaacgcagcgaatgcaagatggggaagcttgtacgatgcaatttatgggacagatgttatatctgaaaataaagctgaaacttgggataaacaaagagcaattgaagtcataaattatgttagagaatttttcgataaaataatttcaatcgaaaacactagttggaaaaatatatctaaaattaaaattgaaagtaataatttagtttttgtagtagacgacaaaaagtacaatcttaaaaataaaaatcaatttgtaggctttagtggtgagaaaaataacccaaaatctattttatttaaaaataacaacttacatattgatgttataattgatgagaacagtaagattggaaaaactgataaagcaggaatttcagatataattgtggagtcggctatatcaactattgttgataacgaggactcagtagccgccgtggactctactgataaagtaaaatgctacagaaactggcttggtttgatgaaaggagatttaaaaactgaggttaataaaaatggaaaaacatttgtaagaaaattaaattctaacagaagttacataggtgcagatgggtcaaaaattaccttacacggtagagctttattacttaatagaaatgtaggtcatttaatgacgaatcctgcaataatattaaaagatgggtctgaaatacctgaaggtatcatggatgctttcatatctactttatgtgctatgcatgactttaaattaaagaataattctagaaaagagtcagtttacattgttaaaccgaaaatgcatggccctgaagaagttgactttactaataatttattttcaagagtagaagatgctttaaaaataaaaaaatattcaattaaagttggaataatggatgaggaaagaaggacaacagttaatttaaaagaatgtataagaaaagttaaggaaagagttgtttttataaatactggatttttagatagaactggtgatgaaatgcatacatcttttgaggctggtcctatgatttttaaaggggatatgaaaaaatctacgtggttaaatacttatgaagattggaatgtagatattggtttagcatgtggtttttctggtaaggcccaaataggaaaaggtatgtgggctatgccagataaaatgtcagatatgatgaagcaaaaaattaatcatccaaaatctggcgcaaattgtgcttgggtaccgtctccaacagcagccacccttcatgcaacgcactatcattactttgacgtttttaaaaaacaagatgaattaaaaaataagaagagagcaaagttagaaaacttactcgaaataccaaaggctgatagacctaattggtctttagatgacataaataaagagcttgaaaacaatgtacaaggaattttgggctatgtggtaagatggattgaccaaggtgtaggttgttcaaaagtacctgatataaataatattggtttgatggaggatagagctactcttagaatttcatcccaacatatagcaaattggttgcatcataatatatgttctaaagaccaagtcatgaaagtattaaaaaaaatggctaaaatagtcgatgaacaaaacagttcagataaaaaatatgagccaatgtctataaattttgaaaaatctaaagcttttataacagcttgtgatttaatttttaaaggaagagttcagccatctgggtacactgagcctttacttcataaaagaagattagaaaaaaaatctattcactaga

SEQ ID NO: 237995 - DNA, 1813 bp, Unknown
  Bacterial polypeptide expressing nucleotide sequence isolated from the Sargasso Sea
tatgaattatattaataaaaatgaccttaaaataaattctacattatttgaatttattaacaaagaagctattccaggcttagatattaaatcagaggatttttggaaaaatttttcaaaaatcgtccatgaacttgctcctataaataaatcattaattgaaaaaagagaaactattcaaaaaaaaattgatgattggcataaaaaagatgaaaacaaagattttaataaggagaaatatataaattttttaaaatctatttcatatattgttgagaaaaaagaagattttaaaataagcacctctgatgtagataaagaaatttcttccatcgcaggccctcaactagtagttccagtagataatgctagatatgcacttaatgcagctaatgctcgatggggaagtttatacgatgctttatacggaactgacgtaattcctggagaaaaagggaaaggccataataaagaaagagctaataaagtaatttcttacgtaagagaatttttagatcaagtctttcctcttaacaatggtagttggaaagaaatttctaaaattcaaattgaaggaagtgacttagtattgcttatagaagagaaaaaaaattatataaaagataaaaaacaatttgttggttttaatggagaaaaaactaaacctcattcaatattacttaaaaataacaatctacacatagatattattattgatccaaaaaatatgatcggaaaagatgataaagcaaatatttcggattttattattgagtcagctatatctactattatagataatgaggactctgtagctgcagtagacggggaagataaggttaaatgctatagaaattggcttggattaatgaagggtgatttaaaaacaagtatggaaaaaaatggaaaaaaatttgttcgtaaactaaaccctgacagaaattatattagtaaagatggatcaaaaatccaacttcatggaagagctctactattaaatagaaatgttggtcatttaatgactaacccttcgattattttaaaggacgaatctgaaattcctgaaggtattatggatgcctttatttctactctatgcgctatgcatgattttaagaataaaaaaaattcgagaacaaaatctttttatattgttaagccaaaaatgcatggtccagaggaagtagcctttaccaatattttatttgaaaaagtagaagatgctttgggaataaaaagattttctattaaagttggtataatggatgaagagagaagaacaacgatcaacttaaaagaatgtataagagaagtaaaagataggattgtttttatcaacacaggtttcctcgacagaactggagatgaaatgcatacttcattcgagataggcccaatgattttcaagggtgaaatgaaaaaatctacttggttaaattcttatgaaaactggaatgttgatataggtttagattgtggtttttcaggaaaagctcaaatcggaaaaggcatgtgggctatgccagataaaatgaaagacatgatggatcaaaagattgggcatcctaaatcaggagctaactgtgcttgggttccatctccaacagctgcaacactacactccatgcactatcacaaagtaagcgtatttaatgaacaagaaaagattaaatcaagaaaaaaagcaaaattagaagatcttttagagataccaaaagctgatagaccaaactggtcagttgaagatataaatcgtgagctagaaaataatgcccaaggtattttaggttatgttgttagatggattgatcaa

SEQ ID NO: 237996 - DNA, 1579 bp, Unknown
  Bacterial polypeptide expressing nucleotide sequence isolated from the Sargasso Sea
aatgacatccaagttaaaaatcatgaaccctttatcagaggctgagaaacaaattcttaacccgataactgtttcgctcatagaatcactgcatgagaattttgaaaatcgaagacaggaattactcgagaatagaagaatcatacagaaagaattagatgacggcagatttcctgaatttttaaatcatactgcagctataagggaaagcgattttgtggttgctcctattccaaaagaccttcaggatcgtcgtgttgaaatcactggaccgccagatcgaaaaatggtgatcaatgcattgaattcacccgttaagacatttatgtgtgattttgaggattcttgctcacctacttggaacaatgttatccaaggtcatctgaatgtgagggatgctgttgaggaaagtatcgaatttacaagagagtctgatggcaaggtttataggctcaatgatgatattgctacattaattatcagaccaagaggatggcatctcgacgagaaacatataacaatcaatgatcaaccgatatctggatctctgtttgatttcggtgtatatctttcaaataactttgaagcactatcaaaaaaaggcacaggcccttacttttatcttcccaagcttgaaaatcacctagaggcgagactttggaacgatgttttcttgcatgctcaagattttctgaatatcgatcgaggaaccattaaagccactgttcttattgagacaatcacagctgcatttgaaatggatgagattatctttgagcttaaagatcattctgccggccttaattgtggccgctgggattatatatttagctttataaagaaatttagaaaccatgaagaatttcttctaccaaatagaacagaagtaaaaatggagcggcatttcttaaaaagttatgtcgatttacttattcaaacatgtcacaaaagaaatgttcatgcgatgggaggaatggcagctcaaattccaatcaggggggatgaggaacaaaaccaaattgccatggataaagttgcttcagataaatcaagagaggcaaatgctggccatgacggaacatggattgctcatcctggattatctgatgtagcgatgaatgcattcaatcaagcaatgggagcatctgcgaatcaaatatctaataaaagaaatgatgtttcagtatgcgctcaagatctcattaaggttccaaatggcagcattacagaggaaggtttgaggcaaaacatatcaataggcattcagtacattgaggcatggctatcaggcaatggatgtgtaccaatacacaatctaatggaagatgctgctacggcagagatatcccgctcccaaatatggcagtggattcaccatgctgcaaaaacaacagacaccaataaggccatcacagaagagtatttctttaagacacttgatgaagaaatggatctaatgatcgtatcaagaggtttcgagagtgattaccttcagccggcaattaatttatttaaggaaatgtcaacagattcagaatttgatgaattcttaacattaccagcatataaacacctctaa

SEQ ID NO: 237997 - DNA, 1450 bp, Unknown
  Bacterial polypeptide expressing nucleotide sequence isolated from the Sargasso Sea
ggaaattttttggaatgcgttcgaagaaatactatatgaatttacacctaagaataaagctttgcttgagaaaagggagatccttcaaaagcaaatcgatgaatggcatatttctaaaaaaggaacggattttgataaagaagcttataaagattttttaaaagaaattggctatttattagaagaaggtgacgacttttcaatagaaactgagaatgtagatcctgaaatatcaaagattgctggacctcaattagtagtgccagtgatgaatgcaaggttcgctttaaatgctgcaaatgcaagatggggaagtctttatgatgctctttatggaacagacgttatcccagaagaaaatggggctgaaaaaggcggatcttacaatccaattagaggagacaaagtaattgaattttcaaaaaaatttttagatgagacctttcctttagttacaggaagttttgcagatgtaacagcttttcaaataaaagcaggaaagctacaaattactcttgctgatcaaagccaagtttctttgtctgatgaatcaaaatttgaggggttctctggatcagaagataatcctaaagggattttgttaaagaataataatctgcacatggagatccaaatagaccgttctgattcaatcggctcacaagacccggctggcataaaggatgttttagtagaaagcgcaataactacaattcaagattgcgaagattcagtcgctgcagttgacggcgacgataaagctcaagtttatgaaaattggttaggattaatgaaaggcgacttggctgagacttttcaaaaaaatgatcaatcgatgacaagagtactcaacgaagacagagattatattaggcctaaaggagaatctttctctttacctggaagaagcactcttcttgtcaggaatgtaggccatcttatgaccaacccagcgattttagataaagacggtaatgaagtatttgaaggaattatggacgcaatgtttactattgcaattgcaaagcatgatatcttgaatactgggtcaaaagtcaatagtaaaactaaaagtatttatattgttaagccaaaaatgcatggtcctgaagaagtaaaattcacctgtgatcttttcgcagcagtcgaatctgcattaggtctagaacctctaacagcaaaaatcggaattatggatgaagaaaggagaactacggttaatcttaaagaatgtattagaattgcaaaagatagagttatttttatcaatacaggttttttggatagaacaggtgacgaaattcatacaagcattgaagcaggcccaatgataaaaaaatccgagatgaaacaacaaacttggattaacgcatatgagaattggaatgttgataccggccttgaaactggattcaaagggaaagctcagataggtaaaggaatgtgggct

SEQ ID NO: 237998 - DNA, 921 bp, Unknown
  Bacterial polypeptide expressing nucleotide sequence isolated from the Sargasso Sea
cccccacacccatcaaggtgggccttatggatgaagagcgaaggacttcaactaatcttaaagaatgtattagagctctttccaaacgtctcgtgtttcagaataccgggtttctcgatcgcacaggagatgaaatgcatacttctatggaagctggcccaatgattaaaaaaggtgatatgaaatcttctaaatggatacaagcttatgaaaataataatgtggatttaggtttaaaatgtggtttttcaggcgttgcacaggtcggtaaaggaatgtgggctgctccagatgagatgaaaaaaatgttagaggaaaagattggacatttaaaagccggcgcaactacagcatgggtcccttctccaacagctgcatcattacatgctctgcattatcatcaaatcgatgtttttgatgtgcaaaaaaaattagttactagatctccagcaaaattagatgatcttttaactatacctatagcaaatagacctaattggtcagttgatgaaattaattcagaaatttcaaattcagcacaaactttattagggtatgttgtaagatggattgaccaaggtgttggttgttcaaaagttcctgatattagtaatacattccttatggaggaccgagcaactctccgaatttcatctcaacatattgcaaattggttacatcatggaattactacaaaaattcaagttatggaaataatgaaacaaatggctaaaattgtggataaacaaaacgagagcgatgagaaatatgtaaaaatgagtgatgattttgacaattcaatcgcatttaaagcagcttgtgatttgatttttaaaggaaaagatcaaccatctggatacactgaaccacttcttcatttaaacagactagaaaaaaaactactcagaactagaatttaat

SEQ ID NO: 237999 - DNA, 2146 bp, Unknown
  Bacterial polypeptide expressing nucleotide sequence isolated from the Sargasso Sea
aatggaaaaaattaatattagcaatctgagtgttgatgagaacctggtaaaattcataaataatgaggctatacctggtacaaatgttgatgttaaaaaattttgggatagctttagcgaggttgttaataagttagccccaaaaaataaaagtttaattcaaaaaagagctgaaattcaaaaaaagatagatgaatggcatatatccaaaaaagaatctatttttgacaaaaaagagtacattaattttttaaaatctattgggtatatcgttgaagagaaatctgattttaaaattagtacttctaatgttgatcaagaaatctcatcaatccctggaccacaattagttgttcccgtagataacgcaaggtatgccttaaatgctgcaaacgcccggtggggaagtttttatgatgccctttatggcaccgatgtgatacctgggaaaacaaacaagggctatgatgatgaaagagcaaaaaaggtaattaattattcaagagaatttttagataatattttttctattactgatgctagctggaaagatattacaaaaattaagttagaagaaaaaaatttagctcttttcataaatgaaaaaaagttttatctaaaaaataaaaatcaatttgttggttttaatggtgaggctgaaaatttaaactcaattcttttaaaaaataacaatttacacattgatatattgatcgatcccaaaagcgctgttggaaaaaatgacaaagcaggtatatctgacataattattgaatctgctatatccactatagtagataatgaagactccgttgcagcagtagattcaaaagataaagtaaaatgttatagaaattggcttggtttaatgaaaggcgatttaaaaacagaagtgcaaaaaaataacaaaaaattcacaagaaaacttaacccagatagagtctataaatctccagatggatcaaagattactttacatggaagagctttattacttaatagaaatgttggtcatcttatgacgaatcctgcaattgttttaaaaaatggctcagaaatacctgagggcattatggatgctttcttttcaacactttgtgcactacatgatttcaaaaataaaaaaaattcaagaacaaattctgtttatatagttaaaccaaagatgcacggaccagaggaagtagactttaccaatgaaatttttgaaaatgttgagaaagttcttaacttaaaaaaaaatacaattaaagttggaattatggatgaagaaagaagaactacagttaatttaaaagaatgtatacggaaagtaaaagacagagtggtttttattaatactggctttttggatagaactggtgacgagatgcatacatcttttgaagctggtcctatgatttttaaggctgatatgaaaaaatcaacttggcttaactcttatgaaaactggaatgttgatattggtttatcatgtggcttttcgggtaaagcacaaatcggtaaaggaatgtgggcaatgcctgatagaatgtcggatatgatgcaacaaaaaattaatcatccaaatgctggagcaaattgtgcatgggtaccttcgccgacagcagcaacacttcacgcaactcattatcacaaagtagatgtatttaaaaaacatggtgagataagtgaaagagcaaaggcagacttaaaaaatattcttgagatacctaaagcagatagaccaaactggtcggttgaagatattaataaagaattggaaaataatgctcaaggaatattaggttatgttgttagatggatcgatcaaggggtaggttgttcaaaagtgcctgatattaataatataggtttaatggaagatagagcgactttgagaatatcatctcaacatatggcaaactggttacatcataatatttgtacagaagaacaggttatgaaagttttaaaaaagatggcagcaatcgttgatcatcaaaattcgaaagataaaaattacttaccaatgtcacaaaattttgaaaaatcatttgcattttcagcggcttgtgacttaatttttaaaggtagatctcaaccttcgggttatactgagccattattacataagaaaaggcttgagaaaaaatctagtcactag

SEQ ID NO: 238000 - DNA, 1085 bp, Unknown
  Bacterial polypeptide expressing nucleotide sequence isolated from the Sargasso Sea
gggtattatggatgcttttattacctcagcggcctgtttgcatgatttaaataaaaaaggaaattcaagaactggctctatttatattgtaaaaccaaaaatgcatggacctgaagagaccgcttttacagatttaattttttcaaaagtagaggaggctttaaatttagagaaatatacttgtaaaataggaatcatggatgaagaaagaagaacatctgcaaatcttaaagagtgtataaggtcattaaaaaatcgagttttttttattaacactggctttttggacagaacaggagatgaaatacatacatcaatggaagctgggccaatgatcaaaaaaggggatatgaaaaaatctgattggatatctgcctatgaaaataataacgtagatattggacttgagtgtggtttttctggagttgcccaaattggcaaaggaatgtgggcaatgccagacaaaatgtcagatatgttagatcaaaaaattgatcatcttaatgctggtgctaattgcgcttgggttccatcacctactgcagctgctcttcatagtcttcattaccataaagtagatatttttgagaagcaaaaaaaattagcaaaaagagagaaggctaaacttgataatttattatcaattccaatagctaataggcctaactggtctatggacgaaattaactctgagatttcaaattctgctcaaacacttttgggttatgttgtgagatggattgatcaaggagttggttgttcaaaggtacctgacattaacaacattggattaatggaagatagagctactttaagaatttcctctcagcacattgctaattggatacatcatggtgtaacaacaaaaatgcaagtaatagaaataatgaaacaaatggctagaatcgtagatcaacaaaatttaaatgatcccaattatgaaaagatgtacgataattttgagaattcactagcttttaaaactgcatgtgacttaatttttgaaggtaagaaacaaccttcaggctacaccgagccattattacatctcaatcgaataaaaaaaaagtctaatcagaattagt

SEQ ID NO: 238001 - DNA, 1768 bp, Unknown
  Bacterial polypeptide expressing nucleotide sequence isolated from the Sargasso Sea
tatgcaagaaaaatatattaacattaacaaactaaaagtttcagaaagtttatctaaatttgtgaaagatgaactattgaaagacacaaatatttctagtgatgacttttggttaggttttgaaaaaactgttgaggagcttgagccaaaaaatagacaattaattaattttagagaaactttacaaaaaaaaattgatgcatggcatattaaaaataaatctaatgaattcaatttaactgaatacaaaaaatttttagttgagatcggctacttaaaagaagaaggtccagatttttctattgacacaaaaaatgtagacgatgaaatcacaaaaattgcaggaccacaattagttgtaccaattatgaactcacgttatgcattgaacgcagctaatgcaagatggatgagtctctacgacagtctatatgggactgatgttatagaacaatctgaggatagtgtttctgaaagatatgaccctttaagaggagaaatggtaattaaatatggtagagactttttagataaatattttcctttaaaagatatgagctggagtaaaattactactgttgcggtcaaagaaggaagttttaaaacattaaaaggaattgaaacatttgatttagtagatgaagaaaaatttattggtcatcgaggtgaagcagataacccatcggcaattatcttgaaaaataataacttacatattgaaattttaagagatcgaagagcttttagtgctcaacaagattatgcgggtattagtgatataattttagagtctgctgtgtctacaatatgtgacaacgaagatagcgttgcggcagtggatgctgcggataaagttatttgctacaggaactggttgggtttaatgaaaggtaatctaaaaactcaatttgaaaaaggaggcaaactacttgaaagaaaattaaatccaaacagaagttacatatcaaaagaaggtaaagggcttaaacttcatggaagaagtctcttattgataagaaatgttggacatttaatgacaaacccatcaataattttaagtaacggtaatgaagtccctgaaggtatcatggatgcatttataactgttgctgctgctcttcatgatcttaaaaataaaaataattctagaactggatccatctatatagttaaaccaaaaatgcatggaccagaggaaactgcatttactgatttaattttttctaaagttgaggaagttctaggattagagaaatacacttgtaaaattggaattatggatgaagaaagaagaacttcatctaatctaaaagaatgcataagaacactcaaaaatagagtattttttatcaatacaggttttttagatcgaactggagatgaaatgcacacttcgatggaagcaggaccgatgattaaaaaaggagaaatgaaatcttctaaatggatcttggcatacgaaaataataacgttgatgttggtttgaaatgtggactttcaggtaaagcccaaattggtaaaggaatgtgggcgatgcctgataaaatgaaagatatgatggagcaaaaaacaggtcacttaaaagcaggcgcaaattgcgcttgggttccatctcctactgcagcagccttacatgcgttacactatcatgaaatagatatttttgatcaacaaaaaaacataattaaaagagaaaaagcaaaacttgatgaccttttaacaattccagttgcaaatagacctaactggtcgattgaagaaattaat

SEQ ID NO: 238002 - DNA, 1203 bp, Unknown
  Bacterial polypeptide expressing nucleotide sequence isolated from the Sargasso Sea
gtaaaggtttaaaattacatggaagaagtcttttgctagtaagaaatgttggtcatctaatgactaacccttcaattttattaagtgatggaagtgaaatacctgaaggaattatggatgcttttataactacagcagctgcacttcatgatattaaaaataaaaataattcaagaactggatcagtttatattgtaaaacctaaaatgcatggtccagacgagacagcatttacagatttaattttttctaaagttgaggaagttctaaatttacctaaatacacatgtaagattgggattatggatgaagagcgaagaacatcagcaaatttaaaagagtgtattagaagtcttaaaaatagagttttttttatcaatactggtttcttagatagaactggtgatgaaatgcatacatcaatggaagctggtcctatgattaaaaaaggtgatatgaaatcatctaaatggattaatgcatacgaaaataacaatgttgatattggtttaagttgtgggttttctggtaaagctcaaattggaaagggaatgtgggcaatgccagacaaaatgaaagatatgatggagcaaaaaacaggacacttaaaagcaggtgcaaactgtgcatgggttccttctccaacagcagctgctttacatgctttacattatcatgaaataaatatttttaacgaacaaaaaaaattaattgatagagaaccagctaagcttgatgatctcttaaccatcccaatagcagatagacctaattggtctgtagaagatataaataaagaaatttccaattctgcacaaactctattagggtatgttgtgagatgggtcgatcagggtgtaggttgttctaaagtgccagatattaataacataggtttaatggaagacagggccactcttagaatttcatctcagcatatcgcaaactggatacatcatggtattacaaccaaaatacaagtaactgaaataatgaaagagatggcaaaaatagtagacgaccagaacaaagatgatccactatatgttaaaatgagcagtgattatgaaaactctatagcatttcaaactgcgtgtgatttagtgtttaaaggtaaagaacaaccttcaggttatactgaaccattacttcatttaaatagattgaaaaaaaaatctaatctgagttcgaaaccaaattaga

SEQ ID NO: 238003 - DNA, 1357 bp, Unknown
  Bacterial polypeptide expressing nucleotide sequence isolated from the Sargasso Sea
atgaaccaattgaataccgaaaaacgagtcacaatcggaagtttatccatcgatccttcattggaagcgcttgttcgtgaagaaatcatgcctggactcgggttggatgccgaggatttctggaattccttctcccaaatcctgaacgatctgactccacgcaatcgtgaactcctcgaaaaacgcgaccggatccagcaacagatcgatgaatggcatctgaacagaaagggcaagcctcgtgatccgcaggcttaccaggaatttctccgttcgatcgattatctcgtcccggagggtcctgattttaagatcacaacaactggcgttgatcccgagatttctcaaattcccggaccgcagctcgtggttccggtcagtaacgcacgttatgcactcaatgcagccaacgcacgatggggcagtctgctggatgcggcttacgggacagacgtcatccctgaaactgaaggtgcagagaaaggaatttcctacaacccccggagaggtgagaaggtttttgaattcgttcatggcgtcctggacgcctcggcccccctggcagaaggttcgttcagcaggattacaggattttccttggatcaaggcagactaaggatgatactggagggaggtcacgaaacaggactacagaatcaggaacaattcgcaggctttaacggttctcctgaaaatccggattccatcctgcttaagaaaaacggcctgcacttggatatccaactggaccgcaatcatcctgtcggcaaggaccatcctgcaggaatctgtgacatcctcctggaatccgcagtcaccaccattcaggattgcgaggattctgtggctgcagtcgatgcttccgataaggtccatgtctaccgcaactggctcggactgatgaaaggtgatctttcggcaaaacttgataaaggggggaaaatgatcacccgcaccctcaatcctgatcggaaatacaagacacccgaaggatcagaaatcgtgctccctggtcgttccctgatgctggttcgaaatgttggccacctgatgaccaccgatgccgtgttggatgagcaaggaaatgaaatatttgaaggtatgctggatggaatgatgaccgcactcattagcctctatgatatacggggcctgggaacattccaaaattcccgcagaggaagcatgtatatcgtcaaacccaaaatgcatggccccgaggaagtagcgctttcagtcgaacttttcggaagaatcgaaaaagccctcggcatggaagaaggaacccttaaaatcggaattatggatgaagaaagacgaaccacccgtcacctcaaggaatgcatccgtgcggcaa

SEQ ID NO: 238004 - DNA, 1225 bp, Unknown
  Bacterial polypeptide expressing nucleotide sequence isolated from the Sargasso Sea
aataaattcgaggattttaatttagataattacaaaaattttctaaaggatattggttacctaaaggaagaaggtccagaattcaaaatcgaaactaaaaatttagacactgaaatttcaagtatagcgggacctcaattggttgtgccgataatgaatgctaggtatagtttaaatgcagctaatgcgagatggatgagcttgtatgacagtttatatggtaccgatgtaattgagtcagaggagagtggaggtgaaaaatatgatccgctaagaggtgaacaagtaattaattacgctagagattttttaaataaacattttccaataaatggcattagttggagagaaatctctggatttgaagttaatgatggaaacttaaagattaaaaaagataaagatttgtttaacttaaaacataatgaaaaatttacagggtttagaggagaagttttaaaacccactgccattatattaaataataataatttacacttagaaattatcataaatccaaaagcgttcagcgcagcgcaagacgcagccggaataagtgatattataatagaatcggcaatttcgactatatgcgaccatgaagatagtgttgccgctgttgatgccgaagataaggttgcatgttacagaaattggttaggattaatgaagggagatttagtttcaatttttgaaaaacaaggaaaacaattaaaaagaaaactaaacccagatagaagttatatatctaactcgggaaaaaacatgaaacttcatggaagaagtttgttattggttcgaaatgttggacacctaatgactaatccctcaattatattaaatgatggatctgaagttcctgaaggaattttagatgcatttattacatcggcagcttgccttcatgatttaaaacgtaaaggcaactctagatcaggttcaatttatattgttaaacctaaaatgcatggaccagatgaaacagcatttactgatgttatttttggaaaagtggaagaggttttggaattagaaaagaatacgattaagtgtggaattatggatgaggaaagaagaacctctgcaaatttaaaggagtgtattagaactttgaaacatagagttttttttatcaatactggatttttagatcgtacaggcgatgaaatgcatacctcaatggaagcaggtccaatgattaaaaaaggagatatgaaaaaatcaa

SEQ ID NO: 238005 - DNA, 1441 bp, Unknown
  Bacterial polypeptide expressing nucleotide sequence isolated from the Sargasso Sea
aatgttggagcacatgatgggtgaaatgatcgagcgaaacgggctgcgtgttgcggctgttttgagtaaatttgtcgacgatgaagcattgcgcgggaccggcatcgacagcgaggtgttctggaaaggcttcgatgccctcgtccacgacctcgcgccaaagaaccgcgcgttgctcgcagaacgcgaccgtctgcagacggagctggaccaatggcaccgcgcaaacccagggccggtgcgcgatctgaaggcataccgcgcatttctcgaaggcatcggctatatcgtgccggcgagcgcagccgtgaaagcgacgactgagaacgtcgataccgaaatcgccgaacaggcgggaccgcaacttgtcgtgccgctctcgaaccagcgctacgcgctcaacgccgccaatgcacgctggggcagcctgtacgacgcgctctatggcaccgacgccatccccgaaaccgacggcgcggtacgcaccgcttactacaacgtagtccgcggtgcgcgcgtgatcgcgcgtgcccgtgccttcctcgacgaagccgcgccgctcgccaacgactcgcacgtcgacgccatcgcataccgcgtggaatgcggcaagctagccgtcacgctcaagaacggctcgtcggcattgaaggttccggcacagttcatcggctatcagggcgacgctggctccccttccgccgtcctgcttaagcaccacggcctgcacttcgagatccagatcgacgccacgcacccgatcggcaagaccgacgcagcgcgcgtgaaagacgtgctgatggaagcggccgtctcgacgattatcgattgcgaagactcggttgccgccgtcgacgccgccgacaaggtccagctttaccgcaactggctcggcctcgcgaaaggcgaactgaccgagcaagtcacgaagaacggcaagaccttcacgcgccgcctgaacgccgatcgcacatacaccgcacccgacggctcgaccgtgaagctgcatggccgctcgttgctgttcattcgcaacgtggggcatctgatgacaaacccggcgatcgtcgatcgcgacggtcatgagattcccgaaggcattctggatgccgtgatgacatcgctgggcgcgatgcacgacctgcaaaacaagctcaattcgcgcaccggctcgatttacatcgtcaagccgaagatgcacgggccggccgaagtcgcgttcgccaatgaactgttcggtcgcgtcgaagatctgctggggctgccgcgccacaccatcaagatgggcatcatggacgaggagcgccgcacgagcgtcaacctgccggcgtgcattgcggcggcatcggcacgcgtggcgttcatcaatacgggcttcctggatcgcaccggcgacgagatgcacagcgtcatggaagcgggtccgatgatgcgcaagggc

SEQ ID NO: 238006 - DNA, 1393 bp, Unknown
  Bacterial polypeptide expressing nucleotide sequence isolated from the Sargasso Sea
cattttgaaataataattaatccaggtgcatttagtgctgcacacgatatagctggaataagcgatgtaattgcggagtcggctatttctacaatttgtgacaatgaggatagcgtggctgctgttgatgctaatgataaggttgtttgttatagaaattggcttggattaatgaaaggtgatttaagaattgagttcgaaaaaaatggtaaaattttagagagaaaattaaatcctgatagaagttatatttcaaaagatggtaaaggtttgaaattacatgggagaagcttacttctgataaggaatgttggtcatttaatgactaacccctcgatccttctaaaagatgatactgaaataccagaaggaattatggatgctttttttacaacaattgctgcagttcatgatttgaaaagaaaaaaaaattcaagaaaaggatctatttatatagtaaaaccaaaaatgcatggtcctgaagaaactgagtttacaaatttgatttttacaaaagttgaagaagttttaaatttaaaaaaatttacatgcaaaatcggcattatggatgaggaaagaagaacatcagcaaaccttaaagagtgtattagaacccttaaaaatcgagtattttttatcaacacaggttttttagatagaactggagatgaaatgcatacatcaatggaagcagggccaatgattaaaaaaggtgatatgaaatcatctaaatggatccaggcctatgaaaataataatgtagacattggtctaaaatgtggttttttaggaaaagctcaaattggaaaagggatgtgggctatgccagataaaatgctagagatgatgaaggataaaattaaccacttaaaggcaggtgcgaactgtgcatgggtgccttcacctacagcagcttcattgcacgcattacattaccatcaaataaatatttttgatgaacaacaaaaaatcttaaaacgtgaacaggctaagcttgatgatttattaacaataccaatagctgatcgacctaattggtctgttgatgaaataaataaagaaatttctaattctgctcaaactcttttaggatatgttgttagatggattgatcaaggaataggttgttcaaaagttcctgacataaataatgtaggtttaatggaagatagagctacattaagaatttcatctcaacatattgcgaattggatacatcatggtgttactactaaaatgcaagtgatagaaataatgaaagaaatggctaaaatagtagataaacaaaataaaaatgacaaaaattactctgaaatgagtaacgattttgataattcaatcgcttttcaaactgcttgtaatttaatctttaagggaaaaaatcaaccttcag

SEQ ID NO: 238007 - DNA, 1804 bp, Unknown
  Bacterial polypeptide expressing nucleotide sequence isolated from the Sargasso Sea
aatgcaagaatttgctttgaatgcaacaaatgcaaggtggggtagcctttatgacgcactatatggaactgatgttatttcagaggaaggaggcgcactaaaagagggtgcatataatgaaattcgtggaaataaggtcattgatttttcaaaagaatttttagatcagtgttttccaattactgattttagttataaagatattacaaatatttcagttagggatcaaagattactttttcatactgagcaagatcaaattacttatctaaaaaatgaaaatcaattcaaaggatttaatggatctcctgaaaatccttcagaggttctactagtaaacaacaatctacatttagaaatacaaatagatcccaatcatcctgttggtaagactgataaagcaaatattaaagatattgttttggagtctgcagtttcaacaatccaagattgtgaggattcagttgccgcagttgatgctgaagataaagtaattgcttatagaaattggcttggtttgatgaaaggagatctctctgaaacatttgaaaaaaatggaaaacaattaacaagagtcttaaaggaagatagaaagtatctagatgctaatggaaattctttttctcttcctggaagaagtcttttacttgttagaaatgttggtcatcttatgcagaatccttcagtaatattagaaaatggtgatgaggtttttgaaggaatcttagatgccatgtttaccatatgtatcgctttatatgatctaaataagttaaatacattgtcgaattcaaggaacaaaagtatgtatatcgtcaaaccaaaaatgcatggttctgaggaggtagctttcacatgcgacttgtttgatgcagttgaacgattattcaatctagaaaaacatactgtaaaagttggaattatggatgaggagagacgcaccactattaatctaaaggcttgcatcgaaaaagctaaagaaagaataatttttataaatactggttttttagacagaacaggagatgaaatacatacaagcatggaagcaggagcaatggttcctaaatcagagatgaaagctcaatcatggataaacgcttatgaagattggaatgtagatataggtataagctgtggattaagtggtaaagcacaaatcggaaagggaatgtgggcaatgccagatgagatgaaagatatggtagagactaaaatagctcatccattatctggtgcaacatgtgcatgggttccatcaccaacagcagcaacgcttcatgcaatgcattatcaccatgttgatgtgttatcaaaacaagaggagctatcttctagggaacaagctgatttagataagattttaactattcctcttttaaaggaacatttagataaacaaacaattaggaatgagatagcaaacagtgctcaaggaatacttggttatgtcgtgagatggattgatcagggcattggatgttcaaaagttccagatattaacaatgttggccttatggaggatagagcaacgtgtaggatatcaagccagcatatttcaaactggattcaccatggtatttgttcagaggaagaagtaattgatatttttaaagagatggctctagttgttgatgagcaaaacaaagatgactcaaactatcaaaaaatgggatcaaatttttctggatttgcatttcaagcttctctagatttagcaataaaaggagtttcccaaccaagcggatatactgagccgttattacataaatggcgtctagaattcaagaaaaatattcgttaa

SEQ ID NO: 238008 - DNA, 731 bp, Unknown
  Bacterial polypeptide expressing nucleotide sequence isolated from the Sargasso Sea
atcttctaaatggatacaggcttacgaaaataacaatgttgatttaggattaaaatgtggcttttctggtaaggctcaaataggaaaaggtatgtgggcggcaccagatgaaatgaaaaaaatgttagatgaaaagattggtcatctgaaagctggtgctaactgtgcttgggttccttctccaacagcagcatctttacatgctttgcattatcatcaaattgacgtttttgaattgcaaaagaaactaatctcaagatctcctgcaaaattagatgatcttttaacaattccaatagcagatagacccaattggtcggttgatgaaataaattctgaaatatcaaattctgcacaaactctattgggttatgttgtaagatggattgatcaaggggtcggttgctcaaaagttcccgatataacaaatacttttcttatggaagacagagcaactcttcggatttcctcccaacatattgcgaattggttgcatcacggaattactacgaaaatccaagttacagaaataatgaaacagatggcaaaagttgtagataaacaaaatgaaggcgacaaagattatgtaaaaatgagtgataactttgaaaaatctatagcatttaaagctgcgtgtgatttaatctttaagggaaaagagcaaccatccggatatactgagccacttctacatataaacagactagaaaaaaaggctactcagaactaga

SEQ ID NO: 238009 - DNA, 1108 bp, Unknown
  Bacterial polypeptide expressing nucleotide sequence isolated from the Sargasso Sea
gagggatcagattttaaaatagagactaaaaatgtagatgatgaaattactcaaattgccggacctcaactagtcgttccaataatgaatgctagatacactctcaacgcagctaatgctagatgggtaagtttatatgatagtttgtatggtacaaatattattgagtcagaggaaggggggagtgaaagatatgacccaaatagaggacaagaagtaataaaatatgtcagagagttttttgataaatatattccaattgatgggactagttggaaaaatatatctgcactcaaaataaaagataaaaatcttataattttaaaagaagataaagagtataaacttaaagatgaaaataaatttgtaggtcacagaggtgatgtaaataagccatcagcaataattataaaaaataataacttacattttgaaattataattaatccaaaagctttcagtgctgctcatgatatagctggaataagtgatgtaatagcagagtctgctgtttcgactatttgtgacaatgaagatagtgttgcggcggttgatgctgaagacaaagtagcatgttacagaaactggctaggtctaatgaggggagatctaaaagtacaatttgaaaaaaatggaaaaaaattagagagaaaacttaatcctgacaggagctacatttctaaagagggaaaaggtcttaaattacacggaagaagtttgcttttaataagaaatgttggtcacttaatgaccaattcatcaataattctaaatgatggtagcgaagtgccagaaggaataatggatgcttttataacaaccactgctgcgttacacgattttaagaaaaagaaaaattcaagaactggatcaatctatattgttaaaccaaaaatgcatggaccagatgaaacagcatttaccgactcaattttttcgaaagtcgaggaattacttggcttaccaaaatacacttgcaaaataggtattatggatgaagaaagaagaacttctgcaaatttaaaggagtgtataagaactttgaaaaatagagttttttttataaatactggatttttagatagaactggtgatgagatgcatacct

SEQ ID NO: 238010 - DNA, 1048 bp, Unknown
  Bacterial polypeptide expressing nucleotide sequence isolated from the Sargasso Sea
tgcgcttcatgatttcaaaaataaaaaaaactctagaaaaaattcagtatatatagtcaaacctaaaatgcatggaccggaagaagtagaatttacaaataatatttttggagaagtagaaaaagttttaggcatacctaaatactctattaaagttggtattatggacgaagaaagaagaactacagtaaatttaaaagaatgtataagaaaggtaaaagaaagagttgtttttataaatactggatttttagataggactggagatgaaatacatacttcatttgaggctggtccgatgattttcaaaggagatatgaaaaaatctagttggctaaatacttatgaagattggaatgttgatataggtttgtcatgtggtttttcaggtaaagctcaaatcggcaaaggaatgtgggctatgccggatagaatgtctgatatgatgcagcaaaaagttggacatcctaacgcgggagccaattgtgcatgggtaccttcacctacagcagcaacacttcatgtaatacactaccatcagttaaatgtttttaaaaaacaatcggaacttaaatctcgaaaaaaagctaaacttgaaaatattttaataataccaaaatctgagaggccaaattggcaagtggaaaatattaataaggaactagaaaataatgcccagggtattttaggttatgtagtaagatggatagatcaaggtgttggctgttcaaaagtacctgatgtaaataacattggtttaatggaagatagggctacactaagaatctcttctcaacatatggcaaactggttgcatcataaaatttgtaccaaagatcaagttatggagactttgaaaaaaatggcagcaattgttgataagcaaaatagtggggacaaaaattacctacctatggcacctaattttgataaatccttagcttttaccgctgcttgtaatttaatttttcaaggtcgagaacaaccatcggggtatacagagccacttctacataaaattagattagaaaaaaaaattagtcattag

SEQ ID NO: 238011 - DNA, 793 bp, Unknown
  Bacterial polypeptide expressing nucleotide sequence isolated from the Sargasso Sea
atgcatacatcaatggaagctggtcctatgattaaaaaaggtgatatgaaatcatctaaatggattaatgcatacgaaaataacaatgttgatattggtttaagttgtgggttttctggtaaagctcaaattggaaaaggaatgtgggcaatgccagacaaaatgaaagatatgatggagcaaaaaacaggacacttaaaagcaggtgcaaactgcgcatgggttccttctccaacagcagctgctttacatgctttacattatcatgaaataaatatttttaacgaacaaaaaaaattaattgatagagaaccagctaagcttgatgatctcttaaccatcccaatagcagatagacctaattggtctgtagaagatataaataaagaaatttccaattctgcacaaactctattagggtatgttgtgagatgggtcgatcagggtgtaggttgttctaaagtgccagatattaacaatataggtttgatggaagacagggccactcttagaatttcatctcagcatatcgcaaactggatacatcatggtattacaaccaaaatacaagtaactgaaataatgaaagagatggcaaaaatagtagacgaccagaacaaagatgatccactatatgttaaaatgagcagtgattatgaaaactctatagcatttcaaactgcgtgtgatttagtgtttaaaggtaaagaacaaccttcaggttatactgaaccattacttcatttaaatagattgaaaaaaaaatctaatctgagttcgaaaccaaattaga

SEQ ID NO: 238012 - DNA, 1220 bp, Unknown
  Bacterial polypeptide expressing nucleotide sequence isolated from the Sargasso Sea
gtaagagaaaaattacaaaaaaaaatagacgattggcataaagatacaaaaggtgaagaaattaatctaaaaaaatattcaaattttttaagaaaaattgggtacttaacaaaaacagggaaagattttaaaattaaaacaacaaatgtggataaagaaatttcaagtatttgtggtcctcaattagtttgtcctgtttcaaacgcaagatttttattaaatgcagcaaatgcaagatgggtaagtttatatgatagtttatatggcactgatgtaattccagaaacacgtggtgctttaagaggaaaaacatataaccctattagaggaaaaaaagtaatcgattattctcgagaattattagacaaatttataccattgcaaaaaaaaagctggaaagatttaaaaaaaataccagaagttataaataataaattagatttaaaactaaaaaatcctaaacagtttgcgggttataataaaaaatcaaacaaactatcttcacttttatttgttaataacaatcttcatatcgatattttgtttgatcaagatggaaatatggaaattaataatcctgatggtaatcaagataaaattaaaattcatgatattattttagagtcagctatttcaacaatttgcgatcatgaagatagtgttgctgctgtagatgctgaggataaggttttaggatatcaaaactggttgggtttaatgagaggggatttaaaggaggagtttgtaaaaaatggaaaaaaaattttaagaaaattaaattctgatagaaattatatttctacaattggaaaaaaatttaaattacatggtaggtctttgttattaaatagaaacgttggtcatcttatgactaatcctgcggttcttttgaaagatggcagagaatgtccagagggaattttggatgcttttattgtttctactgcctgtatccatgatttcagaaaaaaagggaattctcgatgtaattcaatttatattgttaaaccaaaaatgcatggccctgatgaaacttcatttaccaatttaatttttgaaaaagttgaaagagcattaaatttaaaaagatttactatcaaatgtggaataatggatgaagaaagaagaacttcattaaatttaaaagaatgtattaggtccttaaaaaacagggtcttttttataaatactggatttttagatagaactggagatgaaat

SEQ ID NO: 238013 - DNA, 1762 bp, Unknown
  Bacterial polypeptide expressing nucleotide sequence isolated from the Sargasso Sea
ggcagtttatatgatgctctttatggaacggatatgatatctgaagatgatggggctgatagaggaggtgcttacaatcccgtaagaggtgacaaagttatcgatttttcaaaaaactttttaaacgattaccttcctttgactgaaggtaaatatcaagatgttgtttcttttcaaatatcaaatggagtcttggaaatttctttatcagatcaatcaaaaacctctctaaaaaatgactcagcatttgttggttttaaaggtgatgaatcaaatcctgaaagcatattattgaaaaataatgatttacatgtagaaatcaaaattgatagaaatgactcagttggttccacagatcctgcaggaattaaagacgtttttctagaatctgctgtaaccactattcaggatctagaagattctgttgctgctgtgaatggcgaagataaaactgatgtttataaaaattggcttggcttaatgaaaggaacccttgcagaaactttcgaaaagggcgggtcaactcttacaagaagtctaaatgaagatttatcttttttatctccagatggaaaaccgatgacgattgcagctagaagtctaatgctagttagaaacgttggtcatttgatgactaatccagcggttttacttgacggtaaagaaataccggaaggaataatcgatgcaatgttcacaatcgcgataggtaagcatgatttagatcaaacgggatctgtccagaattctaaaacaggcagtatatatatcgtaaaacctaagatgcacggccctgaagaggttcagtttacttgtgatctattttccgatgttgaaagcgctcttggtttagaaaaaaataccgtgaagatagggataatggatgaggagagacgaacaacggtaaatttaaaagaatgcatcagagttgcaaaagaaagagttatttttatcaacactggatttttagatagaaccggcgacgagattcacacaagtatggaagctggcccaatgataagaaaggcagaaatgaaacagcaaccttggattttatcttacgaggattggaatgtagacaatggtttatcttcaggtttcaaaggaaaagcccaaattggaaaaggaatgtggcccatgcccgatatgatgttagatatgtttaatactaaaaccatgcatccaaaagcaggagcaaattgtgcttgggtgccttcacctactgcagcaaccttgcacgcaatgcattatcaccaaataagcgtctcctctgaacaatcagatttattaaaaagagagagggcaagtcttgatgatattttaacaattcctttattggaggatgcagggtcgctttcagccgatgaaatacaggcagaattagataataatgctcaaggaatattaggctacgttgtccgatggattgatcaaggaattggatgctctaaagttcctgatataaataacataggcttaatggaggatagagcaacttgcagaatatccagtcaacatatggcaaattggcttcatcacggactttgttcagaagaacaaattatagagaccatgaaaaaaatggctttggtggtcgacgagcaaaatgctggtgatccagaatatgtaaacatggctcctagtttcgatggcgtagcatttaaagctgcatgcgaccttgttattaagggaagagtccagcctagcggttacacagaacctattctccatgaaaaaagacaagagtttttaggcggctaat

SEQ ID NO: 238014 - DNA, 1258 bp, Unknown
  Bacterial polypeptide expressing nucleotide sequence isolated from the Sargasso Sea
aatgaataattttatacatattaatcaacttaaaatagatagtaatttatttaattttgtgaatacagaaattcttcctggcattgacatacaacaagatcaattttggaaaaatttttcaacaataattcaagaattagatcctataaataaaactttactagaaaaaagaaagaatcttcaattaaaattagataattggcatgaaacaaataaaggaaaagaaattgacatacatgaatataaacaattcttatctgatattaattatcttgtagaagaaaaagaagattttaaaataaatacagaaaatgtagatgatgaaatagctaagatatctggcccacaattagtcgttcctattacaaatgctagatatgctttaaatgcagtaaatgccagatggggtagtctatatgatgctctttatggaactaatgttattggtgaaatttctaaaacttctcaatatgatcctaaaagaggattaaaagttatagaatatgcaaaagaccatttagatcaaatagctcctttaaaagactctttgtggaaagaaataactaagataaaaattgaaaataaaaaaattaaatttttttattctgaaaattctttcactactttaattaatgagaatcaaattattggtgtaagatatgaaaatcaatatgaaatcaaagaattaattctattaaaaaataatttacatatcagagttcttatagatcctaatcatcaaataggtaaaaatgattctgctaatatttctgatattctaattgaatcggctatatcaactattttagattgtgaagatagtgtagcaacagttgatgctgatgataaaattgtgtcatatagaaattggttaggccttatgaaaggtgatttaaaatctgaatttctcaaaaataaaaaattagttaatagaactttaaacaaggatatagaatatgtttctttatcgggagaaagaaaatttttaaagtctagatcattaatgctaattagaaatgtgggacatttaatgacaactcctgctatcttaaataatgatgatcaagaaataggtgaaggattaatggatgctataattacaagcttaattgctctccatgatattaaaaagcaagacggaatgattaattcattaaaaaaatctatttatattgttaaacctaaaatgcatggtcctgaagaagttgaattcactgtttcattatttgaaaaaactgagaagctacttaaaccttga

SEQ ID NO: 238015 - DNA, 714 bp, Unknown
  Bacterial polypeptide expressing nucleotide sequence isolated from the Sargasso Sea
tggcgtatgaaaaaaacaatgttgatattggtctaaaatgtggtttttctggtaaagcacaaattggaaaaggtatgtgggctatgccagataaaatgaaagaaatgatgaaagataagattaatcatttaaaagctggagcaaactgtgcgtgggtgccttctcctacagctgcctcattacatgccctccactatcatcaaataaatatatttgatgaacaaaagaaaattataggtcgtgaacaaactaaattagatgaccttttaagtattcctatagctgatagacctaattggtcagttaatgaaattaacgcagagatatctaattctgcacagaccttgctaggttatgttgtaagatggatcgatcaaggagttggttgctcaaaagttcctgatattaacaacgttggacttatggaagacagggccactctaagaatctcatctcagcacattgctaattggatacatcatggagttacaacaaaaatccaagtaatggagattatgaaagaaatggccaaaattgttgataaacaaaatgaggcagatccagcatacaaaaaaatgtctgatgattttaaaaattcaattgcatttaaaacagcttgttctttaatatttgaaggtactgatcaaccgtccggatatactgagcctttattacataaaaacagaatattaattaaagctagtcagaattaat

SEQ ID NO: 238016 - DNA, 922 bp, Unknown
  Bacterial polypeptide expressing nucleotide sequence isolated from the Sargasso Sea
atggaaaattatattaaacgtggcaatcttaatatccacaatgctcttgataggtttctcagtgatgagatgttatcagggcttgatctaacctcagatgagttttggaaaaagtttgaaggtcttttagaggaattccatcaaagaaataaagatttactagcaagaagatctttattacaagatcaaatctctacttggcataagaataatgattttaatttaagtgaatataaaaagtttttacaagaaataggctacttagaagaagtacctgaagattttacaatcaaaacaatgaatacagatccagaaatttccagtattccaggacctcagcttgttgttcctattatgaatgcaagattttctttgaatgccacaaacgcaaggtggggcagcctttatgacgcactatacgggacggatgttatttcagaagatggaggtgcatcaaaagagggtgcatataatgaaataagaggaaataaggttattgatttttcaaagcaatttttagataactgtttcccaatcactgatcttagttataaagatattacaaatatttcaattgtggaccaaagattactttttcatgctgagcaagatcaaattacatatctaaaaaatgaagatcaattcaaaggatttaacggatctcctgaaaatccttcagaagttttgttagttaacaacaatcttcatttggaaattcaaatagaccccaatcatcctgttggtaaaactgataaagcaaatattaaagatattgttttggagtctgcagtttcaacaattcaagattgtgaggattcagttgccgcagttgatgctgaggataaagtaattgcctatagaaactggctaggtttgatgaaaggagatctttctgaaacatttaaaaaaaatggaaaacagc

SEQ ID NO: 238017 - DNA, 1573 bp, Unknown
  Bacterial polypeptide expressing nucleotide sequence isolated from the Sargasso Sea
aaggtcatcgaaaagtacagcccagtgaacaaaaagttgttagaaaaacgtgattatctgcaagatcaaattaatgactggcacaagagacaaaagagcaaagaaatcgatttaacaacttataaaaagtttctttatgaaattggttaccttgttgaggaaaaagaagattttaaaatacagacatcgggtgttgatcccgagattgggatggtatcaggaccgcaattagttgtccctgtaaccaacgcgcgatatgcgattaacgcggccaatgcgcggtggaacagcttgtacgatgcggtatacggttctgacgttttgggcgacgctcctccgcctggtcctttcagttccgagaggggtgaacgggttatatccttttctaaatcacacctagactctctcgctccactagaaaacggattgtggtctaatatttctaaaatagcaatccatgcgaatgaactggctttatttgaaaaagacgaacaaataaagcttaaagatcctgaacaattcgtaggtcatatcaaagaacacgatgtaggctcacttgaaataattctgataaaaaacggcctccattgtcgtatcgaaataaatcctaacggaactattggcgcaaaagatattgcaagcataaatgatatccaaatagagtctgcaattaccacgatcattgacttcgaggatagcgttgcgacagtcgatgctgaagataagataatggcctaccgaaattggttgggcctaatgaaaggtaatctctctgcaaagtttaaaaaagatggccagcatattgagcggtacttaaacagcgatcttgagattactgataggaaaggagttaaaaccttccttaagggaagatctttgctgctggcacgtaatgttggacatctaatgacaacgccatttgttttggatgaatacggcgaagaagtgggtgaaggtctagtcgatgctatttgtacagtattaattgcaaaacataacattgacctcatatcgggcccaaaaaactcaattcatgactccatatatattgttaagccaaagatgcatggtcctgaagaagtaagacttgcgaatgatgtcttcagtgaggtggagcagatgctgcagcttccgcgtaatacaatcaagataggaattatggacgaggaacgtcgcactagcattaatcttaaagagtgcatacgggaggctaaatcgagattagcttttatcaatacgggatttctagatcgaactggtgacgagattcatacttccatggaagctggtcctatggtcacaaaaaaagatatgaaaataacaaggtggattgatgcgtatgaaaataataacgtcgacgtaggtatagcctgtggcctcccaggtaaagcccagattggaaaaggaatgtgggcaatgccagatctaatggcagacttattcgaacagaagatagggcatccgagagcgggagccaattgtgcttgggtgccaagccctactgctgcaacgatccatgctttgcactaccatttggttgacgtcgcaaaagtgcaggaaactctcggtacga

SEQ ID NO: 238018 - DNA, 1161 bp, Unknown
  Bacterial polypeptide expressing nucleotide sequence isolated from the Sargasso Sea
tatgaaaattttttctaaatttttaaaatcatctacatccaaagcatctacatccaaagaaagaaaaattaatgaaataacattggatatttcagacaaccttaaagaatttgtaaaagatgagctattgccaggattaaacatatcgcctgaatatttttggagctcatttcaagaaattttaaatagttattctaaaaaaaataaagaattattagataaaagaaaagatttacaagaaaaaatcgatcactggcacatagaaaacaaagattttgaaatagagcaatataaaaaatttctcactgatatcggataccttcatcctagaagtaataatttttcaattaaaacatcaaatgtcgaccctgaaataagaaagattgcaggtcctcagcttgtggtcccggtcatgaatgcaagatttgcattaaatgctactaatgcaagatgggggagtttatacgatgccctgtacggcactgatatgataagtgaatctgaaggcgcaattagagaaggtggatataatcctattagaggtgatagggtaattgcttttgcaaaaaattttttagatgaaacgttccctcttgagaatggaacttttaacaaggcaaccaattttgaatttatcgatagtgaaattgttatcactcttaatgacggatcgaagactcatcttttaaacaaagatcaatatataggttatatggataagggagagggcgcttacggactgctttttaaaaataataatttacatattgagattcaaattgatagatctcatccaattggccaagatgatttagcagggattaaggatatattagtagaatctgcaattaccacaattcaagactgtgaagactcagttgcagcagttgatgatgaagacaaaattatcgtttatagaaattggctcggtcttatgaaaggtgacttaaaaagatcttttaataagaatggtaagtatatgacaagggaattgaatggtgatagaaggtatctattaaaaaatggaaaaatgatactgcttccaggaagaagtttattattagttagaaatgttggccatttgatgacaaatcctgctattaaggatgaaaatggtaatgaagtccctgaaggaataatggatacatttttactattgcg

SEQ ID NO: 238019 - DNA, 1455 bp, Unknown
  Bacterial polypeptide expressing nucleotide sequence isolated from the Sargasso Sea
tgtccctatttcaaaaataaaatggagtcaaataacaaaatttaaattagaggacaacaagcttgttttgcttgtaaaaaacgaaaaacattttcttaaaaattacgatcaatttattggctttcaaggagacaaaaataatccaaaatcaattttatttaaaaataataatctacatatagaaattgtgattgacccaaatagtaaaattggaaagatggacttggcaaatataagtgatgttattattgaatcggcaatttccacaattgtggacaatgaagattctgtggctgctgttgatggaaaagataaaattaaatgttaccgtaattggttagggttaatgaaaggtgaccttactgccaatatagaaaaaaaaggaaaaagttttgttagaaaattgaatcctaatcgaaactatatatctaaagatggaaaaaaaataagtttacatggaagagctcttcttttaaatcgaaacgtaggccatctaatgacaaatcctgcaataattcttcaagatgggtcggagatacctgagggtattatggatgcttttgtgtctactctttgtgctattcacgattttaaaaacaaaaataattcacgaactggatccttttatattgtcaaacctaaaatgcatggcccggaagaagttgcttttactgataatatttttggaaaagttgagtttgtattaggtttgaaaaaaaatacaataaaagtgggaataatggatgaagaaagaagaacaacggttaatttaaaagaatgtataagaaaagttaaagaaagaattgtttttataaatactggctttttagatagaactggagatgaaatgcatacctcgtttgaagctggaccaatgatatttaagggagcaatgaaaaaatctgtatggctaaacacttacgaagattggaatgtagatattggtttatcatgtggattttcaggaaaagcacaaataggcaaaggtatgtggccaatgcctgacagaatggctgacatgatgcagcaaaaaataaatcacccaaaatcaggtgctaattgtgcgtgggtaccttctcctacggctgctatacttcacgcaactcattaccacagagaaagtgtttttcaaaaacaatctgagattaagtcgagaaaaaaagctcagcttgaaaatttattaataataccaaaagcagacagacctaattggtcagtaagtgatattaataaagagttagaaaataatgctcaagggatattgggttatgtagtcagatggattgatcaaggagttggttgctcaaaggtgcccgatataaataatgtaggactaatggaagatagagcaacattaagaatatcctctcaacatattgctaactggttgcatcataacatatgtaataaagatcaggttatgagtgttatgaaaaaaatggctagaatagtaga

SEQ ID NO: 238020 - DNA, 1579 bp, Unknown
  Bacterial polypeptide expressing nucleotide sequence isolated from the Sargasso Sea
atggaaattcttgataccagcgtacctggaattgaaaaagttcttacagaagaatgccttgaatttatttatgatttagaaaaaaactttggtcacaaaaggaaagaattattaaaaataagagccgaaaaacaaaaagaatatgatgctggaaaattacctgattttccttctgaaactgaggaagtaagaaattcagattggaaagtggcgccaataccaaaggatttacaggatagaagagtagaaattacaggaccagttgatcgtaaaatggttattaacgctcttaactcaggcgcaaagacatttatgactgattttgaagactctatgtcgccaacttggaataatgttattaatggccaaattaatctgtatgatctttggagaaatcaaattgattttctcgatccaaataacggaaaagaatataaattgaatccagatcctgctgtattaattgtcagaccaaggggttggcatcttgaggaagctcatattgaaattgatggcgtaagaatttcaggtggtatatttgattttgctgtttacctttttcataatcatgaaaaattaaaagagaatggaacaggtccttatttctatctaccaaaaatggaaacatatctagaagcaagattatggaatgaagtgtttgtgtatgctcaggaaaaactaggtattgaaaatggcacatgtaaagcaacaattttaattgagacattacctgcagcatttcaaatggatgagatattatatgagttaaaagatcacatagttggtttaaactgtggtcgttgggattatatatttagctatattaagagattagctttaaatccgaactatattcttccagaccgctcacaagttatcatgggggatgcttttttaaactcctattcgttactattaataaaaacttgtcacaaaagaggtgccttcgctatgggaggtatggctgctcaaatacctgtaaaaaataatgatgaagaaaatgacaaagcatttgaaaaagtaagaaatgataaggaacgagaagttaataatggtcatgacgggacatgggtagcacatccaggattagttcctgtggcaatggaaatttttgataatcaattatctggtgataatcagctagatgtttctcttgataatgtaacaattactcaagacgatttactagaagtgcataaaggtcaaagaactgaagaaggaatgcgcgaatgtattaaggtcggcgttcaatatatcgaagcttggttagcgggtcgtggagctgtacctttgtacaacttaatggaagacgcagcgacagcagaaatatcaagagcacaaatatggcaatggttgaaacatgcaacaaaacttgatgacggaagaacggttaatgaggaattatttaaagatattttaactagtgaaatagataatttaaaaaatgtccttggcgatgatgtctgggcaaaaggtaaatatgaaaaagctgttgaaatatttgaaaaaatgtctatatctccagtttgcgaagaattcttgacacttcctgcttatgaagaaatagtgtcttcttagc

SEQ ID NO: 238021 - DNA, 1402 bp, Unknown
  Bacterial polypeptide expressing nucleotide sequence isolated from the Sargasso Sea
gcaggccctcagttagtcgtgccaatcaacaacgctcgctatgcacttaacgcggtaaatgcccgctggggaagcctttacgatgcactatacggcactgatgtcatcaacaatgaaggtggcgcagaagcgggaaaaagctacaaccccgtacgcggcgccaaagtcgttgcgaaagcgaaagactatctagatagcatgataccccttgcgaaaggcagccacgctgacgttactgagtataagattgaatcaggtaaattggcgatcactcttgtcgacggcgatgaaaccaccttagcaaacacagagcaatggcaaggctaccaaggtgacattagcgcaccgtcaagcctgctatttgcacacaacggtctgcattttgaaattcaactagacccgactcaccccattggcgagagtgatcccgcaaacgtaaaagacgtactggttgaagccgcattaaccaccataatggactgcgaagattccgttgctgctgttgacgctgaagacaaaaccttggtgtatagcaactggttaggcttaatgaaaggctctctaagcattgaaatgacaaagggcggcaagcagcttgttcgcgctatgcatgacgatagaagctaccagccgtctaaacacgtttcacaagacaagttaaaagacggcgaactagtactttctggtcgaagccttatgtttgttagaaacgtgggccaccttatgactaacaatgccatgctctttgacggcgaagaagtgccagaggggatcatggacggtttagtcacttcacttatcgcaaagcatgatcttttaggaaacagcaaatttaaaaacagccgcgaaggcagtatttatattgttaaacctaaaatgcacgggccagaagaagttgcattctctaacgcattgtttggtgctatagaaacgattatcgacgttccagccaacacccttaaaatgggcataatggatgaagagcgccgcacgagcatcaaccttcaagcgtgtattgccgaggctacttcacgcgttgtattcattaacacgggtttcttagacagaaccggtgatgaaattcatacctcaatgcttgccggcccttttgcagaaaaagccgcgctcaagtctatggcgtggattaaggcttatgaaactgcaaacgttgcagtaggccttcgttgtggtctttctggcaaagcccaaattggtaagggcatgtggccaatacctgacgaaatgcaaaatatgatgaccgccaaaataggtcaccctaaggccggcgctaatactgcttgggttccctcacctactgctgcaacactgcacgcgcttcattatcacgatgtaaatgtgtttgacgttcaaaagtcgctagatgaaaactttagtggccttg

SEQ ID NO: 238022 - DNA, 1546 bp, Unknown
  Bacterial polypeptide expressing nucleotide sequence isolated from the Sargasso Sea
attcaaaggatttaatggatctcctgaaaatccttcagaggttctattagttaataacaatctccatttggaaattcaaatagatccacgtcatcctgttggtaagactgataaagcaaatattaaagatattgttttggagtctgcagtatcaacaatccaagattgtgaggattcagttgccgcagttgatgcagaagataaagtaattgcttatagaaactggctaggtttgatgaaaggagatctttcagaaacatttaaaaaaaatggaaaacaactaacaagagtcctaaaagaagatagagaatatttagatactaatggaaattctttctctcttcctggaagaagtcttttacttgttaggaatgttggccatctaatgcaaaatccttcagtaatattagacaatggcgaagaggtttttgaaggaattttagatgctatgtttaccatatgtatcgctttatatgatttaaatgagctaaacacattgtcgaactcaaggaataaaagtatgtatatcgttaaaccaaaaatgcatggttctgaggaggtagctttcacttgtgatttatttgatgcagttgagcgattatttaatctagaaaaaaatactgtaaaagttggaattatggatgaggagagacgaaccactatcaatctaaaggcctgcatcgaaaaagctaaagaaagaataatttttataaatactggttttttagacaggacaggagatgaaatacatacgagcatggaagcaggcgctatggtacctaaatccgatatgaaagctcaatcatggataaacgcttatgaagactggaatgttgatataggattaagttgcggattaagcggtaaagcacagattggaaaaggtatgtgggcaatgccagacgaaatgaaagatatgatagagactaaaatagcccatccattatctggggcaacatgcgcatgggttccatcacctacagcggcaacacttcatgcaatgcattatcatgaggtcgatgtgctatcaaaacaagatgaactatcttcaagacagcatgctgatttagatagcatcttaacaattcctcttttaaagcaggatttagataaacaaacaattaggaatgagatagcaaacagtgctcaaggcattcttggttatgtcgtaagatggattgatcagggtattggatgttcaaaagttccagatattaataatattggtcttatggaagatagagcaacatgcaggatatcaagccagcatatttcaaactggattcatcatggcatttgttcggaggaagaggtaattgatatttttaaagagatggctctagttgttgacgaacaaaataaagatgattcagactatcaaaaaatgggatcaaatttttctggatttgcgtttcaagcttccctggatttagcaataaaaggagcttctcaaccaagtggatataccgagccgttgctacacaagtggcgattagaatttaagaaaaatactccaagaaaaaaacttaactttttttacatttag

SEQ ID NO: 238023 - DNA, 926 bp, Unknown
  Bacterial polypeptide expressing nucleotide sequence isolated from the Sargasso Sea
aatgatacatttagaaaacaaatttggaatacaaatttcaactgattttattgattttattgagcaagaggttttgcctgacacatctatttcggcagataagttttggtttggccttgcaaaaatggttaaggagctcactccgacaaacaagaaactgttggaaagacgaacttactttcaacgtcaaataaatgaatggcacagggcacacaaaggcaaggaattcaacttcgctgactacaaaaattttttatattcgattggctacatcgtaccagagaaggagccattttccatcgacactaaacaagtagatcctgaaatatcaaaaattgcaggtcctcagctagttgtgccaattatgaatgctcgctttgcattaaatgcagcaaatgcgcgttggggctctttgtacgatgctctttatgggactgatgcaatagaaccagtcgataaaacaacagcctattgcaaaaaaagggggcaaaaagtaattcaatggggtcgcaaatttcttgatgacgcctttccactaattaatggttcttggagcaaggtaactgaggtggccgtaaagggtggttgtcttgatctatccggtaaacagttgaagtcggaaaatagttttgttggatatgttgggaaaccttctcaacctacttgcttagttttgcgcaataacaatttacatgtgcggatcgaatttgatcgaaatagcgaggttgggcagtccgatttagctagtatatcggatatcgtgattgagtcagctatatcaactattatggattgcgaggacagtatttctgccgttgatgcttcggacaaaattactgcttatcgaaactggcttggaatgatgaagggcaatctgactgaagaaatatcaaagggagataaaactttcactcgaagattgaatg

SEQ ID NO: 238024 - DNA, 2152 bp, Unknown
  Bacterial polypeptide expressing nucleotide sequence isolated from the Sargasso Sea
atgggcgattcatttattaaaataaatactttatctgtttctaagaatttaattgattttgtaaaaaatgaacttcttacaggattagatgttaacgaaaaagatttctgggatggatttgataaaagtattaatgaacttgcaccaatcaataaaaaattattagaggttcgcgaaactcttcaatctgaaattgatttatggttaaaaaaaaacagaaatggagaatttaatcatcaagagtataagaattttttaaaagaaattggatatttaaaagaggaagggaatgattttaaaatagataccaaaaagcttgatagtgaaatttcaagcattgcaggtcctcaacttgtagttcctataatgaactctagatatacattaaatgctgctaatgctagatgggtaagtctttacgatagtttatatggaacagatttaattgagtcagaagaaactgggagtcaaaaatatgatcctctaagaggacaagaagtaataagatatgcacgcgaatttctaaatgaccacttctctatcaatgaaattcattggaaagatataaatggatttaaaataaagggaagtgacttgaaaattttaaaagatgataaagagtttgagctagtagataaaaataaatttattggatacagaggagaacctaataatccaacaacaataattttagaaaataataatttaaaaattgagataataattaacccaaaagcatttagtgctgtccaagatgctgcgggaataagtgacataattatagaatctgcaatatctacaatatgtgataacgaagatagtgttgcagcagtagattcagaagataaaatattatgttacagaaattggttgggtttgatgaaaggaactctaaaatctgtcttcgaaaaggatggaaaaactttagaaagaaaactaaatccagatagaagttatatttcaaaagataataaaaaagaaaaattacatggtagaagcttacttttaattaggaatgttggtcatctaatgactaattcagcaattattttagaagatggttctgaagtcccagaaggtatcatggatgcatttattacaactgctgcagcaattcatgatttaaaaagaaaaggtaactcaagaactggatctatatatattgtaaaaccgaaaatgcatggacctgaagagactgcttttacagataaaatattcacaagagttgaagaagtattaaaacttgaaaagaatacaattaaatgcggtattatggatgaagagagaagaacatctgtaaacttaaaagaatgtatcagaacattaaaaagcagggtttttttcattaatacaggttttttagacagaaccggagatgaaatgcatacatcaatggaagcaggtccaatgataaaaaaaggtgacatgaaaaaatcaaagtggatagctgcttatgaaaataacaatgttgttgttggtttaaaatgtggattttcaggtgttgcacaaataggtaaaggtatgtgggctatgccagataaaatgaaagacatgatagatcaaaaaatatcacatcttgaagccggtgcgaattgtgcatgggtaccatctcccacagcagcttctttacatgcaatgcattaccataagttaaatatttttgaaaagcacaaaaaattaaatgaaaataaaattaattacattgacaatttattaactataccaattgcagatagaccaaattggagcaaagaagaaataaataatgagttatgtaactcagctcaaacaatattaggatatgttgttagatgggtagatcaagggatagggtgctctaaagttccagacataaataatgttggattaatggaggatagagcaacactaagaatatcatcacaacatatagcaaactggttgcatcatggtatttgctcaaatagacaagttttagaaattctaaaaaaaatggcaaagattgttgataaacaaaatcaaggtgatccagaatatcaaaatatgtcacctaatttcgacaagtcaatatcttttaaggcagcatgtgaattgatttttcatggtaagtcacaaccttcgggctatactgaacctctattgcatttaaataggttaattaaaaaaagctaat

SEQ ID NO: 238025 - DNA, 2176 bp, Unknown
  Bacterial polypeptide expressing nucleotide sequence isolated from the Sargasso Sea
atgaaaactaaaaatttaaaagaatacacgagtgttggaagtctttatgtatcaaaagagctattaaagtttgtaaacaacgaggttcttaagggcacaaaaataaagccaaaaaatttttggagtggatttgaaaaatctttacacattttaaaaccaaaaaatgaaaagttaattgatataagagaaagtattcaaaaaaaaattgatgattggcatatacaaaacaaagataatgagttcaatttagcagcatataaaaagtttttatattctattaactatctaaaaaaagagggaaaaaacttcaaaatccaaacagaaaatgttgatgaagaaatatcaaaaacgccaggtccccaattagttgttccaatttcaaatgcaagatacgctttaaatgcagcaaatgcaagatggggaagtttatatgatgctttatatggaacagatgcaatcggctctgaaaaacttgataacagatacaatcctgtccgtggaggaaaagtcataaattattgtagagatttcttagatgaaatttttccattaaaaaatgcttcatggaaaaaacttagtgaattaaaaattgtaaaacataaattaattttaaaaattggtaaaaaaactatatctttgaaagataaaaagcagtttaaaggatatcgacaagataaaaaaggtcttaaaggtgttttgcttattaataatgggcttcatgtagaattaattattaatccttacgctttccatgcaaacaacgatcccattgggcttagtgatctagtaatagagtcagctgtctcaacaatcatagatcatgaagatagtgttgctgcagtagatgcaagtgacaaagtactgggctatagaaactggttgggtctaatgaaaggaaatttacaggtcaaatttgaaaaattaggaaaaaaatataaaagagttttaaactcagatagaaattacatttctcaaaacggaaaaaaatttaaattacatggaagagctcttttattaaataggaatgtcgggcacttaatgaaaaacccttcaattttattatcagataaatcagaagttcccgaaggtattatggacgcctttataatttctgcagcatgtttgcatgactttattaaaaaagggaactcaagaaaaaattcaatttatattgttaaaccaaagatgcatggaccggatgaagtcgcatttgctgatgaaatttttactcatgttgaaaatgttttaaaaatgaaaaagaatacaatcaaaattggaataatggatgaagaaagacgaacaagtgctaatttaaaagagtgtattagaaatgtaaaaagaagagttgtctttattaatactgggtttttagatagaactggtgatgagatacatacatctatggaatcgggtccagtgattaagaaaggcgatataaaaaattctgattggattaaagcatatgagaacaataatgttgttgttggattggaatgtggtttttctggtaaagcacaaattggaaaaggaatgtgggctgccccagatagaatggcagatatgttaaatgaaaaaataggacatccttcttctggagcgaattgtgcctggactccttcaccaaccgcagcaactttacatgcaactcattatcacaaagtgaacgttttcaaagttcataaaaaactatctaataaaagaaaatttgatttagacaatcttttaaaattaccaattattcgaggtccaaactggtcaatggatgaaattaaaaccgaacttgaaaataattgccaagggatattgggatacgttgtaagatggatagatagtggtgtaggttgttcaaaagttccagacataaacaatatcggtctcatggaggatcgtgcaactttaagaatttcttctcagcatattgctaactggttacaccataatatatgtactcctaatcaggtattagaaacattaaaaaagatggcaaaaattgtagatgatcaaaacaaaaatgatcctgaatacaaaaacatgtctgataattttgataattctattgcctttaaaactgcttgtgacttggtttttaaaggtaaggaccaatcatcaggttatacggaacctttgttgcacttgaacagatctataaaaaaaaatttaagtccctctagatagt

SEQ ID NO: 238026 - DNA, 614 bp, Unknown
  Bacterial polypeptide expressing nucleotide sequence isolated from the Sargasso Sea
gggaaatatgatggaccaaaagattggtcacccaaaatctggagctaattgcgcttgggtgccttctccaacagctgcaatattacattcgatgcattatcataaagtaagtgtttttaaggtgcaaaatgagattaaatctagagataaggctaaactagaggatattttagaaattccaaaagcagatcgacccaattggtcgatggaagatattaatcgagaattggaaaacaacgctcaaggaattttaggctatgttgtaaggtgggttaaccaaggtgtaggatgttcaaaagtacctgacataaataatattggtttaatggaggatagagcaacacttagaatttcatcacaacatatcgctaattggttgcaccacggtatttgcaaagaagaacaagtgatggaagtgatgaaaaaaatggctaaaattgttgataatcagaacaaaaatgacccaagctaccaaaaaatgtctgataattttaatgactcaatagcattttctgcagcatgtgatctagttttcaaaggcagagtccaaccctccggctacacagaacctttactacatcaaaaaaggttagaaagaaaaacttcaaattaat

SEQ ID NO: 238027 - DNA, 451 bp, Unknown
  Bacterial polypeptide expressing nucleotide sequence isolated from the Sargasso Sea
attgtcagacttattaactttgccaataacaaataaacctaattggacaaatgaggaaattaatattgagatatctaattctgctcaaactatcttaggttatgtagttcggtggattgaccaaggaataggctgttctaaagttcctgatattaataatattggtttaatggaagacagagcaacacttcgtatttcatcacagcacattgcaaactggttatatcacggtatatgcagcaggaaacaagtcctagaaattatgaaaaaaatggcaaaaattgtagataaacaaaatattcatgacaaaagttatgaaagtatgtcacctaattatgataaatcaatagcctttaaaactgcatgtgaattaatttttcagggtaaaaaccagccttcaggctatacagagccactattgcacttaaatagattaataaaaaaaaactaa

SEQ ID NO: 238028 - DNA, 1496 bp, Unknown
  Bacterial polypeptide expressing nucleotide sequence isolated from the Sargasso Sea
tatgaagaaaaaagagaaattcgttaaaatacttgatttatctgtatctcaagttcttttatcatttataaataaagaattattgccaggaacaaaaatttcaaaagatcatttttggagagaatttaataaatctgtacatgaattggctaaaaagaacaaggaacttattgatataagagaaaaaattcaaaaatcaattgactcatatcatctaggaaaaaagggaaaaaaaataaatttaaatgattacaaaagtttcttaaaaaaaataaattatttaaaaaaaaatggtccagatttcaaaatacaaacaaagaatgttgacaaagaaatttctagtatatgtggaccccagttagtatgtccagtttctaatgcaagatttttattaaatgctgcaaatgctagatgggtgagtctttatgatattctctatggagcaaatattatcccagaaacaaaaggtgcattaaaaggtaaaacttataatccaataagaggaggtaaagttatcgattatgcaagagaggttttggataaatatatcccccttaaagatcaaagttggaaaaatttaaaaaaaacaccttacattaataaaggaaaactaagtattaaactgaaaaatccaaatcaatttgtgggatttagaaaacaaaaaggcaaagtattttcattactttttataaataataacctgcatttagatattttgttcgatcaaaaaggtaatttagaagtaaataacccagatggaaatcaagatccacttaaaatacacgatatatttatagagtctgcaatttctacaatttgtgatcatgaagatagtgttgccgctgtagatgctgaagacaaagttttaggttatagaaattggctttccttaatgaaaggaaacttaacctcaaaattcaagaaaaataataaaactataataagaaaattaaatcaggatagagaatatttttctctgaaaggaaaaaaatttaaattacatggaagatcattactgctaaatagaaatgttggacacctaatgacaaacccagcaattcttttaaaagatggatccgaatgtccagagggaattttggatgcttttgttacatctgcagcgtgtcttcatgattttaaaagaaaaggaaactctagaactaactcaatttacattgttaaaccaaaaatgcatggccctgaagaatgtgaattcacaaataaaatttttgaaaaagttgaaaaagttttaaaacttaaaaagaaccaaatcttatgtgggattatggatgaagagagaagaacaactattaatcttaaagaatgtgttagagttttaaaaaaaagagtattttttatcaataccggttttcttgatagaactggagatgaaatacatacatcaatggaaattggtccaatgataaaaaagggagatatgaaatcctcaaaatggattagcgcatatgaaaataataatgttgatgttggactag

SEQ ID NO: 238029 - DNA, 2152 bp, Unknown
  Bacterial polypeptide expressing nucleotide sequence isolated from the Sargasso Sea
atgagagagcaatacatcaaaatccacaacttatcagtagcaaaaaatctagctgattttgttaaaaatgagcttttgttggatactaatgttggccctgatgagttctggaaaggctttgacaaagtggtgcacgaattagcaccaaaaaataaaaaattacttgaaatcagagaaacattacaacaagaaatagatctgtggcataaaaaaaatagagaccacgagattgactataataaatataaaaattttttggaagaaataggttatttaaaaaaagaaggtgaagattttaaaatagcaactagaaatttagatgaagaaatatctaatatagcagggccacaattagttgttccaataatgaactctagatatagcttaaatgctgcaaatgcaaggtgggtaagcttatatgacagtctttatggatcaaatataatagagtctgaagaaagtggaagtgaaaaatatgatcctttaagagggcaagaagtgatcaaatacactagaaactttttgaacaaatattttccaataaatgaccttgactggaaagatattactggtttagcagtaaataataaaaaactttcaatttataaggaaaatcaagaatataatttatcagatttagaaaagtttattggtcatagaggtgacgcaactaaaccaaatgctataatcttaaaaaataataatcttcatcttgaaataattattaatcctagggcatttagtgccgcaagagatgcggctggaataagtgatattataattgagtctgctgtttctacaatttgtgaccatgaggatagtgtggccgcagtcgatgctgaagataaagtaatttgttatagaaattggctaggattgatgaaaggaaatttaaagtcaatatttgaaaaaaacggtaaagaattagagagaaaacttaatccagatagaagttatatatcattgaatggtgaaaagttaaaacttcacgggagaagtcttttacttgtgagaaatgttggacacctaatgactaaccctgcaatcactttgaatgatggatcagaagttcctgagggaataatggatgcttttataacttcagcagcttgtattcatgatttgaaaagaaaaggtaattcaagagaagggtcaatttatatcgtaaaaccaaaaatgcatgggccagaggagactgaatttactaatttaatttttacaaaagtcgaagaagttttaaaattagaaaaaaatactattaagtgtggaattatggatgaagaaagaagaacatctgcaaaccttaaggaatgtattagaacacttaaagatagagtattttttatcaacactggatttttggatagaactggtgatgagatgcacacttcaatggaagctggacctatgatcaaaaaaggagatatgaaagagtctaagtggattaaaacttatgaggataataatgtagatataggcttaaaatgcggattttcaggggttgctcaaataggtaaaggaatgtgggctatgcctgataaaatgaacgaaatgatggaacaaaagattggacatgtcaatgcaggcgcaaattgtgcttgggttccttctccaactgctgctgcattacatgttatgcactatcatgaagtaaatgtatttgaaaaacaaaaagaaatattaaaaagagagccatcaaaattatctgatcttcttactattccgatagcaaatcgtcctaattggtctgttgatgaaattaatactgaaatttcaaattctgctcaaactattttgggttatgtagtcagatggattgatcaaggcataggttgttccaaagttccagatataaatgatattgggttaatggaagatagagcaactttgagaatttcatctcaacatatcgcgaattggcttcatcatggcttgtgttcgaatagacaggttcttgaaattttaaaaaaaatggcaaaagttgtagataaacagaatgaagacgactctcactacgaaagtatgtcaccagagtatgataaatctattgcttttaaagcagcatgtgaattaatttttcatggaaagtcacagccttctggctatacagaacctctattgcacttaaacagattaattaaaaaaagctaat

SEQ ID NO: 238030 - DNA, 1759 bp, Unknown
  Bacterial polypeptide expressing nucleotide sequence isolated from the Sargasso Sea
tatgagtaattcatttattaaaattaacactttatctgtttcaaaggatttagctgattttgtgaaaaatgaacttcttccaggattagacattaacgaaaaagatttctgggatggatttgataaaagtattaatgaacttgccccaattaataaaaagttattagaaattcgcgaaactcttcaatctgaaattgatttatggttaaaaaaaaatagaaatggagaatttaatcatcaagagtataagaattttttaaaagagattggatatttaaaagaagagggaaatgattttaaaatagatactaaaaagcttgatagtgaaatttcaagcattgcaggtcctcaacttgttgttcctataatgaactctagatatacattaaatgctgctaatgcaagatgggtaagtctttatgatagtttatatggaacagatttaattgagtcagaagaaactggaagtcaaaagtatgaccctttgagaggacaagaagtaataaaatatgctcgtaattttctaaatgatcacttctctatcaatggaattcattggaaagatataaatggatttaaaatagaggcgagtaacttaaaaatattaaaagataataaagagtttgagctagtagataaaaataaatttattggatacagaggagaagctaatagtccaacaacaataattttagaaaataataatttgaaaattgagataataattaatccaaaagcatttagtgctgttcaagatgctgcgggaataagtgacataattatagaatctgcaatatccacaatatgtgataacgaagatagtgttgcggcagtagattcagaagataaaatattatgttacagaaattggttgggtttgatgaaaggaactctaaaatctgtcttcgaaaaagatggaaaaactttagaaagaaaacttaatccagatagaagttatatttcaaaagataataaaaaagagaagttacatggtagaagcttacttttaattagaaatgttggtcatcttatgaccaattcagcaattattctagaagatggttctgaaatcccagaaggtatcatggatgcatttattacaactgctgcagcaattcatgatttaaaaagaaaaggcaactcaagaaaaggttctatatatattgtaaaaccaaaaatgcatggacctgaagaaactgcttttacagataaaatatttactagagttgaggaagtcttaaaacttgaaaaaaatactattaaatgtggtattatggacgaagaaagaagaacatctgtaaatttaaaagaatgtattagaacattaaagagtagagttttttttattaatactggctttttggatagaactggagatgaaatgcacacctcgatggaagcaggtccaatgataaaaaaaggtgacatgaaaaaatcaaagtggatagctgcatatgaagataacaatgttaatgttggtttaagatgtggattttcaggtgttgcacaaataggcaaaggtatgtgggctatgccagataaaatgaaagatatgatagatcaaaaaatatcacatcttgaagctggtgcaaattgcgcatgggttccatctcctactgcagcctctttgcatgcaatgcattatcacaagttaaatatttttgaaaaacataaaaaattaaataataataaaataaattacattgatgaattgttgtccattccgatagcagacagacctaatggagtaaagaggaga

SEQ ID NO: 238031 - DNA, 1495 bp, Unknown
  Bacterial polypeptide expressing nucleotide sequence isolated from the Sargasso Sea
tatggacaaacgaattgaaaccaataatctgaaaattaatgaaagtctctatgatttcatcaacactgaggttcttaaaggaattggaatatctaaagagtttttttgggaaggtttttctaaaataatttatgaattatcaccgattaacagaaaaattctagataaaagaaaaattatacaaaatcaaattaatacgtggcataaagaaaataagaccggtgattttaaattaaatgagtacaaattatttcttaaaaaaattggttatattattgatgaaggcaaagactttaaaatagaaacaacaaatgttgatcctgaaatctcaactatttgtggtccacaattagttgttccaataaccaatgcacggtatgcccttaatgcagtaaatgcaagatggggtagtttatatgattctctttatggcacaaatacattaggagaattacctaaaacaaaactgtatgatgaggaaagaggtaaacaagttgtaaaatatgctaaattacatttagataactttgctcctttaattagccaaagttgggaaaatataattaatattgagttggatgaaaaaaatttaaaattttttatagacaaaaaaaattttacaactttaaaagagcctgatcaaatcaagggttttaaaaaatatgaaaataaaaaaataaatgaactagttttagtaaaaaacaatttgcattgtagaattgtaatagatcctaataacaaaattgggaaaatggacaaagcgagcatttcagatataattttagagtctgcaatatcaacaatattggattgtgaagatagtgttgcaacagtcgacgcagaagataaaatattggcttataaaaactggttaggcttaatgaaaggagatttagaagcaaagtttttaaaaaattcccaaaagattaatagatctttaaacaaagatattgaacttattaatattaacgaagagaactttacacttaaggggcgttctttaatgctcataagaaatgttggccaccttatgacaaatccagcaattatagataagaatggtaatgaaatttatgaaggaataatggacgctgtaattagctcattaattgctttgtacaattttgataacaaaaattataaaaattctatttttaattctatatatattgttaaacctaaaatgcatggaccagaagaagttgatttcacatgtaatatttttagtaaaattgaaaatttattaaaccttccattaaatacaatcaaaataggtattatggatgaagaaagaaggacaagtgttaatttgaaagaatgtattagaagtgcaaaaaacagaatagcttttattaatactggttttttagatagaactggggatgaaattcatacctcaatgtatgctggtccactattaaaaaaaggtgaaatgaaaaattcaaaatggataaaatcttatgaagatcgcaatgttagaattggattgcaatgt

SEQ ID NO: 238032 - DNA, 574 bp, Unknown
  Bacterial polypeptide expressing nucleotide sequence isolated from the Sargasso Sea
atgcaggcgcaaatttgtgcttgggttccttctccaactgccgctgcattacatgttatgcactaccatgaagtgaatgtttttgaaaaacaaaaagcaatattaaaaagagagccatcaaaattatctgatcttcttactataccaatagcagatcgtcctaattggtctgttgatgaaattaatactgagatttcaaattctgcccaaactattttgggttatgtagtcagatggattgatcaaggtataggttgttctaaagttccagatataaacgatattggattaatggaggatagagcaactttgaggatttcatctcaacatattgctaattggcttcatcatggcttgtgctcgaatagacaggttcttgaaattttaaaaaaaatggcaaaagttgtagataaacagaataaacacgactctaactacgaaagtatgtcaccagagtatgataaatctattgcttttaaagcagcatgtgaactaatctttcatggaaaatcacagccttctggttatacagaaccacttttacatttaaatagattaattaaaaaaagctaat

SEQ ID NO: 238033 - DNA, 1288 bp, Unknown
  Bacterial polypeptide expressing nucleotide sequence isolated from the Sargasso Sea
aattggcttgaattaattaaaggaaatttaaattctgaatttattaaaaatggaaagaaatataaacgtaaactaaatccagatagaaaatattattcaccgtctggaaaagaacttaaactccatggaagatctttattattaaatagaaatgtagggcatctaatgactaatccttctattcttctcaaagatgggtcggaaatccctgagggaattatggatgcttttattacttcagctgcttgtattcatgatatcaaaagtagaaaaaattcaagaaagggttcaatttatattgtaaaacctaaaatgcatggtcctgaagaagcaagttttacaaatcttattttttcaaaagtagaagaagtattaaaattaaaaaaaaatacaattaaatgcggtattatggatgaagaaagaagaacttcagtaaacttaaaagaatgtataagagccttaaaaaatagagttttttttattaataccggttttttggataggaccggagatgaaattcacacatcaatggaagctgggcctatgataaaaaaagaagaaatgaaaaaaactaaatggatttccgcttatgaaaataataatatagatgttggtcttgaatgtggtttctctggtattgctcagattggaaaagggatgtgggctatgccagataaaatggcagacatgatgaagcaaaagatctctcatttagaatctggggcaaattgtgcatgggttccatctccaactgcagctggacttcattctcttcattatcatgaaattaatgtgattaaaaaacaatcagaattaaaaaaaagaaaaccagcaaaagaattagatctaataacaattcctattgctgatagagttaattggtcattagaagaaataaatgatgaaatttctaattctgcccaaactattttgggttatgtcgttagatggatagatcaaggtgtaggttgttcaaaagttcccgatatcaataatattggacttatggaagatagggcgaccctaagaatttcttctcaacaaattgctaattggttacaccatggaatttgtagtaaaaaaagagttttagaaataatgaaaaaaatggcaaaagtcgtcgacaaacagaacgaaaatgattcaaagtatgaaaaaatgtccccaaattttgaaaaatcaatagcgtttaaagctgcgtgtgaattaatatttcatggaagaaaacagccatctggatatactgagccacttcttcattttaatagattgcttaaaaaaaattaat

SEQ ID NO: 238034 - DNA, 1306 bp, Unknown
  Bacterial polypeptide expressing nucleotide sequence isolated from the Sargasso Sea
atgaaaataattgagaaaaatgggttaaaaattagttctgtaatgtttgattttgtgaataacgaagctattccagggactggattagacccagatcaattttgggcaaaattttcggaagttgttcatgagatggcgccaacaaataagtatctgattgaaaaaagagagactattcaaaaaaaaatagacgattggcataaatctaataaaggtaaagaatttaacaagacagaatatattaaatttttaaaatctcttgattatttaattgaggaaaaaaatgaatttaaaatagaaacctctaatgttgatgaggagatctcatctattgctggtccgcaattagttgttcccgtagataacgcgagatatgctcttaatgcagcaaatgctagatgggggagtttatacgatgcattgtatggaactgatgtaatacctggagagaaaaagaaagattatgatgttaaacgtgccacagaagttgttaattatgtaagagattttttagatgaaaattttcccctaaagcaaaaaagttggaaagaaatttcgaaaatttatttagagaataatcaactaattttatcggcagatgaagaaaaagatcaacttaaaaacgatcatcaatttattggatataaaggtgataaattaaaacctaattcaatattaattaaaaataacaaccttcacattgaaattgtatttgatccaaattctatggttgggaaaaatgataaagcatcaatttcagatattattatggagtctgccttatcaactatagttgataatgaggactctgttgctgcagttgatgctgaagataaagttaaatgttatagaaattggcttggtttaatgaaaggtgatttaatatctaaatttgagaaaaatggaaaaaaaattactagaaaattaaatccagatagaaaatatacttctaaaaatggagaaaaaattactcttcatggaagagcattacttttaaataggaatgtaggtcatttaatgacaaatccatctattatattaaaagatggtagtgaaattcctgaagggattatggatgcatttatatctaatctgtgtgctttacatgatttcaaaaataaaaataattcaagaactggttcggtttacattgtaaagccaaaaatgcatggaccagaggaggttgcgtttacaaacactttatttgaaaaagttgaagaaacactaggcatgaaaaaatattcaattaaagttggaataatggatgaggagagaagaacaacggtaaatttaaaagaatgtatca

SEQ ID NO: 238035 - DNA, 1315 bp, Unknown
  Bacterial polypeptide expressing nucleotide sequence isolated from the Sargasso Sea
gaagacaagataattgtttacagaaactggcttggcctaatgaaaggtgatttaaagagatcgtttgataagagtggaaaatttattactagagagcttagtgaagatagaaaataccttttaaaggatggaaaaatgatattacttcctggtagaagtttgatgctcgtcagaaacgttggccatttaatgaaaaacccagcaattaaggatcaaaatgacaatgaaatacccgagggaatcatggatgcattttttacctcatgcatagctatacatgacattattggaaacggaaaatataaaaattcaaaaactaaaagtatttatattgttaaacccaagatgcatggacctgaagaggttcaattttcatgtgatttattctcagaaattgaaaatgtttttaaactacctaaaaatacaatcaaaattggaattatggatgaagaacgaagaaccactttgaatttaaaagaatgtattgaggtagctaaagatagagtgatttttataaacactggatttttagacagaactggtgatgaaattcataccagtatggaggccggtccaatggttacaaaagcagaaatgaaaaaccaaaaatggattcaagcatatgaaaactggaatgttgatgttggtcttgaaactggcttcaagggtaatgcccagattggaaaaggaatgtggccaatgcctgatgaaatgttagagatgtataaaactaaaacaatccatcctaaatctggcgcaaattgtgcatgggttccttcaccaactgcggcggtaattcattcaattcattatcaccaaataaatgttcaatctgaacaagaaaagatacttgaaagagaaaatgcaaatttaaatgatttattagatattcctcttctaacaagcaactcacttacaaatgaagaaattaatgatgaattagaaaataatgctcaaggcatcttggggtatgtagtgagatgggttgatcaaggaataggatgctctaaagtgcctgatatcaataatgttggattgatggaagatagggcaacatgcaggatttcaagccaacatatttcaaactggttacatcatggactttgttcagaagaacaggttattgaaattatgaaaaagatggcaaaagttgttgatggacaaaataaaaacgatgttaattataaaaatatggcaccatcttttgatggtattgcttttaaagccgcatgcgacttagcaattaaaggaaaggatcagcctagtggttatactgaaccaattcttcatgaaatgaggttaaaaagaaaatagt

SEQ ID NO: 238036 - DNA, 1342 bp, Unknown
  Bacterial polypeptide expressing nucleotide sequence isolated from the Sargasso Sea
aatgaaggaaaaatacttaaaaattaaaaatttatcagtttcagaaaatttagcaaattttataaataaagaattactacctgggactaaaattaataaaaaaaaattttggacaggctttgataaatatattcatgagcttgcacccaaaaatataaaattgctgcagaagagagaaagattacaaaaagcaattgatacattacatatagaaaaaaaaaacgataaattaaatttaaggaaatatactaaatttttaataaaaattggttatttaaaaaaacctgggccaaactttaaaattaaaactaaaaatattgataaagaaatatcaagcatatgcggtccacagttagtttgtcctgtatcaaatgcaagatttttgttaaatgcagcaaacgcaagatgggtaagtttgtacgatagcttatatggaacggatgtaatcccagaaactagtggtgctgtaaaaggaaaaacttataatccgataagaggaaaaaaagtaattgaatattccagaatgcttttggataagtttgttcctttaaaaaaacaaagatggcaagacttaaaaaaaattccagaaattaaaaataatcaaataaatttaaaacttaaaaacccaaatcagtttgtaggttataataaaaaattcaataaaattagttctctgctgtttattaataatggtttgcatattgatattttatttgatcaagatggtaaaatggaaatcaataaccctgaaggtaatcaagacaaaattaaaatacatgatatttttttagaatctgccatttctactatttgtgatcatgaagatagtgttgcagcagtagatgctgaggataaagttctgggatataaaaattggcttggcttaatgaagggagatttaaaagtagaatttattaaaaatggtaaaaaaaaatcaagaaagttaaatttggatagaaactatatttctacgaaaggaaaaaaattaacacttcatggaagatctttattgttgaatagaaatgtaggacatttaatgacaaatccaggtattcttttaaaagacgggtcagaatgtcctgaaggaatacttgatgcttttgtaacttctctggcgtgtttacatgactttaaaaaaaaaggaaattctagagttaattctatctatatagtaaagcctaaaatgcacggacctgaagaatgtgattttactaatttaatatttgaaaaagtcgaaaaggttttaaatttaaaaaagaatcaaattctttgtggaaatatggacgaagaaagaagaacatccattaatttaaaggaatgtataagagtttttaaaaaatag

SEQ ID NO: 238037 - DNA, 1138 bp, Unknown
  Bacterial polypeptide expressing nucleotide sequence isolated from the Sargasso Sea
ttatttgatcaaaaaggaaatctagaagttaataacccttttggaaatcaagatccacttaaaatacatgatatatttttagagtcagcaatctctacaatatgtgatcatgaagatagtgttgctgctgtagatgcagaagataaagttttaggttacagaaattggctttctttaatgaaaggaaacttaacctcaaaattcaaaaaaaataataaaaatatagtaagaaaattaaatcctgatagagaatatatttcaaaaagaggaaaaaaatttaaattacatgggagatctttgttgctcaacagaaatgttgggcacctaatgacaaatccagcaattctcttaaaagacggatcagaatgccctgaaggaattttagatgcttttgttacctcagcagcgtgtctccatgattttaaaagaaagggaaattctagaactaactcgatttatattgttaaaccaaaaatgcatggaccagatgaatgtgcatttacagataaaatttttaaaaatgttgaagaagttttaaaacttaaaaaaaatcaaattctttgtggaattatggatgaagagagaagaacaactattaatcttaaagaatgtatcagagttttaaaaaaaagagtattttttatcaatacaggttttttagaccgaactggagatgaaatacacacctctatggaaattggaccaatgataaagaaaggtgatatgaaatcctcgaaatggattaaggcctatgaaaataataatgttgatatcggattagactgtggtttttctggaaaggctcaaattggaaaaggcatgtgggcaatgccagatttattaaaagagatgatggaacaaaaaatttctcatccaatgtcaggagctaattgtgcatgggtaccttctccaactgcagcagcaatccatgctatgcattatcatgcagtaaatgttttttctattcaccaaaaaataaaatttagaaaatctgctaaattagatgatcttctgacaataccagtagacaacaaaaaaaagtggtctaaagaagatatcgaaaaagaattaaaaaataatgcccaaggtattttggggtatgttgttagatgggtggatcaatcggtaggttgctcaa

SEQ ID NO: 238038 - DNA, 2155 bp, Unknown
  Bacterial polypeptide expressing nucleotide sequence isolated from the Sargasso Sea
actgaaatatgggaacttaaccgttgctaaagaattggatgaatttttaagaagagaagttgtagatggaattgatgttgatgctgataacttttggaaagccttagaagttattctcgatgattttggtccaagaaacaaagaactccttcaaaaaagaaaagatattcaagaccaaatagatcaatggcatctttccagaaaagacaaacctcataatccagaggcgtatataagttttttaaaggagataggttatctattagaagaaggcgaagattttgaaatctctactgataacgtagatgatgaaattaaaactattgcaggtgcgcaattagtagttccggtaatgaacgctagattctctttaaacgccgctaacgcaagatgggggagtttatacgatgccctttatggaacggacatgatctctgaagaggaaggtgctgagagaggaggagcttataatccaattagaggaagcaaggttatagaattctctaagaactttcttgatgacagtgttccattaagttctgggtcttacgcagaagtgacaggttttaggattaatgataataatttagatatcacacttaccgatcaatccacagttagtttagctgataaagaaaagtttgtaggctttataggcgatcctgataatccaagtggaatattattaaaaaacaataacttacatatagaaattcaagtagataaagaggattctgtaggcaaagatgatcctgctggaataaaagatgtgatggtagagtccgctgtaactaccattcaagatttagaagattcagtcgcagctgtggatgcagaggataaaactatagcttacagaaactggttgggtttaatgaaaggggatttaaaagaaacttttgttaaaggagatcatgaaatgacacgatctctcaatccagatagagaatactccagccccgaaggagatagattaactttagcaggaagaagtgtgttgttagtaagaaatgttggtcatcttatgactaatccagctgtgcttgataaggagggtaatgagattcctgaaggaattttagatgctatgttcactatctgcattgctaaacatgatttgatgcaaacaggcaacttgagtaattcaagaacaggaagtgtttacatagttaaacctaaaatgcatggtccggaggaagttcaatttacctgtgacttatttgaagccgtagagaaagctcttgatataaaacctctaacagtgaaagtaggcatcatggatgaagagagaagaactactgttaatttaaaggaatgcattagagcagctaaagacagagttatttttattaatacaggattcttagatcgaacaggtgatgagatccataccagtatggaagctggtccaatgattccaaaggctctgatgaaacaacagccctggataaatgcatatgaggattggaatgtagatgtaggtcttgaaacaggatttagtggtaaagcacaaataggtaaaggtatgtgggctatgcctgatgaaatgctaggaatgtatgagaataaatcaatgcatcctgaggcgggcgctaactgtgcatgggttccttctcctaccgctgccaccttgcatgctattcattatcaccaagtcttggttagtgaaagacaatcaacaattaaatccagaactaaggcagatcttaatgatattcttactatacctttactagatgatgtttcgtctttaagtgaacaggacatacaagaagagttggacaataactgccaaggcatattaggttatgttgtgagatgggtagacctaggtataggctgctccaaggtgcccgatatcaataatgttggtttaatggaagatagagcgacttgtcgaatatcaagtcaacacatagccaactggttacatcacgacatttgtacagaagaacaagttattgagaccatgaagaagatggcaataattgttgataagcaaaatgaaggagactctgaatatactaatatgtcaccaagttatgatggcatagcattttctgcagcttgcgagttggcggttaaaggaagaacacaacctagtggttacactgaacccattcttcattcgaaaaggttaatatataaatcttaa

SEQ ID NO: 238039 - DNA, 1668 bp, Unknown
  Bacterial polypeptide expressing nucleotide sequence isolated from the Sargasso Sea
tatggaaaattatattaaacgtggaaatcttaatatccacaatgctcttgataggtttctcagtgatgagatgttatcagggcttgatctaacctcagatgagttttggaaaaagtttgaaggtcttttagaggaattccatcaaagaaataaagatttattagcaaaaagatccttgttacaagatcaaatctcaacttggcataagaacaatgattttaatataaatgaatataaaaagtttttacaagagataggttacttagaagaagtacctgcagattttacaattacaacaaggaatacagatcctgaaatctcgagtattccaggacctcaacttgttgttcctatcatgaatgcaagatttgctttgaatgcaaccaatgcaaggtggggcagtctttatgatgcactgtacgggacggatgttatttcagaagacggaggtgcatcaaaagagggcgcatataatgaaataagaggaaataaggttattgatttttcaaagcaatttttagataactgtttcccaatcactgatcttagttataaagatattacaaatattacaattgtggaccaaagattactttttcatactgagcaagatcaaattacatatctaaaaaatgaagatcaattcaaaggatttaacggatctcctgaaaatccctcagaagttttattagttaacaacaatcttcatttggaaattcaaatagaccccaatcatcctgttggtaagactgataaagcaaacattaaagatattgttttggagtctgcagtttcaacaatccaagattgtgaggattcagttgccgcagttgatgctgaagataaagtaattgcctatagaaactggctaggtctgatgaaaggagatctttccgaaacatttgaaaaaaatggaaaacagctaacaagagtcctaaaaaaagatagagaatatttagatactaatggaaattctttttctcttcctggaagaagtcttttactcgttaggaatgttggacatctcatgcagaatccttcagtaattttggacaatggtgaagaggtttttgaaggaattttagacgctatgtttaccatatgtatcgccttatatgatctaaataagctaaatatattgtcgaattcaaggaacaaaagtatgtatatcgttaaaccaaaaatgcatggttctgaggaggtagctttcacttgtgatttgtttgatgcagttgaacggttatttaatcttgaaaaaaatactgtaaaagttggaattatggatgaagagagacgaaccactatcaatctaaaagcttgcatcgaaaaagctaaagaaaggataatttttataaatactggttttttagacaggacaggagatgaaatacatacgagtatggaagcaggtcctatggttcctaaatccgatatgaaagctcaatcatggataaatgcttatgaagattggaatgtagatataggattgagttgtggattaagcggcaaagcgcagattggaaaaggaatgtgggcaatgcctgacgagatgaaagatatggtagagactaaaatagctcatccattatctggtgccacatgcgcatggggtcccatcacaacagcggcaacacttcatgcaatgcattatcatgaggtcgatgtgat

SEQ ID NO: 238040 - DNA, 1492 bp, Unknown
  Bacterial polypeptide expressing nucleotide sequence isolated from the Sargasso Sea
acttttattcgtaaataacaaccttcatatagatattttgtttgatcaagaaggagatctagaaataaataatcctgacggtaaccaagataaaataaaaatacacgatattattttagaatctgcgatttcaactatttgtgatcatgaagacagtgtagctgctgtagatgccgaagataaagtcctaggatatagaaactggctaggtttaatgaaaggtaacttaaaagtggaatttaaaaaaaaaggaaaaaaaattactagaaaactaaatcctgacagaagttatacatctccgcaaggtaaaaaatttaaattacatggtagatcattattgttaaatagaaacgttggtcatctcatgaccaatccagccattcttttaaaagatggctccgaatgtcccgaaggtattctagatgcatttattacctctgctgcatgccttcatgattttgaaaaaaaaggtaactctaaaaaaaattccatatatatagttaaacctaaaatgcatggacctgaagaatgtgaattcactgacttgctttttaaaaaagtagaaaaaaatttaaatttaaaaaaaaatcaaattcttattggaataatggacgaggagagaagaacttctgtaaacttaaaagaatgtattagaactctaaaaaatagagtcttttttataaatacaggttttttagatagaacaggagatgaaatgcatacatcaatggaagtaggcccaatgattaaaaaagcaaagatgaaatcatcaaaatggatttcagcttatgaaaataataatgttgatattggactttcttgtggttttttgggaaaagctcaaataggtaaaggtatgtgggctatgccagatttaatgaaagaaatgataaaagaaaaaattgcacatccaaaagctggagcaaactgtgcctgggtcccaagcccaacagcagcaacacttcatgctatgcactatcatcaaattgatgttcaacaaattcaaaaagacattatgtctaaaggtgaaaggggtaaacttgaagatctactaacattacctcttttaaataggcaaaatttatcagatgaagatattaattcggagattgaaaataatgctcaaggtattttgggttatgttgtacgttgggttgatcaaggtattggctgttctaaggttccagatataaataacataggtttgatggaagatagagcaacttgtagaatttcttcccaagcaatagcaaattggttagaacacgggattgttaacaaggaacaaattttaaatactttaaaaaaaatggccgttgtagttgataaacaaaacaaagaagatccaaattatatttcaatggctccaagttttgatacaatggcatttaatgcagcaaaagatcttatttttgatggtattatgcagccttcaggctatactgagccaatacttcataaaaaaagattagaattcaaaaaaaaagtataa

SEQ ID NO: 238041 - DNA, 1486 bp, Unknown
  Bacterial polypeptide expressing nucleotide sequence isolated from the Sargasso Sea
tggcatctatcaaataagagtgttgattttgataaaaaaaaatattttaattttttaaaatcaataggatacattgttgatgaaaaagaagattttaaaattagcacctcaaatgttgatgaagaaatctcttcaatagctggtccacaattagttgtaccagttgataatgcacgatacgctttaaatgcagcaaatgctcgttggggaagtttatacgatgctctctatggaactgacacaatcccaggaaatatagataaaacttacagccagaataggggaaaaaaagttataaactatgtaagagagcttttggataatataactccactagaaaaaggaagctggaaagaaatatcaaaaattgaagttgaaaaaaataatttactttttctgattgataaaaaaaaagaaaaacttaaaaataaagatcaatttgttggttttgttggtgaaaaaagtagtcctaagtcagtattattaaaaaataataaattacatatagacattataattgatcctaatagcaacataggcaaaaatgataaaagcggtatatcagatgtaatgattgagtctgctatttctacaattattgacaatgaagattccgtagcagcagtagattctgcagacaaagttaaatgttacaaaaactggcttggcctgatgaagggaaatttagaggcagaaattaaaaagaatggaaaaaaatttattagaaaactaagtcctgatagaaaatatacagcaccagatgggtcgaagatattgttacacggtagagctttgttgcttaacagaaatgtaggccacttgatgacaaatccagctataatcctaagcgatggttcagaaattcccgaaggtataatggatgcatttgtttcaactctttgtgccatgcatgactttaaaaacaaaaaaaattccagaacaaattctgtatatatagttaagccaaaaatgcacggtccagaagaggttgaatttactaataatgtttttaaaaaagttgaagaagttttgggattaaaaaaatattccattaaagttggaataatggacgaagaaagaagaacaacggtaaatttaaaagagtgcattagaaaagttaaagaaagagttgtcttcattaatacaggttttttggataggaccggtgacgaaatgcatacttcgtttgaggctggaccaatgatttttaaaggtgaaatgaagaaatctaaatggcttaatacctacgaagattggaacgttgatattggtttggcatgcggattttctggtaaagcacaaataggaaaaggaatgtgggctatgcctgacaaaatggctgatatgatgaagcaaaaaataggtcatcctagatcaggtgctaattgtgcatgggtaccttctcccacagcagcaactcttcacgcaactcattaccacaggttagatgttttcaaaaaacaatctgaacttaaatctagaaaaa

SEQ ID NO: 238042 - DNA, 2206 bp, Unknown
  Bacterial polypeptide expressing nucleotide sequence isolated from the Sargasso Sea
atgaattttttaaataaatttataaaaaaatttcagtcaagtgaaaaaaacctcgaacagagcgcgaccaataatttaaaaatttcgcctaacttagatgaatttgtaaaaaaagagttagtgcctggattaaatatctcaagtgattacttttggaaaacttttgaggatattgtcgaaagattttcagaaagaaatagagaactgcttaatgaaagagaaaatcttcaaagcaagattgatgattggcatattcaaaataaagattttaatttagaagaatataaaaacttcttaactgatattggctatattcaccctcgaagctctgactttaaaattaaaacttggaatgttgacccagagataagaaagattgctggtcctcaactagttgttcctgtaatgaatgctagatttgcactaaatgctactaatgcaagatggggtagtctatacgatgctttatacggaacagatattattagtgattcaaatggagctgaaagagaaggtggatataacccaattagaggtgataaggtcattgctttttcaaaagaatttctcgataacacaataccccttcaatttggtaagtacgaaaacgttattaattttgaatttgtagacagtgaaatattaatgacccttaatgatggaaaaaaagtaaacctcaaggagaaagaaaaatatattggttacatggataaaggagagggagcatacggattacttttcaaaaataataatctgcattttgaaattcagatagataaaaatcatcctattggtcaagaagatccagctggtataaaagatattttaatggaatcagctataacaactatccaagattgtgaagattctgttgctgcagttgatgatgaggacaaaataattgtttacagaaattggctaggcttaatgaaaggtaatctaaaaagaacatttgaaaaaagtggaaaatctattaccagagagcttaatcctgaccgcaaatacttactcaaaaatggaagaatgatacttttgcctggaagaagtatgctgcttgtaagaaacgttggccacttaatgactaatcctgcagtaagagacaagaatggtaatgaagtatttgaaggaataatggatgcagtattcacaatatgcataggaattcatgatttagttggcaacggaaaatacaagaactcaaaaacaaaaagtatttatattgttaagcccaaaatgcatggtccaaaagaagttaaattcacatgtgatctctttgcagcgattgaagatgcttttaatttacctatgaacacagtaaaagttggaattatggatgaagaaagaagaactactgtcaatctaaaagagtgtatagaggtagcaaaacatcgtgtaatttttattaacactggttttttagatagaactggtgatgaaattcataccagtatggaagcaggccccatggttacaaaaactcggatgaaacaagaaaattggattaatgcatacgaaaattggaatgttgatattggtcttgaaacaggatttaaagggaatgcacaaataggcaaaggaatgtggcccatgcctgatgagatgttagaaatgtataaagctaaatcagttcatccaagatctggagctaattgtgcctgggttccttctccaactgctgcaacaattcatgcgattcattatcatcaaatttatgttcaaagtgaacaagataaaattttaaatagagataaagctagcttaaatgaccttttaaaaattccattaattaaaagttatgaaatgccctcagctgaggaaatacaagaagagcttgataataatgctcaagggattcttggttatgtagtcagatgggttgatcaagggataggttgttctaaagtacctgatctaaatgatataggattgatggaggatagggcgacttgcagaatatctagccaacatattgcaaactggcttcatcatggactttgttctgaaaagcaagtaattgaaacaatgaaaaaaatggcaaaagtcgtagacttgcaaaacaaagatgatgttaactataaaaaaatgtcacctgcttatgatggtattgcatttaaagcggcatgcgatcttgccataatgggaaggacgcaaccaagcggatatacagagccaattcttcatgagatgagattaaaacgaaaatgat

SEQ ID NO: 238043 - DNA, 2152 bp, Unknown
  Bacterial polypeptide expressing nucleotide sequence isolated from the Sargasso Sea
atggcagaaaaatacataaatattcacaatttgtctgtttctgaaattttgtatacattcataaatgatgaagtgctaccagggacggaaattaataaatcaaacttttggtctggctttgataaagctgttcacgaactaacgataacaaataaaaaactaattaagattagagagcggattcaaattgatattgatagatggcatttagacaataaggataagaaatttaatcaaaaaaactatcaaaagtttttaaaagaaataaattacttaaaagaagatcaaggtaattttaaaataattacaaaaaatgtagatgatgaaatatctaaaatagcaggtccacagctagtagttcctatcatgaattctagatacgtactaaacgcagcaaatgcaagatggatgagtttatatgatagcctttacggaacagatgtaattgagtcagaggagtccgcaagtgagagatatgatcctgaaaggggcttagaggtaataagatttacaaaaaaatttttagacaatcatttctctttgtcaaatatgagctggaaggatgttactgaaataaaagttgataaaaataatttaaatttaagttatggtaataaaataacaaatttaaaagatgaggaaaaatttataggattcaggggagatctaaaaaaaccatctgcagttattttaaaaaataataatcttcatgtagaaattataattaatccaaatgcattcagtgctaagagtgacgcagcaggaatatcagatattattctcgagtctgcaataacaactatatgtgatcatgaagattcagttgctgcagttgatgctaaagataaagtaattggttatagaaactggctcggtctgatgaaaggaaatttagtagcaagatttgaaaaaaacggaaaaaaactcattagaaaattaaatccagatagaaaatttaaattaaaaaatggtaatgagtctaaacttcatggcagatctttattgctcaatagaaacgttggacatttaatgacaaacccagcaatacttcttaaagatgggtctgaaattcctgaaggtataatggatgcttttataacaagtctttgttcgttgcatgactttcaaacttgtaaaaattcaaaaaaaaattcaatttatattgtaaaaccaaaaatgcatggaccagacgaaacttcatttactaatgaaatttttaataaagttgaggatgttttagggttaaaaaaaaatacaattaaatgtggaataatggatgaggaaagaaggacttctgccaatctaaaagagtgcattagatctttgaaagaaagagttttttttattaacacaggttttttagatagaacaggagatgaaatgcatagttccatggaggcgggaccgatgataaaaaaaggagatatgaagtcatcaacgtggataaatgcttatgagaataacaatgtagatatagggttagagtgtggtttttctggagttgctcaaattggcaaagggatgtgggcaatgccagataaaatggctgatatggttaatcaaaaaattgtccacttagaagctggcgccaattgtgcttgggtaccttcacctactgcagcagcacttcatgcactccattatcataaaattagcgtttttaaaaaacatcaagaattaaaaaaaaggaagaaaactccactatcacagttattaactatacctgtggttaataacccaaaatggaatattgaggaaataaataaggaaatttcaaattcagctcaaactattttaggttatgtggttagatggatagaccaagggattggatgttcaaaagtaccagatttaaacaacattggtttaatggaagatagagcaaccttaagaatttcttctcaacatatagcaaattggttgcatcatggagtttgtagtagaaaacatgttctagaaataatgaaaaaaatggcaaaggtagttgataaacaaaatgaaaaggacaaaaattatcaaaatatgtctcctcaatacgataaatcaattgcgtttaagactgcctgtgaacttatattccaaggaaaaagtcagccatcaggttatactgaacctttacttcatcttaatagattgataaaaaaaaattagt

SEQ ID NO: 238044 - DNA, 1008 bp, Unknown
  Bacterial polypeptide expressing nucleotide sequence isolated from the Sargasso Sea
agaagggtcaatttatattggttaaaccaaaaatgcatggtccagaggaaacagaatttactaatttaatttttacaaaagttgaagaagttttaaaattagaaaagaatacaattaagtgtggaattatggatgaagaaagaagaacatctgcaaacctaaaggaatgtattagaacacttaaagatagagtattttttatcaacactggatttttggatagaactggtgatgagatgcacacttcaatggaagctggaccaatgatcaaaaaaggagatatgaaagcatctaaatggattaaaacctatgaagataataatgtaaatataggcttaaaatgtggtttttcaggggttgctcaaataggtaaaggaatgtgggctatgcctgataaaatgagcgaaatgatggaacaaaagattggacatgtaaatgcaggcgcaaattgtgcttgggttccttctccaactgccgctgcattgcatgttatgcactatcatgaagtaaatgtatttaaaaaacaaaaagaaatattaaaaagagagccatcaaaattatctgatcttcttactattccgattgcaaatcgtcctaattggtctgttgatgaaattaatactgaaatttcaaattctgctcaaactattttgggttatgtagtcagatggattgatcaaggcataggttgttccaaagttcccgatataaacgatattggattaatggaagatagagcaactttgagaatttcatctcaacatatcgcaaattggcttcatcatggcttatgctcgaatagacaggttcttgaaattttaaaaaaaatggcaaaagttgtagataaacagaatgaagatgactctaactacgaaagtatgtcaccagagtatgataaatctattgcttttaaagcagcatgtgaattaatttttcatggaaagtcacagccttctggctatacagaacctctcttgcatttaaacagattaattaaaaaaagctaat

SEQ ID NO: 238045 - DNA, 1042 bp, Unknown
  Bacterial polypeptide expressing nucleotide sequence isolated from the Sargasso Sea
atgacggaaacactgaaatatggaaacttaacagtagcgaaagaattggatgagtttctaagaactgaagttataaacggtatcgatgtggacgcagaccacttttggaattctttagaaactatacttgatgaatttggtcctagaaataaagatcttcttcagaaacgagaagatatccaagacaagatagatcaatggcacctttcaagaaaagatgagctccatgatcaagaagcttacataagttttttaaaagagatcaattacctgctagatgaaggtgatgacttcgaaattactaccgcaaacgtcgatgatgaaataaaaactatagctggtgcacaacttgtggttcctgtaatgaacgcaaggttctctttaaatgcagctaatgcaagatggggaagcttatatgatgctctttatggaacggacatgatatctgaagagggtggcgctgagcgaggaggggcttacaatcctgttagaggagataaggtaatagagttttctaagaactttcttgatgagactatctcattaagttctggatcttatgcagaagtaacaggttttaaggttagtgctaataatttagacataactctgactgatcaatcgacagttggtttaaaggatgaaggacagttcgttggttatttaggggatcccgataatcctagtggtatattgttaaaaaacaataacttacatattgaaattcaagtagataaagaagattcagtaggtaaagatgaccctgctggaataaaggatgtgatggtagagtctgccgtaacaaccatacaagatttagaagattcggttgctgcagtggatgctgaagataaaactatagcttacaggaactggctaggtttaatgaaaggagatttgaaagaaacatttgtaaagggagatcaagaaatgacaagatcccttaatgcagatagggaatattctagatcagacggcgagtcgttaactttaccgggaagaagcgttttacttgtcagaaacgttgggacatctcatgact

SEQ ID NO: 238046 - DNA, 937 bp, Unknown
  Bacterial polypeptide expressing nucleotide sequence isolated from the Sargasso Sea
actgagaagctacttaaaccttgaaaaaaatacaatcaaaattggtattatggatgaagaaagaagaactagtataaacttaaaagagtgtatacgtgctgctaaatctagagtagcttttataaatactggttttttagatagaactggtgatgaaatacatacctcaatgtttgctggtccttttgttactaaaggggaaatgaaaaattctacttggatcaaagcttatgaaagcagaaatgtaactataggtttaaagtgtggacttcagggcaaagctcagattggtaaaggaatgtgggcaatgcctgacttaatgaaagaaatgatcgatcaaaagattaatcatttagaagctggtgcaaattgtgcttgggttccaagtccaacagctgctactttacatgctcttcattatcatcatctaaatataatagatgttcaaaatgatataatgaagaaagaagaaaaaaatactatcgatgatctaattacattaccactacttaacagacagaatctatcagatgatgaaattaattctgaaatagaaaataatgttcaaggtattctaggatatgtagttagatgggttgatcagggtattggatgttcaaaagttcctgatattaataatataggtttaatggaagatagagctacttgtagaatttcctctcaagcgttagctaattggctcaaacatgaaattatttctgaaaaacaagttgttaatgctcttatgaaaatgtcaaaaatagtagataatcaaaatgttaatgattcaaattataaatctatgtcagaaaattttgactctttatcttttaaagctgcaaaagaattaatttttgatggaacagatcaaccttcaggatatactgaacccatacttcatgaaaaaagattagaatataaaaaaattaataattaa

SEQ ID NO: 238047 - DNA, 1067 bp, Unknown
  Bacterial polypeptide expressing nucleotide sequence isolated from the Sargasso Sea
ggatctagaagattctgtcgctgctgtgaatggcgaagataaaactgatgtttacaaaaattggcttggtctgatgaaaggaacccttgcagaaactttcgaaaagggcgggtcaactcttacaagaagtctaaatgaagatttatcttttttatctccagatggaaaatcgattacgattgcagctagaagtctaatgcttgttagaaacgttggtcacttgatgactaatccagcggttttacttgatggtaaagaaatacccgaaggaataatcgatgcaatgtttacaatcacgataggaaagcatgatttagatcaaacgggatctgtccagaattctaaaacaggcagtatatatattgtaaaacctaagatgcacggccctgaagaggttcagtttacttgtgatctgttttccgatgtagaaagcgctattggtttagaaaaaaataccgtgaagatagggataatggatgaggagagaaggacaacggtaaatttgaaagaatgcatcagagttgcaaaagaaagagttatttttatcaacactggatttttagatagaaccggcgatgagattcacacaagtatggaagctggcccaatgataagaaaggcagaaatgaaacagcaaccttggatcttatcctacgaggattggaatgtagacaatggtttatcttcaggctttaaaggtaaagctcaaattggaaaaggtatgtggcccatgcccgatatgatgttagatatgtttaatactaaaaccgtacatccaaaagcaggagcaaattgtgcttgggtgccttctccaacagcagcaaccttgcacgcaatgcattatcatcaaataagtgtctcctctgaacaatcaaatttaataaaaagagatagggcgagccttgataatattttaacaattcctttattagaggatgcagcatcgctttcagccgacgaaatacaggcagaattagacaataatgctcaaggaatattaggttatgttgtcagatggattgatcaaggaattggatgctctaaagttcctgatattaacaacatag

SEQ ID NO: 238048 - DNA, 1918 bp, Unknown
  Bacterial polypeptide expressing nucleotide sequence isolated from the Sargasso Sea
ttcaacttcgctgactacaaaaaatttttatattccattggctacatcgtaccagagaaggagccattttctatcgacactaaacaagtagatcctgaaatatcaaaaattgcaggtcctcagctagttgtgccaattatgaatgcccgctttgcattaaatgcagcaaatgcgcgttggggctctttgtacgatgctctttatgggactgatgcaataaaaccaatcgataaaacaaaaacttacaacaaaaatagggggcaaaaagtaattcaatggggtcgcaaatttcttgataacgcctttccactaatcaatggttcttggagcaaggtaactgaggtggccgtaaaggatggtcgtcttgaactatctggtaatcagttaaagtcggaaaatagttttattggatatgtcggaaaacctcttcaacctacttgcttagttttgcgcaataacaatttacatgtacggatcgaatttgatcgaaatagcgaggttgggcagtctgatttagctggtatatcggatatcgtgattgagtcagctatatcgactattatggattgcgaggacagcatttctgccgttgatgcttcggacaaaattattgcttatcgaaactggcttggaatgatgaaaggcaatctgactgaggaaatatcaaagggagataaaactttcaatcgaaagttgaatgacgacttttcatactgcttgccctgtggaaataatgccactttaaagggtagaagtttaatgttggtaagaaatgttggccatttaatgactacgccaacagtacttgaccaaaatggtgatgaggtatttgagggtcttcttgatgctatgtgtactgtcacaatagcactgcatgacataaatcgcattggaggtaattcgtctgtcggatcagtttacattgtcaaacctaaaatgcatggtcccgacgaagtggcatttgcatgtcggacgtttgggctcgttgaagatatacttgggcttccattaaataccgtaaaactgggtataatggacgaggaacgccggacatctgttaacttatccgagtgtatccgggctgctaaatcgcgggttgtatttattaacactggattcttagatcgtaccggtgatgaaattcacaccagtatgcaagctggcccgatgcttcgaaaaagcgatatgaaaacgacgtcctggatacaggcatatgaaaacagaaacgttgaaataggtctaaaatgtggattgcagggaagagcccaaatcggaaagggcatgtgggcaatgcctgaccaaatgtcagatatgcttagacaaaaggtacaacatccactagctggagctaattgcgcttgggttccgtcaccaacagctgccaccttgcacgcgacccattatcacaaaattgatgtcaaaaaccgacaagacgaaataaggtcacttgctgtgcaaagctccctagacgacttactgcagatacctttacagtcgggtggaaaattgacggaaagcgaaattcaaagtgaaattgaaaacaattgccagggcattttgggatatgttgttcgttgggttgaccaagggattgggtgttctaaagttcctgatatccacaatgtacagctaatggaagaccgggcaacctgtagaatatcttctcagagcttgagtaattggctttgccataatttcgtggatcatgatttggtgtttaatacgcttaaaaaaatggcagctattgtggactcacaaaatgccgatgatatgaattatagacccatgtcgcctacatttgataccgaagctttcctagctgcgtatgatttaatatttagcggcgagagccaaccttctggttatacagagccaatcttgcatagctggcgtttggaacttaaacgcaaaatgtgat

SEQ ID NO: 238049 - DNA, 1318 bp, Unknown
  Bacterial polypeptide expressing nucleotide sequence isolated from the Sargasso Sea
agaaatatcaaatatttgtggccctcaactagtttgtcctgtttctaattctagatttttattaaatgctgctaatgcaagatgggttagtttatatgatagcttgtatgggacagatataattccagaaactcaaggtgctttgaaagggaagacttataatcctattagaggtaaaaaagtaattgagtatgctcgcggtctattagataagtatgtgcctttaaaaaataaaagttgggaagatttagaaaaaattcctaaaattaaaaataataaattaattttaaagctaaaaaaacctaatcagtttgtaggatataaaaaaaaatcaaataaactaacttcactattattcgttaataataatctccacattgatattttatttgatcagataggaaataataaaactgataatactgagtctcaaagaattaaagataaattaaaaatacatgatatttttttagaatctgcaatttctaccatttgtgatcatgaagatagtgtggcagctgtagatgctgaagacaaagttttaggttatagaaattggctaggtttaatgaaaggaaccctaaagatagaatttacaaaaaatggaaaaaaagttttcagaaaattaaatgtagatagaaattatatatcttctacaggtaaaaatctcatattacatggaagatcattgttattgaatagaaatgttggtcatctaatgactaatcctgcaatacttttaaaagatggttctgaatgtccagaaggaattatagatgcctttattacatctcttgcctgcctacatgattttaaaaaaaaaggaaattctagaactaattcaatttatattgttaaacctaaaatgcatgggcccgaagaatgtgcctttactaatttaatttttcaaaaagttgaaaaagttttaaaattaaaaaaaaatcaaattctttgtggaatcatggatgaagaaagaagaacatcagttaatcttaaagaatgtataaggattttaaaaaatagagttttctttattaatactggttttttagacagaactggagatgaaattcatacatcaatagagatgggcccaatgatattaaaaggtgatatgaaatcttctaaatggatctccgcttatgaaaataataacgttgatatagggatttcgtgtggtttttctgggaaagctcaaataggtaaagggatgtgggcaatgcctgatttaatgaataatatgatgagagaaaaaattaaccatcctttatcaggagctaattgtgcatgggtaccttcacctactgcagcaggacta

SEQ ID NO: 238050 - DNA, 1390 bp, Unknown
  Bacterial polypeptide expressing nucleotide sequence isolated from the Sargasso Sea
ataagagattcagaatggaaggtaagagagattccagaagacctcttggaccgcagagttgaaataacaggaccggtcgacagaaagatgattattaatgccttaaatgcagatgtaaaagtgtttatggctgactttgaagattctctaagccctacctgggagaacgtagcattgggccaaagaaatatgtatgacgctgtaagaagaaccattacatttgaaaatccaaccaacaataaaaagtatgaattaaatgatgagatagctaccttaatgtgccgtgttagaggactacatcttaaggaaaaaggaatcgatattaatggagaaaatccttacggctgcttatgtgattttggtctttatgctttccataatgccaaagaattaattaacagaggcacagggccatacttttatattccaaaattacagtcccatttagaggctaggttgtggaacgaaataatagattattcagaagactatcttaatttaccaagaggaacagtaagagttacatgtctaatcgaaacacttcctgcagtttttgaaatggatgaaattctttacgaactaagagatcatattgtgggcttaaattgcggcagatgggactacatatttagttacataaaaaccttccaaaatcatgcaaataaactcttgcctgatagaagccaagtcggcatgaatcaaccatttctaaacgcttattcaagactacttattaaaacatgtcatcgtagaggggcctttgctatgggcggaatggcggcattgattccgtcaaaagatccagaagagaatgaaactattatcgaaaaagttatgggagataaattgctagaaactagcaatggacatgatggaacttggatcgcgcatccaggcttatctgatattgctaacaatgtgttttccaatgcttttgatgtcggcaaaacaaatcagatgcatgtgatgagagaagaagatgacatcactcaggcagacctaataacaccttgtgaaggtgactttaccgaagattgttttagatcaaatattcgagtttctttaagatatataacagcatggctgcatggtattggttgcgtaccaatttatggattaatggaagatgcagcaacagcagagatttctagaagctctttatggcagtgggttaagcatggcgtaaccatggatacaggcactgttgcaacaaaaaagtcatttgaaaaaatgctggatgaggaatacaatgttgtccaagaagaggttgggcaaaactctttggattcagataagcttgtcgaagccaaaaaattactaaaaaaattggttataagcgccgagttaactgatttccttacattgccagcgtataggagcattaaatgaa

SEQ ID NO: 238051 - DNA, 1423 bp, Unknown
  Bacterial polypeptide expressing nucleotide sequence isolated from the Sargasso Sea
agattagatggcggcagatttcctgaatttttaaatcatactgcagctataagggaaagcgattttgtggttgctcctattccaaaagatcttcaggatcgtcgtgttgagatcactggaccgccagaccgaaaaatggtgatcaatgcattgaattcacccgttaagacatttatgtgtgattttgaggattcttgctcacctacttggaacaatattatccaaggtcatctgaatgtgagggatgctgttgaggaaagcatcgaatttacaagagagtctgatggcaaggtttataggctcaatgatgatattgctacattgattatcagaccaagaggatggcatctcgatgagaaacatataagaatcaatgatcaaccgatatctggatctctgtttgatttcggtgtttatctttcaaataactttgaagcactatcaaaaaaaggcacaggcccttacttttatcttcccaagcttgaaaatcacctagaggcgagactttggaatgatgttttcttgcatgctcaagattttctgaatatcgatcacggaaccatcaaggctactgttcttattgagacaatcacagctgcatttgagatggatgaaattatctttgaactcaaagatcattctgccggccttaattgtggccgctgggattatatattcagctttataaagaaatttagaaaccatgaaaaatttcttttaccaaatcgaaccgaagtaacaatggagcggcatttcttgaaaagttatgtcgacttacttattcaaacctgtcacaaaagaaatgttcatgcgatgggtggaatggcagctcaaatcccaatcaggggtaatgaggaacaaaaccaaattgccatggataaagttgcttcagataaatcaagggaggcaaatgctggacatgatggaacatggattgctcatcctggattatctgatgtggcgatgaatgctttcaatcaagcaatgggaacatctgcgaatcaaatatctaataaaagaaatgatgtttcagtatgcgctcaagatctcatcaaggttcctaatggcagcatcacagaggaaggtttgaggcaaaacatatcaataggcattcaatacattgaggcatggctatcaggcaatggatgtgtaccaatacataacctaatggaagatgctgctaccgcagagatatcccgctcccaaatatggcagtggattcaccatgctgcaaaaacaacagacaccaataaggccatcacagaagagtacttttttaagacacttgatgaagaaatggatcaaatggtcgcatcaagaggttttgaaagtgattaccttcagccagcaattaatttatttaaggaaatgtcaacagattcagaatttgatgaattcttgacattgccagcatataaacacc

SEQ ID NO: 238052 - DNA, 646 bp, Unknown
  Bacterial polypeptide expressing nucleotide sequence isolated from the Sargasso Sea
caaataggtaaaggaatgtgggcaatgcctgatgagatgttaggaatgtatgaaaataaatctacgcatcctgaagctggtgcaaattgtgcgtgggttccatctcccactgccgcaactttgcatgctattcattatcacaaagtttccgtttcagaacgtcaagaggaattagcatccagaccaagggctgatttaaaagatattctttctattccattgctggaaaatcctgaaagcttaacacctgaagtgatacaaactgaacttgataataattgccaaggcatacttggttatgttgtcaggtgggtagatttaggggtaggttgctccaaggtccctgatataaataatgttggtttgatggaagatagagccacgtgcagaatttcgagtcaacatatagcaaattggatacatcacaatcttattacagaaaaccaagttgaagagacgatgaaaaaaatggcacttgtagttgatcagcaaaacgctggggaccctgaatatattgcaatgggccctaactttaatgggatatctttttctgctgcactagatttagctgtgaaaggacgaactcagccgagtggctatacagagccaattcttcactccaaaagattacaagttaaatcataat

SEQ ID NO: 238053 - DNA, 1519 bp, Unknown
  Bacterial polypeptide expressing nucleotide sequence isolated from the Sargasso Sea
aaaataactcaaaaggatttttgggaaaaatttgatagttttgctcatgagctaactccagaaaatagaaaattaataaaaattagagaaaaaatgcaaatggatatagatagctggcatattgaaaatcctaatataataaaaaaagaatatcaaaaatttttaaacgatataggatatttagtaaaaccaggaacagatttcaaaatagatacaaaaaatatagattatgaaatttcaaaagttgctgcaccacaattagtagtgcccatcatgaattcaagatacgcattaaatgctgccaacgcgcgttggatgagtttgtatgatagtttgtatggaacagatataatacaatcagatgaatctgcaagtgagagatatgatcctgaaagaggggaagaggtaattaagtttacaaaaaaatttttagataaacattttactttaaaaaaaaagagctggtcacaagtttctaaaattataattgaaaaaaaaaatttagtactaaatttaatcaatgatagtactagtattaaagacagtaacaaatttattggttatagaggtaaaaaagataaaccaaccgctataattttaaaaaacaataatctttatgttgaaataataataaatccagaagcctttagtgcaaaaagtgatcctgcaggtatatcagatattatattggagtctgctgtaactacaatttgtgaccatgaagactctgttgctggagttgatgctcacgacaaagtattaggatacagaaattggttaggcttaatgaaaggagatcttaaggcagaatttgataaaaatggaaaaaaattaataagaaaattgaatcctgatagaaaatttatattaaagaatggtgagttatcatacttacatggtagatctctattattgaatagaaatgttggtcatttaatgactaatccatcaattcttttatctgatgggtctgaaataccagaaggtattatggatgctttcataatatcagttgcctgtttacatgatttgaaaattagaaaaaattctagaaatggttcaatttacatagttaaacctaaaatgcatggtcctaaagaggcaaagttcacagatcttatttttagcaaagttgaattagcaatagggttaaaaaaaaatacaattaagtgtggtattatggatgaagagagaagaacttcagtaaatctaaaagagtgtatcagagctttaaaaagtagagtattttttattaatactggttttctagatagaactggtgatgaaatgcatacttcaatggaggctggtccaatgattaaaaagggagatatgaaaacttcttcttggataaatgcttacgaaaataacaatgtcgatattggattagcttgtggtttttcaggtttggctcaaattgggaaaggaatgtgggcaatgcctgataaaatgtcagatatgatgaaacaaaaaatatcccacttagaggccggagctaattgtgcttgggttcatcgcc

SEQ ID NO: 238054 - DNA, 705 bp, Unknown
  Bacterial polypeptide expressing nucleotide sequence isolated from the Sargasso Sea
gctgcacgactacaacctgtggatggtgccggcctacctgcgcgagctgcgcccggacctgcgcatcgctttcttccaccacacctacttcccctcggccgacgtgttcaacgtgctgccctggcgtcggcagatcgtcggcagcctgctgcagtgcgactacatcggctttcatattccgcgtcaggtggagaacttcgtcgacgtcgcccgtggtgtgttcccgctcaagaccctggagcggcagagctgcgcgccgcgcttcatcacctatggctgcgccgtgggtctggagcgcatgaccaccgcgctggacaccggcacgcgccaggtcaagctcggcgcgcacccggtcgggctggacatcgaccgcgtacgcaatgcactggaagcgccgaagatcaaggagctgatgggccagctgcgcgaggaaatgaaaggcgtgaagctgatcctctcagtcgagcgcctcgactacaccaagggcattctggaaaagctcaacgcctacgagcgcctgctggccgataaccccgagctgatcggcaaggtcaccctggtcaccgtgtgcgtaccggcagcacgcgagatgagggtgtacgacgaactgcaaacgcagatcgaacaggcggtcggtcgcatcaacggccgtttcgcccgcatcggctggacgccgctgcagttcttcttccgcagcctgccctt

SEQ ID NO: 238055 - DNA, 674 bp, Unknown
  Bacterial polypeptide expressing nucleotide sequence isolated from the Sargasso Sea
gttgcgcgtgcggcaacgcctcatcatcgcagcgaaccgtttgcccatatccgctcagcgtaaaccagatggaaagtggggtttaaaccaatcggcaggaggtctcgtgagcgcactctctggtgtgggaaataattatgaaatgctctgggtcggatggcccggtgtctttgttgaagagggaccagatagagatgcactcacgcagcttctacttcgccgttcctgcctaccgatctatctttcccgaagtgaggtggatctatattacaatggttactgcaacaatgtgttatggccattatttcactatgtcccgatcgctttcgagtcgaagctcagcgagacacagaacatgggactgcaatggactgcttaccaagaagcgaacgagctttttgcaagagtcattttgaacgcctatcaacccggtgatgcggtctggtgccatgactaccacctcatgcttttgccgactaggctgaaggaagagtatccaagcatgaaagttggttggttcctgcatactccgttcccctcaagcgagatatatcgtatgttgccggtgcgagaagagttgctactttcagtgctggcagctgacctcattgggtttcacacatatgactatgcacgacattttgtatctgcttgctcccgtattcttggatttg

SEQ ID NO: 238056 - DNA, 829 bp, Unknown
  Bacterial polypeptide expressing nucleotide sequence isolated from the Sargasso Sea
cttgagttaaaagggttaggctttaaagactggtctagcttacaaatagacgcatcagataaagacggcggtgttaattttaaatcataccctggcttatatggcatgtatcagccagacacaatttcaagctttagctggaaaggtgcaaactttatagtgtcggctaatgaaggtgatgcacgcgaatacttttttgatacaactgatgaagcagattgcatagccaaaggcggcgtagatttcgatgaagacgatggttgccttgcttacatagatgaaagccgcgtcgaagacttaacgcttgctgctaattttgattacttaaataacgacgataacgacatcggtcgcttaaaagtgacaacggtcaaaggtgataataataacgatggtcaatacgaatcgctttatgcctatggcgcacgttcgtttaccatttgggacagtaatgggctggtggtatttgattctggagacgatatagggcgtattaccgcatcagttcatggcgaggcgtttaataataatgaagatgaaaataaaggcgatacacgctcagacgataaaggcgcagaacccgaagcgctaactataggtacaattggcgaacgcacctttgcatttattggactcgagcgtatgggggggatcatgatttacgatattactaacccatatgatgtgcagtttgaagactacttttataaccgaggtttaatagctggtgcagaaattaccggtgatctagcaccagaaggaatgacattcataacacgcgaacaaagtgcaactggcgaaccgctacttatcataggtaatgagatat

SEQ ID NO: 238057 - DNA, 937 bp, Unknown
  Bacterial polypeptide expressing nucleotide sequence isolated from the Sargasso Sea
gcataccttctgggagcgtgcgagcttcgttgaagatcactggaatgtgttctgtgaagtgaaccgtaagttcgctgagcagacggcaaaagaagctgcagaaggggctactgtctggctgcatgattacaacctctggatggttcctgcgtacctgcgggaaattcgcccggatttaaatatcgcctttttccaccatacatatttcccatcggctgacgtatttaacgtgctgccatggagaaaggaaattgtcggcagtctgttgcagtgcgattacattggcttccacattccacgtcagtcagaaaactttatcgatgtggcaaaaggtgtcatgccgtttgaagtgtcggaaaaatcaggctgcgcaccgcgcttcctgacttatggttgtgctgtggggctggatgaaatgaccacagaaattaaagtcaatgatcgtacgattcgtctgggcgctcatcccgttggattggatctgaaacgcgttgatagcgctctagaaaaacctgaaattcagaaccgcatgaaagaactgcgtgaagaattgcacggaattaaattggttctctctgtcgagcgcctggattacaccaagggtataccggccaagcttgaagcgtttgagcgcttactcgaagatcaccctgagcttcacggtaaagtgactctggtgaccgtttgcgttccggcagcgaaagaaatgacggtgtataacgagttgcagaatgaaattgaacaggcggtgggtcggattaatggtcgctatgcgcatgtcggttggacgccagttcagttcttcttccgcgctgttccgtttgaagagctggtggcctactacgcaatggccgatgttatgtggattacgccccttcgtgatggtctgaatctggtcgcgaaagatacgttgccactcagggtaaaactgaaggca

SEQ ID NO: 238058 - DNA, 787 bp, Unknown
  Bacterial polypeptide expressing nucleotide sequence isolated from the Sargasso Sea
gatgggggtgcggtgacgcgggggggagaggaggcggaggcgagagacgcggcgcgcgcgcgcgagcgcgcggaacgagaggcgagagacgcggaggcgagagaggcggagagagagagagaggcggagagagagagagagagggcgaaggtcgaggtgagggagtgtcgagagcgtttgaacatcgtcatggtggcgagcgagtgcgcgccgttcagtaagacgggcggtttgggcgacgtcgtgcaatcgttgcccaaggcgctcgcggcgagaggtcatcgcgtcatggtggtcgtgccgaggtacagagagtacgaggaggtgtacgacacggacgtgcgcgtgacgtttaacgtcctcggtcatcagacggagattggatattttcactcgtacagagacggcgtggattacgtcttcatcgatcacggcgcctatcaccacgtgcgcgacagtatttacgcaggcgagcgttcggacgtcatgtttcggaattcgatgctctgtcaagccgcgttggaggcggtgtggcacgtgccgtgcgggggggttccgtacggggatgaaaacttgatattcgtcgccaacgattggcactcggcgttgctccccgtctatctccaagcgttttatcgcgatcacggcaggtttgaatacgcgcgttcgtgtttcgtcgtgcacaacatggcgcaccagggtcgaggtcctctggatgaattctacgcgttgcaactccccgaacagtacaaggaccactttgtattgaacgatcccatgggcggcg

SEQ ID NO: 238059 - DNA, 1540 bp, Unknown
  Bacterial polypeptide expressing nucleotide sequence isolated from the Sargasso Sea
tctggtccattccccagcgctctgcgttggggtcgcgaagctcctcaatatccgctgtctacaacctgactacgtgccgagctcattcgttctcgtttatcaccgctcccccttcgatgaggtgatcgacgcgaacggaaaccggagctggcaagaccaaaaaagcccgaacggcatcatccccaccctgcgcaatctgttccgggatcacccctcagggacatggattgcctggcgccaggaggaagacgatgactgcgcggatgaaacaaccgtgatcgaggagccgctgccgatcaggctgcgccggattcctctgcagcaagagcagatctccagcttttatcacgtgacttcaaaggaatcggcttggccgatcctgcacacctttccaagccacttcaacgtcaacaacgctgactgggcgacgtttcaagaagtcaaccgtcgcttcgcagaagccgcctgcaatgaagcagcaccgggcgcctgcatttgggtacacgactacaacctttggctgacaccgggatacatccgccagcagcggcccgatgtaaaggtcgggttcttccatcacacgccgttccctagcgcggatgtatttgggattctcccttggcgggaagaaatcatcagcagcctgctggcctgcgatgtggtgggctttcacatcccccgttatgcggagaacttcagccgcgctgcatccagcctgctggccgtcgaacggggaccccgcgaaaaagtctcaacccactttctccaccacggcagcgcgctggcacagcccgactgcacaccgtggcttcgctatcaaggccgcaccgtgcgactggtctccacgccagttggcacaagccctgatgtcatcaaggcactgcgcgactcagagcccgtccaaagcctgatccatgacattgagcgcgacaccaaaaaagggcgcaagttgatcatctccgccagccgggtggactacaccaaaggcaacgaagagctgctgctggcctacgagcgccttctcgaacggcgccctgagatgcatggcgatgtggtgctgatgctggcctgcgtagcggccaacaccggcatgaaggtctacgaagacacccaacgcagcattgaagagaccgtgggccggatcaatggccgcttcggcaggatcgactgggtcccaatccggctcacaacccagcggatcccctatgaagaaatcgtggcctggtttgcagcctctgatatctgctggattactcccctcagagacggactcaaccttgttgccaaggaatatgtagccgcgcgcaagggccaaggcggcagccttgtgctctcagagttcaccggtgcttcggtggtggttgatggggccatcctcaccaatccctactcgcaccggcgcatggacgaagccatcgataccgctctgacgatgcctgttgaggaacaacgtgagcggatggagcgcatggtgcgcgcagtggacacgttgagcgtggccaactgggccaatgagcaacttcaggcgcttgagccctga

SEQ ID NO: 238060 - DNA, 646 bp, Unknown
  Bacterial polypeptide expressing nucleotide sequence isolated from the Sargasso Sea
catgacctcctcccaaccgctcgatctgcgcctgccgacccccggctgttacaacgatcccgaacgggccggtctggacgccaagagcgtcttcgacggcatgaccgagcacctgttcttcacgctcggcaagctcgctccaaccgccagccgccatgacctctacatggcactgagctatgcggtgcgcgatcgcctgatgatgcgctatctcgccacaaccgaggcgatgagggcccatccccagaagtctgtcgcttacctctcggccgagttcctgatcgggccccagctgaacaacaatctgttgaacctcggaatacagaaggaagccgaagcagcgcttcgtaacttcggaatcgaatccctccagcagatcctggatgttgaggaagaacctggactgggcaacggtggtttgggacgcctggcggcctgctacatggaatccctcgccagcctgaaaattcccgccacgggctatggcatccgctacgagttcggcattttcgaccagctgatccgcgatggctggcaggtggagatcaccgacaagtggctgaagggcggctggccctgggaactcccccagcctgatgaggcctgcttcgttggcttcggtggccgcacccgagagctacatcga

SEQ ID NO: 238061 - DNA, 648 bp, Unknown
  Bacterial polypeptide expressing nucleotide sequence isolated from the Sargasso Sea
aatgtttactcatgttgaaagtttcaaatcagcttttctagaaaagttagagacgatgtatggtaaaagtttcaaagactctacaactcgtgatcaatacaatacgcttgggtacatggtacgtgagtatatgaatagtcaatggattgcaacgaacgaaagttatcgatctggagagcgaaagcaaatgtattacttatccattgagtttttacttgggcgtttgcttggaagtaacatattaaatttaggtatcagggatgtatgtgagcaaggactttctgagcttggcatttctttgcaacagttagaagaggtggaagcagatgcaggtcttggaaatggtggacttggacgattagcagcctgtttccttgattcacttgcatcgttaaacttaccaggtcatggctgtggaattcgttacaaacacggcttattcgatcaaaaaattgtggatggttatcaagttgagtttccagaacagtggcttcttcatgaaaacgtatgggaagtaagaaggcatgatcaagctgtagaggtaagttatttcggcaatgttgaaccactctacattgatggacgtttagagttcaggcatacgaatgcagaagtaattatggcagtaccatatgacgttccagtagt

SEQ ID NO: 238062 - DNA, 104 bp, Unknown
  Bacterial polypeptide expressing nucleotide sequence isolated from the Sargasso Sea
cataacaccctcatcagtcgcgtataccaaccatacgttacttccagaagctctagagaaatgggatttagtttattcaataatctccttcctcggcatctaga

SEQ ID NO: 238063 - DNA, 775 bp, Unknown
  Bacterial polypeptide expressing nucleotide sequence isolated from the Sargasso Sea
taaatgtagaatttttattcattcagaggtcagtgtgggcagaaaacgtgcgatggaaaaattcggagccgaggtaatcagggtgaaaggaaattatgatgattcactcaaagaatgtataaatgaggcgaataaaaataactggcagatcataagcgatacctcatatcagggttatatggagtatccacgatttataatggctggttacaccgttttggctagagagattgtcaatcaattatcaaaaaaaacattacccacacatatatttttacaggcgggagtaggaggttttgcagctgcgatgtgcacgatatttttgaatgaatggggcggtgaaaacataaaaattatagtagtagagccaaattatgctccttgtttgatcgagagcgctatagatggagaaccaaaagtttttgatattaaaaaagaaacaattatgactggactttcatgtggagagccgtcgattttggcatgggagatattgagtgaatgtacagatctatttatgacaatcagtgatgataaaattccagaactgatgcgtattatggcaaatggttatgagaatgatattggtgtcgaagcgggtgaatgttcagtaagcggtctggccgctttgagtgcacttaaaaataatgattacttagtaaataaattagatattaatgataagagccgagttttattgattggaacagaaggtgctacggatccagatatttatgaaagcataattcaaaactcgcaaatcagaaaaaattag

SEQ ID NO: 238064 - DNA, 640 bp, Unknown
  Bacterial polypeptide expressing nucleotide sequence isolated from the Sargasso Sea
attgggactaaagaaaacaaagtatgaattagcgactttagcagctgaagttgaagttgatatcctgaaacgaagcatgggaaagcaagatcattttccagcagcatatggaaatttaaatattattaacttcttaagtgatgaaagagtagaagttgagccagtattatgtaacaaggaaaagattagccaacttgaaaataatttaatgcttttttacacttttcaatctcgagatgcaagtaaagtactcaaatcacaaattaaggaaacaaagaataagtttgatgttctgactgagatgaagaatcttgcagtgcctctttcaaaatgtctcagtgaagatagaagcctaaaagagtttggtaaacttcttcatcagaattggatcttaaaacaaagcttaactaatcaaataagtaacaaagagatagaaaaatattatcaacttggattagactctggtgcaataggtggaaaactcttgggtgctggtggcggaggatttctattgttttatgtggaacctgaaaaaaaagaaacattaataaatgctctatctgatctctatcccctatcaattaagtttgataccagtgggagccgactgacctattacgatagatcagacgaaaactag

SEQ ID NO: 238065 - DNA, 773 bp, Unknown
  Bacterial polypeptide expressing nucleotide sequence isolated from the Sargasso Sea
taatcatctaaaaatacattctcaattttctatttgtgaaggatctataaagttagatgatttaaaagatatttctaaagataataaactaaaagcaataggtttgtgtgatacctccaatctatgtggtgccttagagtttgctgaaaaattatctaaatctggatctcaaccaataatcggaactcaaattaattttaaattaggtgatacaataggtcttatacctttattcgcattaaatgaagatggatataaaacaataataaagttatcttcattgtcttttttaaaaaatgatgtgctttctgaacctcatttagattttgatgagctattaaataaaaatgaaggagtagcaatattttctggaacggttaatggtttttttggacaattgtttaacaaaggtaaatttgaagaaattcaagaaatttttttaaaattaaagaattgttatggtgatagattttatattgaaatacagcgtcatggtgatttaaatgaaaaagagtttgaaaaatttaatttaacaagttcaaaaacactagatattcctctaatcgctactaatgaagtattttatatagataaagatatgcatgaggcacacgatgcactgatatgtataaaaaacaaaacttatgtaaatgaaaaaaatagagttagatttactaatcagcattatcttaaaactaattcagaaatggttgatttatttactgatttgccagaagcattggaaaataattataattttccatttcgatgta

SEQ ID NO: 238066 - DNA, 849 bp, Unknown
  Bacterial polypeptide expressing nucleotide sequence isolated from the Sargasso Sea
aaatttaatcatctgaaaattcacactcaatattctatttgtgaaggtgcagccaaaattgatgatcttcaagaattttcaaaaaacaataaaattaaatcattaggattatgtgatacgtcaaatttgtgtggtgcacttgagtttgctgaaaaaatttctaaagcaggaactcaacccattattggaacacagattaattttaaaatcgatgacttaattggattacttcctgtatttgctttaaatgaagctgggtacaaaaacataattaatctttcttcaacatcttatcttaaaaataatgaattatctgatccatatgtagaatttaaagatttacttgataattctgaaggtgttgcaattttttcaggaacagtttttggtttgtttggcaaattatttgataaaggaaaatttactgatattcaaaatcattataaacaaattaaaaaatattttggagacagattttatatagaaatacaacgtcataacgatataaatgaagttggatttgaaaagtttaatttaaaacaatcctttaaattagaaataccaattattgcaacaaatgaagtattttatttaagcaaagaaatgcatgaagctcatgatgcattgatatgcatagggaacaaaacttatgtaaatgaaaaaaatagattaaagtttactgatcaacattatttaaaaaccaactctgaaatgtctgaattatttgttgatttacctgaagctttagaaaataattataattttcctctaagatgtaatttcagaccaatgttttcaaaccctattttgccaaatattagtagtgataaagatggaaatgcagatgaa

SEQ ID NO: 238067 - DNA, 879 bp, Unknown
  Bacterial polypeptide expressing nucleotide sequence isolated from the Sargasso Sea
aaagatttttttggatttataccacttatagcaaaaaatattgaaggctataaaaatattatagaactttcttcaaaatcttatttagaaaattccgaagttactgatccacattgtaattttgatgaattgttaaacaattcttcaggaatagttgtattcagcggatcaataagatcattgataggaaatctttttatcaaaggtttgtttcaggagttagaagatattatcagcaagctatcaaaaatttttaaaaatgacttttatttagaaatacaaagacacaatgatgctaatgaaaaagaatttgagaatttcaatttaaacatttctaaaaaatttgatcttcctattattgctactcatgaagtttattatttagataaaaatatgtttgaagctcatgatgccttaatgtgtattggtaataaaacttatgtaaatgatacgaatagattaaaattatctgatcaacattattttaaatcttctgatgaaatggttgaacttttcaaagacttacctgaagctttagagaataattttaaccttccttttagatgctcatttagacctcttccatctaatcctattttacccaatatttcatcgtctaatgttgatgctaatgatttgttaagaaatgattctaacgaaggtctaaataataaatttaaaaaaatcttcaaaatagaagaaaaagatttaaataaaaatgacaaatacttgatttataaagaaagattaaaccatgagattaaaataatagttgaaatgaattatgctggatactttcttattgtatctgattatataaaatgggcaaaaataaataatatacctgtaggcccaggaagaggctcaggtgctggatct

SEQ ID NO: 238068 - DNA, 646 bp, Unknown
  Bacterial polypeptide expressing nucleotide sequence isolated from the Sargasso Sea
atgtccaagacggtggcgtacaccaaccacaccgtcatgcccgaggcgctcgagaagtggcccctggagctcatgcaggagctcctgcccaggcacgtcgagatcatcatgaggatcgacgaggagttctgcgagagcgtcaagaaggcgtacccggacgcgaccgaggaggagatggccgccaagctcggcgccatgcgcattctcgagaactacctcaccccggaggaggaggccgccctggccgcggagaaggcggccgcggcgaaggcgaaggctgccgcgaaggcggcggcggcaaaggacgccgacgccgacgccgaggaggaggaggaggttgaggaggaggcgccgcccgcgccgatggtgcgcatggcgaacctctgctgcatcgcgggcttcgccatcaacggcgtcgcggcgatccactccgagatcgtgcgcacgttcacgttcaaggatttcgccgagctctaccccgacaagttccagaacaagaccaacggcgtcacccccaggcgctggatggcgttctgcaaccccgaactctccgagatcatcaccgaggccatcggcacggacgagtggatcaaggacacctccctcctcgagaagctcgcgcccctcgccaaggacgaggcgctcc

SEQ ID NO: 238069 - DNA, 709 bp, Unknown
  Bacterial polypeptide expressing nucleotide sequence isolated from the Sargasso Sea
tatttttcaagtggtattaatggtattttaaaaaaaaaaaatcagtttgatttaatttttgatactactaacgcaaagtcaaatttaaaacattataaattgataaaagacaaatattttatcaatttaactccttcaggaattggtgagttttatataccttatattgatgaacaaaaaaaacttaaaactagatcatttaatttaattacatgtggtggacaaagtacaattccaataatttatgaaataaacaaactaataaagaaaataaattatgttgaagttgtgtctgcaatttcctcaaaaagtgcaggattagcaacacgattaaatgtaaatgaatatttagagattacatcaaacgcaattaaaaagtatacaaaaatcaaaaatgtaaaagttattttaaacattaatcctggaagtccacctgtaaatatgtcaaattctatatattttcagttaaaaaaagatctttcaaaaaaacaaatttttgaattaaaaaaaattttacaaagagtaaataaaaagatgaaaaattatgccaagggttttcaatgtaattatattggaaatacgggaaataaaatttataaaataactttatctgttacaggaaatggtgattatttaccaaagtattcaggtaatttagatataattactaatatggcttcattaataataaataaaatttataaatgaa

SEQ ID NO: 238070 - DNA, 733 bp, Unknown
  Bacterial polypeptide expressing nucleotide sequence isolated from the Sargasso Sea
atgagtattaaagtatcgacagaggatggcgtgttaagcctgactctgaacaggccggataaaaaaaatgcgctgaacaagcagatgtatcagcaactggtgcagcaattgcagcaagcggcgcaggatgatgcggtcaaggtcgttctgttgcaaggctctgcagagtgtttttcctcgggcaatgatttagcagattttctacaaagtggtgagctcaatgacactcatccaacagtgatgtttttgtatgaaatggcgaagtttccaaaacctgtagtcgctgctgtggcaggtttggcgataggtattggtactacggtgttgctgcattgtgatttggtctacagtacagcagattgtcgttttcagttaccttttacccagttgggtttatgtcctgaagcggggtcgagcttgttgttgcctctgctgattggccaccagcgtgccagcagtctgttattgctatcagaggctatagatggcaatgaagcctggcgtataggtttggtaaatcaattggtggcaaaagaagaggtgctggagtttgccctgaataaggcgaggaagctggcagccttaccaacagatgcggtgcaaagcagtaaaagactgatgaaagcaggcggtgctgtacaacagacgatagcgctggagctggtggattttagtcgtttattacaaggaccagattgtcaaaaggtgatccagcagttttttagagggtaac

SEQ ID NO: 238071 - DNA, 652 bp, Unknown
  Bacterial polypeptide expressing nucleotide sequence isolated from the Sargasso Sea
accgaggccggccaggagctgcgtctgcgccaggagtattttctggtctccgcgtcgctacaggatctgctcgagcgtcatctgcgtctgcatgacggtctgcagtgcctgccgcagcaggtggcgatccagctcaacgacactcacccggccatcgctgtggtcgagctgatgcgcctgttggtggacgagcatcgcctgccctgggcagcaagcctggcaactgacggtcgctaccacctcctacaccaaccacacgctgctgccggaagcgctggagtcctggccagtagcgctgatggagcgtctgctgccgcggcacctgcaaatcatctacctgatcaacgccgagcatatcgatgcgctgcgtgccaaggacatccacgactttcgcctgctgcgcgcggtgtcgctgatcgaggaagaccacggccgccgcgtgcgcatgggcaacctggcttttctcggcgcgcacagcatcaacggcgtttccgcgctgcatacgcgactgatgcgcgacacggtatttcgcgatctgcaccggctctatcccgaccgggtgaacaacaagaccaatggcgtgaccttccgccgctggctgtttcaggtcaatccggggctgacgcatctgctggtcgacgctctcggtgag

SEQ ID NO: 238072 - DNA, 1309 bp, Unknown
  Bacterial polypeptide expressing nucleotide sequence isolated from the Sargasso Sea
gaaactatcatttactgcaccagctgtcagagcggatttgacaactggtggatcattttaccaagcacaatttgattatgaacaaaataaacaatggaaaggaacgcttaagagaaccaaaattgatcaaaacggagttttatatccaaatgacaaatccaattggagtgctgcagatttacttcctgcgcctgacaaaagaaaaatatggactgaactttcaggtgcagattataaaactgatttaaataattttgtcgaagctaatgatactgaaattaatagtttatttacattaactggaaacaatgttccaaaatatcataatattaatgaaagttatacggtcaactcaactcaatattcaaatccaaaaaatacaactagatgtaaaaatgctgctggtgttcgagatgacaatgaggatgatgttaaaggattaataaattttgtaagaggaaaagattattttgattatgatgctgactgtaatttaacagaaacgattcataatccgttaggagatatttatcactctgagatgatagtagttggagctccaaatgcagaaactgcatttgttggaactaaccaagaagcatattttagatctatcaaaggatatgattcttgggcagctagcttggctaaaagagatgaagtagtttacgttggagcaaacgatgggatgcttcatgcttttgatgcaaagactggggtagaaaaatggggttttgttcctcctttcgttgcagcaaatatgcctaccatggttaatgttaatttaaaccgaactagtgttggtggatctaatgcaatttatggtgtagatggttcgccagtttcacatgatatgtattttaaaggaccttatgataatgcaaaaaggtggcatactattttgatgataccttatggcagaggtggtgctggtttttctgtattagatgtaactgaaccaaatgctcctagacatctatattctatctttaatgatacaacaaaatatagagttcatgttatggatcacaatgctaatattaatagctatgattatattgcaagctcataccctatcgcttcatttcaagaagcccaattagtaactgataatgctgagttgggagaaggaactacaaaatgtgacgaaactggagacaatcaatgctatcaatctaaaacttggactattccagtagatggacttggtcagaacgatatagaagttcttatgggaggcttaacgtatagaggaagggtggtctctaagggctccgtcttcaggaacaggaacaaccataatttttga

SEQ ID NO: 238073 - DNA, 1330 bp, Unknown
  Bacterial polypeptide expressing nucleotide sequence isolated from the Sargasso Sea
caatgagaggctctttattgaaattcaaaggtcaaacaataataatcaatccgttgaaaataagctaatagatatagcctatgatagcggtatacccatagttgcgacaaatgatattttttttgaggcacgtgccgaccatgaggcaaatgatatccttcaatgcattacaaatgctgatgtaatatctaatccaaatagaaaaaaaatctcacaagagtcctattttaaaaatcaagaagaaatgctttccttgtttgaagatttgccagaagcactcgagaattctgtatcaatctcgatgcggtgcacatacagaccgacaacattaaatccaatacttccaatgtacgtacaggaggggtctgaggctgaagcgaaagaaaaagaaaaccacttgctagttgatatggctaataaaggttttcaggataaaatttcaaaattcggaactgcagaaaattaccataaatcattttatcaagataggctcgataatgagctttcaattattcttgatatggattatgcaggatattttttaattgtgtctgatatcatcaactggtcaaaaaataacaatataccggttgggccaggtagaggatccggtgcaggctctcttgtggcatggtcgcttgggataacagacttagatcctataaaattcaatctagtatttgaaagattcctaaatccacatcgaatatcgatgcctgacttcgatattgacttttgcccaattcgacgtgacgaagttattaattatataaaacaaagatatggtaatgatagagttgcgcaaataattacattcggaaaacttcaagcaagagcagtaatccgagatgttggcagggtaatggagatcccttataatcaagtggacagtttatgtagactgataccaaacaaccctgcgaatccgatgacgctatcagatgcgttaagtgagatcaaagagattgggctaattagaaaatcagacgaaacaatagatcgcttgctcaagctctcactttcacttgaaggtctataccggcacgcctcaacgcacgcggctggagttgttatatcaaatgggaaacttgaagaatatgtacccctctacatggatcaaaaaactaattcccttgtaacgcaattcaatatgaagtgggttgagcaagcgggtttggtaaaatttgatattttaggcctcaagaccctctctgtaataagtgaatgctgcaagcagctcgaagccattggtaaaggcgttgacataacatccatagattttcaggatgaaaaaactcttaaactgtttagagatggagaaacatcgggt

SEQ ID NO: 238074 - DNA, 791 bp, Unknown
  Bacterial polypeptide expressing nucleotide sequence isolated from the Sargasso Sea
catgaccttctcccaacccctcgacctgcgtctgccgacccctggctgttacaacgaccccgagcgggccggtcttgacgccaagagcgtcttcgacggcatgaccgagcatttgtttttcaccctcggcaagctcgcccccaccgctagccgccatgacctctacatggctctcagctacgcggtgcgcgatcgcctgatgatgcgctacctcgctactacggaggcgatgcgggcccatccgcagaaatcggtggcctatctatcggcggaattcctgatcgggccccagctgaacaacaatctgctgaacctcgggattcagcaggaagccgaagaagctctcaagaacttcggcatcgaatccctgcagcagatcctggatgtggaggaggagcccggcctcggcaacggtggtttgggacgcctggcggcctgctacatggaatccctggccagcctgaagatccccgccacgggatatggcatccgctatgaattcggcatcttcgaccagctcatccgcgacggctggcaggtggagatcaccgacaagtggttgaagggaggctggccctgggaacttcctcagcccgatgaagcctgcttcgtcggctttggtggccgtaccgagagctacatcgatgacaagggcatctaccgttcccgctggatccccgccgagcatgccatcggcatcccccatgacgtccccgtcctgggctatcgggtcaacatctgcgatcgtctgcgcctctggcgtgccgatgccaccgagagctttgacttct

SEQ ID NO: 238075 - DNA, 715 bp, Unknown
  Bacterial polypeptide expressing nucleotide sequence isolated from the Sargasso Sea
tatggctaatccaatgaattccaacgaaccctttgatcttcgcttgcctacgccaggctgctatttagatcctgagaaagctggcatggattcagatgctgtttttcaaggaatgacagctcatcttttctacactcttggaaagttagcaacctctgcaagtcctcacgacttatatatggctttgagttacgcagttaaagatagactaatgacaagatatttagccagccaagaggtcataagaaaaaaaccacaaaaaactgtagcttacttatcggcagaatttttaataggtcctcaattaagtaataacctcctcaatcttggcattactcaagaagccgaagatgcattaaaaagatttggtattgaatctttatcaacaatactcgaagtagaagaagaacctggattaggtaatgggggtcttggtagacttgctgcatgttatatggaatcattagcgtccctacaagtaccggcagttggttatggcattcgctacgaatttggcatattcaatcaattaatcagagatggttggcaagttgaagttactgataaatggctaaaaggtggatggccttgggaacttccacaacctgatgaatcatgtttcgttggctttggaggaagaactgaaagttatagagacgataaaggaaactacagatcaagatggataccttctgaacatgcaataggtgtccct

SEQ ID NO: 238076 - DNA, 789 bp, Unknown
  Bacterial polypeptide expressing nucleotide sequence isolated from the Sargasso Sea
aatgaaaaaaacgtcttcaaaggcaaaagcctcagtggctattgcggaccttccgagcacggaagaattaaaaaacagtattattaaacatttgcacggcagccttggtactgacgtaaataaagccagcccacaagcctggtggcgcgctacttgtgctgcagtgaacgaatatgtgtacgatggtttacgtaatactcagcgtactcactatcaacaaaatacccgcgctgtgcattatttcagccttgaatatttaatgggtcgtctgttcagcaacaacctgcacaatttgggtgtttatgacgctgcaaaagatgcactggcacagctgggcttaaatatcgctgatctggaagatcaggaagaagacatggcgctgggtaacggcggtttaggccgtttggctgcctgttttatcgactctatggcgacgttgaattatccagctattggttatggtattcattacgaacacggattgtttaaacaagaattttccgatggtcgtcagattgagcgtccggatagctggcgcgaatacggtaacccatgggagatttgccgtcctgaatctattcaggaaatttcagtctacggttatgtcgaaaccacctatgacttgcaaggcaaaatgaaaaaagtgtggcaccctggccgcattatcaaaggtgtaccttgggatattccggtggtaggttatcagggcagctctgttaacgtattacgtttgtgggaaagccgtgccagtgatttcttcaactgggacgtatttaactcaggcggtta

SEQ ID NO: 238077 - DNA, 412 bp, Unknown
  Bacterial polypeptide expressing nucleotide sequence isolated from the Sargasso Sea
gcatcgccaatggatcagttctcaagatgtattagcagtgccttatgatgtacctattccgggctataaaaataatattgttaatacccttagactttggaagtctgaagcaacggacgaatttaatttaacagaatttaatgccggaagttattctgaagcagtagcacaaaaaaatctcgctgagcaaataaccatggtgttgtaccctaacgacagcagtgaaaatggtaaagagctgagattacgtcaacaatactttttatcatcggcaagtattcaagatgtacttacacaatggattgaacaatatggtaatgattttactgaatttgctcagcatcatgtgtttcagcttaacgatacccacccaagtattgcggttgccgagctgatgcgaattttagttgat

SEQ ID NO: 238078 - DNA, 427 bp, Unknown
  Bacterial polypeptide expressing nucleotide sequence isolated from the Sargasso Sea
gatgaatgtaccctttagctatgcatcacccacgctgagcgttgaggcgttaaagcactctattgcctataagctgatgtttatcattggtaaagatccggccatcgccaataagcatgagtggctcaacgccacgctgtttgccgtccgcgaccgtatggtggagcgctggctgcgctcgaatcgcgctcagctttctcaggaagtacgccaggtttattacctgtcgatggaatttctgattggccgtacgctttcgaacgccttgctgtcgttgggcatctacgaagatgtgaacagcgcgctggaagagatggggctgaaccttgaagagctgattgacgaagagaatgacccggggctgggcaatggtggtcttgggcgcctggccgcctgtttcctcgactcgctggcggcgctgggcctg

SEQ ID NO: 238079 - DNA, 778 bp, Unknown
  Bacterial polypeptide expressing nucleotide sequence isolated from the Sargasso Sea
gctgcgcgaacagcgacagcgtgccgccgcgcaccggcgcccctgcggcgtccgccgcgaacacccgcgcgttaaagataggctaatgacaagatatttagccagccaagaagttataagaaaaaaaccacaaaaaacagtagcttacttatcagcagaatttttaataggccctcaattaagtaataatcttcttaatcttggaataactcaagaagcagaagatgctttaaaaagatttggtattgaatcattatcaacaattcttgaagttgaagaagagcctggtttaggtaatggtggacttggcaggcttgcagcgtgttatatggaatcattagcttctctacaatttccagcagtaggttatggtattcgatacgaattcggcatattcaatcaattaattagggatggctggcaagttgaagtaactgataaatggctaaagggcggatggccatgggaacttccacaaccggacgaatcatgttttgttggttttggaggaagaactgaaagttatagagatgataaaggaaattacagatcaagatggatcccttcagaacatgcaattggagtacctcatgacgttccagttttaggttatagagtaaatacatgtgacagattaagattatggagagcagatgcaacagaaagttttgacttttatgcattcaatattggtgattattacggcgcagttgaagaaaaagttgcatctgaaactctttcaaaagttctatatccaaatgatggaactgacgaaggt

SEQ ID NO: 238080 - DNA, 346 bp, Unknown
  Bacterial polypeptide expressing nucleotide sequence isolated from the Sargasso Sea
atgtctcaggaaccgcttgcacgagaagcagaggtagccgcattccgcgatgctgtcttgaccaaactcacctacgcggtgggcaaggacccggatcacgccttcgaccatgattggttcgaagccattgcgctggccgcccgcgaccagatggtcgatcactggatggaccacacgcgacgtatttatcgcaaaggccagaagcgcgtttattacctgtccctggaatttctcattggccggttgctctacgacagcctgagcaacctgggtgtgctggagatcgctcgcgaagcgctgtcggagctgggcgtggatctggaacgcatccgcctgctggagcccg

SEQ ID NO: 238081 - DNA, 798 bp, Unknown
  Bacterial polypeptide expressing nucleotide sequence isolated from the Sargasso Sea
caggaatgcaagggttcgcaaggtaaattatatttctatggagtggctgcctggtagggtcatgtataacaatattacgaatgtgtgtcagctcgatctagtcaagcgggttaccaagattttaggtcgtgatttttcgaaaattatgcgatcagagcccgacccaggtcttggcaatggtgggttggggcgcctggcatcttgttttttagattcattggctacactgaagtatcctgccagaggctatggcttgcgctatcaatatgggatttttgaacaaaagctttggtcgggtgtccagatcgaaaagcctgataattggttattaacagagtttccgtgggagatgcgtcgtgacgaatcagctaaaacagttgtttttggtggtcagcttgtcgatcataagaataagcatggcgagaccattcactctttggtaaattttgatgatgtaagggcattggcctacgatgtgcctattattggctatggaaaaaatagtgattattctgctttaactcttcgtttatggacaacaaaagagtctccgagaaattttaaattagctcgttttaatgcaggggatttgactgatgctacgaaaaacaccgctcttactgatgtgttatatccgaatgataagaatagtctcggcctttcaatgaggataaagcaggaatatcttttagtttcctcaacaattcaagatattatgcatgaatatcacaaagagtatgacacgattgatgagtttcatgataaagtgcgtattcagattaatgatacccacccagc

SEQ ID NO: 238082 - DNA, 976 bp, Unknown
  Bacterial polypeptide expressing nucleotide sequence isolated from the Sargasso Sea
tatggctaatccaatgaaatccaacgaacccttcgatctacgtttgcctaccccaggttgctacttagatcctgagaaagctggcatagattctgatgctgttttccaaggaatgacagcccatctcttttatactcttggaaagttagctacttctgcaagtcctcatgacttgtacatggctttgagttacgcagttaaagataggctaatgacaagatatttagccagccaagaagttataagaaaaaaaccacaaaaaacagtagcttacttatcagcagaatttttaataggccctcaattaagtaataatcttcttaatcttggaataactcaagaagcagaagatgctttaaaaagatttggtattgaatcattatcaacaattcttgaagttgaagaagagcctggtttaggtaatggtggacttggcaggcttgcagcgtgttatatggaatcattagcttctctacaagttccagcagtaggttatggtattcgatacgaattcggcatattcaatcaattaattagggatggctggcaagttgaagtaactgataaatggctaaagggcggatggccatgggaacttccacaaccggacgaatcatgttttgttggttttggaggaagaactgaaagttatagagatgataaagggaattacagatcaagatggatcccttcagaacatgcaattggagtacctcatgacgttccagttttaggttacagagtaaatacatgtgacagattaagattatggagagcagatgcaacagaaagttttgacttttatgcattcaatattggtgattattacggcgcagttgaagaaaaagttgcatctgaaactctttcaaaagttctatatccaaatgatggaactgacgaaggtagaagattgagactccaacaacaacacttttttgtaagttgttctcttcaagatatgttgagaagcctttga

SEQ ID NO: 238083 - DNA, 307 bp, Unknown
  Bacterial polypeptide expressing nucleotide sequence isolated from the Sargasso Sea
atgacagccgtcgatctggaattcgaccagctcaacagtaccgtcgacgcgctacggcgctcaatttccaatcgcatgatgtacggtgtcggcaaggacgccgttaccgctcacccgcatgactggctgcacgccgccgcactcgccgtgcgcgaccggctggtcgcgcgctggatgaagaccacgcgcctgcaatatgaacaggacgtcaagcgcgtctattacctgtcgatggaatttctcatcggccgcacgtttacgaacgcgttactcgcgctcggcattcacgatcagatgaaggaagcgc

SEQ ID NO: 238084 - DNA, 991 bp, Unknown
  Bacterial polypeptide expressing nucleotide sequence isolated from the Sargasso Sea
cccttttgccgaagtggcccgtgccgaaagcatctcccgagtgctttacccggccgacagcaccgaagcagggcaggaactgcgcctgcgccaggaatatttcttcgtctccgcgtccctgcaggatttgctgcgccgccacaagaacatgcacggttcggtgctcagcctgggcgagcatgccgccatccagctcaacgacacccacccgtccatcgccgtggccgagttgatgcgccaactggtcgacctgcacgatgtaccctgggaagccgcgtgggatgtcaccgtcgagaccctttcgtacaccaaccacaccttgctgcccgaggccctggaaacctggcctgtcggtttgatggagcgcatgctgccgcggcacatgcagatcatctacctgatcaacgcccagcacatcgactcgctgcgtgccaaaggcatccacgactttgatgtcttgcgcgctgtgtcgctgatcgaagaagacaacggccgccgcgtgcgcatgggcaacctggcattcctgggctcccatagcgtcaacggcgtgtccggtttgcatacccagctaatgcgcagcacggtgttctccgaactgcacaagctctaccccgagcgcatcaacaacaaaaccaacggcattaccttccgtcgctggttgtaccaggccaaccccaagttgaccgatatgctggtggaagccctgggcccggatattctggaccagcccgagcagcgtcttatcgagttggaaccctttgccgagaaaccggccttccgcaaagcgttcgctgaacagcgcctgcacagcaagcgcgcactggcgcagatcatccatgagcgcctgggcattgcgatcaacccggcggcgatgttcgacgtgcaggtcaagcgcatccatgaatacaagcgccaactgctcaacctgctgcacactgtggcgctgtaccaggcgatccgtgccgagccgggcatcgattgggtgccgcgg

SEQ ID NO: 238085 - DNA, 946 bp, Unknown
  Bacterial polypeptide expressing nucleotide sequence isolated from the Sargasso Sea
agaaaagttgcatctgaaactctctcaaaagttctttatccaaatgatggaacggatgaaggtagaagattaagactcaagcaacaacacttttttgtaagttgttctcttcaggatatgttgagaagccttgaaaaaagatcaatacccgtaactgaattccctaaacattggacagttcaattgaatgacacgcatcctgctatagccgttgctgaattaatgcgacttcttattgaccaatatcaaataggttgggataaagcttggaacataactacctcctcagtggcatataccaatcacactttacttccagaagctttagaaaaatgggatttaggtttatttaatgatctgcttcctcgacatctagaaattatttatgaaattaattggcgatttctacaacaattaagactgcgttatcctggtgatgacaaaattctccaaaaactctcgattattgatgaagaaggctctaaatcagtaagaatggctcacctggctacaattggagcgcatcacataaatggtgtagccgctcttcactcagatcttataaaaagacaactgcttcctgaatttgcaaaactatggcctgaaaaatttacaaatgttactaatggagttactccaagaaggtgggttgcattatcaaacccgtcattatctagccttctagagaaagaagttggtcctaattggattaccaacatggagcttttgaaaaagttagaggggaaaaaagatgataataactttttacaaaaatttgaggaaactaaattaaatggcaaacgaaaattatctagttttatccattcaaaaacaggcattctagttgatccatcaagtttatttgatgttcaagtaaaaagaattcatcaatataaaagacagcatttaaacgccttacaaattattgcacaatatctaagaatca

SEQ ID NO: 238086 - DNA, 799 bp, Unknown
  Bacterial polypeptide expressing nucleotide sequence isolated from the Sargasso Sea
aacgctctacaaattattgcccagtatttaagaatcaaaaatggtacaaacaagtatgaagtcccaagaacaataatattcggaggtaaagctgcaccaggttactttatggcaaagcttatgattagattcattaatggtattgctgatgtagttaattctgatccagatatggatggcttattaagagttgtttttctaccagactataacgttaaacttggtgaaatagtttatcctgcaacggatctttcagaacaaatctcaactgctggaaaagaagcatctggaactggaaatatgaagtttgccatgaatggagcgttaacaattggaaccttagatggagcaaatgtggaattaagagatcttgtgaaaaaagagaatttctttctttttggtaaaactgaaagcgaaattatggacttaaaaaataataactactcacccaaaacttttattgatcaaagtccagagctcaaagaggttatacgtttaattgaaattggccactttagcaatggagataaagaattatttaaacctttattgaatagcttaactggacatgatccgttttttgttatggctgactttgaagactacttaaataaacaagatgtggttagtgaatgttggaataataaaaactcttggaataaaatggcattattaaatactgccagatcaggatatttttcttcagatagatctattagagagtattgtaaatctatttggaaagtatctccaatgcctgttgaaattacttgcgacgtcgaagaattaactagttaat

SEQ ID NO: 238087 - DNA, 757 bp, Unknown
  Bacterial polypeptide expressing nucleotide sequence isolated from the Sargasso Sea
gtaccccaacgatgccagcgaaaacggtaaagagttgcgactgcgtcagcagtactttttatcctccgccagcctgcaggcgattttaaagcgttgggtgcatcaccacggccatgacttcagtgagtttgccgcgaaaaatgtgatccaattgaatgacactcacccgagtattgccgtccccgaattaatgcggctactggtggatgaatatggcctcgaatgggacgccgcctgggcgattaccagccaaactatggcctataccaatcacacattgttgcccgaggcgttagagcgctggcccgtgcgtatgatggcgctgatgttgccgcgaattttagaaatcatctatgaaatcaacgccagatacctagatttagttgcccaccactggccgggggatggcgccaaactggccagcatgtcgatcattcaagatggtcccgatccccacgtgcgcatggcgtacttagccatagtagcgagcttttcggtaaacggcgtggcggcgctgcatacccagttattaaagtcgggcctgtttaaggatttttatagcctgtggccggagaagtttaacaatcgcaccaatggcgtgaccccaagacgttggttagcccactgcaatcccgcgctcgccaaactgttaaccagccatttaggtaagggatgggtgacagacttaagccagctgacggcgctcaatgccttaacccaagacgccagctttattcaaaagtggcgtgaggtgaaa

SEQ ID NO: 238088 - DNA, 856 bp, Unknown
  Bacterial polypeptide expressing nucleotide sequence isolated from the Sargasso Sea
ggaacttcttaagaagttagaagaaaaaaaagatgacaataattttttacagaaatttgaggacactaaattaaatggcaaaagaaaattagctagttttatccattcaaaaaccggaatacttgtagatccatcaagtttatttgatgtacaagtaaaaagaattcatcaatataaaaggcaacatttaaacgccctgcaaattattgctcaatatttaagaatcaaaaatggtacaaacaagtatgaagttccaagaacaataatattcggaggtaaagctgcacctggttacttcatggcaaagctaatgattcgattcattaatggtattgctgatgtagttaactctgatccagatatggatggtttattaagggttgtttttctgccagactataacgttaagcttggtgaaatagtttatcctgcaactgatctttcagaacaaatttcaactgctggaaaagaagcttctggaactggaaatatgaagtttgctatgaatggtgcgttaactattggaaccttagatggagctaatgtggaattaagagatcttgtgaaaaaagagaatttctttctttttggaaaaactgaaagcgaaattatggatttaaagaataataattactcccccaaaacttttattgatcaatgcccagagcttaaagaagtaatacgcttaatcgaaattggccactttagcaacggagataaagaattatttaaacctttattaaatagcttaactggacatgacccattttttgttatggctgactttgaagactacctgaataaacaggatgtggtcagtgaattctggaataacaaaaaatcctggaataaaatg

SEQ ID NO: 238089 - DNA, 931 bp, Unknown
  Bacterial polypeptide expressing nucleotide sequence isolated from the Sargasso Sea
atgggatttagtttattcaataatctccttcctcggcatctagaaattatttatgaattaaattggcgatttctaccacaattaagactacgttatcctggtgatgacaaaattcttcaaaaactctcaatcattgatgaagagggctctaaatcagtaagaatggctcacttagctacaattggagcacatcatataaatggggtagccgctcttcactcagatttaataaaaagacaacttctccctgaatttgcagaattatggcctgaaaaatttacgaatgttaccaatggagttactccaagaagatgggttgcactctcaaatccatctttatctacccttctagaaaaagaagtaggtcctgattggataacaaatatggaacttctcaaaaagttagaagggaaaaaagataacaccagttttttacaaaaatttgaggaaactaaattaaatggtaaaagaaaattagctagttttatccattctaaaacaggcatacttgtcgacccatcaagtttgtttgatgttcaagtaaaaagaattcatcaatataaaaggcaacatttaaatgcattacaaattattgctcaatatctaagaatcaaaaatggtacgaacaagtatgaagtacctagaacaattatctttggaggtaaagctgccccaggttactttatggcaaaattaatgattcgattcattaatggtattgctgatgtagttaattctgatccagatatggatggtcttttaagagttgtttttttaccagactataatgtaaagcttggtgaaatagtttatcccgcaacagatctttcagaacaaatttcaactgctgggaaagaagcatctggaactggaaatatgaagtttgcaatgaatggtgcattgactattggaaccttagatggagccaatg

SEQ ID NO: 238090 - DNA, 796 bp, Unknown
  Bacterial polypeptide expressing nucleotide sequence isolated from the Sargasso Sea
tttttatagcctgtgcccggagaagtttaccaatcgcaccaatggcgtgacgccaagacgttggttagcccactgcaatcccgcgctcgccaaactgttaaccagccatttaggcaagggctgggtgacggatttaagccagctgacggcgctcaatgctttaacccaagacaccagctttattcaaaagtggcgtgaggtgaaacaagccaacaaggtgcaactcgctgagatgatagccaaggaatgtggcgtcgagtttgaccctacgatgctgtttgatgtgcaggttaagcggatccacgagtacaagcgtcagctccttaatattctgcatgtgatccatctttaccatcaaatccagcaggggcacacggagcatctcgtgccacgctgtgtgctgattggtggcaaagctgcgccaggttactttatggcgaaactcatcatcaaactcgccagtaatgttgcccacatggtcaactgcgatcctgtggtggcgccgtatctgcgttttgcgtttctgcccaattacaacgtcagtgctatggaaaaaatctgccccggcaccgatgtctccgaacaaatctccaccgcgggtaaggaggcctctggcacgggcaatatgaagttcatgatgaacggcgcactcaccataggcaccttagatggcgccaatatcgagatgcttgaagaggtcggcgaggataactttttcctctttggtctcaacgccgagcaagtgacccaaatgcgctgcgattatcaaccgcagcggattatcgccgagtcccac

SEQ ID NO: 238091 - DNA, 919 bp, Unknown
  Bacterial polypeptide expressing nucleotide sequence isolated from the Sargasso Sea
tggaccgttcagctcaacgacacccaccccgccatcgccgtggcggagctgatgcgtctgctgatcgacgaccgccacatggattgggacaaggcctgggacatcacctcccgctccgtcgcctacaccaaccacaccctgctgcccgaagccctggagaagtgggacctgaatctcttcggcaacctgctgccccgtcacctggagctgatctacgagatcaaccgtcgcttcctccagcagctgcgtctgcgttaccccggaaacgacgccatccagcgcaagctgtcgatcatcgatgaagacggcagcaaggctgtgcgcatggcccacctggccaccatcggtgcccaccatgtgaatggcgtggcggcactgcactccgatttggtcaagaccgatctgctgccggaattcgctgagctctggcccgagaagttcaccaacgtgaccaatggcgtcaccccacgccgttgggtggccctggccaaccccgagctgtccaccctgctcaacgagcacatcggcgaggactggatctccaacatggagaacttgcgcaagctggaggagcgccaggacgaccagggcttccttgagcactggggcaacaccaagctgtcggtgaagcgcaagctggccagctacatccatcgcaacaccggtgtgctggtggatccctccacgttgttcgacgtgcaggtgaagcgcatccacgagtacaagcgccagcacctcaatgcgctgcaggtgatcacccagtacctgcggatcaagaacggccgagccgacggcatggccccccgcaccgtgattttcggtggcaaggccgctcctggctactacatggccaaactgatcatccgcttcatcaacggcatcgccgagaccgtcaacgccgatcccgacaggacggccg

SEQ ID NO: 238092 - DNA, 820 bp, Unknown
  Bacterial polypeptide expressing nucleotide sequence isolated from the Sargasso Sea
gatggcgaccctccacttcctgcccatgcttacgggatccgttatgaattcggaatttttgagcagatcatcgagcgcggagagcagaaggaaaccccggacaactggctcagtcagggatatccctgggaaattccacgctgggaggtgctttacccggtccaattctatggatacgttcagagtcgttgggatgacgaagggcgtgagtggcgacaatgggtgggaggggagtccgttttagcgatggcatacgatgtcccgatcagcggttttcaaaaccgcacggtcaacaacctcagactctggtccgcgcgggcacccagggcttttgattttcagatcttcaaccgtggggattacatgcaggcggttgaggaaaaacagcgcagtgaaaccatatccaaagtcctttatcccaacgaccagggattttcaggcaaggaactgcgtttgaaacagcagtatttttttgtctccgcttctctccaggacatcatccgacggtttaaagcccatcattcggatttttcaaccttccaccaatgggttgcgatccaactcaatgacacccacccctcgattgccgttccggaactgatgagactgcttgtggacgaggaaggtcttgagtggtttgaagcctgggaagtggtggttcaggttttcggctacaccaaccacacggttttacctgaagccctggaacgttggtcttcctcaatgttggggcatctgctgccgagacattttgaaatcattcatgaaatcaaccgtcgtttcattcaaaaagtccggatcagccaccccggggatgagg

SEQ ID NO: 238093 - DNA, 622 bp, Unknown
  Bacterial polypeptide expressing nucleotide sequence isolated from the Sargasso Sea
tgcaagcaataaaacgttccagaagcaattcatgaaagtgaagcttgagtacaaagagttgctagcagaggaaattcgcaagtcgcttgatatagaagtagacgttaacgccattttcgacgtgcagattaagcgtttgcacgagtataagcgtcaacacttagcgcttctgaatattatggcgttataccgtcgtattctagaaaaccctgattacgatatgcacccgcgtgtatttgtgtttggtgctaaagccgcgccgggctacaagcttgcgaaagatattatctacgcgattaacaaggtagcggataagatcaacaatgacccgcgtgtaaataacaagattaaagtggcatttttaccaaactaccgcgtgtcgctagctgaaaagatgatccctgcggcagacgtatctgagcaaatcagtacggcaggtaaagaggcatcaggtacgggtaatatgaagcttgcactgaacggtgcggtaactattggtacacttgatggtgcaaacgttgaaattgctgaagaagtgggcgatgacaacatctttatcttcggacttacagtagaagaagtgaacgagcttaaagcgaatggctataacccacatgactac

SEQ ID NO: 238094 - DNA, 948 bp, Unknown
  Bacterial polypeptide expressing nucleotide sequence isolated from the Sargasso Sea
tacccaccctgctattgcagtcgctgaattaatgcgacttctaattgaccaatatcaaatcggctgggataaagcttggaacataacaacctcctcagttgcttataccaaccacacattactaccagaagctttagagaaatgggatttaggtttatttagcgatcttcttcctcgtcatttagaaattatttatgaaattaattggagatttctacagcaattaagactacgttatccaggagatgacaagatccttcaaaaactatcaataattgatgaagaaggctccaaatcagttcggatggcccacttggctacgataggagcacatcatgtaaatggtgttgcagctcttcactcagatctaataaaaagacaacttctgcctgaatttgcagcattatggcctgaaaaatttacaaatgtaaccaatggggttactccaagaagatgggttgccttatctaatccatcattatctaaccttctggaagaagaagttggtccaaattggataacaaatatggaacttcttaagaagttagaagaaaaaaaagatgacaacaattttttagaaaaatttgaggaaactaaactaaatggcaaaagaaagttagcaagttttatccattcaaaaactggaatacttgtagacccatcaagtttatttgatgttcaagtaaaaagaatacatcaatataaaaggcagcatttaaacgctcttcaaattattgctcaatatttaagaatcaaaaatggtaataacaaatacgaagtcccaagaacaataatatttggaggtaaagctgcaccaggctactttatggcaaagctgatgattagatttataaatggtattgctgacgtagtcaattctgacccagatatggatggtctattaagagttgtttttctaccagactataacgttaaacttggtgaaat

SEQ ID NO: 238095 - DNA, 598 bp, Unknown
  Bacterial polypeptide expressing nucleotide sequence isolated from the Sargasso Sea
ccagactataacgttaaacttggtgaaatagtttatcctgcaaccgatctttcagaacaaatttcaactgctgggaaagaagcatctgggactggaaatatgaaatttgcgatgaatggagctttaactattggaaccttagatggagctaatgttgaattaagagatcttgtgaaaaaagagaatttcttcctttttggtaaaactgaaagcgaaattatggatttaaaaaacaataattattccccaaaaacttttattgatcaatgtcccgaacttaaagaggttatacgactcattgaaataggccactttagcaatggggataaggaattatttaaacctttattaaatagcttgacaggacatgatccattttttgttatggctgactttgaggactacctaaacaaacaggatgtagtcagtgaatgctggaataataaaaaggcttggaataaaatggcattactaaatactgctagatcaggatatttttcttctgatcgatctattagagagtactgtaattctatttggaaagtttctccaatgccagttgaaattacttgcgatgtcgaagaattaactaattaat

SEQ ID NO: 238096 - DNA, 862 bp, Unknown
  Bacterial polypeptide expressing nucleotide sequence isolated from the Sargasso Sea
gcacttctttgtgagctgctcactgcaggacatgttgcgcagcctcgacaaccgcggactgcccgtggaggacttcccgaattactggagcgttcagctgaacgacacccaccccgccatcgccgtggcggagctgatgcgcctgctgatcgacgatcgccacatggagtgggacaaggcctgggacatcacctcccgttccgtggcctacaccaaccacaccctgctgcccgaagccctcgagaagtgggatctcaatctgttcggcaatctgctgccgagacacctggagctcatctacgagatcaaccgtcgcttcctgcagcaggtgcgcatccgctatccaggcaacgatgcgatgcaacgcaagctctccatcattgatgaagagggcagcaaagcggtgcggatggcccacctggccacgatcggcgcccatcacgtcaacggggtggccgccctccactcagacctggtgaaaaccgatctgctccccgagttcgccgatctctggcctgacaaattcaccaatgtcaccaacggcgtcaccccccgacgctgggttgccctctccaatccaggactggccagcctcctggatgagcatgtcggcaaagactggatctccaacatggagtctctgcgcaagctcgaagagcggcagaacgaccaaggcttccttgagttgtggggtgaaaccaagctgtccgtcaaacgcaagctggctggctacatccacaagaacaccggtgtgctggtggatccctccaccctgttcgacgttcaggtgaagcgcattcaagaatacaagcgccaacacctcaatgccctgcaggtgatcacccagtatctgcggatcaag

SEQ ID NO: 238097 - DNA, 898 bp, Unknown
  Bacterial polypeptide expressing nucleotide sequence isolated from the Sargasso Sea
cttgaaaaaagatcgatagcaataacagaattccctaaacattggacagtccaattaaatgacacccatcctgctattgcagttgcagaattaatgagacttcttattgaccaatatcaaataggttgggataaagcttggaacataacaacctcttcagtggcttatacaaatcatacattactaccagaagctttagaaaaatgggatttaggtttatttagtgatctccttcctcgtcatctagaaattatttatgaaatcaattggagatttctacaacaattaagactacgttatcctggtgatgacaagatccttcaaaaactctcaataattgatgaagaaggttccaaatcagttaggatggcgcatttggctacaattggagcacatcatatcaatggtgttgcagctctccactcagatttaataaaaagacaacttctgcctgaattcgcagctctatggcctgaaaaatttacaaatgtaactaatggagttactccaaggagatgggttgctctatctaatccatcactatcgaaacttttagaagaagaagttggtccaaactggatcacaaatatggaccttcttaaaaagttagaagaaaaaaaagatgacaacaattttttgcaaaaatttgaggaaaccaaactaaatggcaagagaaaattatctagctttatccattcaaaaactggaatactggtggatccatcaagtttatttgatgttcaagtaaaaagaattcatcaatataaaaggcagcatttaaatgccctacaaattattgcgcaatatttaagactaaaaaatggtacaaacaagtatgaagttccaagaacaataatattcggaggtaaagctgcaccaaggttactttatggcaaaa

SEQ ID NO: 238098 - DNA, 535 bp, Unknown
  Bacterial polypeptide expressing nucleotide sequence isolated from the Sargasso Sea
ccaattgaatgacactcacccgagtattgccgtccccgaattaatgcggctactggtggatgaatatggcctcgaatgggacgccgcctgggcgattaccagccaaactatggcctataccaatcacacattgttgcccgaggcgttagagcgctggcccgtgcgtatgatggcgctgatgttgccgcgaattttagaaatcatctatgaaatcaacgccagatacctagatttagttgcccaccactggccgggggatggcgccaaactggccagcatgtcgatcattcaagatggtcccgatccccacgtgcgcatggcgtacttagccatagtagcgagcttttcggtaaacggcgtggcggcgctgcatacccagttattaaagtcgggcctgtttaaggatttttatagcctgtggccggagaagtttaacaatcgcaccaatggcgtgaccccaagacgttggttagcccactgcaatcccgcgctcgccaaactgttaaccagccatttaggtaagggatgggtgaca

SEQ ID NO: 238099 - DNA, 823 bp, Unknown
  Bacterial polypeptide expressing nucleotide sequence isolated from the Sargasso Sea
gaatttcggcatcgagtcgttgcagcagattctggatgtggaagaggaaccgggtctgggcaacggaggtcttggccgtctggcggcttgctacatggagtcgctggccagcctgaagatcccggccaccggctacggcatccgctacgagttcggcatcttcgatcagctgatccgcgatggctggcaggtggagatcaccgataaatggctcaagggaggctggccctgggaattgccccagcccgatgaggcctgcttcgtgggcttcggcggccgcaccgagagctacatcgacgacaaaggcaactaccgctcccgttggatcccggcagaacacgcgatcggcattccccatgatgtgcccgtactgggctacagggtcaatatctgcgaccggctgcggctctggcgtgcggatgccaccgaaagcttcgacttctatgccttcaatatcggcgactactacggcgccgttgaggaaaaggtgggcagcgaaactctctccaaggtgctgtaccccaacgacggcaccgacgaaggccggcgtctgcgcctgaagcagcagcacttcttcgtcagctgctcgctgcaagacatgctgcgcagcctcgacaaccgcggactttccatcgaggacttccccaactactggacggttcagctgaacgacacccatccggccatcgctgtggctgagctgatgcggctgctgatcgacgatcggcatctggagtgggaccgggcctgggacatcacctcccgctccgtggcctacaccaaccacaccctgctgcccgaagcgctgagaagtgggacctca

SEQ ID NO: 238100 - DNA, 888 bp, Unknown
  Bacterial polypeptide expressing nucleotide sequence isolated from the Sargasso Sea
actgataaatggctaaaaggtggatggccctgggaactgccacaacccgacgaatcatgtttcgttggatttggtggcagaactgaaagttatagagatgataaaggaaactacagatcaagatggataccttcagaacatgctattggagttcctcatgatgttccggtgttaggttacagagtaaatacatgtgacagattaagattatggagagctgatgcaacagagagttttgacttttacgccttcaatattggtgattactatggtgcagtagaagaaaaagttgcgtctgaaactctttcaaaagttctatatcctaatgatggaactgatgaaggtaggagattaagacttaaacaacaacacttttttgtaagttgttctcttcaggatatgttaagaagccttgaaaaaagatctatcccaataacagaattttctaaacattggacagtacaactaaatgatactcatcctgctattgcagtagctgaattaatgcgactacttattgaccaatatcacataggttgggaaaaagcttggaacataacaacttcttcagtcgcttataccaaccatacgttacttccagaagctttagaaaaatgggatttaggtttgtttaatgatctccttcctcgtcatctagaaattatttatgaaattaattggagatttcttcaacaattaagactgcgttaccctggagatgacaaaatccttcaaaagctttcaataattgatgaagaaggctctaaatcagtaagaatggctcacttggctacaattggagcacatcatataaatggggtagcagctcttcactcagatcttataaaaagacaactccttcctgaatttgcagaactttggcctgaa

SEQ ID NO: 238101 - DNA, 897 bp, Unknown
  Bacterial polypeptide expressing nucleotide sequence isolated from the Sargasso Sea
gtggcgtgtaagaaacctcgctgaacagatcactatggtgctgtaccccaacgatgccagcgaaaacggtaaagagttgcgactgcgtcagcagtactttttatcctccgccagcctgcaggcgattttaaagcgttgggtgcatcaccacggccatgacttcagtgagtttgccgcgaaaaatgtgatccaattgaatgacactcacccgagtattgccgtccccgaattaatgcggctactggtggatgaatatggcctcgaatgggacgccgcctgggcgattaccagccaaactatggcctataccaatcacacattgttgcccgaggcgttagagcgctggcccgtgcgtatgatggcgctgatgttgccgcgaattttagaaatcatctatgaaatcaacgccagatacctagatttagttgcccaccactggccgggggatggcgccaaactggccagcatgtcgatcattcaagatggtcccgatccccacgtgcgcatggcgtacttagccatagtagcgagcttttcggtaaacggcgtggcggcgctgcatacccagttattaaagtcgggcctgtttaaggatttttatagcctgtggccggagaagtttaacaatcgcaccaatggcgtgaccccaagacgttggttagcccactgcaatcccgcgctcgccaaactgttaaccagccatttaggtaagggatgggtgacagacttaagccagctgacggcgctcaatgccttaacccaagacgccagctttattcaaaagtggcgtgaggtgaaacaagccaacaaggtgcaactcgccaagatgatcgccaaggaatgtggcgtcgagtttgaccctgcgatgctgtttgatgtgcaggttaaacggatcca

SEQ ID NO: 238102 - DNA, 904 bp, Unknown
  Bacterial polypeptide expressing nucleotide sequence isolated from the Sargasso Sea
aacaacaaacatttttttgtcagttgttctctccaagatatgttgagaagtcttgaaaaaagatctatccccataacagaatttgccaaacattggacagttcaattaaatgatactcatcccgcaattgcggttgcagaattaatgcgtctattaattgatcagtatcaactaggttgggacaatgcctggaatataactacttcatcagtagcatatacaaaccatacattgcttcctgaagctttggagaaatgggatttaagcctatttagtgatttacttcctcgtcatttagaaattatttacgaaataaattggaggtttttacaacaattaagacttcgttacccaggtgatgacaagatcttacaaaaactttctattattgatgaagacggtgccaaatcagtgagaatggctcatctagctactataggtgctcatcatattaatggtgttgctgcccttcactctgacctaatcaaaaggcaacttctcccagaatttgcagaactatggcctgaaaaatttaccaatgtaactaatggagtaactcctagaagatgggttgctttagcaaatccctccttatctaatttgttagaaaaagaagttggtccagattggattacaaatatggaactacttaaacaattagaaaagaaaaaagatgatgcaaatttccttcaacaatttgaggaaacaaaattgctgggtaaacgaaagctagcaagctttatccatacaaaaacaggcatacttgttgatccatcaagtctgtttgacgtccaagttaaaaggatccatcaatataaaagacaacatttaaatgctctgcaaattattgctcagtatttaaggatcaaaaatggtaccagcaaatataaagctccgaggacag

SEQ ID NO: 238103 - DNA, 616 bp, Unknown
  Bacterial polypeptide expressing nucleotide sequence isolated from the Sargasso Sea
attaagagttgtttttctaccagactataacgttaaacttggtgaaattgtttatcccgcaactgatctttctgaacaaatttcaactgccggaaaagaagcatccggaactggaaatatgaaatttgccatgaacggagctttaactattggaaccttagatggagctaatgtggaattaagagatcttgtgaaaaaagagaatttctttctttttggtaaaactgaaagcgaaattatggatttaaaaaataataattattcccccaaaacttttattaatcaatgtccagaactaacagaggttatacgcctcattgaaataggccactttagcaatggggataaagaattatttaaacctctattaaatagcttgactggacatgatccattttttgttatggctgactttgaagactacctaaataaacaggatgtggtcagtgaatgctggaacaataaaaaatcttggaataaaatggcattattaaatactgctagatcaggatatttttcttcagacagatctattagagaatactgtaaatctatttggaaagtttctccaatgccagttgaaattacttgcgacgtcgaagaattaactaattaa

SEQ ID NO: 238104 - DNA, 856 bp, Unknown
  Bacterial polypeptide expressing nucleotide sequence isolated from the Sargasso Sea
gctggtggaccccgccagcctgttcgacgtgcaggtgaagcgcattcacgagtacaagcgccagcacctcaacgccctgcaggtaatcacccagtacctgcggatcaagaacggccagaccgacggcatggcgccccgcaccgtgatcttcggtggcaaggccgctcccggctactacatggcgaagctgatcatccgcttcctcaacggcatcgccgacaccatcaatgccgatcccgacatggatggcctgttgcgggtggtgttcctgccggattacaacgtgaaactgggggaacaggtgtatcccgcctccgacctctccgaacaaatctccaccgccggcaaggaagcctccggcaccggcaacatgaagttcgccatgaatggtgccctcaccatcggcacccttgatggggccaatgtggagatccgcgagctggtgggaagcgagaacttcttcctcttcggcaagaccgtggaagaaatcacggccctgcagcagaacggctaccgccctggcgatgtgatcgccacactgccggaactgcaggaggccctgcggctgatcgagatggggcacttcagcaacggcgacggagaactgttccgccccctgctcgacaacctcaccggacacgaccccttctatgtaatggccgactacgccgactacctgcgggcccaggaggcggtaagccatgcctggagcgaccggatgcactggaatcggatgtcactgctgaacacggcccgcaccgggttcttctcctccgaccgttccatcggcgagtactgcaacaacatctgggccgtggatcctctccacgtggagatcacctgcgacgtgcgctaa

SEQ ID NO: 238105 - DNA, 941 bp, Unknown
  Bacterial polypeptide expressing nucleotide sequence isolated from the Sargasso Sea
ggcagttgaagttactgacaaatggctaaaaggtggatggccttgggaacttccacaacctgatgaatcatgttttgttggctttggaggaagaactgaaagttatagagatgataaaggaaactacagatcaagatggataccttctgaacatgcaataggtgtccctcatgatgttccagtcttaggatacagggtaaatacatgcgacagattaagactatggagagctgatgctacagaaagctttgacttttatgcatttaatattggtgattattatggtgcagttgaagaaaaagttgcatctgaaactctttcaaaagttctatatccaaatgatggaactgacgaaggcagaagattaagactcaaacaacaacacttttttgtaagttgttcacttcaggatatgttgagaagccttgaaaaaagatcaataccaataacagaatttcctaagcattggacagtccaattgaatgatacccaccctgctattgcagtagcagaattaatgcgacttctgatagaccaatatcaaataggctgggataaagcttggaacataacaacctcttcagttgcttataccaatcacacattactaccagaagctttagagaaatgggatttaggtttatttaatgatcttcttcctcgtcatcttgaaataatttatgaaattaattggcgatttcttcaacaattacgattacgttatcctggtgatgacaaaatccttcgaaagctatcaataattgatgaagaaggctccaaatcagtacggatggctcatttggctacaataggagcacatcatataaatggagttgctgctcttcactcagacttaataaaaagacaacttcttcctgaattcgcagatctatggcctgaaaagtttacgaatgttactaatggggttactccaaggagat

SEQ ID NO: 238106 - DNA, 799 bp, Unknown
  Bacterial polypeptide expressing nucleotide sequence isolated from the Sargasso Sea
tggataacaaatatggaacttctcaagaagttagaagaaaaaaaagatgacaacgattttttagaaaaatttgaggatactaaactaaatggcaaaagaaaattagctagttttatccattcaaaaactggaatacttgtagacccatcaagtttatttgatgttcaagtaaaaagaatacatcaatataaaaggcaacatttaaacgctcttcaaatcattgctcaatatttaagaatcaaaaatggtacaaacaaatatgaagtaccaagaacaataatatttggaggtaaagctgcaccaggctactttatggcaaagctaatgattcgatttataaatggtattgctgacgtggtcaattccgatccagatatggatggtctattgagagttgtttttctaccagactacaacgttaaacttggtgaaatagtttatcccgcaacggatctttcagaacaaatttctactgctggaaaagaagcatctggaactggaaatatgaaatttgcaatgaatggagcgttaactattggaaccttagatggagctaatgttgaattaagagatcttgtgaaaaaagagaatttcttcctttttggtaaaactgaaagcgaaattatggatttaaaaaataataattattcgcccaaaacttttattaatcaatgtccagaacttaaagaagttatacgcctaattgaaataggccactttagtaacggagataaagaattatttaaacctttattaaatagcttaaccgggcatgatccattctttgttatggctgact

SEQ ID NO: 238107 - DNA, 750 bp, Unknown
  Bacterial polypeptide expressing nucleotide sequence isolated from the Sargasso Sea
agccagctgacggcgctcaatgccttaacccaagacgccagctttattcaaaagtggcgtgaggtgaaacaagccaacaaggtgcaactcgccaagatgatcgccaaggaatgtggcgtcgagtttgaccctgcgatgctgtttgatgtgcaggttaaacggatccacgagtacaagcgtcagttactcaatattctgcatgtgatccatctttaccatcaaatccagcaggggcacacggagcacctagtgccacgctgcgtgttgatcggtggtaaagcggcgcccggttactttatggcgaagctcatcatcaaactcgccagtaatgttgcccacatggtcaactgcgatcctgtggtggcgccttacctgcgctttgcgtttctgcccaattacaacgtcagtgccatggaaaaaatctgtcccggcaccgatgtctccgaacaaatctccaccgcgggtaaggaggcctctggcacgggcaatatgaagttcatgatgaacggcgcactcaccataggcaccttagatggcgccaatatcgagatgcttgaagaggtgggcgaggataactttttcctctttggcctcaacgccgagcaagtgacccaaatgcgctgcgattatcaaccgcagcggattatcgccgagtcccacgccttatccgaagtcatggccttactcaagagcggccatttcaacctgctggaaccggggattttcgaccccattatcgcctcgattgaa

SEQ ID NO: 238108 - DNA, 901 bp, Unknown
  Bacterial polypeptide expressing nucleotide sequence isolated from the Sargasso Sea
cctgatcaagccgtttttgtgggctttggcggccgcaccgagggctacaccgatgagcacggccgttaccgctcccgctggatccctgctgaacacgccatcggcattccccatgacatccctgtcctgggctacaaggtcaacacctgcgatcggctacggctctggcgtgccacagccaccgaatcctttgacttctacgccttcaacatcggtgattactacggggcggttgaggagaaggtgggttccgaaacgctctccaaggttctctaccccaacgacggcaccgatgaaggccgccgtctgcgcctgaagcagcagcacttcttcgtcagctgctctttgcaggacatgctgcgcaacctcgagcagcgcaagattccggtgacggaattcccgcagcactgggcggttcagctcaatgacacccacccagcaatcgcagtcgccgaactgatgcgcctgctgattgatgacaagaaccttgattgggatgtggcctgggacatcaccagccgctcactggcttacaccaaccacaccctgctgcctgaagcactcgaaaaatggggcctgcccctgttcgcaagcctgctgccgcgccacctagagctgatctttgagatcaaccgccgcttcctacagcaggtacggctgaaacatcccggcgatgacgccatcctgcgcaagctctcgatcattgatgaggagggccaaaaagccgtgcgcatggctcatctcgccaccgtgggctcccaccacgtcaatggcgtggccaagctccacagcgatctggtgaagagcagcttgatgccggagtttgcacagctctggcccgagaaattcaccaatgtcaccaatggcgtcacaccacgccgctggattggcctctgcaacc

SEQ ID NO: 238109 - DNA, 907 bp, Unknown
  Bacterial polypeptide expressing nucleotide sequence isolated from the Sargasso Sea
atgaatgtaccttttagctactcatcacccaccctgagcgttgaggcgttaaagcactctattgcttataagctgatgtttatcatcggcaaagatccggctatcgctaacaaacatgaatggctcaacgccacgctgttcgccgttcgcgatcgcatggttgagcgctggctgcgttcaaaccgggcgcagctctctcaggaagtgcgtcaggtttactatctgtcgatggagtttttgattggccgtaccttgtccaacgcgctgctatcgctcggtatttatgaggacgtgaacagcgcgctggaagagatggggctgaatcttgaagagctgattgacgaagagaacgacccgggcctgggcaacggcggtcttggtcgtctggctgcctgcttcctcgactcgctggcggcgctgggtttgccgggccgcggctacggtattcgctacgactacgggatgtttaagcagaatatcgtcgacgggcggcagaaagagtccccggactactggctggagtacggcaacccgtgggagttcgagcgccacaatacgcgctacaaagtgcgcttcggcggccgcattcagcaggaaggtaaacattcccgctgggtggagaccgaagagattattgccgaagcctacgatcagatcatcccgggtttcgacaccgacgccaccaacacgctgcgtctgtggagcgcgcaggccagcagcgagatcaacctcggtaaattcaaccagggcgactacttcgcggcggtggaagataaaaaccactctgagaacgtgtcgcgggtgctctatccggacgactccacctattccgggcgcgagctgcgcctgcgccaggagtatttcctcgtgtcggcgacggtgcaggatatcctcagccgtcactacc

SEQ ID NO: 238110 - DNA, 830 bp, Unknown
  Bacterial polypeptide expressing nucleotide sequence isolated from the Sargasso Sea
gaagaaccgctggcctgatgacgagcaacggatccgggagatgtcaattgttggggatgggcaggtgcgtatggcttttctttcggttgtaggcagccattccgtaaatggagtggcggctcttcatacgaaactgctcaaggaccgattgctaaggaattttgctgaattataccccgacaaattcaataacaagaccaatggcatcacgccccgtcgctggttgcttggatgtaaccccgagctttcggagttgattacttccgtggtgggggatggttgggtcactgacctgagccttttgcgtggtctcgaagcggttgcggatgactcatcctttcaggaaagatttatggagatcaaacggaccaacaaagtggttttgacggacatgatctccagcaatatggatttgagggtagatcccgatgccctttttgattctcagatcaaaagattgcatgagtacaagcgtcagcacctcaatttgcttcacatacttactctttaccgccgcctattgcatgatcccgaactcgatatatctccacgagtctttgttttcggtgccaaagcagctccaggctaccacttggccaaagtgatcattcatgcgatcaacttggtgggcaagcgaatcaacgccgattccaggatcaacggcaagctcaaggttgccttttggcccaattacggtgtttcctctgctgaaagaatcattcccgccactgatttgtccgagcaaatttcgactgctggaaaggaagcttcggggacgggcaacatgaagttcgccttgaacggagcattgaccattggcaccctcgatg

SEQ ID NO: 238111 - DNA, 969 bp, Unknown
  Bacterial polypeptide expressing nucleotide sequence isolated from the Sargasso Sea
gttatcgttgggtatttatgacgatgtcaaaaatgcgctggaaggtatggggttggatcttgaagatctgatcgatgaagaaaacgacccgggcctaggcaacggtggcctcgggcgcctggcggcctgcttcctggactcgctggcaacgctgggactgccgggacgcggctacggtattcgctatgactacggcatgttcaagcaaaacattgttgatggccgacagaaagagtcgccggactactggctggaatacggtaacccatgggagttcaaacgccacaatacgcgctacaaagtgcgctttggcgggcgtatacagcaggaaggcaagaaaacgcgctggatagaaaccgaagagatcctcgcggttgcctacgaccagattatccccggttacgacaccgatgccactaacacgctgcgcctgtggaatgcccaggccagtagcgagatcaacctcggtaaatttaaccagggcgactactttgcggcggtggaagataaaaaccactccgagaacgtctcccgcgtgctctatccggatgactccacctattcaggacgcgagctgcgcttgcgccaggagtatttcctggtctcctccacggtgcaggacattctgaatcgtcattatcaactgcacaaaacctacgataatctggcggataaaatcgccattcacctcaacgacacccatccggtgctgtcgatccctgagctgatgcgtctgttgattgatgagcacaagttcagttgggatgatgcgtttgaagtgtgctgtcaggttttctcgtataccaaccacactttgatgagcgaagcgctggagacctggccggtggatatgctgggcaaattctgccgcgccatctgcaaatcatttttgagattaacgactacttccctgaaacgctgcaggagcagtatccgaccgatacccgtctgctgggggcgacgtcgatt

SEQ ID NO: 238112 - DNA, 817 bp, Unknown
  Bacterial polypeptide expressing nucleotide sequence isolated from the Sargasso Sea
tctctctttgacgtccaggtcaagcgcatccacgagtacaagcgccagcacctcaatgccctgcaggtgattgcccagtacctgcgaatcaagaacggccaggccgatggcatggcaccccgcaccgtgatcttcggcggcaaggcagcgcccggctactacatggccaagctgatcatccgcttcatcaatggcatcgctgaaacggtgaactccgatcccgacatggacggccgcctgcgggtggtgttcctgccggattacaacgtcaagctcggccagcgcgtctacccggcctctgacctctcagagcagatctccactgccggtaaagaggcctccggcaccggcaacatgaagttcgccatgaatggtgccctcacgatcggcaccctcgatggcgccaacgtcgagatccgcgaacaggtgggtgcagagaacttcttcctcttcggcaaaaccacaccagagatcgaagagctgcgcgcctgtggctaccgcccctgggagctgctggctgaactgcccgaactggaggctgtgcttcacctggttgagcagggccacttcagcaatggcgacaccgaactgttccgcccgctggtggacaacctgcgcggccaggaccccttctttgtctttgctgattttgcggcctacatggacgcccaggaccaggtcagccaggcctgggctgaccgccagcactggaatcgcatgagcctgctcaacagcgcacggatgggttatttctcctccgaccgctccatccgggagtactgcgacaatatctggaaagcatccgcttttccggtgc

SEQ ID NO: 238113 - DNA, 826 bp, Unknown
  Bacterial polypeptide expressing nucleotide sequence isolated from the Sargasso Sea
gaaattaaaagcggtgagcaaatcgagcgtccagacagctggcgtcactacggtaatccttgggaaattgcccgtccagaatctattcaagaagtatcactttacggctatgtagagacgaaatacggcgacaacggacgtgtgctgaaagaatggcaccctggctcaattgtaaaaggtgtgccgtgggatattcctgttgtaggttatgaaggtaaaaccgtaaacgtattgcggttgtggcagtcagaagcgtctggctacttcaattgggacgtattcaatgctggtggttatgttgatgcacagcgtgaaaatgtatcagctgaaactatttcaaaagtactttatccaaacgatgagaccgaagcgggtaaagagcttcgccttattcagcagtacttcttctgctcgtgctcgcttaaagacattatccgtcgctacaagcgtgctcatggtgacgattggagccgtttcgccgatcaggttgttattcagctaaacgacacgcacccagctatttctataccagagctaatgcgcattcttgttgaccgcgcagagcttggttgggatgaagcgtgggggatttgtacaaaagtatttgcatataccaaccacaccttgctaccagaggcacttgaaaagtggcctgcgcgcatgattgagaagatccttcctcgtcatctagaaatcatttatgaaattaaccaccgctttatggcagaggttgataagaagtggcctggcgacaatgccatgaaagctaagctttcaatcattgaagaaggtaacgagaagatggttcgtatgggccacctgtcgg

SEQ ID NO: 238114 - DNA, 923 bp, Unknown
  Bacterial polypeptide expressing nucleotide sequence isolated from the Sargasso Sea
tgaaggcggctggccctgggaactgccccagccggatgaggcctgcttcgtcggcttcggtggccgcaccgagagctacatcgacgacaagggcagctaccgctcccgctggatccccgccgaacatgccatcggcatcccccacgacgtgcccgtcctgggatatcgcgtcaacatctgcgatcgtctgcgcctctggcgcgccgacgccaccgaaagcttcgacttctacgccttcaacatcggcgactactacggcgccgttgaggagaaggtgggcagcgaaaccctctccaaggtgctctatcccaacgacggcaccgatgaaggccggcgtctgcgtctgaagcagcagcacttctttgtcagctgctctctccaggacatgctgcgcagcctcgacaaccgaggcctgtccgtggaggacttccccaagtactggaccgttcagctcaacgacacccacccggccatcgcggtggcggagctgatgcgcctgctgatcgacgaccgtcacatggattgggagaaggcctgggacatcacctcccgttccgtcgcctacaccaaccacaccctgttgccggaggccctggagaagtgggacctcaacctgttcagcagcctgctgccccgccacctggagctgatctacgagatcaaccgccggttcctccagcaactgcgtctgcgttaccccggcaacgacgccatccagcgcaagctgtcgatcatcgatgaagacggcagcaaggcggtgcgcatggcgcacctggccaccatcggtgcccaccacgtgaacggagtggcggcgctgcactccgatctggtgaaaaccgacctgctgccggaattcgccgagctctggcccgagaaattcaccaacgtcaccaatggcgtcacgccccgccgctgggtggccc

SEQ ID NO: 238115 - DNA, 861 bp, Unknown
  Bacterial polypeptide expressing nucleotide sequence isolated from the Sargasso Sea
gctataggagttcctcatgatgttccagtcttagggtacagggtaaatacatgtgacagattaagattatggagagcagatgcaacagaaagttttgacttttatgctttcaatattggtgattactatggagcagtagaagagaaagttgcatctgaaactctttcaaaagttctatatccaaatgacggaactgacgaaggtagaagattaagactcaaacaacaacacttttttgtaagttgttctcttcaggatatgttgagaagccttgagaaaagatcaatcccaataacagaatttcctgagcattggactgttcaactcaacgatactcatcctgccatagcagtcgcagaattaatgagacttcttattgaccaatatcaaataggatgggacaaagcatggaacattacaacctcctcagttgcatatactaatcacacattactaccagaagctttagaaaaatgggatttaggtttatttaatgatcttcttcctcgccatctagaaattatttatgaaattaattggagatttctacaacaattaagactacgttatcctggcgatgacaaaattcttcaaaaactctcaataattgatgaagaaggctcaaaatcagttcggatggcccatttggcaacaattggagcacatcatataaatggggtcgcagctcttcactcagatctaataaaaagacaacttcttcctgaatttgctgcgctttggcctgaaaaatttacaaatgtaactaatggggttacgcccagaagatgggttgccttatctaacccatcattatctaatcttctagaagaagaagttggtcctaattggataacaaatatg

SEQ ID NO: 238116 - DNA, 798 bp, Unknown
  Bacterial polypeptide expressing nucleotide sequence isolated from the Sargasso Sea
accacggcgctggatgggcctctgcaacccgcaattgcggggcctgctggatgaggtgatcggccaaaactggctccacaacctcgatgagctcaagcagctcgagcgtttccaagacgattccggattcctggagcgctgggatcaaaccaagctggagtccaagcgccaattagcgagctacatccaccgccacacaagcgtgctggtggatccggcctcgctgttcgatgtgcaggtcaagcgcatccacgagtacaagcgccagcacctcaatgctttgcaggtgatcgcgcaatatctgcggatcaagaacggccaaggcgatggcctcgccccgcgcacggtgatctttggcggcaaagcagcccccggttactacatggccaagctgatcatccgcttcatcaacggcattgccgaaaccgtcaattccgaccccgacatggatggccgcctgcgggtggtgttcttgccggattacaacgtgaagctcggcgagcgggtgtatccggcttctgatctttctgagcagatctccacagccggcaaggaagcctcgggcaccggcaacatgaagttcgccatgaatggggcactcacggtcggcaccttggatggggcgaatgtggagattcgcgagcaggtgggggccgacaacttcttccttttcggcaaaaccaccccggagatcgaagccctgcgcaagagcggctaccgcccctgggagctactggaagagctgccggaactccaagacgtgctgcatctggtggaacagggccacttcagcaatgg

SEQ ID NO: 238117 - DNA, 905 bp, Unknown
  Bacterial polypeptide expressing nucleotide sequence isolated from the Sargasso Sea
tggtggacttggcagacttgcagcatgttacatggaatcattagcatctctacaggttccagcagttggttatggtattcgatacgaatttggcatattcaatcaattaataagagatggatggcaagttgaagtaactgataaatggctaaaagggggatggccatgggaacttccacaaccagacgaatcatgtttcgttggttttggaggcagaactgaaagctatagagatgataaaggtaactacagatcaagatggatcccctcagaacatgctataggagtacctcatgatgttccagttttaggatacagagtaaatacctgtgacagattaagattatggagagctgatgcaacagaaagttttgacttttatgcattcaatattggtgattattatggtgccgttgaagaaaaagttgcatctgaaactctttcaaaagtgctatatccaaatgatggaactgatgaaggtagaaggttaagactaaaacagcaacacttttttgtaagttgttctcttcaggatatgttgaggagccttgaaaaaagatcaatagcaataacagaattcgctaaacattggacagtccaactgaatgatactcatcccgcgatcgcagttgcagaattaatgcgacttcttattgatcaatatcaaataggttgggataaagcttggaatataacaacctcatcagttgcttacaccaaccatacattactaccagaagccttagagaaatgggatttaggtttatttaatgatcttcttcctcgtcatctagaaattatttatgaaattaattggcgatttctacaacaattgcgactacgttatcctggtgatgacaagatccttcaaaaactctcaataattgatgaagaaggctccaaat

SEQ ID NO: 238118 - DNA, 844 bp, Unknown
  Bacterial polypeptide expressing nucleotide sequence isolated from the Sargasso Sea
tggatccctgctgagcacgcgatcggcattccccatgacatcccagtcctgggctacaaggtcaacacctgtgatcggcttcggctctggcgcgcaacagccaccgagtcgtttgacttctatgccttcaacattggtgattactacggggcggttgaagagaaggtgggttccgagacgctctccaaagttctttacccgaacgacggcaccgatgaaggccgccgcctgcgcctgaaacagcagcacttctttgtcagctgctctttgcaggacatgctgcgcaacctggagcagcgcaagatcccggtgagggaattcccgcagcactgggccgttcagctcaatgacacccacccagcaatcgcagtcgccgaactgatgcgcctgctgatcgacgacaaaaacctggattgggatgtggcctgggacatcaccagccgctcactggcctacacaaaccacaccctgctgcctgaagcactggagaaatggggcttgcccctgttcgccagcctgctgccgcgccacctggagttgatatttgagatcaaccgccgcttcctgcagcaggtacggctcaagcaccctggcgatgacgccatcctgcgcaagctctcaatcattgatgaggaaggccaaaaagccgtgcggatggctcacctcgcgaccgtgggctcgcaccacgtcaacggcgtggccaagctccacagcgatctggtgaagagcagcttgatgccggaatttgctcagctctggcctgataagttcaccaacgtcaccaatggcgtcacccctcggcgctggattggcctctgcaacccacagctgcgtggtctccttg

SEQ ID NO: 238119 - DNA, 829 bp, Unknown
  Bacterial polypeptide expressing nucleotide sequence isolated from the Sargasso Sea
aaatggctaaaaggtggatggccatgggagcttcctcaacctgatgaatcatgttttgttggttttggaggtagaactgaaagttatagagatgataaaggaaactacagatcaagatggataccttccgaacatgccattggagttcctcatgatgttccagtattgggatatagagtaaatacatgtgacagattaagattatggagagctgacgcaacggaaagttttgatttttatgccttcaatattggtgattactatggagcagtagaagaaaaagttgcatctgaaactctttcaaaagtgctatacccaaatgatggaactgatgaaggtagaagattaagacttaaacaacaacactttttcgtaagttgttctcttcaggatatgttgagaagtcttgaaaaaagatcaataccaataacagaatttcctcaacattggacagtccaattaaatgatactcatcctgctattgcagtagcagaattaatgcgtcttcttattgaccaatatcatttaggttgggatgaagcttggaacataacaacctcatcagtcgcgtataccaaccatacgttacttccagaagctctagagaaatgggatttaggtttattcaatgatctcctacctaggcatctagaaattatttatgaaattaattggcgatttctacaacaattaagactacgttatcctggtgatgacaaaattcttcaaaaactctcaataattgatgaagaaggctctaaatcagtaagaatggctcacttagctacaattggagcacatcatataaatggggtagccgctcttcact

SEQ ID NO: 238120 - DNA, 823 bp, Unknown
  Bacterial polypeptide expressing nucleotide sequence isolated from the Sargasso Sea
ttgaatgatacccatcctgctatagcagttgccgaattaatgcgacttcttattgaccaatatcaaataggttgggataaagcttggaacataactacttcctcagttgcttataccaaccacacattactgccagaagctttagagaaatgggatttaaatttatttaatgatcttctacctcgtcatctagaaatcatttatgaaattaattggagatttcttcaacaattaagactacgttttcctggtgacgacaaaattcttcaaaaactctcaataattgatgaagaaggctccaaatcagttcggatggctcacttggctacaattggagcacaccatataaatggtgtcgcagctcttcattcagatctaataaaaagacaacttcttccagaattcgcagtactatggcctgaaaaatttacaaatgtaactaatggagttactccaaggagatgggttgccctatctaatccatcattatctaaccttcttgaagaagaggttggtcctaattggataacaaatatggaacttcttaagaaattagaagaaaaaaaagatgacaacaatttcttacaaaaatttgaggaaactaaattaaatggcaaacgaaaattagctagttttatccattcaaaaactggaatacttgtagatccatcaagtttatttgatgttcaagtaaaaagaattcatcaatacaaaaggcaacatttaaatgccctacaaattatcgctcaatatctaagaatcaaaaatggtacaaacaagtatgaggacccaagaacaataatatttggaggtaaagctgccc

SEQ ID NO: 238121 - DNA, 801 bp, Unknown
  Bacterial polypeptide expressing nucleotide sequence isolated from the Sargasso Sea
attgggctatcaggtgaccggctatttcgcgccttcgtctcgatacggcagtcctgcggtgaatggcgtcgcggctttgcatacgaaattgctgaaaaataccgttttccgggatttctacaaacttttccccgaacgttttttcaacagaaccaatggcattaccccgaggctctggctgatgcaggccaacccggaattagccgaattgattagcagtcggttcggccatgactggggaaaaaacctggaggaactttgtggtctggaaacctttcaggaagatgaaactttccgcaaagaatggcgggagttgaaacaaatgaagaaacagcaactgattcgctggctggaaaaaaagaatgggtatttcctcaacccggattccatgttcgatgtccagatcaaaagaatccacgaatataagcggcaactcctcaacctgctttacaccgtttatctttataacaaattgaggagggaccaagatttcaagcccgaacctcggacggtgattctggcaggaaaagccgcacccggatattttgcggccaaactgatcatcaaacttgctcatgacattgcgggagtgatcaacaaggatcctccgacttcagcaaggcttcaactggttttcgttgaaaattatggagtcaccgtagcagaaaaactgatccccgccacggacctttcccagcatatctcgacagcaggcaccgaagcttcggggacaggcaacatgaaattttccctcaatggagctttgattctcggaaccctcgatggggcgaatatcgagat

SEQ ID NO: 238122 - DNA, 886 bp, Unknown
  Bacterial polypeptide expressing nucleotide sequence isolated from the Sargasso Sea
cgcgacggctggcaggtggagatcacggacaagtggctgaagggaggctggccctgggaattgccccagcccgatgaggcctgtttcgtcggctttggtggccgtaccgaaagctacatcgacgacaagggcacctaccgctcccgctggatccctaccgagcatgccatcggcatcccccacgatgtgcctgtgctgggctaccgcgtcaatatctgcgaccgcctgcgtctctggcgtgccgatgccaccgaaagctttgacttctatgccttcaacatcggcgactactacggcgccgttgaggagaaggtgggcagcgaaaccctctccaaggtgctgtacccgaacgacggcaccgatgaaggtcgccgtctgcgcctgaagcagcagcacttcttcgtaagctgctcccttcaggacatgttgcgcagcctcgataaccggggactacccgtcgaggacttccacaagtactggaccgttcagctcaacgacacgcaccccgccatcgccgtggcggagctaatgcgactgctgatcgacgaccgccatatggattgggacaaagcctgggacatcacgtcccggtcggtcgcttacaccaaccacactttgttgccggaggccctggaaaagtgggatctgaacatgttcggcaacctgctgccccgccatctggaactgatctacgagatcaaccgccgctttctccagcaactgcgtctgcgttatcccggcaacgacgccatccagcgcaagctgtcgatcattgacgaagacggcagcaaagctgtgcgcatggcgcatttagccacgataggtgcccatcacgtaaacggcgtggcagcgctgcactctgatctggtcaagaccgacctgctgg

SEQ ID NO: 238123 - DNA, 853 bp, Unknown
  Bacterial polypeptide expressing nucleotide sequence isolated from the Sargasso Sea
aaaactagaggccaaaaaagatgacaccaattttttacaaaaatttgaggaaactaaattaaatggtaaacgaaaattagctaattttattcattcaaaaacaggcataattgttaatccatcaagtttatttgatgttcaagtaaagagaattcatcaatataagagacaacatttaaatgctttacaaattattgctcaatatctaagaatcaaaaatggcacaaataacaatgaagttccaagaacaataatatttggaggtaaagctgctccaggttacttcatggcaaaactaatgattcgattcattaatggtattgcggatgtagtcaattctgatccagatatggatggtctattaagggttgtttttttacctgactataatgtaaagcttggtgaaatagtttatcccgctactgatctttcagaacaaatttcaactgctggaaaagaagcatctggaactgggaatatgaagtttgccatgaatggtgcattgactattgggaccttagatggagcaaatgtagaattaagagatcttgtgaagaaagagaatttctttctttttggaaaaactgaaagtgagattatggatttaaaaaataataattactcgcctaaaacttttattgatcaatgtccagaactaaaagaagtaatacgtttaattgaaattggtcactttagcaatggggataaagaattatttaaacctttattaaatagcttaactggaaatgacccattctttgttatggccgacttcgaggactatttaaataaacaggatgaagtcagtaaatgctggaataataaaaaatcttggaataaatggcattattaa

SEQ ID NO: 238124 - DNA, 2515 bp, Unknown
  Bacterial polypeptide expressing nucleotide sequence isolated from the Sargasso Sea
tatgagtcataacagtgagctgagcccaaataccagcggcgttactcccaaaaaacgttcaacaaaaaccgttgaaactaaaaaaaaaccagcacacgaaccctgcgagccctgtgatgccttacccgcttcttttactcgccatgttcgctatggattaagccgcggcgaaggggcgcgtggtgaattatttcaagcgctggctctcagcgtaaaagagcaaatgctggatgattggcgtgagacgcgcatcaaagatagctgttacgacaacaaacaagtggcctatttgtcactcgaatttttaatgggcagaacactaggcaatgccttgttaaacttagagttagagcaagatagccgcgaggcattaagccattattctgtttccctcgaggagatagaagaggccgaacatgacgctggcttaggcaatggtggccttggtcggcttgcagcttgttttctcgatagttgcgccagcatggacttatccgttactgggtatggcattcgttatgaatacggcatgttcgcccaaaagatagttgatggatatcaggttgagcgccctgatcgctggttacgtgagggaaatccatgggaggtacgtgtaccgcaccataatgtgacggtaaagttttttggtcacaccgaatcctatgtcgataaacaagggcgcaggcacatgatttgggttgatacccaagatgtgctcgccgtggcctacgatatgcctgtccccggttatcgtaatggccgcgtgaatagcttaagactttggaaggctgaagccaccgatgattttgacttagcagaatttaaccaaggcgattacacagaggccgtggcgcgtaaaaacctcgccgagcagatcactatggtgctttaccccaacgatgccagcgagaacggtaaggagctgcggctgcgtcagcaatattttttgtcttccgctagcttacaggcaattttaaaacgttgggtacatcaccatggcaatgatttcactcattttgctgaaaaaaatgtgatgcaattgaatgacacccacccaagtattgcggttcccgagttaatgcggctgctggtggatgaatatggtctcgaatgggatgccgcttggtcgatcaccagtcaaaccattgcttataccaatcatacgctgctacccgaggcattagagcgctggcctgtgcgtatgatggcattgatgctgccgcgtattttagaaatcatctatgaaatcaacgccagatacctcgatttagttgcccaccactggccgggggatggtgccaaactggccagcatgtcgattattcaagatggccccgatccccatgtgcgcatggcctatttagccatagtggccagcttttcggtgaacggtgtcgctggattacatacccaattgttaaagtcgggtctgtttaaggatttttatagcctgtggccggagaagtttaacaatcgtactaacggggtgacaccaagacgttggttagcccactgcaatcccgcgctcgccaaactgttaaccaaccatttaggcaaaggttgggtgacggacttaagccaactgacggcgctcaatgccttaacccaagatcctagctttatccaaaagtggcgggaggtgaagcaagccaacaaggcggtgctggccaagatgattgctaaggaatgtggcgtcgagtttgacccttcaatgctgtttgatgtgcaggtcaagcggatccacgagtacaagcgtcagctactcaatattctgcatgtgatccatctctaccatcaaatccagcaggggcatacagagcatctggtaccacgctgtgtgctgatcggtggtaaggctgcgcccggttactttatggcgaagctcatcatcaaactcgccagtaatgttgcccatatggtcaattgcgatcctgtggtggcgccttatctgcgctttgcgtttctgcccaattacaacgtcagtgcgatggaaaaaatctgccccggcaccgatgtctccgaacaaatctccaccgcgggtaaggaggcctctggcacgggcaatatgaagtttatgatgaacggcgcactcaccataggcaccttagatggcgccaatatcgagatgctcgaagaggtaggcgaggataacttcttcctctttggcctcaacgccgatcaagtggcccaaatgcgctgtgattaccaacctcagcggattattgccgagtcccaggctctatccgaagtcatggctttactcaagagcggccattttaacctactggaaccgggaattttcgacccgattatcgcctcgattgaaagcgcggacgaccagtggatgactgcggcggatttcgatagttatcgcctcgcccaagaggctgtggctaaggcttataaagatccgaaaaagtggacgcaaatgagcattcgcaacacggcggccagtggtcgcttctccagtgatgtgacgattgcaggctatcgggatgaaatttggaaactgtaa

SEQ ID NO: 238125 - DNA, 550 bp, Unknown
  Bacterial polypeptide expressing nucleotide sequence isolated from the Sargasso Sea
cccgcctccgatctgtcggagcagatttccaccgctggcaaggaagcctccggcaccggcaacatgaagttcgccatgaatggcgccctcaccatcggcaccctcgacggcgccaatgttgagatccgcgaactggtgggtgccgagaacttcttcctgttcggcaaaaccgtggaagagatcaaggctctcaaggagcagggctaccgtcccggcgacttcatcgccgccatcccagagctgcaggaagccctgcgactgatcgaaatgggccacttcagcaatggcgatggggaactgttccgcccactgatggacaacctcaccggcaacgatcccttcttcgtgatggccgactttggcgattacgtgcgggctcaagaagctgtaagcctggcctggaccgatcggatgcactggaatcggatgtccctgctcaacacggcgcggaccgggttcttctcatccgaccgctccatcgcggagtactgcaagaacatctggaacgtcgaccccctcaacgttgagatcacctgcgacgttcgctgat

SEQ ID NO: 238126 - DNA, 1651 bp, Unknown
  Bacterial polypeptide expressing nucleotide sequence isolated from the Sargasso Sea
agaaagttttgacttttatgccttcaatattggtgattactatggagcagtggaagaaaaagttgcatctgaaactctttcaaaagttctttacccaaatgatggaactgatgaaggtagaagattaagactcaaacagcaacactttttcgtaagttgttctcttcaggatatgttaagaagccttgaaaaaagatcaattccaataacagaatttcctaaacattggacagtccaattaaatgatactcatcccgctattgctgtagcagaattaatgcgacttctcattgaccaatatcaagtaggttgggataaagcttggaacataacaacctcatcagttgcttacacaaaccatactttacttccagaagctttagaaaaatgggatttaggtttatttaatgatctccttcctagacatctagaaattatttatgaaattaattggcgatttctacaacaattaagactacgttaccctggtgatgacagaatccttcaaaaactctcaataattgatgaagaaggggctaaatcagtaagaatggctcacttagctacaattggagcacatcatataaatggggtagcagctcttcactcagatctaattaaaaggcaacttcttcccgaatttgcaaaattatggcctgaaaaatttactaacgtaactaatggagttactccaagaagatgggttgctctctcaaatccatccttgtcttctcttctagaaaaagaagtaggtcctgattggataaccaatatggaacttctgaaaaagttagagggaaaaaaagatgacaccaattttttagaacaatttgaagaaactaaactcaatgggaagcgaaaattagctagctttatccattcaaaaacaggtataattgtcgatccatcaagtttatttgatgttcaggtaaagagaattcatcaatataaaaggcaacatttaaacgccttacaaattattgctcaatatctaagaatcaaaaacggtacaaacaagtataaagtaccaagaacaataatctttggaggtaaagctgctccaggttactttatggcaaaactaatgattcgattcattaatggtattgctgatgtagttaattctgatccagatatggatggtctattaagggttgtttttttaccagactataatgtaaagcttggtgaaatagtttatcccgctacagatctttcagaacaaatttcaactgccggaaaagaagcatctggaactggaaatatgaagtttgcaatgaatggagcattgactattggaaccttagatggagctaatgtggaattaagagaccttgtaaagaaagagaatttctttctttttggaaaaactgaaagtgaaattatggatttaaaaaataataattactcacccaaaacctatattgaaaaatgtccagagctgaaagagttaatacatttaattgaaattggccactttagtaacggcgataaagaactatttaaacctttattaaatagcttaactggatatgacccattctttgtgatggctgacttcgaggactacttaaaaaaacaggatgaagtcagtaaatgttggaatataaaaactcttggaataaatggcactattaaatactgcaagatc

SEQ ID NO: 238127 - DNA, 1522 bp, Unknown
  Bacterial polypeptide expressing nucleotide sequence isolated from the Sargasso Sea
caaaaaactgtagcttacttatcggcagaatttttaataggtcctcaattaagtaataacctcctcaatcttggcattactcaagaagccgaagatgcattaaaaagatttggtattgaatctttatcaacaatactcgaagtagaagaagaacctggattaggtaatgggggtcttggtagacttgctgcatgttatatggaatcattagcgtccctacaagtaccggcagttggttatggcattcgctacgaatttggcatattcaatcaattaatcagagatggttggcaagttgaagttactgataaatggctaaaaggtggatggccttgggaacttccacaacctgatgaatcatgtttcgttggctttggaggaagaactgaaagttatagagacgataaaggaaactacagatcaagatggataccttctgaacatgcaataggtgtccctcatgatgttccagtcttagggtacagggtaaatacatgtgacagattaagattatggagagctgatgcaacagaaagttttgacttttatgctttcaatatcggtgattactatggagcagtagaagaaaaagttgcctctgaaactctttcaaaagttctatatccaaatgatggaactgacgaaggtaggagattaagactaaaacaacaacacttttttgtaagttgttctcttcaggatatgttgagaagccttgaaaaaagatcaatagcaataacagaattccctaaacattggacagtccaattgaacgatactcatcctgctattgcagttgcagaattaatgagacttcttattgaccaatatcaaatagattgggataaagcttggaacataacaacctcttcagttgcttatacaaaccatacattactaccagaagctttagaaaaatgggatttaggtttatttagtgatcttcttcctcgtcatctagaaattatttatgaaattaattggagatttctacaacaattaagactacgttatcctggtgatgacaagatccttcaaaaactctcaataattgatgaagagggttccaaatcagttcggatggcccatttggctacaattggagcacatcacataaatggtgttgcagctctccactcagatttaataaaaagacaacttctgcctgaattcgcagctctttggcctgaaaaatttacaaatgtaactaatggagttactccaaggagatgggttgcactatctaatccatcactatcgaatcttttagaagaagaagttggtccaaactggatcacaaatatggaccttcttaagaagttggaagaaaaaaaagatgacaacaattttttgcaaaaatttgaggaaactaaactaaatggcaaaagaaaattatctaactttatccattcaaaaactggaatactggtggatccatcaagtttatttgatgttcaagtaaaaagaattcatcaatataaaaggcagcatttaaatgccctttcaatttattgccaatatt

SEQ ID NO: 238128 - DNA, 1051 bp, Unknown
  Bacterial polypeptide expressing nucleotide sequence isolated from the Sargasso Sea
atctatccatcactatcgaaccttttagaagaagaagttggtccaaactggataacaaatatggaacttcttaagaagttagaagaaaaaaaagacgacaaccattttttggaaagatttgaggaaaccaaactaaatggcaaaagaaaattagccagctttatccattcaaaaactggaatactggtagatccatcaagtttatttgatgttcaagtaaaaagaattcatcaatataaaaggcaacatttaaacgccctacaaattattgcgcaatatttaagaattaaaaatggtacaaacaagtatgaagtcccaagaacaataatattcggaggtaaagctgcaccaggttactttatggcaaaactaatgattagattcattaatggtattgctgatgtggttaattctgatccagatatggatggtttattaagagttgtttttctaccagactataacgttaaacttggtgaaatcgtttatcctgcaacggacctttcagaacaaatctcaactgctggaaaagaagcatctggaactggaaatatgaagtttgccatgaatggagcgttaacgattggaactttagatggagcgaatgttgaattaagagatcttgtgaaaaaagagaatttctttctttttggtaaaactgaaagtgaaattatggacttaaaaaataataactactctcccaaaacttttattgatcaatgtccagaactcaaagaggttttacgcttaattgaaattggccactttagcaatggggataaagaattatttaaacctttattaaatagccttacaggaaatgacccattttttgttatggctgactttgaagattacttgaataaacaggatgtggtcagtgaatgctggaatgataaaaaatcttggaataaaatggcattattaaatactgctagatcaggatatttttcttcagatagatctattagagagtactgtaaatctatttggaaggtctctccaatgcctgttgaaattacttgtgacatcgaagaattaactaattaat

SEQ ID NO: 238129 - DNA, 1228 bp, Unknown
  Bacterial polypeptide expressing nucleotide sequence isolated from the Sargasso Sea
ctgacggtcgctaccacctcctacaccaaccacacgctgctgccggaagcgctggagtcctggccagtagcgctgatggagcgtctgctgccgcggcacctgcaaatcatctacctgatcaacgccgagcatatcgatgcgctgcgtgccaaggacatccacgactttcgcctgctgcgcgcggtgtcgctgatcgaggaagaccacggccgccgcgtgcgcatgggcaacctggcttttctcggcgcgcacagcatcaacggcgtttccgcgctgcatacgcgactgatgcgcgacacggtatttcgcgatctgcaccggctctatcccgaccgggtgaacaacaagaccaatggcgtgaccttccgccgctggctgtttcaggtcaatccggggctgacgcatctgctggtcgacgctctcggtgagcaggttctgcatcgccccgaggatcatctccaggcgctcgaagccttcgccgagcgccaggatttccgcgacgaatatgcgctctgccgccagcgcaacaaggagctgctggccgagcgagtcaggcacgtgctggggatcagcctcgacaccacggccatcttcgatgtgcacgtcaaacgcatccatgaatacaagcgtcagttgctcaacctgctgcataccgtggcgctgtatcaggccatccgcaacgacccgaccaccgactgggtacctcgggtgaagatcttcgccggcaaggcggcggccagttatcgccaggccaagctgatcatcaagctggccaacgacatcagccgcaccatcaatggtgacccgaccgtacgcgggctgctcaaggtcgtgttcatccccaactacaacgtcagcctggccgaaaccatcattcctgccgccgacctttccgagcagatctccaccgctgggctggaagcttccggcaccagcaatatgaagttcgccctcaatggcgcattgaccatcggcacgctggatggcgccaacgtggaaatgtgcgagcgggtcggcgaagaccacatgttcatcttcggcatgactgcccagcaggttgccgcccggcggcgcctgggcctggagatgagcgatgtggtggcggattcggaacgtctggaggccgcgctcggcgccattcgcggcggggtgttctcgccggacgatccggcgcgctacgtgggcctggtggattcgctgctgtacgaggaccatttcatggtctgcg

SEQ ID NO: 238130 - DNA, 1462 bp, Unknown
  Bacterial polypeptide expressing nucleotide sequence isolated from the Sargasso Sea
aatgcgcattcttgttgaccgcgcagagcttggttgggatgaagcgtgggggatttgtacaaaagtatttgcatataccaaccacaccttgctaccagaggcacttgaaaagtggcctgcgcgcatgattgagaagatccttcctcgtcatctagaaatcatttatgaaattaaccaccgctttatggcagaggtcgataagaagtggcctggcgacaatgccatgaaagctaagctttcaatcattgaagaaggtaacgagaagatggttcgtatgggccacctgtcggtaatcggttcatttgctgttaacggtgtggcagaaatgcactctcgtcttgttaagtcgtctctgttcccagagttcgatgaactatatccaggtaagctaactaacgtaaccaacggtattacgccacgccgctggttgaaagcgtgtaatccagcgctgtctaagctaatcgataaaaagattggtgacgactggccgcgcgacttagacaaactgcaagggttggctaaatttgcaagcaataaaacgttccagaagcagttcatgaaagtgaagcttgagaacaaagagttgctagcagaggaaattcgcaagtcacttgatatagaagtagacgtcaacgccattttcgatgtgcagattaagcgtttgcacgagtataagcgtcaacacttagcgcttctgaatattatggcgctataccgtcgtattctagaaaaccctgattacgatatgcacccgcgtgtatttgtgtttggtgctaaagccgcaccgggctacaagcttgcgaaagatattatcttcgctattaacaaggtagcggataagatcaacaatgatccgcgcgtaaataacaagattaaagtagcattcttaccaaactaccgtgtatcactcgctgaaaaaatgattccagcggcagacgtatctgagcaaatcagtacggcaggtaaagaggcatctggaaccggtaatatgaagcttgcactgaacggtgcggtaactattggtacacttgatggtgcaaacgttgaaattgctgaagaagtaggcgatgacaacatctttatcttcggacttacagtagaagaagtgaacgagcttaaagcgaatggctataacccacatgactactactataaagatccagaaattaaagctgtgctggattggttagaaacggattactttacgccaggtaaaccaggtgcattggtgtcaattaagcaaagcttacttgataacggtgacccgtacatggtgcttgcagatttccgtgcttattctgatgcacaaattgcagttgatgctgcataccgcgacaaagcgcgttgggcagaaatggccatcatcaatacagcgaagatgggtaagtttacctcagatcgttcaattcgtgactacgtagaacgcgtttggaaactttcaccgtgtaagattgaaagctaa

SEQ ID NO: 238131 - DNA, 892 bp, Unknown
  Bacterial polypeptide expressing nucleotide sequence isolated from the Sargasso Sea
tttatccattcaaaaactggaatacttgtagatccatcaagtttatttgatgttcaagtaaaaagaattcatcaatataaaagacaacatttaaacgccctacaaattattgctcaatatttaagaatcaaaaatggtacaaacaaatatgaagttccaagaacaataatatttggaggtaaagctgcaccaggttactttatggcaaaattaatgattcgatttattaatggtattgctgatgtagttaattctgacccagatatggatggcttattaagagttgtttttctaccagattataacgttaaacttggtgaaatagtatatcccgcaacggatctttcagaacaaatttcaactgctgggaaagaagcatctggaactggaaatatgaagtttgctatgaatggagcgttaacgattggaaccttagatggagctaatgtggaattaagagatcttgtgaaaaaagagaatttctttctttttggtaaaactgaaagtgaaattatggatttaaaaaataataattactctcccaaaacttttattaatcaatgtccagaacttaaagaggttatacgccttattgaaattggccactttagcaatggggataaagagttatttaaacctttattaaatagcttgactggacatgacccattttttgttatggctgactttgaagactacataaataaacaggatgttgtcagtgaatgctggaataataaaaaatcttggaataaaatggcattattaaatactgctagatcaggatatttttcttcagatagatctattagagagtactgtaaatctatttggaaagtctctccaatgccagttgaaattacttgcgatgtagaagaattaactaattgat

SEQ ID NO: 238132 - DNA, 2548 bp, Unknown
  Bacterial polypeptide expressing nucleotide sequence isolated from the Sargasso Sea
atggctaatccaatgaattccaacgaaccctttgatctacgcttgcctactccaggctgctatttagatcctgagaaagctggcatggattcagatgctgtttttcaaggaatgacagcccatcttttttatacccttggaaagttagctacttctgcaagtcctcacgacttgtatatggctttgagttatgcagttaaagataggctaatgacaagatatttagccagccaagaagtcataagaaaaaaaccacaaaaaacagtcgcctacttatcagcagaatttttaataggccctcaattaagtaataatcttctaaatcttggaataactcaagaggcagaagatgctttaaaaagatttggtattgaatcattatcaacaattcttgaagttgaagaggagcctggattaggaaatggtggacttggcagacttgcagcttgttatatggaatcattagcatctctacaagttccagcagttggttatggtattagatatgaatttggaatattcaatcagttaattagagatggttggcaagttgaagtaactgacaaatggttaaaaggtggatggccttgggaacttccacaaccagacgaatcatgttttgttggttttggaggaagaactgaaagttatagagacgataaagggaactacagatcaagatggattccctctgaacatgctattggagttcctcatgatgttccagttttaggatacagagtaaatacatgtgacagattaagattatggagagctgatgcaactgaaagttttgacttttatgcattcaatattggtgattattatggcgcagtagaagaaaaagtggcctctgaaacactttcaaaagttctatatccaaatgatggaactgacgaaggtagaagattaagactcaaacaacaacacttttttgtaagttgttctcttcaagatatgttgagaagccttgaaaaaagatcaataccaataacagaattccctaagcattggacagtccaattaaatgatacccaccctgctattgcagttgcagaattaatgcgacttcttattgaccaatatcaaataggttgggataaagcttggaacataacaacctcttcagttgcttataccaaccacacattactaccagaagctttagagaaatgggatttaggtttatttaatgatcttcttcctcgtcatctagaaattatttatgaaattaattggagatttctacaacaactaagactacgttatcctggtgatgacaagatccttcaaaaactctcaataattgatgaagaaggctccaaatcagttcgaatggctcatttagctacaattggagcacatcacataaatggtgttgcagctcttcactcagatctcataaaaagacaactactgcccgaattcgcagcattatggcctgaaaaatttacaaatgtaactaatggagttactccgagaagatgggttgccctatctaacccatcactatcgaaccttctagaagaagaagttggtccaaattggataacaaatatggaacttctaaagaagttagaagaaaaaaaagatgacaataattttttagaaaaatttgaggaaaccaaactaaatggcaaaagaaaattatctagttttatccattcaaaaactggaatacttgtagatccttcaagcttatttgatgttcaagtaaaaagaattcatcaatataaaagacaacatttaaacgccctacaaattattgctcaatatttaagaattaaaaatggtacaaacaaatatgaagttccaagaacaataatattcgggggtaaagctgcaccaggctactttatggcaaagctcatgattagatttattaatggtattgctgatgtagttaattctgatccagatatggatggtttattaagagttgtttttctaccagactacaacgttaaacttggtgaaatagtttatcccgcaacggatctttcagaacaaatttcaactgctggaaaagaggcatctggaactggaaatatgaaatttgcaatgaatggagcgttaacgattggaaccttagatggagctaatgtcgaattaagagatcttgtaaaaaaagagaatttcttcctttttggtaaaactgaacgcgaaattatggacttaaaaaataataattactctcccaaaacttttattgataaatgcccagagcttaaagaggttatacgcctaattgaaattggacactttagcaatggggataaagaattatttaaacctttattaaatagcttgacagggcatgacccattttttgttatggctgactttgaagattacttaaataaacaggatgtggtcagtgaatgctggaataataaaaaatcttggaataaaatggcattattaaatactgctagatctggatatttttcttcagatagatctattagagagtattgtaaatctatttggaaagtatctcctatgcctgttgaaattacttgcgatgtggaagaattaactaattaat

SEQ ID NO: 238133 - DNA, 991 bp, Unknown
  Bacterial polypeptide expressing nucleotide sequence isolated from the Sargasso Sea
atggaacttcttaaaaagttagaagaaaaaaaagatgacaacatttttttacaaaaatttgaggaaaccaaactaaatggcaaaagaaaattagccagctttatccattcaaaaactggaatactggtagatccatcaagtttatttgatgttcaagttaaaagaattcatcaatataaaaggcaacatttaaacgccctacaaattattgcccaatatttaagaatcaaaaatggtacaaacaagtatgaagtcccaagaacaataatattcggaggcaaagctgcgccgggttactttatggcaaagctaatgattagattcattaatggtattgctgatgtggtaaattctgatccagatatggatggtttattaagagttgtttttctaccagactataacgttaaacttggtgaaatagtttatcctgcgacggatctttcagaacaaatctcaactgctggaaaagaagcatctggaactgggaatatgaaatttgccatgaatggagcgttaacgattggaaccttagatggagcgaatgtggaattaagagatcttgtgaaaaaagagaatttctttctttttggtaagactgaaagcgaaattatgggcttaaaaaataataactactctcccaaaacttttattgatcaatgtccagaactcaaagaggttatacgccttattgaaattggccactttagcaatggggataaagaattatttaaacctttactaaatagccttaaaggccatgacccattttttgttatggctgactttgaagattacttaaataagcaggatgtggtcagtgaatgctggaataataaaaaatcttggaataaaatggcattattaaatactgctagatcaggatatttttcttcagatagatctattagagagtactgtaaatctatttggaaagtatctccaatgcctgttgaaattacttgcgacgtagaagaattaactaattgat

SEQ ID NO: 238134 - DNA, 1894 bp, Unknown
  Bacterial polypeptide expressing nucleotide sequence isolated from the Sargasso Sea
tcggcgacgggctatggcctcaactaccagtacggcctgttccgtcagtcgtttgccgatgggcaacagatggaagccccggatgactggcatcgtggcagctacccgtggttccgtcacaacgaggcgctggatgtgcaggttgggattggcggtaaggtcagcaaagaaggccactgggagccaggttttaccatcaccggtcaggcctgggatctgccagttctcggctaccgtaacggcgtagcgcaaccgctgcgtctgtggcaggccagccacgcgcatccgtttaacctgaccaaatttaacgacggtgatttcctgcgcgcagagcagcagggcatcgacgccgaaaaactgacgaaagtgctgtacccgaacgataaccacaccgcgggtaaaaagctgcgcctgatgcagcagtacttccagtgtgcctgttccgtagctgacattctgcgccgccatcatctggcagggcgtaaactgcatgagctggctgattttgaagttattcagctcaacgatactcacccgaccattgccattcctgagctgctgcgcgtgctgattgatgagcaccagatgagctgggacgatgcgtgggccattaccagcaaaacctttgcttacaccaaccacacccttatgccagaggcgctggagtgctgggacgagaagcttgtgaaagcgctactgccgcgccatatgcaaatcatcaaagagattaacgagcgctttaagacgttggtcgataaaacctggccgggtgatgctgaagtctgggcgaagctggcggtggtgcacaacaaacaggtgcgcatggctaacatgtgcgtggtcagcggctttgctgttaacggtgtggcggcgctgcactccgatctggtggtgaaagatctgttccctgaatatcaccagctctggccgaacaaattccataacgtcaccaatgggattaccccacgtcgctggattaagcagtgcaacccggcgcttgccgcactgctggataaaacgctgaaaaaagagtgggccaacgacctcgaccagttgattaacctggaaaaatatgcagacgacgcgaagttccgtcagcagtatcgcgacatcaagctggcgaacaaagagcgcctggtgaagtttattaaagcgcgtaccggtattgaaataacgactaacgctatctttgatattcagattaaacgtctgcatgaatacaagcgtcagcacctcaacctgctgcatattctggcgttgtacaaagaaatccgtgagaacccgcaggcagatcgcgtgccgcgcgtattcctgtttggcgcaaaagctgctccaggttactacctggcgaaaaatatcatcttcgccattaaccaggttgcacaaactatcaataacgacccgcaagtgggcgacaagctgaaggtcgtcttcctgccggattattgtgtctcggcggcggaaatgctgatcccggcggcggatatctctgagcagatttcaaccgcagggaaagaggcttccggcaccggtaacatgaagctggcgctgaacggtgcgttaaccgttggtacgctggatggcgcaaacgtcgaaatcgccgagaaggtgggtgacgagaatatctttatctttggtcataccgtggaagaggtgaaggtgctcaaagccaaaggctacgacccggtgaaatggcgtaaaaaagacaaagtgctggatgctgtcctgaaagagctggaaagcgggaaatacagcgacggcgacaagcatgcctttgaccagatgctgcacagtatcggcaagcagggcggcgacccgtatctggtgatggcggacttcgcggcctacgttgaagctcagaagcaggttgacgtgttgtatctgaccaggaagc

SEQ ID NO: 238135 - DNA, 1153 bp, Unknown
  Bacterial polypeptide expressing nucleotide sequence isolated from the Sargasso Sea
agatttaattaaaagacaactacttcctgaatttgcagcactatggcctgaaaagtttacaaatgtaactaatggggttactccaaggagatgggttgccctatcaaatccatcattatcgaaacttcttgaggaagaagttggtccaaattggattacaaatatggaacttcttaagaagctagaagaaaaaaaagatgacaataattttttacaaaaatttgaggaaactaaactaaatggcaaaagaaaattagctagttttatccattccaaaacaggaatacttgtagatccttcaagtttgtttgatgttcaagtaaaaagaattcatcaatataaaagacaacatttaaacgcgcttcaaattattgctcaatatttaagaatcaaaaatggtaacaacaagcatgaagtcccaagaacaataatattcggaggtaaagcagcaccagggtactttatggcaaagctgatgattcgctttattaatggtattgctgaagtagttaactctgatccagatatggatggcttgttaagagttgtttttctgccagactataacgttaaacttggtgaaatagtttatcccgctactgatctatcagaacaaatttccactgctgggaaagaagcatctggaactggaaatatgaagtttgccatgaatggagcgttaacgattggaaccttagatggagctaatgtggaattaagagatcttgtgaaaaaagagaatttctttctttttggtaaaactgaaagcgaaattatggatttaaagaataataattactctcccaaaacctttattgatcaatgtccagagctcaaagaggttatacgtcttattgaaattggccactttagcaatggggataaagaattatttaaacctttattaaatagcttgactggacatgacccattttttgttatggctgacttcgaaaactacttaaataaacaggatgttgttagtgaatgctggaataataaaaaatcttggaataaaatggcattattaaacaccgccagatcaggatatttttcttcagatagatctattagagagtattgtcaatctatttggaaagtctctccaatgcctgttgaaattacttgcgacgtagaagaattaactaattaa

SEQ ID NO: 238136 - DNA, 928 bp, Unknown
  Bacterial polypeptide expressing nucleotide sequence isolated from the Sargasso Sea
ttgtcgagcacgtacctccacaacgacgtcgggagcctccagcgctcgctcgtgcgacacgtcgagtacacgttggctcgacgacgatacaagttcgataaggggtcgttttatcaggccaccgcgcactcggttcgagatcgtttgatcgagcggtggacggatacgcagcaatactcggcgaaaaagggggccaaaaaggtgtactacctctcactcgaattcttgatcggacgatcgctcgggaacgcggtgtcgaatctcggcctgaggggatcgtacgcagaggcgttgcgtcagattggatacaatctggaggacatcatgtcggaagagaaggagcccgcgctaggaaacggcggtttagggaggctggcgtcgtgtttcctcgacacgctcgcgacgcaaaactacccggcgtgggggtacgggattcggtataaatacggcatgttcgagcaacgaataatcaatgggaaacaggccgagtttccggattactggctcaccgacgggaacccgtgggaggtggaacgattggacgttcaatatccggttcgattgttcggccacgtgcgcgaggttcaagattcaaacggaaacacgctccgcgcgtgggaagggggtgaagtggtcatggcgcaggcatacgacacgccgattcctggttacggcacgtacaacacgaataatatgcgtttatggagtagtaagccgtcgcacgaatttgactttgcgtcgttcaacgccgggaattattacggagccgtcgaggcgaaggagcgttgcgaaagcatcacctcagtgctttaccccaacgacaccacggaagaagggaaacggttacgtctgaaacagcagtatttcttcgtcagcgcgacgcttcaagatatttaccgtcggttcaaaaagaatgtcgggcgcggat

SEQ ID NO: 238137 - DNA, 1707 bp, Unknown
  Bacterial polypeptide expressing nucleotide sequence isolated from the Sargasso Sea
gcgccgttgaggagaaggtgggcagcgaaaccctctccaaggtgctgtatcccattgacggcaccgatgaaggtcgccgtctgcgtctgaagcatcagcacttcttcgtgagctgctccctgcaggacatgctgcgcagcctcgacaaccgcgggctatccgttgaggacttccccaagtactggaccgttcagctcaacgacacccaccccgccatcgctgtggcggagctgatgcgtctgctgatcgacgaccgccacatggattgggacaaggcctgggacatcacctcccgttccgttgcctacaccaaccacaccttgctgccggaggccctggagaagtgggacctgaacctgttcggcaacctgctgccccgccacctggaactgatctacgagatcaaccgtcgcttcctccagcagctgcgtctgcgttaccccggcaatgacgccatccagcgcaaactgtcaatcatcgatgaagacggcagcaaggctgtgcgcatggcccacctggccaccatcggtgcccaccatgtgaatggcgtggcggcactgcactccgatttggtcaagaccgatctgctgccggaattcgctgagctctggcccgagaagttcaccaacgtgaccaatggcgtcaccccacgccgttgggtggccctggccaaccccgagctgtccaccctgctcaacgagcacatcggcgaggactggatctccaacatggagaacctgcgcaagctggaggagcgccaggacgaccagggcttccttgagcactggggcaacaccaagctgtcggtgaagcgcaagctggccagctacatccatcgcaacaccggcgtgctggtagatccctccagcctgttcgacgttcaggtgaagcgcatccatgaatacaagcgccagcacctcaatgctctgcaggtgatcacccagtacctgcggatcaagaacggccgggccgacagcatggccccccgcaccgtgatcttcggtggcaaggccgctcctggctactacatggccaagctgatcatccgcttcatcaacggcatcgccgagaccgtcaacgccgatcccgacatggacggccgcctgcgggtggtgttcctgccggattacaacgtgaagctcggcgagcaggtctaccccgcctccgacctctccgagcagatctccaccgccggcaaggaagcctccggcaccggcaacatgaagttcgccatgaatggtgccctcaccatcggcaccctggatggcgccaatgtggagatccgcgagctggtgggcgctgagaacttcttcctgttcggcaagaccgtggaggagatcaacgagctcaagcagagcggctacaaccccggcgaattcatcaacgccatgccggagctgcaggaagctctgcgcctgatcgagatgggtcacttcagcaatggcgacagtgagctgttccgtcccttgctggacaacctcaccggcaacgaccccttcttcgtgatggcggacttcgccgactacctacgggcccaggaggccgtcagcctcgcctggaccgatcgcatgcactggaaccggatgtcgctgctgaacaccgcccgcacagggttcttctcctctgaccgatccatcggcgagtactgcaagaacatctggaacgtggatcccctcaacgtcgaaatcacctgcgacgtgcgctgat

SEQ ID NO: 238138 - DNA, 487 bp, Unknown
  Bacterial polypeptide expressing nucleotide sequence isolated from the Sargasso Sea
gatgtaccaagcgacggcgcagagcgttcgcgaaggattggtcgaccgatggaacgagacgtacgcgcactttcacaagaagaatccgaagcaagcgtactacttgtccatggaatacttgcaaggtcgcgcgttgacgaatgcgatcggtaacatgggactcacgggtgagtactctgacgcgcttcgttctctcggatacacgctcgaggacgtcatgagcgtcgaacgcaacgccggtttgggtaacggcggcttgggacgcttggcgtcttgctttttggattccatcgccacgctcgatcttccggcgtggggttatggtttgcgttacaagtacggtttgttcaagcaaggcgtcgataaggcgaccggtgaacaattggaattcgccgatgactggctcgaagtgggcaacccgtgggaaatcccgcgcccgcaggtgagctatccgatttccttttacggaagcgtcgtcgacggtaag

SEQ ID NO: 238139 - DNA, 1152 bp, Unknown
  Bacterial polypeptide expressing nucleotide sequence isolated from the Sargasso Sea
aaggcgaagaccgcgaagacggccgtcgtcgaagaagaagaggaggaagaagaggaacccgcgatggtgcgcatggctaacttatgctgcatctccggtatggcgatcaacggtgtcgccgccattcactccgaaattgtgaaggatgtcgtcttcaacgacttttacaagctcttcccggaaaagttccaaaacaagacgaacggcgtcacgccgcgacgttggttggctttctgcaacccggaactctccgccgtcatcaccaagtgggttggcagcgacaagtggatcaccgacaccgatgaactccgcaagttggccgacaacgcctcaaacccggagctccaagcggagtggaaggcggcgaagctcgcccgcaagcaaatctgcaaggactacatcaagaaggtcacggacattgacgtcccgattgattccatgtttgacattcaggtcaagcgcatccacgagtacaagcgccaattcctgaacatcctaggcattatttaccgttacaagcagatgaaggcgatgacgccggaggagcgcgccaagtgcgtgccgcgcgtctgcgtcttcggcggcaaggcgtacgccacttacttgcaagccaagcgcatcgtccgactcatcaacaacgtcggtaacgttgtgaacaacgacccggagatcggtgacctcctcaaggttgtcttcgtcccggattacaacgtttccttggctgaaacgttgatcccggcgtctgaactttctcagcacatctccaccgcgggcaccgaagcctccggtacttccaacatgaagttccaaatgaatggttgcttgatcatcggtaccctcgatggtgcgaacgttgaaatccgagagtgcgttggtgaggataacttcttcttgttcggtatcaccgatcccgaagttgaaccggcgcgcgcggaacgcgcggcaggcaagttcatcccggatccgcgtttcacggaaacgtgcgagtacgtgcgtagcggcgtgtttggtgacaagttcgaagaactcttgggttctctcgaaggcaacgaaggtttcggccgaggtgactacttcctcgtcggtaaggatttcgcctcctacctcgatgcacaagagcgcgtcgacgccgcgtacaccgaatccgccggc

SEQ ID NO: 238140 - DNA, 1440 bp, Unknown
  Bacterial polypeptide expressing nucleotide sequence isolated from the Sargasso Sea
tatggctaattcaatgaataccaacgaaccctttgatctacgtttgcctactccaggctgctacctagatcctgagaaagctggcatggattctgatgctgttttccaaggaatgacagcccatctcttttatacacttggaaagttagctacttctgcaagtcctcatgacttatatatggctttaagttatgcagttaaagataggctaatgacaagatatttagccagccaagaagtcataagaaaaaaaccacaaagaacagtcgcctatttatcagcagaatttttaataggccctcaattaagtaataatcttctcaatcttggtataaccctagaggcagaagaggctttaaaaagatttggtattgattcattgtcaacaatacttgaagttgaagaagagcctggattaggtaatggtggacttggcagacttgcagcttgttatatggaatcattagcatctctacaagttccagcagttggttatggtattagatatgaatttggaatattcaatcaattaattagagatggttggcaagttgaagttactgacaaatggttaaaaggtggatggccatgggaacttccacaaccagatgaatcatgtttcgttggttttggtggaagaactgaaagctatagagacaataaaggtaattacagatcaagatggattccttcagaacatgctattggagtccctcatgatgttccagttttaggatacagagtaaatacatgcgacagattaagattatggagagctgatgcgacagaaagtttcgacttttacgcattcaatattggcgattattatggtgcagtagaagaaaaagttgcatctgaaactctttcaaaagttttatatccaaatgatggaactgatgaaggtagaagattaagacttaaacaacaacacttttttgtaagttgttctcttcaggatatgttgagaagccttgaaaaaagatcaattccaataacagacttccctaagcattggacagtccagttgaatgatacccatcctgctattgcagttgcagaattaatgcgacttcttattgaccaatatcaaataggctgggataaagcttggaatataacaacctcctcagttgcttataccaaccacacattattaccagaagctttagagaaatgggatttaggtttatttaatgatcttcttcctcgtcatcttgaaattatatatgaaattaattggagatttctacaacaattaagattacgttatccaggagatgacaagatccttcaaaaactctcaataatcgatgaagagggttcaaaatcagttcggatggctcatttggctacaattggagctcatcatattaatggtgttgcagctctccactcagacttaataaagaggcaacttcttcctgaatttgcagctctatg

SEQ ID NO: 238141 - DNA, 660 bp, Unknown
  Bacterial polypeptide expressing nucleotide sequence isolated from the Sargasso Sea
gtattgctgatgttgttaattctgatcctgatatggatggtttactaagagttgttttcttacctgattataatgtaaaacttggtgaaatagtttatccagcaacagatctttcagaacaaatttcaactgccggaaaagaagcatctggaactggaaatatgaagtttgccatgaatggagcattgactattggaaccttagatggagctaatgtggaattaagagatcttgtgaaaaaagaaaatttcttcctttttggaaaaactgaaagtgaaattatggatttaaaaaataataattactcgcccaaaacttttattaatcaatgtccagagctaaaagaggttatacgtttaattgaaattggtcactttagtaacggggataaagaattatttaaacctttattaaatagcttaactggatatgacccattctttgtaatggctgacttcgaagattacttaaataaacaggatgaagtaagtaaatgctggaataataaaaaatcttggaataaaatggcattattaaatacagcaagatcaggatatttttcatcagatagatcaattagagaatattgccaatcaatttggaaagtctcaccaatgcctgtagagattacttgcgatgtagaagaaataactagttaat

SEQ ID NO: 238142 - DNA, 2515 bp, Unknown
  Bacterial polypeptide expressing nucleotide sequence isolated from the Sargasso Sea
atgagtcataacagtgagctgagcccaaataccagcggcgttcccccaaaaaaacgtgccactaaggccgcgccgagtaagcccaaagcgacactcgaaccctgcgagccctgtgatgccctgcccgcgacctttaatcgccacgtgcgttacggtttaagccgcggcgaagtggctcacggtgagttatttcaagcgttggcactcagcgttaaagagcaaatgttggatgagtggcgtgagacgcgcatcaaagatagctgctatgacaacaagcaagtggcctacttatcgctggagtttctgatgggcagggcattaggtaatgccttgttaaatttagatttagagcaagacagccgcgaggcgcttagccaatattccgtgtctcttgaggagcttgaagaggccgaacacgatgcaggtttaggtaatggtggccttgggcgactcgccgcctgttttcttgatagctgcgccagcatggatttatccgtcacgggatacggcattcgttacgaatacggcatgttcgcccagaagattgtcgatggctatcaggtagagcgtccagaccgttggctgcgtgagggcaacccgtgggaggtgcgtgttccgcaccataatgtgacggtaaagttcttcggtcacacagaatcctatgtggataaacaagggcgcagacacatgatttgggtcgatacccaagatgtgcttgccgtggcctatgatatgcccgtgcccggttatcgcaatggccgggtgaatagcctcagactctggaaggccgaagcgacagatgactttgatttagctgagtttaaccaaggggattacacagaggcggtggcgtgtaagaacctcgctgaacagatcactatggtgctgtaccccaacgatgccagcgaaaacggtaaagagttgcgactgcgtcagcagtactttttatcctccgccagcctgcaggcgattttaaagcgttgggtgcatcaccacggccatgacttcagtgagtttgccgcgaaaaatgtgatccaattgaatgacactcacccgagtattgccgtccccgaattaatgcggctactggtggatgaatatggcctcgaatgggacgccgcctgggcgattaccagccaaactatggcctataccaatcacacattgttgcccgaggcgttagagcgctggcccgtgcgtatgatggcgctgatgttgccgcgaattttagaaatcatctatgaaatcaacgccagatacctagatttagttgcccaccactggccgggggatggcgccaaactggccagcatgtcgatcattcaagatggtcccgatccccacgtgcgcatggcgtacttagccatagtagcgagcttttcggtaaacggcgtggcggcgctgcatacccagttattaaagtcgggcctgtttaaggatttttatagcctgtggccggagaagtttaacaatcgcaccaatggcgtgaccccaagacgttggttagcccactgcaatcccgcgctcgccaaactgttaaccagccatttaggtaagggatgggtgacagacttaagccagctgacggcgctcaatgccttaacccaagacgccagctttattcaaaagtggcgtgaggtgaaacaagccaacaaggtgcaactcgccaagatgatcgccaaggaatgtggcgtcgagtttgaccctgcgatgctgtttgatgtgcaggttaaacggatccacgagtacaagcgtcagttactcaatattctgcatgtgatccatctttaccatcaaatccagcaggggcacacggagcacctagtgccacgctgcgtgttgatcggtggtaaagcggcgcccggttactttatggcgaagctcatcatcaaactcgccagtaatgttgcccacatggtcaactgcgatcctgtggtggcgccttacctgcgctttgcgtttctgcccaattacaacgtcagtgccatggaaaaaatctgtcccggcaccgatgtctccgaacaaatctccaccgcgggtaaggaggcctctggcacgggcaatatgaagttcatgatgaacggcgcactcaccataggcaccttagatggcgccaatatcgagatgcttgaagaggtgggcgaggataactttttcctctttggcctcaacgccgagcaagtgacccaaatgcgctgcgattatcaaccgcagcggattatcgccgagtcccacgccttatccgaagtcatggccttactcaagagcggccatttcaacctgctggaaccggggattttcgaccccattatcgcctcgattgaaagcccggatgatcagtggatgacggcggcggatttcgacagttatcgccttgcccaagaggctgtggctaaggcctataaagatccgaaaaagtggacgcaaatgagtattcgcaacacggcagccagtggtcgcttctccagtgatgtgacgattgctggctatcgagatgatatttggaaactgtaac

SEQ ID NO: 238143 - DNA, 886 bp, Unknown
  Bacterial polypeptide expressing nucleotide sequence isolated from the Sargasso Sea
tcattcaaaaactggaatacttgtagacccatcaagtttatttgatgttcaagtaaaaagaattcatcaatataaaaggcaagatttaaacgctctacaaattattgctcaatacttaagaatcaaaaatggcacaaataagtatgaagttccaagaacaataatattcggaggtaaagctgcaccaggttactttatggcaaaactcatgattcggtttattaatggtatcgctgatgtagttaattctgatccagatatggatggtttattaagagtagtttttctcccagactataacgttaaacttggtgaaatagtttatccagctacggatctttcagaacaaatttcaactgcaggtaaagaagcctctggaactggaaacatgaaatttgctatgaatggagccttaacgattggaaccttagatggagctaatgttgaattaagagatcttgtgaaaaaagagaatttctttctttttggtaaaactgtaagcgaaattatggatttgagaaataataattactgtcccaaaacatttattgataagtgtcctgagcttaaagaggttatacgcttaattgaaattggccatttcagtaatggggataaagaattatttaaacctttattaaatagcttgactggacatgacccattttttgttatggctgactttgaagattatttaaataaacaggacgttgttagtgaatgttggaataacaaaaaatcatggaataaaatggcattattaaatactgctagatcaggatatttttcttcagatagatctattagagagtactgcaaatctatatggaaagtttctccaatgccagttgaaattacttgcgacgtcgaagaattaactaattaa

SEQ ID NO: 238144 - DNA, 2476 bp, Unknown
  Bacterial polypeptide expressing nucleotide sequence isolated from the Sargasso Sea
tatggctaccaagaagaagacagaccaggatctccaactggataaagatcagctcaaggcgagtatcgtgcgtcacctgcgttctaccttgggtacaagcgaacagaaagcctcgccagaagcgtggtggaaagcgaccgcagccgccgtcaacgaacaggtgtacgagcgcctgacccgtactcagcagactcacttcaagaaagatactcgtgcgattcactatctctctgctgaattcctgatggggcgtttgacctccaacaacctgcacaacctctccctgtacaaaatttgcgaagaggcgctgggtgaactcggtctggagctgaccgatctgtgtgaacaagagcccgacatggcgctcggcaacggcggtctgggccgtctggccgcctgcttcatcgattccctggcgaccctgaactacccggcggtcgggtatggtatccactacgagcacggcctgttccgtcaagaaattcaggatggccgccagattgagcgccccgactcctggcgtgaatatggcaacccctgggagatctgccgcccggaatccgtgcaggagatcccgctctatggctatgtcgagaccgtgtttggcgacaacggtggcctcaagaaggtgtggcacgccggccgcaagatcaaaggggtgccttgggatatcccggtggtcggttttggcggtcataccgtcaacatcctgcgcctgtgggaatcccgcgcctccgagttctttgactgggacgtgttcaacgccggtggctatatcgattcccaggcggagaaagcccaggccgagaccatctccaaggtgctctatccgaacgatgagaccgatgcgggcaaagagctgcgcctgatccagcagtacttcttctgtgcctgctccatcaaggacatcatgcgtcgctacaagcgggtgcatggcgccgacttcagcaactttgccgcccagattgccatccagctcaacgatacccaccccaccgtggccatcccggaactgatgcgggtgctggtggatgaagaggggctgacctgggacgcggcctgggccatcagctatcaggtcttctcctacaccaaccacaccctgctgccggaagcgctggagaagtggtcggtcagtctgttcgagaaggtgctgccccgtcatcttgaggtgatttacgagatcaacgcccgcttcctgagcgagctggttgaacccaagtggccgggtaacgatgccatcaaggccaagctctccatcatcgaagagggtgatgtgcgcaaggtgcgcatgggcaacctgtgcgtcatcggctcttccaaggtcaacggtgtggccgagatccactccaagctggtgaaggaagacttgttccccgagtatgccgagctgtggccccagaagatgtgcaacgtcaccaacggggtgaccccgcgtcgctggctgctggcttgcaacccggaactggccgagctttacaacgaggtggtgggcaaagagtggccgctgcagctcgacaagctgcgcagcgtggtcaagtttgccgacgacaaggcattccagcagcagttcatgaccatcaagcgccacaacaaggagaagctggtcaaggtgatcaaggccgaaaccggcatcgaggtgagctcggaggcgatctttgacgtccagatcaagcgtctgcacgagtacaagcgtcaacagctgaacctcatccatatcatggcgctctaccgtcgcctgctggccaaccccgactatgacatgcacccgcgggtgttcatcttcggctccaaggcggcgcccggttacaagctggccaaagacatcatctacgccatcaacaagctggcggagcgggttaacaacgatgcgcgcatccagggcaagctgaaagtggtgttcatgccgaactaccgcgtgagcctggccgagaagctgatcccggcggctgatgtatccgagcagatctccaccgctggctatgaggcctctggtaccggcaacatgaagatggcgctcaacggtgccatcaccatcggcacgctggacggcgccaacatcgagatcgccgaagaggcgggagccgagaactgcgccatcttcggtctgaacgtggacgaggtgaaggcattgaaggggcgcggctacaacccgtacgacttctactatgccaactccgagctcaaagcggtgctggactggtttgataccgactacttcacgccgggtcgtccgggcgagctctcctccatcaaacgctccttgctggaagggggggatccctacctgaccctggccgatttcgcctcctactcggaagcccacaagctgatcgacagctggtatcgggatccggccctctgggcgaagaaggccatcatcaactcggccaccatgggcaagttcaactccgatcgttccatccaggactatgtggatcgcatctggcaattgaaaccctgcagcatcggctaa

SEQ ID NO: 238145 - DNA, 1507 bp, Unknown
  Bacterial polypeptide expressing nucleotide sequence isolated from the Sargasso Sea
ctgaacgatactcacccggctgtagctattcctgaactgatgcgtattttagttgaccgcgcagaaatgagctgggatgaagcctggaacctttgtcaaaatgtatttgcctacaccaaccataccttgttgccagaagctctggaaaaatggtcagtgcggttatttgaaaaagtattaccacgccacttagaaatcatttacgaaattaaccgtcgtttcctggttgaacaagtggacgtgttgtggcctggcgataacgagaaaaaacgtaaactgtcaattatcgaagaaggccatgagcctatggttcgtatgggccatttgtctgtggtcggctcgttccgtgttaatggtgtggccgaaattcactcagagttagtgaaatcagatctatttccggagatggttgccttatggccggataaattcaccaacgtgacaaatggtgtaacaccacgtcgctggttaaaggcctgtaatccacgtttagccaagttgctggacgaaactatcggcgatgaatggccacgtgacttaaaacagctgaataagtttgctgcttttgctgatgatcctgccattcaggatgcctttatggccatcaaacagcaaaacaaagctgatttagcgacagtagtgaagaaactgaccaacatcagcattgaccctcatgctatttttgatattcaaatcaaacgtttgcatgaatacaaacgtcaacatctgaacttgttgcatattctggccttgtaccgtcgtattctgcaaaacccggattacgacatggtgccacgtgtattcctgtttggtgcgaaagcagctcctggttacaaactggccaaagaaattatttacgccatcaataaagtggctgagaagatcaataatgacaaacgggtgaaaaaccgtctgaaagtggtctttatgccaaactaccgtgtgacattagctgagaaaatgatcccggctgctgacgtgtcagagcaaatctctaccgcaggtaaagaagcttcaggtacaggtaatatgaaactggcgttaaacggtgctattactgtaggtacgctggatggcgccaatattgagatcgcagaggaagtggggccggataatatttctatcttcggtttaaccgttgatgaagtaaaatcgctgcaggccaaaggctatcacagctgggattactattatcaggatgctgaaatcaaagctattctggattggctggagacggattacttcacaccgggtaaaccaggtgaattgtccgccatcaaacgcagcctgcttgaaggtggagatccgtacttagtgttggccgatttccagtcgtacgtgaaggcacaagagaaagtggatggctggtaccgtgatcaagccggatgggcgaaaaaagctattctgaacactgcactgatgggcaagtttacctcagaccgttctattgaggactatgtagaaaaagtctggaaattggactcttgcaaaattagtcagcaataac

SEQ ID NO: 238146 - DNA, 769 bp, Unknown
  Bacterial polypeptide expressing nucleotide sequence isolated from the Sargasso Sea
ctccgtcggccgcaatatccccaatgaagggatgctgttctatggtccgattcagcagggcaacgataactggaacgcgaccttcttctgcggttcctgcgccgtgattcgtcgtaaagcgctggacgatatcggtggttttgccgtagaaactgtgaccgaagatgcgcacaccgcgcttaaatttcagcgcctgggctggaaatcatcgtttctcgatatcccactggctgcgggtttagccaccgaacgtttggtcgtgcacgtcattcagcgtacccgctgggcgcgtgggatgacgcaaattttccgcctcgataacccgctactgggccgcgggctgaccttccagcagcgcctgtgttatctcagcgccatgctctactatcagttcgccttgccacgggtcgtgtttgtcaccgcaccgttagcgtatctgttgtttaacctgaatattatctactcctcagcgagcctgattgtctcgtatgcgctaccgcatctgttcctggcgatttatgtcggctcacggatgaacggtcgctatcgctacagcttctggggggaaatctatgacatcgtgctggcattccacctggtgctgccgacgctggtgacgatgatcttccccaaacgcggtaaattcaacgtgaccgacaaaggggggctgctggatgtgggctacttcgactttaccgtcgtcaggccgcatctggtggtggcatgtttgctcgcggttggcgtgattgtcggtatcgtcagggccatt

SEQ ID NO: 238147 - DNA, 907 bp, Unknown
  Bacterial polypeptide expressing nucleotide sequence isolated from the Sargasso Sea
ggcaatgatttctggaacgctgcgttcttttgtggctcttgtgccgtcatacgtcgcagcgctattgaagaaattggtggttttgcggttgaaaccgtgacagaggatgcgcataccgcactcaaattacaacgtcgtggctggaattcagcttttctggcgctgccgttggcagcagggctggccacagagcgccttgcgttacacataggacaacgggctcgctgggccagaggcatgctgcaaatacttcgactggataatccgttattcggcagagggttatccttacctcaacggctttgttacctcaatgctatgctgcattttcttttttctttacccagaatcgtttttctaaccgcacctctgtgctacctgttgttcggccaaaatattattgatgcatcgcctgagatgattctggcttacgctttgcctcatttatttttcaccacttataccaactcaagattgcagggcaagttccggcataccttttggggcgagatttatgaagcggtattatctttccatctggtgttacccactatcgcgactttgattaatccccgtaagggtaagtttaatgtcacggaaaaaggaggcttactggaaaacggctatttcgattacgacatggtcaagccacatctttttactctggttctgctgttgtgtggttttttatccggcatagtacagttgatttggagcgagcattatcaagttgagccaaaagttctgttgttgaatttattctgggcaggttttagctgcattatgttgtttgcgtctgtggctgtggctcgggaaatgaaacaagtacgacaaaccgttcgtcttgatgtcagtttgccggtcgtcctgcatcttgaaactggccatacactgaaaacaaaatcaa

SEQ ID NO: 238148 - DNA, 1693 bp, Unknown
  Bacterial polypeptide expressing nucleotide sequence isolated from the Sargasso Sea
accatctacgccgcgctcgcgctcgactatccggccgagaaaatctcgatccacgtgctcgacgacggccgccgtcccgagttcaaggcgttctgcgaagaagtcggcgtcaactggaccatccgcacgcacaaccgccatgcgaaggccggcaacatcaatgaagcattgaagatcacccagggcgaatacctcgcgatcttcgactgcgatcacattccgacccgctcgttcctgcagatcggcctcggctggttcctgcgcgacaagctgctgtcgatgctgcaaacgccgcaccacttcttctccgccgatccgttcgaacgcaatctcggcaccttccgcaaggtgccgaacgaaggcgaactgttctacggcctcgtgcaggacggcaacgatctgtggaacgccaccttcttctgcggttcgtgcgcgctgctgcgccggagcatggtcgaagagatcggcggcatcgccgtggaaacggtcaccgaagacgcgcacaccgcgttgaagctgcaccgtctcggctacaccaccgcctatctggcgattccgcaggcagcaggcctcgccaccgaaagtctctccggccacatcggtcagcggattcgctgggcgcgcggcatgacgcagattttccggatcgacaatccactgaccggcaagggtctgaaaatcggccagcggctctgttatctgaacgcgatgatgcacttcttctacggcatcccgcgtctcgtgttcctcaccgcaccgctgtcgtacctgttcttcggcgcgcatgtgatcgaagccgccgccagcacgatcgcgatctacgcgctgccgcacatgatgcacgcaagcatcaccaactcgcggatgcagcgctcgttccgccattcattctgggccgaggtgtacgaatcggtgctggcctcctacatcaccgcgcccacgctgctcgcgctgatcaacccgaagctcggcaagttcaacgtgacggccaagggcggccagatcgaaaagaactacttcgactggtcgatctcgcggccgtatctgttcctgctgttgctgaacctgatcggcttcgtggtcggcatcgtccatatctatctgaactggcatatccgcagcgtggtcaacacgaccatcctgaacctcggctggaccacctacaacatgctgattctcggcgcgagcgtggccgcggcgagcgagcggcggcagattcgcgcggtgcaccgggtggcgatgcaaatgcccgtgatgctgaaattctcgaccggccgcacgctggcctgcgaaaccatcgactactcggaaggcggtgtcggcgtggcgctgcccggcaaaatcgaggtgccgatccacgagcgcgtgaccgtgtcgctgtttcgcggcgacgaggaatacaccttccccgccacggtcggcttcaccgagccgggccgggtgggcctgcgcttcgcgacgctgacgcgcgagcaggagtacgagttcgtcaagaccaccttcgcgcgcgccgacgcgtggaccggctgggccgaagggcgccagcaggacacgccgctgcgcggtctgtcgcacgtgctgtcggtcggcgcgcgcggcatcgtgggtcttttcgagcatctttatgccgaccttcgaagctcgatgaaaagccgtccggtggacgtcaagaagctaaaaaccaaagactgat

SEQ ID NO: 238149 - DNA, 2593 bp, Unknown
  Bacterial polypeptide expressing nucleotide sequence isolated from the Sargasso Sea
ctgggtcgatacgtggctggcggcaggcgccgccggtcgccgtggagcggcgcgatgaacgcgggcttcgcgctgcgcctgcgtgcgctcggccgtcgtgcggccgactggctcgcgcgcggcatcgggttgccggcgcaacgcacgctggtcgactgggtcgtgcggctgttcttccatgcgccgccgccgggccggccggatcacgtgcgccgctgggtgcgcgtcgcgtccctgcggctcgcgcaggagtggggcgtgctgcagccgctcagcccgcgcgaatggctgtggcgcgcgatcgtgcgtgcgccgcgtgcggcggacggccggcccgcgcgcgatccgctcgcgtggttcgacaagtatgtcgtgccggtttacgtggccgggcgcgcggtcggccgacgcatcgatgcgatgctcgcgcgcctgccgtgggtgcgctggggcggctggctcgatgcgcgtgcgaacggcgtcggccggcgccgctggctcgcgccgctgctgctggtcgccggcgcgctgctgtgggccgcggccgggatgtcgccgctgatgccgggcgcgcagttcgcgttcttcgcgatcgtcgcggtgctggcgctcgcgctgcgccgcctgccgggccatctgccgacgctcgcgctcgcgtcgctcgcactgctcgcgacgttgcgctacatgtggtggcgcacctcgcagacgctcgatttccgcagcccggtcgaggccgtcgccggctacctgctgtacggcgcggaagcctatacgtggatgatcctgctgctgggcttcgtgcagaccgcctggccgctcgaccggccgatcgtgccgctgcccgacgatcccgacacctggccgaccgtcgacatctacatcccgacctacaacgagccgctgtcggtcgtgaagccgaccgtctttgccgcgcagagcatcgactggccgagcgcgaagctgcgcgtgtatctgctcgacgacggcaagcgccccgaattcgaggcgtttgcgcgcgcggccggcatcgactacgtgacgcgcgacgacaaccgccacgcgaaggccggcaacatcaaccgcgcgctgccgaagacgcatggcgaatacatcgcgatcttcgactgcgatcacgtgccgacgcgctcgttcctgcagaccacgatgggcgtgttcctgcgcgacccgaagtgcgcgctcgtgcagacgccgcaccatttcttctcgcccgatccgttcgagcgcaacctcggcacgttccgcgagatcccgaacgagggcaacctgttctacggcctcgtgcagtcgggcaacgacctgtggaacgcgacgttcttctgcggctcgtgcgcggtgctcaagcgcagcgcgctggaagaggtgggcggcgtcgcggtcgagaccgtgaccgaggatgcgcacacggcgctcaagctgcaccggcgcggctatacgtcggcgtacctgccgaccgtgcaggcggcaggcctcgcgaccgaaagcctcgcgggccacgtgaagcagcgcacgcgctgggcgcgcgggatggcgcagatcttccgcatcgacaacccgttcctcgggcgcgggcttggcctcatccagcggatctgctacggcaacgcgatgctgcacttcttctacgggattccgcggctggtgttcctgacgatcccgctcgcgtacctgttcttccacctgtacttcatcaacgcatcggcgctcgcgctcgcgagctacgtgatcccgtatctcgtgctcgcgaacgtcgcgaactcgcggatgcaggggcgctaccgccattcgttctgggccgaagtctacgagtcggtgctcgcgtggtacatcgcgctgccgaccaccgtcgcgttcttcagcccgaagcacggcaagttcaacgtgaccgacaagggcggcaagatcgacgaaggctacgtcgactggtcgacgtcgaagccgtacctggtgctgttcgggctgaacgtgctcgcgatcctcgccggcctgtggcggctcgcggtcgaccagggcgacgaggcatcgacgatcctgatcacgctcgggtggaccgtgtacaacctcgcgatgctcggcgcggcgctggccgtggcgcgcgaaaccaggcaggtgcgcgtcacgcaccggatcgcgatgcgcgtgccggccatgctgctgctcgccgacggctcgacggccgcgtgcttcacgagcgactactcgaccggcggcctcggcctcgaagcggtgccggggctcccgcttgccgtcggcgacacgctgacggtgtgcgtgacgcgcggcgaccggccgttcccgttcccggtgcgcgtgagccgcgtgacgccgacccatgtcggcgtgagcttcgacgaactcacgctcgaacaggagcgccagcttgtgcaatgcacgttcggccgcgcggacgcgtggctcgactggaatgaaggccagcgggtcgacacgccgctcggcgggctgaaggaagtgttgcggatcggcctcgacggcaacgtacggatgtggaagggtgcggcgcgcggcctgctggccatgctggcgccgaaactcgatcgggcgcgcgactgac

SEQ ID NO: 238150 - DNA, 901 bp, Unknown
  Bacterial polypeptide expressing nucleotide sequence isolated from the Sargasso Sea
tataaccttgacgacatattgaaagtgggctcgcaatacaacccccatcttaaccctgtcatctgtcaagatctggtcaaatgcgaccctgatatcggccctttagcaagggacaagtcacctcttatactcgctattgaaaacaacttgataaccgtctttgatattgaccatgttgggaataacaccaatagaatactaactccggtatttggtaaaaaaaacattcaaaaaggtgagtccatcgtcatcaaaaattcatacacagacactctcgaaggccttcctatattgcatggtaggtgcttgttaaataggaaaatggcgaaaggattttttactaaacaacttggccctcgatattcaggttggaaaagcatgcctctagaaaggagagcatttttagcgatagcaactcttttcatgaaaggagttgattcaggtggcgttgccgaaagcattaaattacagcgccagataaacgaagatttcagtttaaagaaggtaaaaaatctcaactatctcgacgagagtaaaatcgatgaaatattgtctgagaatgaagatttgaagccatttcaggcgctggttaatagccactcatttgaactgactttgattactggatttatggaagcagctcgaaagaaaggaaaactctacacgagccatatgtactggataaaacacactgacaggtcactttggttcactctcgagaactgtggaagccaaatgccttattgtgaggcggcagcagtcagggctcattaccttcgagaagaaaatgttcaaatgggactcgatcacccagaaatagaaagcgctatcgatggactagaaaaatttcttggtgaaacggaaggctggttagcaaaggttgtgaaagaagatgtttgat

SEQ ID NO: 238151 - DNA, 773 bp, Unknown
  Bacterial polypeptide expressing nucleotide sequence isolated from the Sargasso Sea
acgacgccgatcgacgtcaggcacgtcgccgcgtcgggcgtcttttccgcgcccgccgcctcgtacacctggagcgcccgcttgtagtagtcgagcgcgcgcgggtaatcgccctgcttgctgtgctgggtgccgatcgacatcaggcacgtcgccgcgtcgggcgtcttttccgcgcccgccgcctcgtacacctggagcgcccgcttgcagtagtcgagcgcgcgcgggttatcgccctgcgcgctgtgcacggcgccgatcgacatcaggcaccccgccgcgccgggcgtcttctccgcgcccgccgcctcgtacacctggagcgcccgcttctggtagtcgagcgcgcgcgggttatcgccctgcttgctgtgcacgacgccgatcgacgtcaggcacgtcgccgcgtcgggcgtcttctccgcgcccgccgcctcgtacacctggagcgcccgcttgtagtagtcgagcgcgcgcgggtaatcgccctgcttgctgtgctgggtgccgatcgacatcaggcacgtcgccgcgtcgggcgtcttttccgcgcccgccgcctcgtacacctggagcgcccgcttgcagtagtcgagcgcgcgcgggttatcgccctgcgcgctgtgcacggcgccgatcgacatcaggcacgtcgccgcgccgggcgtcttctccgcgcccgccgcctcgtacacctggagcgcccgcttgcagtagtcgagcgcgcgcgggttatcgccctgcgcgctgtgcacggcgccgatcgacat

SEQ ID NO: 238152 - DNA, 916 bp, Unknown
  Bacterial polypeptide expressing nucleotide sequence isolated from the Sargasso Sea
caagggagcgcgggtgggctcgcggtcggtgtactgggtgcgttaaaagctgctggtggtctgtggtttggctggagtggtgatacagataatgaggataaaccgttaaaaaaagtcacgcgtggcaatatcacctgggcctcgtttaatttgagtgagcaagattacgaagagtattactgccagttttcaaatgcggttttatggcccgcatttcactatcgactggatttagttcagtttcagcgctctgcctgggaaggctaccaacgggttaatgccttactggtagataaacttctgccgctgcttggcgatgacgacatcatctggattcatgattaccatctattgccgtttgcctgcgagttacgtaagcgcggtgtgaataaccgcatcggttttttcctgcatattccttttccgacgccggaaatttttaatgcgctccctccacatctggcgctacttgagcaaatgtgtgattttgatttgcttggtttccagactgaaaacgatcgccaggcttttctggactgtctcgcagcccagactcgggtgtccacgcataaagataagcagcatctggcatggggaaaagcgtttcgcactcaggtctatcccatcggtatcgaacctgatgagattgcacgacaggcgtccgggccgctgccgccaaaactggcgcagctaaaagcggagcttaaaaatgtgcagaatattttctccgtggagcgtctggattattccaaaggcttgccggagcgctttcaggcctacgaggccttactggaacattatccgcagcaccacggtaaaattcgctatacgcagatagcgccgacctcgcgtgaagaggtgcaggcctatcaggatattcgccaccaactggaaacagaagcagggcgaatcaacg

SEQ ID NO: 238153 - DNA, 780 bp, Unknown
  Bacterial polypeptide expressing nucleotide sequence isolated from the Sargasso Sea
ggccgagctcttctacaacggcttctgcaacaacgtgctgtggccgctcctccactacatcccgctgtcgatgctcgaggggcaggcgcaggtggcggaggagcagtggcgcgggtacaaggcggcgaacgaggcgttcgccgacgaggtgctcgcgctcacgcggtcgatcgacgccgactcgccgcagccgctcgtgtgggtgcaagactaccatctgatgctgctgcccaggatgctgcgcgaggcgcaggacgacctccatgtgggctggtttttgcacacgccgttcgccacgtcggagatgtaccgcacgctgccgcaccgcgaggagatcctgcgcggcgtcctcggcgccgacctgatcggctttcacatctacgactacgcccgccacttccactcggcgtgcctgcgcgtgctcggctcgggcggctccgagggcgtcaccgaggggaacgaggggctcttcgaccacgcggcgcggcgtagtatcgccgtcgacgccttcccgatcgggatcgaccccgagcgcttccgccagtgcctgctgcaggggacagtgaaggacaaggtgatcgacctgcagcggcgcttcgacggcaagaaggtgctgctcgggatcgaccggctcgactacgtcaaggggatcccgcacaagctcaaggcggtcgagaagttcctgcagatgtacccgagcatggcgaacaagatcgtgctggtgcagatcgccgtcccgagccgcgtcgacgtcccggggtaccagaagctgcgctccaa

SEQ ID NO: 238154 - DNA, 799 bp, Unknown
  Bacterial polypeptide expressing nucleotide sequence isolated from the Sargasso Sea
gaagttcaagagcacatcagagagctgcgagaacgtttcagaggccgcaaagtgatgcttggcgtcgaccgcctcgacatgatcaagggcattccacacaaactgttggcgtttgaaaagtttcttaatgaaaatcccgagtggaaggacaaggtgaatctgattcaaatcgctgtcccgacgcgtagtgacgtgccagagtaccaacgactcgcgtcacaagtgcacgaaatcgtcggtagaatcaacggccgtttcggttccatcggttccgttcccatccagcacttggattgcacgatgcagttccctgaactctgtgctctgtatgccgttacggacgtcatgctggtaacttctcagcgtgacgggatgaaccttgtctcatacgagtttgtctcttgccagactgaagacaacgcgggtgtgttggtgctgtccgaattcgctggtgccgcacaatccatcggtgccggtgcgctactcgtaaatccccacaacgtcactgacgttgcaaacgccatcaaggaagcgttaatcatgcccgaggcggaaaagattgagcgattccacagcagtttctcgcacgtttccgtgcacacctcgcaagcgtgggcggataccttcatcagtgaactcaacgatacgcacgttgaggcagaattgcgtcaaaaacgcattcctccgcatctcaaaccgcatgttatggttaaatcgtttgagaatgcgcgcaagcgtctcatcattctcggttacaacgccacgcttactgatccgatggagaacaggaccaaggtga

SEQ ID NO: 238155 - DNA, 880 bp, Unknown
  Bacterial polypeptide expressing nucleotide sequence isolated from the Sargasso Sea
aataatctttggattggatggcctggattggctatagagaaagcaaaagagtcagaagtacattcaaaactcatcaagcagcatatgaaacctgtctttttaagtaatgaagaaattgaagatttctatgaaggtttcagtaacgaaactttatggccaaactttcattatttcaatcaatatacggtatataaagaagagcattggcgagcctatcaacgtgtgaatcaaaaatttgcaaaaatcgttgcagaagatctcgaagatgatgatacagtttggataaatgattatcaactattactattacctcaaatgattaggattatgagtcctaattcaactattggtttttttctacatattccttttccgtcctatgaatcctttagaagattgccttggagaagagaattactaaatggtatgctcggttcggattttttaggatttcatacctatgacgacatgagacattttctatcctctgtcaatcgactggcaggacttggcaactctaatggcactattaaagtcaaaaatagacttgtaaaagctgatgccttgcccatgggtatcgattatgaaaagtacgccaactcagctcaagatccaaaaacattggcgagagaggcacgttacagagaatccattggtgatgtgagactcattttatcaattgatcgactagattactcaaaaggtatccctcaaaggcttagggcatttgagctttttttacttaaatatcctgactttatagaaaaagtctctcttttcatggtagtggttccctcaagagattctgtttcaaaatacaaacaacttaaagaagagatagaccttttggttgggcgtatcaatggtcaattttcaaaac

SEQ ID NO: 238156 - DNA, 1387 bp, Unknown
  Bacterial polypeptide expressing nucleotide sequence isolated from the Sargasso Sea
catgagccgactgatcatcgtatcgaaccgggtcgcaccgatctcggagggtggcccggcggcgggcggcctcgcagtcggcgtctacgacgcattgaaggaaaccggcggcatgtggttcggctggagcggcgacgtgctcagctccggccagccgcagatcaaggtggaagagcgcgggccggtgaccttcgcgaccatcgcgctgatgcgccgcgactacgaccagtactaccgcggcttctcgaacgccacactgtggcctgcgttccactatcgcgccgatctgctgcaatacgaccggcacgacttcggcggttattgccgcgtcaatgcgtggctcgcccagcaactcgtgccgctactgcgtgaagacgacgtgatctgggttcacgactatcacctgattccattcgcccaggcattgcgggcggccggcgtgaaaaatcgcatcggtttctttttgcatatcccgtttccggcctcgcaggtgttgctggcggtgccgcctcatcgcgaactggtcgaagcgctctgttcgttcgatttgctcggtttccagaccgcgcctgatttgcgggcgttctgcgactacatcgtcaacgaggcgaacggcacggtcgacgtatcggccagcggtccgctgacggtccatgcgtttggccggactctgcgtgcggccgcttacccgatcggcgtctatccggacgaaatcgccgaactggcgaaagcgggtgagcggggcaagccggtgcgcacgatgaaggccacgctgcattcccgcaagctgatcatgagcgtggaccggctggattattcgaaggggctagtcgagcgttttcgcgcgttcgagcgtctgctcgaacattccgcggcacaacgcaacaaggtgtcgttcctgcaaattgcaccgcccacgcgcgccgacatgcacgcgtatcaggacattcgtctgcaactcgaaggggagtcagggcgcatcaatggccgctttgccgagctcgactggacgccgatcctgtacatccataagcagtacgagcgctcggtgctggccgcgctgtttcgtacggcgcatgtaggctacgtcacgccgctgcgtgacggcatgaatctcgtcgcgaaggaatatgtgtcggcgcaggacccggagaatcccggcgtgctcgtgctgtcacgttttgccggcgcggcgcaggaactgggcggcgcgttgatcgtgaatccggtcgatatcgacggcatggccgaggcgctcgcgagcgcgctggcgatgccgcttgcggagcgccaggcgcgtcatcgcgacatgatggcgcaactgcgcgagaacaacgtgtcggtgtggcgcgataacttcatgcgcgatcttcagagggcacagggt

SEQ ID NO: 238157 - DNA, 1432 bp, Unknown
  Bacterial polypeptide expressing nucleotide sequence isolated from the Sargasso Sea
aatgagcagactgatcgtggtatcgaatcgtgtggcgccaatccaggaaggccgccccgcggcaggtggcctcgcgatcggcgtgctggacgcgttgaaggaaaccggcggagtctggttcggctggagcggcgagacggtcagcgagccgtcatccccggtgatcgagaagcagggcaatgtgacatacgcgacggtgggtctcaccaagcgcgactatgaccagtactaccgcggtttttcgaacgcgacgctgtggccgacgttccactatcgcaacgacctgtcgcgctacgaccggcaggaatatgcgggctaccagcgcgtcaacgcgacgctcgccaggcagctcaaggagctgctcaagcccgacgacatcatctgggtgcacgactatcatctgctgccgttcgcgcgctgtctgcgcgagctcggcgtgaagaatccaatcggtttcttcctgcatattccctttccagttccggaagtactccgtacgattccgccgcacgaggaattggtcaaagcaatgtgcagctacgacgtggtcggtttccagactgaggcggatcgccagtcgttcgtcgactttatcgagcgcggccagcacggcacctcgagcgaagacggcatggtgcacgcgtacaaccgcttccttaaagtggccgcatacccgatcggcatctatccggatgcgatcgccaaggccgccgaacagttcaccgatcgcaagccggtacgcagcctgcgtgacggcatgcgtgggcgcaagctgatcatgagcgtcgaccggctcgattattcgaagggattggtagagcgcttccaggcattcgaacggctactgctgaatgcaccgggttggcacggacgcgtatcgctggtgcagatcgcgccgccgacgcgcgcggacgtgcagacgtatcagcgtattcgtcagacattggaaggcgaagcgggccgcatcaacggtcgtttcgcgcaactcgactggacgccgatccagtacctgaaccgaaagtacgaacgcaatctgctgatggcgctgttccgtcaatcgcaggtcggctatgtgacgccgctgcgcgacggcatgaacctggtcgcgaaggagtacgttgcatcgcaggatccggccgatccaggcgtgctcgtgttgtcgcaatttgccggcgccgccgagcaattgccgggtgcgctggttgtcaatccgttcgatctgtcgcagatggccgaggcgctggagcgagcactgtcgatgccgctcgccgagcgccaggcgcgtcacgcggacatgatggcgccgatgcgcgagaacaatctgtcggtctggcgcgacaccttcctcgacgacctgcgcaacatcgcgaccgcctcttcggtgacggccaaagcggtaaagctcgctgacgtgacggcatcctccagctga

SEQ ID NO: 238158 - DNA, 1411 bp, Unknown
  Bacterial polypeptide expressing nucleotide sequence isolated from the Sargasso Sea
ctggtgagccgactcgtcgtcgtatccaatcgcattgcagatccccgtaaagccgcggccggcgggctcgccgtcgccgtgaaggacagcctgcaggaatccggcggcgtctggttcggctggagcgggaggctacgcggcggcgacgaccagcctgcgcacggcgacgaagtgcagatccagaacgtcggcggcatccagctcgcgacgatcgatctcgacccgcaggattacgacgcgtactacctcggttattcgaacaacgtgctgtggccggtgtttcactaccggctcgatctcgcgcagttcgatcgccgcttcgccgacggctaccggcgcgtgaaccagctgttcgcgcgcaagctgcgcacgctgctgcggcccgacgacaccatctgggtccacgactaccagctgattccgctcgccgccgagttgcgcgcgatgggctgcaggaatccgatcggcttcttcctgcacattccgatgccgccgccgccgatcatggccgcgattccggagcacgaatggctgatgcgttcgctgttcgcctacgatctcgtcggcttccagaccgagtcggacctgcttcacttcgagcattacgtcgaagcggaagccggcgccgcgcggctgcccgacggccgcctgcgcgcgttcggccgcacgctgtcggccggcgcattcccgatcggcatcaacgtcgacgagttcgaatcgctcgcgcgcgatcgcgacggcctcgacatgttcgaccggatgcgcgacgagtactcgcgccgccagttgctggtcggcgtcgaccggctcgactacacgaaggggctgccgcagcgcgtcaatgcattccgccagttgctcgagcaatatccggagaaccgcaaccgcgcgacgctgatccagatcgccgcgccgagccgcgaggatctcggcgcgtacgacgacctgcggcgcgagatggacagcctgtgcggcgcgatcaacggcgactacggcgaactcgaatggatgccgatgcgctacattcaccgcaccgtcgcgcgcaagcgcttgccgggcctctaccgcgcgagccgcgtcgcgctcgtcacgccactgcgtgacgggatgaacctcgtcgcgaaggagtttctcgccgcacaggatgccgccgatccgggcgtgctcgtgctgtcgcgtttcgccggagcggccgagcagctgaagtcggcactgctcgtcaatccgtatgacacgcaaggcaccgcacaggcgatccagcgcgcgctcgcgatgccgctcgaagaacgccgccagcgtcacgcggcattgatggcgatcgtgcgcgcgaccgacgtgcactggtggcgcacgcgctttctcgacgcgctcaccgaggcggccgaagtcgcagcagcgaccgaatcctgac

SEQ ID NO: 238159 - DNA, 364 bp, Unknown
  Bacterial polypeptide expressing nucleotide sequence isolated from the Sargasso Sea
ttatggagttaagtataaagatgaaattcatgctgttatgtgttttgcttttacaaataaaattcctaaatcagttagagagttagatttacttagtaaagatgcctttcttcagagcgcccaaagagatcaaaatgttggtaaaattgcaattgcttatactgtctggtcaaaaaaaaaaggtggtgggaaattaatagtaaaagaagtatttaaaatgataaaaaaatcaaaccatctcaacagattagtaactctttcaccgcttacagaaatggcaagaaactttcatttaaaaaatggagctgttgaagtccaaattaatgaagatactcaaaattttgaatataaagttataaaataa

SEQ ID NO: 238160 - DNA, 517 bp, Unknown
  Bacterial polypeptide expressing nucleotide sequence isolated from the Sargasso Sea
aaaggtaaaagtgagataaaaaaaaatgttcaaagcttctttggatggataaagggagcagaattaattgaacttaaagagtgtgatatatcaaaagatcctgttagaccagaactagacaatgattttagaactagttatggaagaaaaatttacggagttaaatataaagacgaaattcacgcagttatgtgttttgcttttacaaataaaatacctaaaactgtaaaagaattagatcttttaagtaaagatgcatttttacaaagtgctcagagaagtcaaaaaattggtaaaatagcaatagcttatactgtttggtcaacaaaaaaaggtggaggaaaattaatagttaaagaagtttttaaagttataaaaaagtctaaccacctgaatagattggttactttatcacctcttacagaaatggctcgaaattttcatttaagaaatggagctgaagaactacaagtaaacgaaactactcaaaactttgaatacaaaattataaaataaa

SEQ ID NO: 238161 - DNA, 516 bp, Unknown
  Bacterial polypeptide expressing nucleotide sequence isolated from the Sargasso Sea
ttagaaaaggtaagattgatataaaaaaaaatgttcaaaatttctttggatggataaagggtgcagaattaattcagttaaaagagtgtgatatatctaaggatccagtaagaccagaattagataacgattttagaactagttatggaagaaaaatttatggagttaaatatcaagaggaaattcacgctgttatgtgttttgcttttactaataaaataccaaagaccgtaaaagaactagatcttttaagcaaagatgcatttttacaaagtactcatagaggtcaaaaagttggtaaaatagcgattgcttatactgtttggtcaacaaaaaaaggtggaggtaaattgatagttaaagaagtttttaaagttataaaaaaatccaatcatttaaataggctagttacattatcacctttaacagatatggctcgaaaatttcatttaagaaatggagcagtagaaatacaagtaaacaaagatactcaaaattttgagtacaaaatttaaa

SEQ ID NO: 238162 - DNA, 448 bp, Unknown
  Bacterial polypeptide expressing nucleotide sequence isolated from the Sargasso Sea
gagttaaaagagtgtgatacttctaaagatcctgtaagaccagaattaaataacgattttagaactagttatggaagaaaaatatatggtgttaaatataaggatgaaatacacgctgttatgtgttttgcttttacaaacaaaataccaagaaatgttaaagaacttgatcttttaagtaaagatgcatttttacaaagtgctcagagaggccaaaaaattggtaaaatagccattgcatatactgtttggtcaacaaaaaaaggtggaggtaaattaatagttaaagaagtttttaaaattataaaaaagtctaaccacctaaatagattagttaccttgtctcctcttacagagatggctcgaaattttcatttaagaaatggtgcagtagaagttcagataaacgaaacaactcaaaactttgagtacaaagttttaaaataaa

SEQ ID NO: 238163 - DNA, 146 bp, Unknown
  Bacterial polypeptide expressing nucleotide sequence isolated from the Sargasso Sea
aatgcttaaagaggaaaacaaaatattcaaaaatttatataacgaacaaggttgggatttggaaaatgctcttaagagagatgattggttagatactaaaaaaattatagagaagggaagagactggatcataaatgaaattaaag

SEQ ID NO: 238164 - DNA, 703 bp, Unknown
  Bacterial polypeptide expressing nucleotide sequence isolated from the Sargasso Sea
ttggccattgaaggtgacgcagtgacattctcaaagtatgaagaaagaacttttgctattgcgggtttaccaggtgaagccagtggtcaaattggtaatgatggtgaaatgacaatggccaattcatcgaatactacgaatcaaagtggtacagcctccatcgatgctggtaataaacaatatagttcgctgtcattgaaagaaaagtctctgattacagacttagaaaatgcattaaaaaacattaaatcagtggatgggaaggtatcagtttcacctttgacgatgactgtattcgttaaagacaggcccagtgtcgtagcatccattgagcgcatcattaatgagtttaatgatgagatcaccaaaggcattagctttgatattgtgctgctcgatgtcatttattcttctaatcagcgtcaggcttttgatatgtcgatggctgctaatttgtttaatggcaaagcattacttaaatctaataactcatcgccgtttatttcaggttccggtgcaacccctgcaccttctcagtttgacattgagatcgtgggaggtgacttcagtggcacacaattattcattgatgcgctgaaaaagcagggcgatattagccgtaagtttcaagtgccagtccagatcagcaatggtactcaaatgaaagtaatgtctgtagattcaacgaatgtatattgctgaa

SEQ ID NO: 238165 - DNA, 715 bp, Unknown
  Bacterial polypeptide expressing nucleotide sequence isolated from the Sargasso Sea
agatcttgagaatgcattaaaaagcttttcttttattgttggttctgaggtttgttttagagatgaaggtgtcagccattttggtttagaaaatggtttatttgagattaatggaaattttattgaggttgtttccccatttaaacaagacactaccgctgaaagatttatgtctaaaatgaatggtgacgcgggatacatgttgatatttgagtgcgaaaatgcagatctctatagacagaaagcagatgaattagatattagaagtatttggagcactgatttagaaaatggtgttaaagctactcattaccaccctaaggatattggtggattaattatttctgttgactcaatgaacaaaaaaaactggtatgataaaaattcatattggcaatgggctggtgatgactggcagtcaaaaacaaacaatcaatgttcaatttcatctatttctatgagttgcaaaaacccaagtaaattagcaaacaagtggggctcttttcttgacctttcagtaaatgaatctggagacagacatgttattaaaggtgatgatttcaaaattttctttacgcatgatgatgttaaggggatagattatctatcaaagcttactttgaaaattaataattccgaacataatgataaaatatttcaacaatataaagaaaatgaaattgaaatttgtggtactaaaatagatttaatataa

SEQ ID NO: 238166 - DNA, 907 bp, Unknown
  Bacterial polypeptide expressing nucleotide sequence isolated from the Sargasso Sea
tccgacgaattgctgcaaaatcagaacttggtcgcatctctaaaacatcaaaacaaggctattagcgaagaagtatataaatatcaggataagcgacgtattttactctcgaggcgagacgttgtatcaatcggagtggaagacaagagaaaggaaatgcggtcgcgagctgaaaaaagacatttgcttgagctcgatgttcaacgctccttagcggaggaacacacatggacagcaaatgcggaacgggagcgagaggcgataaacaaaacatcagagttaatagcggaaaaccaggcgatcttgaagcggatgaaggaacccgaacaaaaattaagagccgacttggaaaacgcgcttaaaagtagagtcacgacccaggactcactgagttcgtcgcaaaaggaaatagaagcaagtgctaaaaatttaaaaaccaccgaaaatgaacgtttgaaagcaagctcagtcctaaaagcacgagaggaggaactagaccggactaatctcgatctgcgggccttagaagcccgcttgcaggaactcgatagccgttttaatcaacaaaaggtggatctgcaggagcaactaaagaaattaaccgaacacgattctcttgagaccttagacgcaaaaatacaatcgacagaaaggaagatagctcgattaggggcaattaacctcgcagctatcgatgaactcgcacaattttccgatcgcaaggactatttagacaaacaacacgccgatttgtcgacagcgctttcaatgctaggcgacgctataagaaaaatcgatattgaaacgaaaacacgtttcaaagaaacctttgataaagtcaataacggaatacagaaaatgttcccgatcctcttcggaggtggacatgcgtacatcgaactgactg

SEQ ID NO: 238167 - DNA, 400 bp, Unknown
  Bacterial polypeptide expressing nucleotide sequence isolated from the Sargasso Sea
gatgagtgaggcgccacagcgcctgagataccgacatgaatttcttcgggtggcccgtggaggtaaaaaatgtgcgatgccaggacttgtgcttcaagttcgtaagcagcaaatacttgagaataaacaaaacctaaaaaatatccgaatagggtttaccgtaagcaaaaagataggtaattcggttacgcgcaaccgggcgcgaaggagacttcgctctgttgctgatattgtgatgcaaaagtctgcagctagcggcaacgattatgtgattataggacgaaagtcgacaacgaaacgtgaattttgcgccttggttaaagatttggagaatgcgttgaagatgctaggtaaagcaagattagatggtttctcaaaaaatgaggggcatgcgaaataa

SEQ ID NO: 238168 - DNA, 336 bp, Unknown
  Bacterial polypeptide expressing nucleotide sequence isolated from the Sargasso Sea
tttatacaggagatgacaaaacatcaatgtcggatatgttagatggattttcaggtaatatttcagtaaccgccaatgttgttcccgatcaaatgcataaaatgtgtatgtatgctctggatggaaatgaggagaaagcatcaatgataaataataaaatagataaacttcatgatattctatttattgaatctaatccaataccagttaaatggtgcttatataaaatgggcttaattaaaaaaggtattagattacctttaacatggttagatgaaaaattagaaactgacttagaaaatgctcttaagaatgcaggagtctcatttgaataaa

SEQ ID NO: 238169 - DNA, 3250 bp, Unknown
  Bacterial polypeptide expressing nucleotide sequence isolated from the Sargasso Sea
atgtggatcgtccggctggcgttacgcaggccctacacgttcgtcgtactcgcgctgctgatcttcatcgcggggccgctcgcgctgctgcgcacccccaccgacattttcccgaacatcgacattccggtcgtcagcatcgtctggtcatacaacggcttctccgccgaagacatggccaagcggatcacgtcgaactacgaacgcgcgctcacatcggacgtcgacgacatcgagcatatcgaatcgcaatcgctgaacggcgtgtcggtcgtgaaaatcttcttccacccgggcgccgacatcaatcgcgcgatcgcggaagccgcgagcaacgccgcgtcgatcctgcgcatcctgccgcccggcacgctgccgccgaacatcatcacgtacaacgcatcgaccgtgccgatcctgcagctcgggctgtcgagcaacacgctcgccgagcagcagctgtacgacctcggcaacagtttcatccgcacgcagctcgcgaccgtccagggcgcggccgtgccgctgccgttcggcggcaagatccgccagatcgtcgtcgatctcgacacgcgcgcgctgcaggccaaaggactcgcgccgatcgacgtcgtcaacgcgatcaacgcgcagaacctgatcctgccgggcggcaccgcgaagatcggcacgcacgaatacaacgtgcagatgaacggcagcacgcagacggtcgccgcgctgaacgacctgccggtgaagacgatcggcggcaatgtcgtgtacgtacgcgacgtcgcgcacgttcgtgacggctacgcgccgcagaccaacatcgtgcgggcggacggcaagcgcgcggcgctgctgacggtcgagaagaccggcagcacatcgacgctgacgatcatcgaccaggtgaaggcgatgctgccgaagatcgcggctgggctgccgaaggcgctgcacattgcgccgctcgacgatcagtcggtgttcgtgaaggcggccgtccagggtgtcgtgcgcgaggcgctgatcgccgcgtgcctgaccgcgctgatgatcctgctgtttctcggcagctggcgcgcgacgctgatcatcgcgatcacgatcccgctcgcggtgctcacgtcgctgctcgcgctcgccgtgctcggccagaccatcaacatcatgacgctcggcgggctcgcgctcgcggtcgggatcctcgtcgacgacgcgacggtcgcgatcgagaacatcacgcatcatctcgagctcggcgcgccgctcgaggaggccatcctgaccggcgcgggcgaaatcgcggtgccgaccttcgtgtcgacgctgtcgatctgcatcgtgttcgtgccgatgttcctgctgaccggcgtcgcgcgctatctgttcgtgccgctggccgaggcggtgatcttcgcgatgatcgcgtcgtacttcttctcgcgcacgctggtgccgacgctcgcgatggcgctgatgcgcgccaagggcagcggccggccgccgcgcggcgtattcgcgcccctcgtgcatgtggcgcgtttccaggcagcgttcgagcatcgcttcgaggccgtgcggctgcgctatcgcgcgctgctgtcggcggcgatcgcgcggcgccgccgcttcgcggccgcgttcctgctcgcctgcgtcgcatcgaccggcctctacgcattcgccgggcaggatttcttcccgtcggtcgacaccggcgagatccgcctgcacctgcgcgccccgaccggcacgcggatcgaggaaaccgcgcggctcaccgacgaagtcgaagcgaagatccgcaacgtgattccggccaacgaactggccggcgtgctcgacaacatcggcgtaccggtgagcgggatcaacctcacgtacgactcgtcggatccgatcggcaccgaggacgccgacgtgctcgtcacgctgaagccgaatcacgcgtcgaccgctacatacgtggcgaagctgcgcaacgtgctcgcgcaggcgttccccggcgtgacgttcgcgttcctgccggccgacatcgtcagccagatcctcaacttcgggctgcccgcgccgatcgacatccagatcgtcggcaacaagctcgaccagaaccgcgcggtcgcgaatgcgctgctcgcgaagctgcgcggcgtgcgcgggctcgtcgacgcgcgcatccagcagccgggcgacgaaccggcgatcaacgtgaacgtcgatcgcacgaaggcgatccaggccggcctcgagcagcgcgacgtcgcgcagaacctgctgatcgcactgtccggcagctcgcagacgacgccgaacttctggctcgatccgcgcaacggcgtcagttacccggtgctcgtgcaaacgccgcaatacacggtgaattcgctgcagtcgctcgcgaacgtgccgctgcccgccggtaccgcgcgctcgccgcagacgccggccggcggcccggccgcgggtgcgcccgcgcagaacctgctcggctcgctcggcacgttctcgcgcgcgacgcagcaggccgtggtgtcgcactacaacgtgcagccggtgctcgacatcttcgcgtcggtgcaggggcgcgacctcggcggcgtcacggccgacgtgacgaagctcgtcgacgaagcacgcgcgcaactgccgcccggctcgtcgatcgtgctgcgcggccaggtgcaggcgatgcatgagtcgttcaccgggctgctcggcggcctggtgctcgcgatcgcgctcgtctacctgctgatggtcgtgaacttccagtcgtggctcgatccgctcgtgatcgtcggcgggctgccggcgtcgctcgccggcatcgcgtggatgctgttcgtcacgcgcaccacgctgtcggtgcccgcgttgaccggcacgatcctgtgcatcggcatcgcaaccgcgaacagcatcctcgtcgtgaacgcggcgcgcgagctgctcgcggccggcgagtcgccgtggcaggcggcactcgacgccggtttcagccgcttccgcccggtgctgatgaccgcgctcgcgatgctgatcggcatgctgccgatggcgctcggcctcggcgacggcggcgagcagaacgcgccgctcggccgcgcggtgatcggcgggcttgcgttcggcacgatatcgacgctgctgttcgtgccggtgctgttcggcttcgtccatgcgtggctcgcgcagcgtcgcgacgccgcggccgcccggcgcgcgcggcccacctccgatacgccggcgctgggctgat

SEQ ID NO: 238170 - DNA, 748 bp, Unknown
  Bacterial polypeptide expressing nucleotide sequence isolated from the Sargasso Sea
attgagattacgccaaatttgttttgttgcaaaagatcttgaaaatgcattaaaaaacttttcttttattattgggtctgaagtttgctttagagatgaaggcgttagtcattttggattagaaaatggtttattggagattgatggaaattttattgaggtcgtttctccatttaaacaagatacaaccgcagaaagatttatgtctaaaatgaatggtgacgcgggatacatgttgatatttgagtgcgaaaatgcagatctttataggcagaaagcagaaaaatttaatattagaagtatttggaaaactgatttagaaaatggagttaaggctactcattatcaccctaaagatattggcggattaattatttctgttgattcaatgaacaaaaaagattggcaagataaaaattcatattggcaatgggctggcgatgattggcaattgaaaacaaacaatcaatgttcaatttcgtctatatctatgagttgcaaaaacccaagtaaattagcaaatcaatgggggtcttttctcgatctttctgtaaatgaatctggagacatatacattattgaaggaactgatttcaaaattttctttatgtatgatgatattaagaggatagattatttgtcacaactaactttaaaaattaataattccgaacttaaagataaaatatttcaaaaatataaagaaaatgaaattgaaatttgtggcactaaaatagagttaatataa

SEQ ID NO: 238171 - DNA, 583 bp, Unknown
  Bacterial polypeptide expressing nucleotide sequence isolated from the Sargasso Sea
atgcagaccctcaatctcaccctcttttccgccatcaacgccggggttgcgccgcagccgggcgtggcccgcctcgccatcttcgccgccgactggctcgtctatgcgttgcccgcgatgttgctgctcacctggatcttcggcgcgcgcccgacgcggcgtcaggcgatcgaagccggcctcggcgtgtgcgtggcgctcgcgctcgcgcaggtcatcggacatttctggttctcgccgcgcccgttcatggcgggcgtcggcacgcagctgattccgcacgcgccggacagctcgtttccgagcgatcacatgacgttcgcgtggagcatggcggtcgggttgatgctcggcggcacgacccggttcaccgggttcgtgatggccgcaatggccgcggtgattgcatgggggcggatctatgcgggcgtgcactggccgttcgacatggcgggcggcgtgctggtcggcacggccggcgcgctggccgcgcacctgtacgggcaacgcgtgaccgcgctgctcgaacggctcggcgattcggtgcatgccgcagtgacgggccaccggcacgcgccgtaag

SEQ ID NO: 238172 - DNA, 880 bp, Unknown
  Bacterial polypeptide expressing nucleotide sequence isolated from the Sargasso Sea
gatcgcgtcccggcgtgggcgacgagagcgacggtcgaacaaggcgtcatgggcgcgggatacgacggcgtgttttggaatcccgaggaaaagtacgagttcaagcactcgtccccgaagaaaccggaggcgtcgagaatttacgaggcgcacgtgggcatgagctcgaacgatcccaaggtgaactcgtaccgcgagttcgcggacgacgtcctccctaggatcgccgccagcgggtacaacactgtgcaactcatggcggtgatggaacacgcctactacggttcgttcgggtaccacgtgacgaacccgttcgcggtgtcctctcgatgcggtacgcccgaggaattgaagtacctcgtcgacaaggcgcacggactcggcgttcgcgtgctgttggacgtcgtgcactcgcacgcgtcgagcaacgtcaacgacggtatcgctgggttcgatttcggtcaaaaggacgtggactcgtactttggcgtcggcgacgccggctaccactggttgtgggactcgcgactgtacaaatacgacaactgggaggtgcttcgttacttgttgtccaacttgcgctactgggtcgaagaatacaacttcgacggctttagattcgacggcgtcacctccatgttgtaccatcaccacggattacaaatggagttctccggcgaatacgaccaatacttttccaccgccaccaacgtggacggcgttgtgtacttgatgctcgcgaacgagatgcttcactcgttgtaccctgaaattgaagtcatcgcggaggacgtgagcggcatgccgacgctctgcctcccggtgtccaaaggcggcgtcggtttcgacgcgcgattggccatgtcgattcccggacttt

SEQ ID NO: 238173 - DNA, 511 bp, Unknown
  Bacterial polypeptide expressing nucleotide sequence isolated from the Sargasso Sea
atgatagagacaaatcaaacagactggattaaatcagaagctatcaacctagaaaattgttgcaatgataatccattaaaaatactaggtcctcattttcatgaagagcaatgggtaataagggtatggatgcctgacgcagatgaagttacaataaattttaaaaataaaacctataaggcagaaactataaaccataaatggctttttgaagcaaccctgcctgaaaatccaaattctaattacaaaataaatatttcaagaggagggatcgctcatacacaacatgacccatggtcttatagagaagagtggatgggagaagttgataggcatctttttgcagaaggtaatcatcatcatatttgggaaaaaatgggagcacatctcattgaaaataagaatcaaaagggggtcatgttttgcatttgggctccaaatgcaaaatcaatctcaataattggagatataaattcttgggatggaagacatcatccaatgcaaaaaagat

SEQ ID NO: 238174 - DNA, 868 bp, Unknown
  Bacterial polypeptide expressing nucleotide sequence isolated from the Sargasso Sea
ctggcggcgtcagccaaggcgaaagagaaatccggttaccgcctgagcctggatattccctcttacctgccggtgatgcagtactgcaacaaccgtgaattgcgacgtgaactgtacgaagcctatgttacccgtgcatcggccctgtcgcccagcggcacccagtgggataacggcccgctgatggttgagatcctgcagttgcggcaggagttggcgcagctactgggttttgccaattacgcagaggattcgctggccagcaaaatggcaccgagttgcgataccgtgctgaattttctgggtgagctggctgacgccagtcgtccggtcgccgagcgcgaactggcggagttgaaagcctttgctgcggaccttgggcaggccgagttggcggcctgggatgtgccctacttcagcgaaaaactgcgcgagaagcagtacgcggtatcccaggaggagctgcgtccctacttccctgctgagcgggtgctggatgggcttctcacggtgacgggcgagctctttgacttgagttttgcgccgcgcgaagcaccgttgtggcacgccgatgcccgttgctttgatgtgctgcgcgatggcgaggtgatcgcgcagttctatctggatatctacgcgcgggccaacaagcgaggcggtgcatggatggcggattgccgggggcgccgacagttggcggacggtcttgtacagcgcccggtcgcttttctggtatgcaattttaccccgccgacggagtcgcggccttccctgctgacgcacaatgaagtgaccaccctgttccacgagtttgggcatggcctgcatcatatgctgaccccaggtggattgcctgtcggtgtcgggc

SEQ ID NO: 238175 - DNA, 340 bp, Unknown
  Bacterial polypeptide expressing nucleotide sequence isolated from the Sargasso Sea
cagcgtggtgagcttcatgcgccgcgacgagaaggaaggcaattgggttgtggtggtctgcaacttcacccccgaaggccatggcaactaccgcattggcgtgccagtggatggcttctacaccgagctgttcaacagtgatggcgcccgttatggcgggagcaaccagggcaatctcggcggcaaattcagcgatgactggggcatgcacagctacgggcaatccctggatctctgcctgcctccgctgaccgtgatggtgttcaaacacgaccccaaccggcagcgagaagcagcaaaggatgaagctgcagccaaattgggcggatcactcgggtag

SEQ ID NO: 238176 - DNA, 578 bp, Unknown
  Bacterial polypeptide expressing nucleotide sequence isolated from the Sargasso Sea
gatgactcaagcccagacttacttctatgacggtagcgatgtcgcgctgttaaacggtcaatatacggatgtgttttccctgcttggtatgcacagcatcaacgagagcaaggccttggtggtgcgctgttttttacgcaacgcccaaaaggttgatgtgataagtcttaaggatggccgtaaggtggcgagccttgagcgtgtcaatgaggcggggctgtttgcggggacgctaggcagacgggttaagccctttttgtatgcgctacgggtgacttatcccctctgtgagttggatattatcgacccctatcagtttggctccctcctcgatagtcaggacttatacctcttcggcgagggaagttctgagcaggcctatcgctttttaggtgcgaattggcgccaagtcgatagcgttgaaggcgtgcatttttgtgtatgggcccccaatgctaagcgggtctctgtggtgggggattttaaccactgggacgatactcgccatgtgatgcgccaacatctggccaacggcttatgggagatttttctgcctgatgttaccgaaggcgcgcact

SEQ ID NO: 238177 - DNA, 907 bp, Unknown
  Bacterial polypeptide expressing nucleotide sequence isolated from the Sargasso Sea
ggtcgctaaatcttcaatggaagatgctggttatgctgattcagaaaatgagatactggattcaactggagttattctcggtgtaaccgcaggcatgaaactgctggggtcacttacctcccggcttcaatacccggtatgggaaaaagtcctgagacgaagcggaatttcggaaaccgacaccaaacagattatcgaaaagattaaaaaagcctatgtaccatgggaagagaattcatttccaggaatgctgggaaacgtaatcgcaggacggattgctaaccgcctaaacctaggaggcactaactgcactgttgacgcagcatgtgcaagctcattgagcgccatgaagatggcaatcagcgatttacttgaataccgtgctgatatgatgattgcaggaggtgttgatgcagataattctccaatgatgtatatgtgtttcagtaaaacaccagcattcacttcaggcgaaaatccaaggccttttgatcaggattccggtggtgtgatgattggtgaagggctgggcatggttgtattaaagcgcctggaagacgcacaacgagacggcgatcgtgtttacgcattgataaaaggtattggagcatcaagtgatgggaaattcaaaagcatctacgccccccgttcctcaggtcaagcaaaagcccttaaaagggcatatgaagacgcaaatgtggaacctctaagcattggcttgctggaagcacatggaactggtactgacgcaggagatttagctgaatttgaaggcctgaaagaaattttcaattcagacaaagctaaaaaatctggtttcccaaattatcagcatattgccctcggaagcataaaatcacaaattggtcataccaaagctgcagcaggagttgcaggactaatcaaa

SEQ ID NO: 238178 - DNA, 735 bp, Unknown
  Bacterial polypeptide expressing nucleotide sequence isolated from the Sargasso Sea
cagcatttcccaagaagaagtgcgcgcctggttcccggtggacaaggtgctcagcggcctgttcgccatcgtgcagaagctctacggcatcgagattcgcgagctgaaagacttcgacacctggcatccggatgtgcgcctattcgagatcagcgagaacggccaacacgtcggccgcttcttcttcgacctctacgcccgcgccaacaagcgcggcggcgcctggatggacggcgcccgcgacaagcgccgcgacgctcagggcaagctgatcgccccggtggccaacctggtgtgcaacttcaccccgccggtcggcggcaaaccggcgctgctgacccacgatgaggtcaccaccctgttccacgaattcggccatggtctgcatcacctgctgacccgcgtcgagcacgccggtgcctcgggcatcaacggcgtggcctgggacgcggtggagctgccgagccagttcatggagaactggtgctgggagcccgaaggcctggcgctgatctccggccactatgaaaccggcgaggcgctgccgcaggccatgctggacaagatgctggcggcgaagaacttccagtccgggctgatgatggtgcgtcagctggaattctccctgttcgacttcgagctgcacgccagccacggcgacggccgcagcgtgctggacgtgctcgaaggcgtgcgcgccgaagtctcggtactgcgcccgccggcctacaaccg

SEQ ID NO: 238179 - DNA, 118 bp, Unknown
  Bacterial polypeptide expressing nucleotide sequence isolated from the Sargasso Sea
gcccggcgctcggctgctcacctacgccgagctggcggatcgcctgatcccctacgtcaaggaacggggattcacccacatcgaactgatgcccatcaccgagcatccctttgatggc

SEQ ID NO: 238180 - DNA, 741 bp, Unknown
  Bacterial polypeptide expressing nucleotide sequence isolated from the Sargasso Sea
gggaaagagaggtggcgcttggatgaccaattttaaaggccagtatagaaatggagatgatgaccatcgtcctcatgtggccattgtttgcaattttacaaaacccacagaaactaagccttccttgctgacttttggtgaggttttgacattttttcatgagtttggtcactctcttcatggaattttagcagatggccaatacgagagcctttcagggactaatgtgtattgggactttgtagagttaccatctcagatattcgaaaactgggcttttgaaaaagagtgtttggatatttttgcttctcattttgaaacaggtgaaaaaattcctttcgaaataattcaaaaaattaaagagagttctaactttcatgaaggcagaaatactcttagacaggcttcctttgccattttagatatggcctggcataaccaggaccctgagtctattgaagatgtgggtgattttgagaaaagagtccttaaagatacattattattacctcatgtcgacgggaccaacattagttgtgcgttctctcacatttttaatggaggctattcagcaggctattatagttacaaatgggctgaaattcttgatgctgatgcctttgaactttttaaagaaaaaggaatttttaatagagaagtcgctaaatcttttcaagaaaatattttgtcaatgggtggagccgagcacccaatggttttatacaaaaggtttcgaggaaa

SEQ ID NO: 238181 - DNA, 595 bp, Unknown
  Bacterial polypeptide expressing nucleotide sequence isolated from the Sargasso Sea
catggctaacctcaaattcaacggtgtcagcatgtttgcgacaacgaccaccgcaaccggaggcaccaatggcgtcttcagtaaccttgcccaagacctgaccttggataacacggtcagtgtctacgtcagtgcggaaggtactgccgggccgatagtaagcgttaacaaagcactgcttctttcagcgcttaccatcgacgcctccaacgtagggacctccacaagctacaccaatggtcgaaacacaacctttgcaggcggaggttcccagttcatgacctttgctgccgaagatgctagcagaacgatcgaccttacggatatatccgttggggtttttactcaggccatccagaacttggccacgctaagagccgacaatgccgcatccgtatccaggttgcgctttgcgggcgatgaaatggccctccagaagaccaacatggaggctgccaatgggcgtatcattgacgtggacattgccgaggagagcacccggttggccaagtacaacgtactggtccaagcatcagcagccatgctcgctcaagccaacagcaattccgatgtagccctcatgctcctcaggtaa

SEQ ID NO: 238182 - DNA, 877 bp, Unknown
  Bacterial polypeptide expressing nucleotide sequence isolated from the Sargasso Sea
atcggttcaggaatgatagggacaacaatggcttacgatctatcccaagatcatgatattgttgtgggtgactttaatgatagttctcttgcaaaattaaaggcgctcaatccaaatattataacaaaaaagattgatgtaacaaattctttagaattaaaagattttattcaagttgctgatatagttttgcttgcggttccgggacatttaggttttgcaaccttgaagactatcattaaatctggaaaaaatgttgttgatatatctttttctaacgaaaactttttggaacttgatgtcttagctaaggatagaggtgtcacagctgctgtagatgcaggtttagcccctggaattccgaactttcttttaggataccatgattctgagatgaaaataaactcttttgaatattatgttggtggtttgcctaaaaatccagagcccccttttttttataaggcgccattctcaccggtagatgttattgaagaatacacacgtccagcgcggatgatggtaaatgggaaaattgttactaaaccagcactttcagaaattgaaataatgaattttgataacataggtaatttagaggcatttaatactgatggattaagatcaatcttatttacgatgaatcacattaccaacatgaaagaaaagacattaaggtatagcgggcatgctgctttaatggcaaattatagaaacgctggaaaatttgataaagatcaaatatcaaaaacttcagatgaactatttacagcttggaagcttgaagaaaatgagccagagctaaccgtaatgaaaataatcattgatggagatagtgaatgtattacatatgatctctttgatgagtttgactccg

SEQ ID NO: 238183 - DNA, 1381 bp, Unknown
  Bacterial polypeptide expressing nucleotide sequence isolated from the Sargasso Sea
atgtttatcggatttgattacggtacctccaactgtgccgtcgccgtgatggaacaaggcagccccaggctgctgaacctgagcggtgcccactaccttccctccaccctgcatgcgccccaccgggatgccatcgccggcctgctggccgaagggctggcacccgcccagcagagcgagtacctcaagctgcgcggccccgtggtgacccgggcccaggcggtacgccgccagatgcgcgaagaggggctgatcgacgagctcagcttcggcgccgcggcgctggaacgctatctggaagagccggacgacggctactacctcaagtcgccgaaatccttcctcggcgcctatggcctcaaggcaccgcagatcgccctgttcgaagacatcgtctgcgccatgatgctgcacgtgcggcgcgaggcggaacagcagctcggtgcgccgatccgccgggccgtggtcggtcgcccggtcaacttccaggggctggcgggggaagagagcaaccgtcaggccatcgccatcctgagcgaggcggcgcggctcgcggggttcgagcaggtggagtttctctatgagccggtggcggccggcttcgaattcgaggcccgcctgaccgaggatgcggtggtgctggtggtggacatcggcggcggcaccaccgactgctccgtgctgcggatgggcccgagtcaccgcgaccggctcgatcgcgacggcgatctgctcggccacagcggccagcgcatcggcggcaacgactttgacatccggctgacggtggagggcatgatgccgctgctcggcatgcacgagaccctcaagaccggcaagccgctgccccacccgctgttctgggatgccgccgccatcaacgacgtcagcgcccagagccgcttctacagcctggagaccgcccgccagctgcaggatctgcagctcgacagccagcccggcagcaagctgggccgcctcgccagtctgcgcgcccacaagctgagccaccagctggtgtggcgtgccgagcagggcaagatcgccctctcgacgcaggagtccaatcaccaatcgctgagcgagctggaaaaagggctggaggcggagctgacccgcgaacagctggccaatgcctctgccctgctgctggagaaaattggcgagctgatggatgaagccatcaccgccgccggcgtgcagccggatcgggtcttcatcaccggcggcagtgcccgttcaccgctgatccaggccttcatccgccagaagctgccccaggtgccgctggaagggggcgatgacttcggctcggtcgcctccggcctggcccgttacgccgagcggctgtttggcagcggtcaacccacccagttctgac

SEQ ID NO: 238184 - DNA, 1003 bp, Unknown
  Bacterial polypeptide expressing nucleotide sequence isolated from the Sargasso Sea
atgacaaaacttaccgctatcgcgataaccctcacagctatagtagcgagtagctatgccgttgccgccgaaccgattgaagtcatttccccagcaaaaatcactgaacccgaaaaggtggagctgggtaaaatgctgttttttgaaccaaggctgtctaaatcaggttttatttcctgtaactcttgccacaacctctccaccggcggcgtggatgccctgcccacatcgattggtcaccattggcaagaaggcccaataaactctccgaccgtgctaaatgctgactttatgctggcgcaattctgggatggccgcgccagcgacttaaaagaacaagccgcgggcccaattgccaaccccaaagaaatgggctttacccatgaactcgccaccgaaaccattgcctcaatgcccgcttaccgtgcccgctttgccaaggtttacggcgatgaaaaagtcgatattgaccgcttaaccgatgccattgccgccttcgaaaaaaccttagtcacgccaaatagcccattcgatcaatatctattaggtaaacaggatgcgataagcagcgaagccaaagcgggttaccaactgtttaaggacaaaggctgcgtcagctgccacaacggccctgcggtcggtggcactatgtttatgaagatgggcttaatcaaaccgttccacaccaataaccccgccgaaggacgtaaaggtgtaacgggtaaggatgcggataagtttgtgtttaaggtaccgacactgcgcaatatcgagctcacctacccctacttccacgatggcagtgtatggacgctcgaagaagcggtaaataccatggcggatattcagttagggcaaaagcttaccgacaaggaaaccaaggaaatggtagcgttcttaaattcactgacaggtgaacagccacagatcaccctgccgatcctccccccatcgaataaagagactccgcgcccagtaccttttgcgacaggagcaaaataag

SEQ ID NO: 238185 - DNA, 817 bp, Unknown
  Bacterial polypeptide expressing nucleotide sequence isolated from the Sargasso Sea
tatgaaattcaataaaaatttatttactctaaaaaaaccattattagtgggtatttgtaattttactcctgattcctttagtgatgggggcaaaaccttttctcgcacttctgcacttaatcatattaactcaatggttaaagatggagcacaaattatcgatattggagctgagagtactagaccaaatagtgaaccaattacatacaaagaagaaatacgtcggctttcaaaaattctaccgtatttgaattataagaaatatctcgtttcattagactcttataaacctgaaactcaagaatatgcccttaataaaggagttcatattattaatgatataaatggtggttcagaggaattgttcaaacttacaaaaaagtacaatgctggattattcttaatgcacaaaagaggaacgccaaaagatatgcaaaaaaaactaaatccaagagctaatatggtaaaagagttcgataaatttattgaaaaaagactgaaaatacttgataaaatgaaatttaatctaaaaaaagtatggtttgatccaggaataggttttggcaaaacactaaaccaaaatttacaattaatgagatccttatcaaaatatagttacaaaaatctacaaatacttttaggttcatcacgaaaaagttggataaacttcattgatccttcaaacgccgatcaaagaataggtggatctttagcttctattactcatgccttacaacaaaatgtcaatacgtttcgaattcatgatgtccaagagacaaatcaaatgataaaagttttgaaagctttaaataaatga

SEQ ID NO: 238186 - DNA, 760 bp, Unknown
  Bacterial polypeptide expressing nucleotide sequence isolated from the Sargasso Sea
aatgatagtcgatactcattgtcacctctactttgaagagctaaataaagatctagatggagtccttagtcgagcaaatgacctaggtgttaatacattcatatgcgtgggcactaatctaagtgattcttatgaaagtcttaacttggcacaaaaatataaaagtatatatgcaacagcaggtatacatcctcatgactctaaggatgctgccgaagatgatttacaagaacttcgcaaactattggataatgaaaaaattgtagccgttggagaaatgggtttagattattttagaaatatctctaatccagatatacaaaaaatagtttttaaagaccagcttaaattagctgaagaaatcaataaaccaattgtgtttcataacagagaagcagatgaagatataattaacatattatctgactttccaaatgtgataggagtggcacactgtttttctagttcttatgaaacagcaattaaattaattgaaatgggttttttcatttctttttctggcaacctgacatttaaaaatagccatttacctgaggttgcaaaaaaattaccactagacagattactggtagaaactgactccccatttttaagccctgtcccctttcgaggtaaaacaaatgagcctggcagggcaaggtatgtagcagaaaaacttgctgaaatttttaattcagatattgaccagatagcttcaataactactgcaaatgcaaaaaatctttttaatctagtttag

SEQ ID NO: 238187 - DNA, 997 bp, Unknown
  Bacterial polypeptide expressing nucleotide sequence isolated from the Sargasso Sea
catggacagccagagcacaccgataacattgcatatcccgaatgcaactcaaggcgagttgtcgttctgtggttcgggacttccggcgttctcacagtgggccaaaagcctgccaatggcaaataccggggaagcttcccgacgcctctatcaggccatccgcgagttaaacgcattaagctgccctgcggcacagcgatttgaactcctcgaagttatccgtccttatatacactcggtctgcaaagtcctgaataagcactttttgcagtcctctgtatccctgaatgataagcaacttaagatcgctaatctgagccaggcgttgcaagggcatctcgcgactggttacaaaatggtggtcgcacacagtgttgatctgcttggcgccggagatcgtccgcccaagcactttgcaccggctattcaccgagcaattgtcgacagcagtcagattattctgcgggcctaccagctgtattttcagccgccagacagaacctggctggacgtgaaccagatctacctgatggcagaagcgcgccgtctggaaaacatcactattgaagatcaacaagcacggtacgtttacaaatctacaatccgtgacgccttcgcacgcatacaccttttggggacagcgaaacccagcaacctgcgccagcaggatctggcacaactgtatgaagtatgtgaatactgggcacctcacgctgaactgacgccggctgacgatgaaagcgctctgtttatcatcaaccttcatcgcgaccgcccaggccagtatcgccagcatctgcgcgataaccaaaagataaatttccgcagcctgaacacgcaaaaactggttcaggcgctgaagctatatgcgtctgcgggcagcgatggccggattaccgtgccagataagaccagcgaaacgctgattgcccatgcgattcaatcctggggaatccactggcagcgttcattccgtcgcgtgcctaccgatggtcaa

SEQ ID NO: 238188 - DNA, 547 bp, Unknown
  Bacterial polypeptide expressing nucleotide sequence isolated from the Sargasso Sea
aatacacgagccttacttgcatatatgtggacacatccaggtaaaaaaacaatatttatgggaatggaatttgggcagcgccaagaatggaatgtttgggatgatttgcaatgggatcttctaaattatgaacctcacaaaggaatacagaaattagtagatgatttgaatgatttatataaaagagaacctgctttatggagaaatgattttgacgaatacggattccagtggattgattgcgatgataataaaaattcagtaatcagtttcatgagaagagaaaaaactgatggagaatggcttgtaatagtggcaaacttcacacctcaaaaccactctaattacaggataggtgtgcctgttgacggattctatgaagaaattttcaatacagatgcgagtcaatatggaggttcaaacctaggtaatatgggagggaaatcaacagatctatacaacatacatggctatgaaaattctatagatctttgccttcctcctcttagcgttctggttctaaagcataaatccaagaagaattaag

SEQ ID NO: 238189 - DNA, 1003 bp, Unknown
  Bacterial polypeptide expressing nucleotide sequence isolated from the Sargasso Sea
atgataaaactcaccgctattgcgatcagtattatggccatgttaggcggacactacgccgttgctgccgaaccgattgaagtgattacgcctgctaaaatcactgagccagaaaaagtcgagctgggtaagatgctgtttttcgaacctagactgtcgaaatcaggctttatctcctgtaattcttgccacaatctttccaccggtggcgtggatgccctgcccacatcgattggccaccattggcaagagggtccaattaactccccaaccgtactgaacgccgactttatgctggcgcaattctgggatggtcgcgccagcgacttaaaagaacaagccgcaggtccgattgccaatccgaaggaaatgggctttacccatgaactcgccaccgaaaccattgcctcgatgcccgcataccgcgctcgcttcgctaaggtctacggtgatgaaaaagtcgatatcgatcgtttaaccgatgccattgccgccttcgaaaaaaccttagtcacgccgaatagccccttcgatcaatatttattgggtaaacaggatgcgattagcagcgaagccaaagccggttaccaactgtttaaggacaaaggctgcgtcagctgccacaacggcccagcggtcggtggcactatgtttatgaagatgggcctcatcaaaccgttccacaccaataatcctgccgaagggcgtaaaggcgtgacgggcaaagaagccgataaatatgtgtttaaagtaccgacactgcgcaatatcgagctcacctatccctacttccacgatggcagcgtatggacgctcgaagaagcggttaataccatggcagatattcagttagggcaaaagcttaccgacaaggaaaccaaggaaatggtgtcgtttttaaattcactcacaggtgaacagccgcagatcactctgccaattctgccgccatcgaataaagcaacaccgcgccctgtgccatttgcggcagcgaccaagtaat

SEQ ID NO: 238190 - DNA, 346 bp, Unknown
  Bacterial polypeptide expressing nucleotide sequence isolated from the Sargasso Sea
catgcattcctacacgcgaacgcctatgcggatgacagagtattgcaacttcactcccgcgctggcacggccacggctgcgctccgttcgtatcaacggactcgcaacctgtctgcggctggaagaagtctattggcgaatcattgaagaaattgcccgccagaaatccatgtcggtggggaaactgatttctcaatgggcacgcgaaattgatttgacgcaggagacggtctgcaacttcaccggcctgatacgcattatttgcgtcactcaattacttgacaaaaaacatccaatcaatctggaagcaatcgatcccgatgccatggggaatccgcctcaataa

SEQ ID NO: 238191 - DNA, 1270 bp, Unknown
  Bacterial polypeptide expressing nucleotide sequence isolated from the Sargasso Sea
atgactaataaagaattattggagcgaaggaagctctcaatgggctcttcaccattattttataaggaacctattcacttggttaaaggggaaggtatttggttgtatgacgattccaataataaatacatggattgttacaataacgtcccttgtgtaggtcattgccatcctcatgttattgaatccttaagcaaacaagctggccaactaaacacacacagccgttatatcagtaaagttgtggtcgattattcagaaaggttaatgaatctgcatactaatccgctttcggtgttgcaaatgggatgcagtggaacagaagctatagaaatagctattaaaatggctaggcttgctaccggaggaaaaggaattatttgtagcaacgctacttatcatggtaatagtcatgaaaccattcgaatgactattggaccttttgaaccagattttaaaagagtacctttcccagaaaaatttagaccgcttaaagaaggtttatcagaaaacgagctttgtgatttgtatcttgaagaaattaaaagagctattaatgaattctctgaagcaaatatcccattagccggtatgttgttttgttctatatttgcgaatgaaggtctaccaagcataccagaaggatttctgcctaaagctgctaaattgattagagatgcaggcggcctagtaatacttgatgaagtgcaagctggtttttgcagaacaggcagttggtggggctatgaagtaaatgattgcgtacctgatattgtggcaatgggaaaacccatgggatcgggttatccaattagtggagtaggaacgaatgaagaaattgctaaaacgttccatagcaaaagttattacttcaataccacagcctcaactccgttgcaggccgctgttggtaatgctgttcttgatgtgatcgaagaagaaaacttaaaagaaaatgtaaattcagttggggagtaccttaaagataaagtaagtagctttgtcgataaatttgacaaggtcggagatgtaagaggacaagggttgtttataggtattgagtgtattgaaggcaatggtaatagtgaacccaacaaggagttagcagttgaatttgtggaaaggatgaaacagaaagggtttttaatttctaatgcggggcagtttagaaatgttttaaaaattagaccacctttggtgtttcaaaaagaacatgctgattcactctatgaagttcttgaagaaaccttagacgaatttcataactaaa

SEQ ID NO: 238192 - DNA, 1486 bp, Unknown
  Bacterial polypeptide expressing nucleotide sequence isolated from the Sargasso Sea
aatgcaactgtggataggcgtccatctcccgttgttgtgcctcgaagtattccggccgaagtggtcgcgtgatacgcacgatgcacccggcgctgcgcaaggccttgctgtgcttgaaaaagagcgcgtcattgcctcggatgcgatcgcgcgtgccgccggcgtctgcaccggcatgcgccgcggcggggttctcacgctcgccccggccgccgttatgcacgagcgcgatggcgcagcggaactcaacgcggtgcgtgaggtggcgaccggtctgctgaacctgtcaccacaggtggtgattgcggaagaaagcacggtgctggtcgacgtgtcggccagtctgcggctctttggcggcatccgctccttgcgtcgcatggcgcgccgcgtggctgacgccattggcgtgaccgccacgatcagcgtcgcgccaacgggacaggccgcatggctgctcgcgcgctttggcggcggcgctgcgttgagccacgattccctttctcgttcgatggcgagcctgccggtcagcctgccgccgccggcgcgtcgccacctggactggctgaccggtattggctgcgagaccgtcggccaactgatgcgactgccgcgtgcaggtttgaaaaaacgctgcggaacggcattgctagacctgctcgaccgcgccagtggagatgcacctgaagtgtacgaatggtttgagacgccgccgacgttccaggcgcgcgtggaactgcccgaccgcatcgagcacgccgaagcctgcctctttgcggcacgccgtctcgttgtgcaactgaccggctggctgtcacagaaacagcttgccgtgacgcgcattgtcctgctgctcgagcacgaacggggccgggacgcgatagagccgacaacgattgaagtggcgctggcggagccaacatggcgcgaggatcacctcgtgcgcctgctgaaggaacggctcacgcgggttgaactggcggccgccgtgattgccctgcaactggtggtgcaggaggtcagggaggccgaggccgcatcggactcgctctttccggagcccggcggcaccgcgtccgatcacgcgcggctgctcgaactgctggtcgcgcgcctgggcgcagaaaacgtgcttcggcccgcacccgttgctgatcatcggcccgaggtcgcggcgcgctgggtgtccgtgacggacaagacgaagtacgtcgcgccggcgacggacacgccgcgcccgacgtggctgctcgaagcgccgatcaagctactgatgcgcggtgaacgccccttctacggcacgccactgcgcacggtctcgtctggggagcgcgtcgaggcgggctggtttcagggcgagcccgtgacgcgtgactacttcgtcgcggaagccgacgaccatatctgctactggattttccgggagcggatcggcgcggtcgatgacgacgagccgcgctggtatctgcacggactgttcggataa

SEQ ID NO: 238193 - DNA, 535 bp, Unknown
  Bacterial polypeptide expressing nucleotide sequence isolated from the Sargasso Sea
aatgagtaaacacgcagtattttggataagagacgattttagaataaaaaataatccagcattgtcatatgcaacaaataatcatgagtctgtatctgcaatctatatatacaacaacttaaaatttgatcaaaaaagagaggcacaaaagtggtggataagcaaatcgcttaaggaatttagtaaagatttacaaaaatttaatattaatctagagatttttaattcagatgaaataaaatttttttctaaaatcaaaaaagaaaaaggattaagtatttactggaataaaatttatgaaccagatgagttagatatagacaaaaaattaatttcatattttgaaaaagaaaaaataaattttaaattctttaaaggaaatgttcttaacgaatttaataaagtaaacaaaagcgatgggacaccttttaaagtttatagtccattttggagaaatgctgaaagaatttacttagaaaaagttcctgaaaaaagttcaaatgtaaaaaaaataaaaaaagctaaaaattttttt

SEQ ID NO: 238194 - DNA, 307 bp, Unknown
  Bacterial polypeptide expressing nucleotide sequence isolated from the Sargasso Sea
aatgtttgatcagacaactaacacagaagttcaccagcttaccgttggcaaaatcgaaaccgcaaacggcactatcaagccccagttattacgtgacgccgttaagcgtgccgtaactaacttcttcgcacagttggacggtcaggaagcacaagaagtgtacgaaatggtgctaagtgaagttgaagcacctctgcttgacatcatcatgcaacacactcgcggcaaccaaacccgcgcagcaaacatgctaggtatcaaccgtggtactctgcgtaaaaaattaaagaaatacggcatgaactaa

SEQ ID NO: 238195 - DNA, 307 bp, Unknown
  Bacterial polypeptide expressing nucleotide sequence isolated from the Sargasso Sea
aatgtttgatcagacaactaacacagaagttcaccagcttaccgttggcaaaatcgaaaccgcaaacggcactatcaagccccagttattacgtgatgctgttaagcgtgccgtaactaacttcttcgcacagttggacggtcaggaagcacaagaagtgtatgaaatggtgctaagtgaagttgaagcacctctgcttgacatcatcatgcaacacactcgcggcaaccaaacccgcgcagcaaacatgctaggtatcaaccgcggtactctgcgtaagaaattaaagaaatatggaatgaactaa

SEQ ID NO: 238196 - DNA, 487 bp, Unknown
  Bacterial polypeptide expressing nucleotide sequence isolated from the Sargasso Sea
tatgggaatggaatttgggcaaagacaagaatggaatgtttgggatgatctgcaatgggagttactagaatttgagccccataaaggcatcagaaacttgattgatgacctaaacgttctttataaaaatgaacctgcattatggaaaaatgactttgatccttatggattccaatggatagattgtaatgacaaatctaattcggttataagtttcatgagaagagaaaacgataccaatgagtggcttgttgttgttgctaactttacacctaatactcatgggtcatacaaagtaggtgttcctgtggaaggattctataaagaaatatttaattcagatggctctagatacgggggcagtaacaaaggaaatatggggggtaaagaaactataaattacaatattcatgattatcaaaatgctctagaacttgctttgcccccattaagcgtgagtatattcaaacatcaatcaaaaaaataa

SEQ ID NO: 238197 - DNA, 490 bp, Unknown
  Bacterial polypeptide expressing nucleotide sequence isolated from the Sargasso Sea
tttatgggaatggaatttgggcaaagacaagaatggaatgtttgggatgatcttcaatgggagttactagaatttgagcctcataaaggtatcagaaacttgattgatgacctaaatgttctttataaaaatgaacctgcattatggaaaaatgactttgatccttatggattccaatggattgattgtaatgacaaatctaattcggttataagtttcatgagaagagaaaacgataccaatgagtggcttgttgttgttgctaactttacacctaatactcatgggtcatataaagtaggtgttcctgtggaaggattctataaagaaatatttaattcagatggctctagatacgggggcagtaacaaaggaaatatgggtggtaaagaaactataaattataatattcatgattatcaaaatgctctagaacttgctttgcccccattaagcgtgagtatcttcaaacatcaatcaaaaaaataaa

SEQ ID NO: 238198 - DNA, 825 bp, Unknown
  Bacterial polypeptide expressing nucleotide sequence isolated from the Sargasso Sea
catggcactggcaaccctcgattggatgacccaggacgccgagcgtctggcccagtgcagccatgcccatccgctggccgttctcggcccgcagcaactggaggacggtcgctgggtggttcgggtctggatgcctgaggccgatcgggtggtgctgctccacgccggtggcgagctgctgctgcagaacccgcaccacccctggatctttgaaacagagctccctggtgatctcggcagcggctatcgattgagggttgagcgagccggcatcacccacgagcagcacgatccgtacgccttccgccatgagtggatgggtgccatggatcggcacctgtttgccgagggcaaccaccaccacatctggaaacgcatgggtgcccatccccatcagcaggatggggtggccggcgtgcagttctgcctgtgggctccccatgcccgcagcgtttcgatcatcggcgactgcaacaactgggatggtcgccacctgcccatgcaacagcgcactggtggcatctgggagctgttcgttcctggccttggcaccggcgctcactacaaatatgaaatccacacccaggagggtcactgctacgaaaaggctgacccctatggcttccagcacgaggtgcgccccaaacaggcctcccttgtggctgatctcaaccaattcgagtggagtgacgacggctggctgaaggagcgcgatggacgcaatgccttggagcagcccatctcggtgtacgagatgcacatgggcagctggatgcacggcagctgggatgaacccttcatcgaagccgacggcagcgtccgccc

SEQ ID NO: 238199 - DNA, 919 bp, Unknown
  Bacterial polypeptide expressing nucleotide sequence isolated from the Sargasso Sea
gatcaaaaaaaatgggataattcagacaatataaaagaaattttagctataagaaaagagatatctgaactggttggctttaataactacgcggaatattctctggcaacaaagatggccgagacaacagcagatgtttttgaatttctttatgatttggcaaataaaacaaaatctacagcattaaatgaaatcgaaatgattgagcagtttgcaggtcagaagctgcaaccatgggatgtctcatattatcttgagaaatataaacaagaaaatttctccgtatcagacgatgaattaaaacaatattttcaaaagtctactgtacaaaatggaatgtttgatgtagctaaatcattatttgatattactttggaaattaatccaaatatcccggtgtggcatgagagcgttgagtttgttgaagttaaaaaccttaatggggaaattattggtggattttatatagatttatttgctagaaatggaaaaagaagtggtgcatggatggatgaatgcgttatcagaaagaatataaacgataacaaaatgcttccaataggatatcttgtttgcaactttaccccgcctaacgaaaaaggaatatctcttttaacacacaatgatgtaattacctggtttcatgaatttggacacatgctgcatcatctcctcacgaaagttgatctacccagtatatctggaataaatggtgttccttgggatggggttgaacttccgagtcagtttatggaaaattttgcatggaactatcaggtattaaaagattgctctaaacatcatataacaggtcaatattttccgaaaagtatctttcgcaaattacagaaagccagaaattttgggtcaggacttgctatgttaagacagcttgagtttgctctgtatgatctgagta

SEQ ID NO: 238200 - DNA, 727 bp, Unknown
  Bacterial polypeptide expressing nucleotide sequence isolated from the Sargasso Sea
catgatcgagacaattcaagcagactggattaaatcagaagctatcaacctagaaaattgttgcaatgataatccattaaaaatattaggtcctcatttttatgaagaacaatgggtaataagggtatggatgcctgaagcagacgaagttaagataaattttaaaaacaatacctataaggctgaaaacataaaccataaatggctttttgaagctatcctgcccgaaaatccaaatcataattacgaaataaatatctcacgaggagggatcacgcatacacaacatgacccttggtcatatagagaagagtggatgggagaagttgatagacatctttttgcagaaggtaatcatcatcatatttgggaaaaaatgggagcacatcttattgaagaaaaaaatcaaaaaggtgtcatgttttgtatttgggctccaaatgcaaaatcaatctcgataattggagatataaattcttgggatggaagacatcatccaatgcaaaaaagattagggggaatttgggaactattcatgcctacaatgcaagagggcgacacatataaatacgaaataagaacacaacaaggtcatatttatgagaaagctgatccatatggtttcctacatgaaatcagacctcaaaatggttcaatagtttcaaaattgaaaaactttaattggaatgatagttcttggatttcaaatagagattcttctagtcaa

SEQ ID NO: 238201 - DNA, 635 bp, Unknown
  Bacterial polypeptide expressing nucleotide sequence isolated from the Sargasso Sea
gctgggtcgggtcatccgccagcttctggcgcaagtgccccaccacgatccgcaggtagtggctgtcctcggtatgggttggcccccagatgtccttgagcagctgctgttgggtaatcacccgccccgggtggcgtgccaactgcgccagcactgcgtattccttgcgagtcagcgccacttcggcaccgtccagcaaaacgcggcgataggccaggtcgaccgtcagcgggccaaaactcaaggcggcttcctgggcttctccggccggtgcctggcgcaacagcgcacgcacccgggcaagaaactcctggatgccgaacggtttggtcacgtagtcattggcgccaccgtcgagggcctcgaccttctgaccttcgctggcccgcaccgacagcaccagcaccggcacgctcgaccactcgcgaaactcacgcagcacctgttggccgtccatgtcgggcaggcccaggtcgagtaccagcagatccggtttgctcaaggccgcctgcgccaggccttcgttgcctgtgccggcttcgattaccttatagccttgggaagccaggctgatgcgcaggaatttgcggatctgcggttcgtcatcaatgacaagaatcgtcgcggtctggctc

SEQ ID NO: 238202 - DNA, 820 bp, Unknown
  Bacterial polypeptide expressing nucleotide sequence isolated from the Sargasso Sea
atgccgcccgtcgagggggacggtttcggcgtgtgcgcgttggatcccgcgctcgagggacacaaagggcatctcggacatcgctttgaaaagtttaaacacttgcgcgcggcgatcgaagagcacgagggtggcatggaaaagtttagccgaggatacgaaaagatgggctttacgcgcaccgccgagggcatcacgtacagagaatgggcgccgaacgcgacggcggcgtgccttcgtggtgattttaatgggtgggatctcggtgaaaacggcaagtggatgaccaaggatgattacggtgtcttctccgtgttccttccgaacaatgaagacggatctccggcgattccgcacggttctcgcgtgaagattcaccttcaaattccgaacggcgaacccgtcgaccgcattccggcgtggatccagtacgcggttcaagcgccgggtgagattccgttcgacggcgtgtactgggatccgccgaaggaggactcgtacgagttcaagtacgcgcgtccggacgctccgagcgagcttcgcatttacgaagcgcacgtcggcatgtcgtccaccgagccgaagattaactcgtacgtggaattcgccgatgacgtgttgccgcgcatcaaggatctcggttacaacgcggtgcagttgatggcggtgcaagaacacgcgtactacgcgtctttcggctaccacgtcaccaactttttcggtgtctcctcgcgatgcggtacgcccgaagagttgaagtacttggtggacaaggcgcactccatgggcatcaccgtgctcatggatttggtgcattcgc

SEQ ID NO: 238203 - DNA, 527 bp, Unknown
  Bacterial polypeptide expressing nucleotide sequence isolated from the Sargasso Sea
catgggtggcgcggcagtcctcgactggatggttcaggacggcgaacgtctcgcgaactgtcggcatgaccacccgttcgcgatcctcggcccgcaaccaagcgatgcgggctggaccgttcgggtgtggatgccggaagcccacagcgtgacgctgctggagtgcggtcgggaaacagcgatgaccgctcccaatcacccctgggtgtttgaaacaacgctcagccacgaccccggcagcaactacagggtgcgggtcgagcgcggcggaatcacccacgaacagcacgacccctgggcgttccgggatgactggatgggcgacatggatcgccacttgtttgcccagggcaatcaccaccacatctggcaacggatgggcgcccacctcacgcagcgtgatggcatctccggtgtgatgttctgcctttgggcaccgcatgccctgagcgtgtcgatcctgggtgatctcaactcctgggatggccgtcaccaccccatgcagcagcgcatgggcgggatctggg

SEQ ID NO: 238204 - DNA, 880 bp, Unknown
  Bacterial polypeptide expressing nucleotide sequence isolated from the Sargasso Sea
gtgaaatacctcaaggaacgttccgacgaacagtggagcgtgttcgacatggtgagcactctgtgcaaccgtcgatacacggagaaggccatcgcgtacgtcgagtcgcacgatcaatccatcgtcggtgacaagacgaccgcgttttggttgatggatgccgaaatgtactctggtatgtccgctctgagcgaaccatccatcgtgattcaacgcggtatcgcgcttcacaagatgcttcgtctcgtcaccgcgtcgctcggcggcgagggctatctcacctttatgggtaacgagttcggtcatcccgagtgggtcgacttccctcgcgagggtaacaactggagtcacgagtactgccgccgccgctgggatctcgccgacgccgatcacttgcgttaccaacacctcttgagctttgacaaggcgatgatggcgttggacgacgagtacgcgtacatgggcgcctcgcaccagcacgtgagcaccgccgacgacggtcgtcaaatcctcgtcttcgaacgcggcccgctcgtgttcgtgttcaacttccatccgtccaacacgtacgaaggtctcgagatcggcgtcccggaaccgggtaaataccgcctcgccctggacacggacgcgtccgatttcggaggctcgtctcgctgcggtttcggcgtcgatcacttcacgtcccccgaagcgcccccgagctgggtcggtccgtacgagcagacccctcgcgccgcaaagatgcgagtgttatctccctcgcgctccgcgcaggtgtattaccgcgtgcacgaaccgagcgcggcgccgcccaccgaaccgagcgtcggcgaaatcgtgcgcgaaatcgactccgacgcctcctcggctcgatgag

SEQ ID NO: 238205 - DNA, 796 bp, Unknown
  Bacterial polypeptide expressing nucleotide sequence isolated from the Sargasso Sea
tctcattgaagaaaaggaccaaaaaggtgtcatgttttgcctttgggctccaaatgcaaaatcaatctcgataattggagatataaattcttgggatggaagacatcatccaatgcaaaaaagattagggggaatttgggaactattcatgccaataatgaaagagggagacatatataaatatgaaataagaacgcagcaaggtcatatttatgagaaagctgatccatatggtttccttcatgaaattagacctcaaaatggttcaatagtttcaaaattgaaaaactttaattggaatgatagttcttggatttcaaatagagattcttctagtcaaattaacaagccaatttcagtttatgaaatgcatttagggagttggctccatgaatcaacagataataaatatctggaggacaatggtgaaccaagagacccagtgcctgcagccgatttaaaacctggaaccagattattaacttatccagaattaaccaagaaactcatcccttatgtaaaagagagaggattcactcatattgaactaatgccaatatctgaacatcctttcgatggttcatggggataccaggttacaggctggtatgcaccaacaagtagatttggcaccccaaatgaatttagagagtttgtaaataaatgtcatgaagagggtataggcgtaattcttgattgggtgcctggtcatttcccaaaagataagcatggtttagcattttttgatggttgtcatctttatgaacatggagattcacgcattggtgaacacaaa

SEQ ID NO: 238206 - DNA, 803 bp, Unknown
  Bacterial polypeptide expressing nucleotide sequence isolated from the Sargasso Sea
tttgatgggacccacctttacgaacacggggatccccgcatcggcgagcacaaggagtgggggacgctgatcttcaactacagccgcaatgaggtgcgcaactttctggttgccaacctggtgttctggctggagcagttccatatcgatggcattcgcgtagacgccgttgcctcgatgctttaccgcgactacctgcgaccggacggtgaatggctggccaatgaacacggcggccgcgagaacaccgaagcggtgcgattcctgcagcaggccaaccacgtgatgttccagcacttccccggtactctctccatcgccgaggagtccaccacctggcccatggtgacccagcccacggacatgggcggacttgggttcaatctgaaatggaacatgggctggatgcacgacatgctcgattacttcgagcttgatccgtggttccggcaatttcaccagaacaacatcacattctcaatctggtatacctacaccgagaatttcatgttggcgctcagccacgatgaagtggtgcatggaaagagtcatcttcttcacaagatgcctggagatgactggcagaaatatgcgaatactcgagccctgctggcatatatgtggacccatcccggcaaaaagaccatcttcatggggatggaatttgggcaacgcgccgagtggaatgtttggggcgatctgcagtgggatcttctcaattacgagccccacatgggtattcaacgactcgtcgatgatctgaatgttctttacaaagcagaaccagctctctggagagatga

SEQ ID NO: 238207 - DNA, 834 bp, Unknown
  Bacterial polypeptide expressing nucleotide sequence isolated from the Sargasso Sea
tatgttttgcttgtgggcgcctcatgcaaaaagcgtttctgttattggtgatctgaattcatgggatggccgacatcaccctatgcaaaaacgtctaggagggatttgggaactattcatacctggtctaagtgagggggatttatacaaatatgaaatcaggactgaaaaaggacattgctacgagaaagccgacccttatggttttcaacatgaagttagacctgcaaaaagctcagtagtatcaaaaatcgattcatttcaatggaatgatcagtcttggatatccgatcgtgataatagagatcctttagaggaaccaatatcagtttatgagatgcatttaggaagctggatgcatgcttcctcagacgatccatttatcaattcaaatggagagcatagagtcccagttccagcagcagatatgaagcctggctcacgattgcttacatacaaagagctggcaaacaaggtcattccctatgtcaaagataggggctttactcatatcgagcttatgccaatttcagagcacccttttgatggctcatgggggtatcaagttactggttggtatgcgcctacgagtagatatggatcaccagatgagtttcgtgccttcgttgattcatgccataaagagggaataggaatcattctcgattgggttccaggccacttccctaaagatcagcatggacttgcttattttgatggtagccatttatacgagcattcagatccaagaattggagaacacaaagaatggggaacattgattttcaattacagtcgcaatgaagttcgtaattttctagttgcaaatttaat

SEQ ID NO: 238208 - DNA, 891 bp, Unknown
  Bacterial polypeptide expressing nucleotide sequence isolated from the Sargasso Sea
ccatctgggatcctggcgtcgccataccgataacaacttctggctgagctaccgcgaactggccgatcaactggtgccctacgcgaagtggatgggcttcacccatctggagctgctgccggtaaacgaacatccgttcgacggcagctggggctatcagccgaccgggctgtacgcgccgacccgccgctttggcacccgtgaagacttccgctacttcctgaatgccgcccatgccgcgggtctgaacgtcattctcgactgggtgccgggccacttcccgtcggatgactttgcgctggcatcgttcgacggtaccgcgctgtatgaacacagcgacccgcgtgaaggttatcaccaggactggaatacgctgatctacaactacggtcgccgggaagtcagtaacttcctggtcggtaacgcgctgtactggattgaacgcttcgggatcgacgccctgcgcgtggatgcggtagcgtcaatgatctaccgcgactacagccgcaaagagggtgagtgggtgcccaacgagtacggcggccgggaaaacctcgaagcgattgagttcctgcgcaataccaaccgcgtgctcggcgaacagacgccgggagcggtcacgatggcggaggagtccaccgacttcgccggggtttcacgaccgtcttcaacgggcggtcttggcttctggttcaaatggaacctcggctggatgcatgacaccctcgactacatgaagctcgatcccatctatcgtcgtcatcatcacgacaagatgaccttcgggatgctctacaactacaccgaaaacttcgtcctgccgctgtcacacgatgaagtggttcacgggcaaaaatcgattcttgaccggatgcccggcgatgcctggca

SEQ ID NO: 238209 - DNA, 787 bp, Unknown
  Bacterial polypeptide expressing nucleotide sequence isolated from the Sargasso Sea
tttgatggttgtcatctttatgaacatggggattcacgcattggtgaacacaaagaatggggaactttaatctttaattacagcagaaacgaagtaagaaatttcctagtagccaatctcgtttattggtttgaagaatttcatattgatggcatacgagtagatgctgttgcttcaatgctttacagagactatctacgaccagatggagaatggatacctaatgagaatggtggaaatgaaaatacagaagccgttaaatttcttcaacaggccaatcatgtactcttccaacatttcccaggggcactttctattgctgaagagtcaacaacttggccaatggtaaccaaaccaacggacatgggaggattagggtttaatttaaaatggaatatgggctggatgcacgatatgctcgattattttgagatagatccttggttcagacaattccatcaaaatagtgtgactttctcaataacatataactatacagagaactttatgcttgctctcagtcatgatgaggttgtccatgggaaaagtcatcttttacataaaatgcctggtgacgactggaagaaatatgcaaatactcgagctttactaacttatatgtggacccatcctggtaaaaaaacaatatttatgggaatggaatttggacaaagacaagaatggaatgtttgggatgatcttcaatgggatttactagaatttgaacctcataaaggtatcagaaacttgattgatgacctaaatgcactttataaaaatgaatctg

SEQ ID NO: 238210 - DNA, 877 bp, Unknown
  Bacterial polypeptide expressing nucleotide sequence isolated from the Sargasso Sea
ctacagccgcgaacccgggcaatggctgcccaatgcctatggcggacgggagaatttagaggcaattcattttctgcaaatgttgaatcaacgtttgtatcaagccttccccggcatttgcatgatagccgaagagtcaaccgcctttgcgggcgtgactaagccgacggatggcggcgggctggggtttggttttaaatggaatatgggctggatgaacgacagcctaagttacttgggtcgcgatcccatctatcgccagtatcaccataaccagctgacctttagtttgatgtatgcctattcggagcaatttatgctgtcgataagccacgatgaagtggtgcacggcaagggctctttgttgcataaaatccccggcgatgattggcaaaaattcgccaccctcagggcctattacggctttatgtgggggcatccgggcaaaaaattactgtttatgggcagcgagttcgcccagcgcgacgaatggaaccataaccatagcctcgattggcatttgcttgcttttgaaccccaccaaggcgtgcagcgctggcttcgggatctgaatcggctttatcgccaattccccgctttatctgtgctcgactatgagtcgcaggggtttcgctggctcgattgtgacaatggtcgggacagtatttttagctttgttcgctatggcgagggcagtgatgtgcccttggtgtttgtggtgaacatgacgccaactctgcaccaaggatttcgtatcggcttgccccaaggcggggatttttgtgagtacctcaatagcgacagtcatctctatggcggcagcaatcaggggaatgcgggcaaggtaattgccgaagacttacctggcagggcaggc

SEQ ID NO: 238211 - DNA, 793 bp, Unknown
  Bacterial polypeptide expressing nucleotide sequence isolated from the Sargasso Sea
gtcagaagcttcctcttgggcagcgccttttcttggattgagcgatatggagtggatggctttcgggtcgatgccgtggcctcgatgctctatttggattactctcgcgacaaaggtgaatggttgccgaacgagaaaggcggccgagaaaacttggaggccattgattttcttcgccaatttcacgagatccttcgcaacgagtatcccggagttatatccattgcggaggaatccacagcattcccaaaaatctccgaacctacttctcaaggtggtctgggctttgacttcaagtggaacatgggatggatgcacgacgttcttgcctacttgggggcttctcaaaaggaacgccccgcttttcacgaaaaactcaccttcggttccacttaccagttttcggagaaattcgttcaagctttttcccacgacgaggttgttcacggcaagggatccctcgcaaacaaaatgaaggcgcatagcaggactgagcaaatctcacagcttcgggccctctatgcattcctctggacttggcctggaaaaaagaccctcttcatgggcggcgagttcgcccaatggaaggaatgggattgtgacggcgagctcgattggtcccttcgagactttcctatgcacgagggtgttcgcaacttggttcgcgagcttaacggcttgtaccggaagcatccttcatggtctgcctgcgatcaccagcgtgacaagtttcgctggatttcttgcgacgacgcccaaagtcgctccatttcctttattcgctttggagaaa

SEQ ID NO: 238212 - DNA, 538 bp, Unknown
  Bacterial polypeptide expressing nucleotide sequence isolated from the Sargasso Sea
cgccaacctgcgcgcctacttgtcgttcatgtggacgcacccgggcaagaagctgctgttcatgggcagcgagttcggccagtggcgcgagtggaaccatgatcgcgagctggactggcatctgctcgaagaggccgatcaccgtggcgtgcagaacctggtgcgcgatctgaaccggctgtacagccaggaaccggcgttgcacgaattggacagcgacccgcagggctttcagtggctgatcggcgatgatcgcgccaacagcgtgttcgcctggctgcgcaagagctcgacagggcatccgctgctggtggttgccaacttcacgccggtggtacgtgaggcctaccgcatcggcgttccggtggacgccaagtggctggaggtcttcaacagcgacgcggcctgctacggcggctcgaacaccggcaacggcggcggcatgctcgccgagccgatcgagagccacggcgagaaggtctcgctgtcactgaccctgccgccgctcggcgtgctggtactgcggccgcaggtgtaa

SEQ ID NO: 238213 - DNA, 895 bp, Unknown
  Bacterial polypeptide expressing nucleotide sequence isolated from the Sargasso Sea
ggtgccgggccatttccccaccgacgggcacgggctggcccgcttcgacggcacgccgctttacgaacatgccgacccgcgcgaagggttccatcaggactggaacacgctgatcttcaattacggccgaaccgaggtccggaactacctgatcgccaacgccctgtattggctgaaggaatatcatctcgacgggctgcgcgtggatgcggtggcctcgatgctgtatcgcgattattcacgcaaggccggcgaatgggtgcccaacaggcatggcgggcgggaaaacctggaggccatcgccttcatccaggccatgaacgtcgtcacctatggcgaggtgcccggcatcatgaacgtggccgaggaaagcacgtctttccccaaggtgtcggccccggtcgatgcgggggggctgggcttcggcttcaagtggaacatgggctggatgaacgacacgctgcgctacatgcagcaggatccggtccatcgcaaatatcaccacgatcagatgaccttcggcctgatgtatgcgttttccgagaatttcgtcctgccgatcagccatgacgaggtggtccatggcaagggcagcatgttgcgcaagatgcccggcgacgaatggcagcaattcgccaacctgcgcgcctattacggcttcatgtggggtcatccgggcaagaagctgttgttcatgggctgcgaatggggtcagcccgaggaatggaaccacaatggcgaactgaactggcacgccgccggtcagccgctgcacaagggtgtgcaatcgctggtccgcgatctgaaccggctttatcgcgaaacgcctgcgctgcatgtcaaggattgcgatgccgaggggtttcagtggatcgccaccgacccggcgcaatcg

SEQ ID NO: 238214 - DNA, 840 bp, Unknown
  Bacterial polypeptide expressing nucleotide sequence isolated from the Sargasso Sea
aatgggagcacatctcattgaagaaaagaatcaaaaaggagtcatgttttgcatctgggctccaaatgcaaaatcaatctcgataattggagatataaattcttgggatggaagacatcatccaatgcaaaaaagattagggggaatttgggaactattcatgccaacaatgcaagagggcgacaaatataaatacgaaataagaacacaacaaggtcatatttatgagaaagctgatccatatggtttccttcatgaaatcagacctcaaaatggatcaatagtttcaaaattgaaaaactttaattggaatgatagttcttggatttcaaatagagattcttctagtcaaattaacaagccaatttcagtttatgaaatgcatttaggaagttggctccatgaatcaacagataataaatatcttgaggccaatggtgaacaaagagaagcagtgcctgcagccgatttaaaacctggaacaagattattaacttatccagaattaaccaagaaactcattccttacgtaaaagagagaggattcactcatattgaattaatgccaatatctgaacatccttttgatggttcatggggataccaggttacaggctggtacgcaccaacaagtagatttggcaccccaaatgaatttagagagtttgtaaataaatgtcatgaagagggcataggcgtaattcttgattgggtgcctggtcattttccaaaagataagcatggtttagcattttttgatggctgccatctttatgaacatggagattcacgaataggtgaacacaaggaatggggaactctaatatttaattacagcag

SEQ ID NO: 238215 - DNA, 398 bp, Unknown
  Bacterial polypeptide expressing nucleotide sequence isolated from the Sargasso Sea
cggcgtccagcgcctggtacgcgatttgaaccatacctatcgtcaccataaagcgctgcacgagctggattttgacccctatggctttgaatggctggtggtggacgatcatgagcgctcggtatttgtcttcgtccgtcgcgataaggccggcaatgagattatcgttgccagcaacttcacgccggtgccgcgtcacggctatcggttcgggattaaccagccagggcgctggcgtgaagagctgaacaccgactcgatgcattaccacggtagcaacaccggtaacggcggcatcgtggaaagtgaggccatcgccagtcacgggcgtgagcattctctctcgattacgctaccgccgctggcgaccgtctggctggtacgggaggcagaatgac

SEQ ID NO: 238216 - DNA, 619 bp, Unknown
  Bacterial polypeptide expressing nucleotide sequence isolated from the Sargasso Sea
atttcgcacgatgaagtggtacacggcaaaggcagcatgctgcataaaatgcctggcgatgaatggcagcaagccgctaacctgcgttgttacgcgggctttatgtacggccaccccggcaagaagcttaactttatggggaacgagcttgcgcaggcacgagaatggaaccatgacagtagtttagactggcacttgctcgattacgaaaagcacaaaggcattcaagcgctttataaggcgctcaaccacctctatacgtctacgccagcgctttacgagcaagaccacgaaccagggggctttgcttggttggaccacaataatgcagaccaaagcgtagtttcatttgttcgtatgtcaaaagatgcgaggcaaaaagtatatgtggtatctaattttacgcctgtgccgcgtcagaacttcagaataggcgtagatgatgcatgcacgctgacgctagcattaaatacagatgatggtgcatattggggtagtgactacgacgttgcttctactgtaaatacgcaaaccataccttggaatgagcgtacacactctgcagaaatcacgttaccgccgctagccacagtattttatgttgccaatgtggattaat

SEQ ID NO: 238217 - DNA, 937 bp, Unknown
  Bacterial polypeptide expressing nucleotide sequence isolated from the Sargasso Sea
gccgatttaaaacctggaacaagattattaacttatccagaattaaccaataaactcattctttacgtaaaagagagaggattcactcatattgaactaatgccaatatctgaacatcctttcgatggttcatggggataccaagttacaggctggtatgcaccaacaagtagatttggcaccccaaatgaatttagagagtttgtaaataaatgtcatgaagagggcataggcgtcattcttgattgggtacctggtcattttccaaaagataagcatggtttagcattttttgatggttgccatctttatgaacatggagattcacgaataggtgaacacaaagaatggggaacactgatatttaattacagcagaaacgaagtaaggaatttcttagtagcgaatctcgtttattggtttgaagagtttcatattgatggcataagagtagatgctgtagcttcaatgctttacagagattacctacgtccagatggagaatggatacccaatgaaaatggtggaaatgaaaatatagaagccgttaaatttcttcaacaggctaatcatgttctcttccaacacttcccaggtgcactttctatcgctgaagaatcaacaacttggccaatggtaaccaaaccaactgacatgggagggttagggtttaacttgaaatggaatatgggatggatgcacgatatgcttgattattttgaaatagatccttggtttaggcaattccatcagaatagtgtcactttctcaattacatataactatacagagaactttatgcttgcacttagtcatgatgaagttgtccatgggaaaagtcatcttttgcataaaatgccaggagatgactggaagaaatatgcaaatactcgagcattacttacttatatgtggactcacccaggcaaaaaaaacg

SEQ ID NO: 238218 - DNA, 802 bp, Unknown
  Bacterial polypeptide expressing nucleotide sequence isolated from the Sargasso Sea
tttcccggcgtttcccgtccttcctccaccggcgggctgggtttctggttcaagtggaacctcggctggatgcacgacaccctcgactacatgaagctggacccggtgcatcgccgtcatcatcacgacaagatgaccttcggtatgctctacaactacaccgaaaactttgtcctgccgctctctcatgatgaagtggtgcacggcaaaaaatcgatactcgaccgcatgccgggcgacgcctggcagaagttcgctaacctgcgcgcctactacggctggctgtttgccttcccgggtaaaaagctgctgtttatgggcaatgagtttgctcaggggcgcgaatggaaccacgacgcaagcctcgactggcatctgctggaaggcggcgataactggcaccacggcgtccagcggctggtgcgcgatctcaaccatacctatcgtcaccataaagcgctgcacgagctggatttcgatccctacggcttcgaatggctggtggtggacgaccatgagcgttcggtatttatctttgttcgtcgcgacagggcgggcaatgaaattatcgtcgccagcaacttcaccccggtcccgcgtcatgagtaccgttttggcatcaaccagcccggccgctggcgtgaagagctcaacaccgactccatgcattaccacggcagcaacaccggcaacggcggcgtcgttgagagcgacccgatcgccagccacggtcgtgaacactccctctccattacgctgcctccgctggcgacggtgtggctggtgcgggaggcgcaatgat

SEQ ID NO: 238219 - DNA, 773 bp, Unknown
  Bacterial polypeptide expressing nucleotide sequence isolated from the Sargasso Sea
ccacggcctggcgttcttcgatggcacacacctctacgaacacggtgatccgcgtatcggtgagcacaaagagtggggaacgctgatcttcaattacagccgcaacgaggttcgtaacttcctggttgccaacctggtgttctggttcgagcagttccacatcgacggtattcgtgttgatgccgtggcttcaatgctctaccgggactatctgcgtccggatggtgaatggctggccaatgaccatggcggcagggaaaacaccgaagccgttcatttcctgcagcaagccaaccatgtgctgtttcagcacttccccggtgcgttgtcgatcgcggaggaatccaccacatggccgatggtgacccaaccgacggaaaacggcggcctgggtttcaacctgaaatggaacatgggttggatgcacgacatgctcgattacttcgagctggacccctggttccgtcagttccaccagaacaacatcaccttctccatctggtacacgtacaccgaaaacttcatgctggcgctcagccacgacgaagtggtgcatggcaagagtcatctcctccacaagatgcctggtgatgactggcagaaatacgccaacacccgggcactgctcgcctatatgtggacccaccccggcaagaaaaccatcttcatggggatggaattcggtcagcgggctgaatggaacgtctggggtgatctgcagtgggatcttctcaactacgaaccccacaaaggcattcaactgctggtggatg

SEQ ID NO: 238220 - DNA, 880 bp, Unknown
  Bacterial polypeptide expressing nucleotide sequence isolated from the Sargasso Sea
ttgaaaaatttccgggggattctttccattgccgaagaatccactgcctgggccggagtcagccatcctacctataccggaggactgggattcaacctcaaatggaatatgggttggatgaatgacagcttgagatacatggaaaaggacccggtttacaggaaatacgagcatcaactgatgactttttcgatgatgtatgctttcagcgaaaacttcgtgttagccctttcccatgacgaggtggtccacggaaagcgctcacttctggaaaagatgcccggggatgagtggcagaaacgggccaaccttcgattgtatcatgcgtatttgatggggcatcctggcaaaaaactaatcttcatgggcggagaattcggtcaatggcgggaatgggacgaaaaagtcagtctcgactggcatctgctggaaaatgaaggtcatcgccaactccagcacttttgccgagaattgaaccggctgtacctgcgcttgcccgcgctctacagcaatgacttcgattggagcggttttcgctggatcgatcacagtgaccaggataacagtgtgcttgcctttttacggttgccggctgttggttatgaggcaagtgaggacttggagcataacgattcgaattccgctcccgtggcctttgttttcaacttcacaccagtcccgagaaggggttatctgttgggacttcctgaagcagatgcgtaccataaaatttttgatacagacgatccctggtttggcggttcgggtttcagcagccagtcccggattgcggtggaaaatcatcccagccacggatttccctgcagggttttactggatctgcctccgttggcggcattgatgctcaagccaggttaat

SEQ ID NO: 238221 - DNA, 829 bp, Unknown
  Bacterial polypeptide expressing nucleotide sequence isolated from the Sargasso Sea
ataaattcttgggatgggagacatcatccaatgcaaaaaagattaggaggaatttgggaactattcatgcccacaatgcaagagggcgacatatataaatacgaaataagaacacaacaagggcatatttatgcgaaagctgatccatatggtttccttcatgaaatcagacctcaaaatggttcaattgtttcaaaattgaaaaactttaattggaatgatagttcttggatttcaaatagagattcttctagtcaaattaacaagccaatttcagtttatgaaatgcatttaggaagttggctccatgaatcaattgataataaatatctagaggacaatggtaaaccaagagacccagtgcctgcagccgatttaaaacctggaacaagattattaacttatccagaattaaccaagaaactcatcccatacgtaaaagagagaggattcactcatatagaactaatgccaatatctgaacatccttttgatggttcgtggggataccaagttactggctggtatgcaccaacaagtagatttggcaccccaaatgaatttagagagtttgtaaataaatgtcatgaagagggcataggcgtaattcttgattgggttcctggtcattttccaaaagataagcatggtttagcattttttgatggttgtcatctttatgaacatggagattcacgaataggtgaacacaaagaatggggaaccctaatatttaattacagcagaaatgaagtaagaaattacttagtagccaacctcgtttattggtttgaagagtttcatattgatggcataagagtagatgccg

SEQ ID NO: 238222 - DNA, 846 bp, Unknown
  Bacterial polypeptide expressing nucleotide sequence isolated from the Sargasso Sea
catgaccgtctctatcctattagattctttgaaagacgacggacaaagactttctgaatgcagacatgaaagtccattttcaattcttggtcctcaaccatttaaagataaatggataattcgaatatggatgcctgaggcaagtgaagttgaactgataacacaacaaactaaaattaagctacaaaatcccaatcatgaatggatatttgagggtgttttagaaaaagatcctggtaatgactatcaaataaaagtaaatagaggaggaattgaacatgttcaacatgatccttggagtttccgaaaagagtggatgggtgaaattgatagacatcttttcgcggagggaaatcaccatcacatatggcgaaaaatgggtgctcacctcactgaaatagataaaaagcaaggagttatgttttgcttatgggcgcctcatgcaaagagtgtttccgttattggtgatctcaattcatgggatggacgccatcacccaatgcaaaaacgtctaggaggaatttgggaactattcatacctagtctacgtgagggagatttatacaaatatgaaatcaggactgaaaaaggacattgctacgagaaagccgacccttatggttttcaacatgaagtaagaccagcaaaaagctcagtcgtatcaaaaatcgattcatttcaatggaatgatcagtcttggatatccaatcgtgacaatagagatcctttagaacaaccaatttcggtttatgaaatgcatttaggaagctggatgcatgcttcctcggacgatccatttatcaactcaaacggagagcatagagccccagttccagctgcagatat

SEQ ID NO: 238223 - DNA, 790 bp, Unknown
  Bacterial polypeptide expressing nucleotide sequence isolated from the Sargasso Sea
cttgccgatgcaacaacggcttggaggcaattgggaactcttcgtgccaggactaagtgctggcgcccactacaaatacgagatccacacccaagaggggcattgctacgagaaagcagatccctacggcttccagcacgaagtgcgcccagcccaagcgtccgtggtggccaatctcaagggctaccaatggggtgatgaagcctggctcaaacaacgcgacagccggaacccgctcgatcaaccggtttcggtctacgagatgcatctcggcagctggatgcatggcagctgggatgacccctacatcgaggctgatggcactccaaggccacccgtgccggccgctgatctcaaacctggcgcgcgcctgctgacctatcccgaactggccgatcgggtgatcccttatgtgaaggctcggggttttacacacatcgagctgatgccgatggcggagcaccccttcgatggctcctggggttatcaggtgaccggcttctatgcccccaccagccgctttggaacgctcaacgaattccgtgccttcgtggatcggtgccacgccgaagggattggcgtggttcttgattgggtgcccgggcacttccccaaagatgcccatggcttggccttctttgacggctgccacctctatgagcacagcgatccccgcatcggagagcacaaggagtggggcacgctgatcttcaactacagccgcaatgaggtgcgcaacttccttgttgccaacctcgttttctggtttgaagagcttcacatcgacggc

SEQ ID NO: 238224 - DNA, 842 bp, Unknown
  Bacterial polypeptide expressing nucleotide sequence isolated from the Sargasso Sea
gcatgcggataccatggatggcgtaaccggcacgcgcttctccgtctgggcgcctaacgctcaacgcgtgtcagtggttgggcagttcaactactgggatggccgtcgccacccgatgcgcctgcgcaaagaaagcggtatctgggagctgtttatccccggcgcgcagcatggccagctgtataaatatgagatgatcgatgccaacggtaagctgcgaatcaaagcggacccttacgccttcgaagcgcaaatgcgcccggaaaccgcgtcgcttatctgtggtctgccggaaaaagtggtgcaaagcgaggagcgtaaaaaagccaaccagtttgatgcgccaatatctatctatgaagtgcacctgggttcatggcgtcgtcataccgataacaacttctggctgagctaccgcgagctggcggatcagctggtgccttacgccaagtggatgggctttacccaccttgaactgttgccgattaacgagcatccgttcgacggtagctggggttaccaacctaccggcatgtatgcgccgacccgtcgatttggtacgcgcgatgacttccgctattttgtgaatgccgcgcatcaggcggggctgaacgtcattcttgactgggtgccgggccatttcccgtcggacgactttggtctggcagagtttgatggcaccaggctgtatgagcacagcgacccgcgagaagggtatcaccaggactggaacacgctgatctacaactacggtcgccgtgaagtcagcaactatctggtgggcaacgccctgtactggattgagcgctttggtatcgacgcgctgcgcgtggatgccgtgg

SEQ ID NO: 238225 - DNA, 881 bp, Unknown
  Bacterial polypeptide expressing nucleotide sequence isolated from the Sargasso Sea
tctgcatcattgtggctcatgcaggaaccgttacaccttcttactcatcttcctttttctccttgaacaaatgctaactgattacgacctacatctcttgggcgaaggtagacactggaaaagctacgacaagcttggcgcgcaactgtgtacacgtgatggacaacagggagttcattttgctctctgggcgccgaatgctgaagcggtcagtgttgttggtgatttcaatggctgggctggccacaaccacatgatgagcaagctgatgccgtccggcttctggcaactcttcgttcctggtgttgggcctaatactgcctacaagttccgtgtgaaaacaactgaagggactattgaccgcgccgatccccacggctattcagctgaggtgccaccacagaatgcttctctcgtcacagatttaagtgattacaactggaacgactcgcattggatggagcaaaggcggcggcgagattggttcagtgaaccaatctcattctatgaagttcatctcggaagttggaggcgaccaggagacgacccgcatcgctggctgacataccgtgaccttgagagagaacttattccttactgccttgaaatgggatttacccatttggaatttcttccaccaacagaacatcccctctctgcaagttggggctaccaaacgatcggcttatttgctgcaacaagtcgctttggtacccctcaagatttcatgtcactgatagacggctgccatcaagccggtatcggagtcattattgattgggtacctgcacacttcccaaaagatgatcatggggcttcgcccgcctggacgggacggctctctacgaacatgaaagacccatgcaggggcgagcacccct

SEQ ID NO: 238226 - DNA, 937 bp, Unknown
  Bacterial polypeptide expressing nucleotide sequence isolated from the Sargasso Sea
gagatcgccatgacaacgccgaaccacccctgggtgttcgaggcacagctcaacagagaccccggctgcacgtaccgggtcagggttgagcggggcgggatcgtgcacgaacaacacgacccctgggccttccgcggcgaatggatgggcaaaatggaccgccacctgtttgctgaaggcaaccatcaccacatctggcaaaagatgggtgcccacctcaccgagcgtgacggggtcaggggtgtgatgttctgcctgtgggcgcccagcgctctcacggtctccgtgattggagatctgaattcatgggatggacgtcaccaccccatgcagcagcgcgtcgggggcatctgggaactgttcatccccggcctcgaggagggacatctctacaagtacgaaatccgtacccaagaaggccactgctaccaaaaggctgatccttatggcttccagcacgaggttcgcccggacaacagctccgttgtggctcgcctgggcggataccaatggtccgatcagggctggatgcagaagcgcgaaagcagcaacgcgctcgatcaaccgatctcggtgtatgaaatgcacctgggcagctggatccacgcctcagcggatgagccctggattcaacccgacggcacccctcggacgcccgttcctgccgcggagatgaaacccggcgctcgcctgctcacctacgccgaactcgccgatcgcctgattccctacgtcaaggagaggggcttcacccacatcgaggtgatgccgatcaccgagcatcccttcgacggctcctggggctatcaggtgacgggttggtatgcccccaccagccgttacggaacgcccgatgaattccgggccttcgtggatcgctgtcacgccgaaggcatcggcgtgatcatcgactgggttccgggccactcccgaagga

SEQ ID NO: 238227 - DNA, 736 bp, Unknown
  Bacterial polypeptide expressing nucleotide sequence isolated from the Sargasso Sea
atgactgatcgtccggttctgaccatgccaggggaaaccctgatgcccagtgacgccgatgtagacgcactggtgcgagccgagcatggcaacccgttttccattctcgggccgcatcctgacggcgagggaatcgtgattcgcgcctacctgcccaatgccctgggtgccgaagtgctcgatcgcgatgagcaactgcttgccgtgatggagcaggggcaggtgcccggattcttctttatccgcctgccacatcagcaaccctacctgctgaagattcgctgggccggcggcgagcagatcaccgaagacccctacagcttcggtccgcaactgggcgagctggacatgcacctgttctccgaaggcaatcaccggcagatcggccgggtattcggctcgcaggtgctggaagtcgacggtgtgcagggcgtgcgcttcgccgtgtgggcgcccaacgcgcgccgagtgtcgatcgtcggcagcttcaatggctgggacggtcgccgtcatccgatgcggctgcgctttccgtccggcgtgtgggagttgttcatcccgcgcctgcagccgggcgatacctacaagtacgagattcttgggccgaacggcatcctgccgctcaaggccgacccgatcgccctggcaaccgagcacccgccgggcaccgcttcggtcatcgcccggccgctggactaccagtggaaggaccatggctggttgcagcagcgcgccg

SEQ ID NO: 238228 - DNA, 925 bp, Unknown
  Bacterial polypeptide expressing nucleotide sequence isolated from the Sargasso Sea
catgatcgagacaattcaagcagactggattaaatcagaagctatcaacctagaaaattgttgcaatgataatccattaaaaattttaggtcctcacttttatgaagagcaatgggtaataagggtatggatgcctgaagcggacaaggttaaaataaattttaaaaataaaacctataacgcggaaacgataaaccataaatggctttttgaagcaatccttcctgaaaatccaaattctaattacgaaataaatatttcacgaggaggtatcacacatacgcaaaatgacccctggtcatatagggaagagtggatgggagaagttgatagacatctttttgcagaaggtaatcatcatcatatttgggaaaaaatgggagcacatctcattgataataagaaccaaaaaggggtaatgttttgcatttgggctccaaatgcaaaatcaatctcgataattggagatataaattcttgggatggaagacatcatccaatgcaaaaaagactagggggaatttgggaacttttcatgccaataatgaaagagggagatacatataaatacgaaataagaacacaacaaggtcatatttatgaaaaagcagatccatatggtttccttcatgaaattaggcctcaaaatggttcaatagtttcgaaattgaaaaactttaattggaatgatagttcttggatttctaatagagattcttctagtcaaattaacaagccaatttcagtttatgaaatgcatctaggaagttggctacatgaatcaacagataataaatatctagaggataatggtgaactaagagacccagtacctgcagcagatttaaaacctgggacaagattattaacttatccggaattaaccaagaagctcatcccttacgtaaaagagagaggatcactc

SEQ ID NO: 238229 - DNA, 874 bp, Unknown
  Bacterial polypeptide expressing nucleotide sequence isolated from the Sargasso Sea
gtgccgaccggtgcaagagggtggcgtcggtttcgattaccgtcttcagatggcgatcgcagacaagtggatcgaagtgttgagcgaatggggcgcggatgaaaactgggacatgggtaacctcgtgttcaccatggagaaccgtcgctacggtgaaaagtgcatctcgtacgcggaatcacacgaccaagcgctcgtcggcgacaagaccaccgcgttctggttgatggacgctgagatgtacacgaacatgtccactttggttccggacagcccggtcatctctcgcggcatcgccttgcacaagatgattcgtcaattcacgatgggtctcggcggcgaaggctacttgaactttatgggcaacgaattcggtcatcccgagtggatcgatttcccgcgcgacgatcgcattgaagcggcgacaggtgaattcatcccgggtaacggcaactcgtaccacttgtgccgtcgtcgattcgacttggccgatatggaccacttgcgttacaagtacctcaacgcctttgacgccgcgatgcacaaggtggcgggcgcgttcaagtacctcgcgtccaaccaccagtacacgtcgtgcaagagcaacgaagataaggttgtcgtcttcgaacgcggtgatttggtgttcgtcttcaactggaacccgacccaatcgttcagcgactaccgcatcggctgcaaggaagagacgaagtacaagcttgtgctgagctcggacaacgccgaattcggcggttactccaacttgtccacggaaacggcgggtgaatatcacgccgaagactacgcgttcaacggccgtccggcatctttcttggcgtacttgccgtcgcgcaccgtttctgtttacgca

SEQ ID NO: 238230 - DNA, 913 bp, Unknown
  Bacterial polypeptide expressing nucleotide sequence isolated from the Sargasso Sea
cgagtgggcgcccggcgcaaaggcagcgtgcctttttggtgacttcaacggttggtctaccggagcggagggtgtttggatgaccaagaatgactacggcgtgttcgaggtgttcctacctaaccttgcggatggttctcccgcaattccccacggcacacgcgtcaaggtgcatctggaagttgaaggacaggaacctgttgacaagattcccgcgtggataaaatttgctgttcaggcaccagatgagattcctttcaatgggatatattatgacccgccacctgaggaagtgtatcagttcaagtatgcacggcccaagagcccggacgagctccgaatctatgaagcgcacgttggcatgtcgtcaatcgaaccaaagataaattcttacgtagagttcgccgacgacgtcatcccccgtattgcgcagcttgggtacaacgccgtacagctgatggctgtacaagaacacgcatattatgcatcttttggataccacgtcaccaattttttcgccgtgtcatctcgttgtggcacgccagatgagctcaaatacttgattgatacggcacattcttacggcgttgctgttcttatggatattgtccactctcatgcgtcttccaatgccactgatggaataaacatgttcgacggaactaacgggcagtatttccacgacggtccacaagggtatcattggatgtgggactcgcgctgtttcaactatggcagctgggaagtattgcgcttcctgctctccaatctcaggtattggatggaagagttcaaattcgatggtttccgtttcgacggtgtgacctcgatgatgtactcacaccacggcctgcagatggccttcacaggggattacggtgagtatttcggcatgtcaacggacgtagatgct

SEQ ID NO: 238231 - DNA, 2191 bp, Unknown
  Bacterial polypeptide expressing nucleotide sequence isolated from the Sargasso Sea
gctgttaaacggtcaatatacggatgtgttttccctgctcggtatgcacagcatcaacgagggcaaggccttggtggtgcgctgttttttacgcaacgcccaaaaggttgatgtgataagtcttaaggatggccgtaaggtggcgagccttgagcgcgtcaatgaggcgggactatttgcgggcacgcttggcagacgggttaagccctttttgtatgcgctacgggtgacttatcccctttgcgagctgaatattatcgatccttatcagtttggttcactcctcgatagtcaggacttatacctcttcggcgagggaagttctgagcaggcctatcgctttttaggtgcgaactggcgccaagtcgatagcgtcgaaggcgtgcatttttgcgtatgggcgcccaatgctaagcgggtttctgtggtgggggattttaaccactgggacgagactcgccatgtgatgcgccaacatttggccaacggcttatgggagatttttctgcctgatgttgccgaaggcgcgcactataagtttgatttggtttatcaaaatggcgagcgccacgcgaaatccgacccgatggcgacccaaatggaatgtgcaccgcacaatgcctccatagtgccgaaaaaacaccaatatccgtgggcagattcacaatggatgcacaaacgtgcgaccacggcttggcatcgcgccgcgatgtctatctacgaagtgcagctaggctcttggcgccgaaaaggtgagtttggtgagcaatatttggattatcaagacttaatcgagcagttgatcccctatgttaaggagcaaggctttacccatatcgagttgatgccagtcagcgagtatcccttcgacggctcttgggggtatcaacccgttggcctgtatgcgccgacccatcgttttggtgatgccaatggcttaaaggcctttatcgatgcctgccatcaggccgagattggcgtgttactcgattgggtcgcggcgcatttccctaaggatccccatgggttagtgcgttttgatggcacttgcctctatgaacatgaggatccgcgcaaaggcacacaccccgattgggatacgctgatctataactacgaccgcggtgagctgcgcagttttctgctcagcaatgcctgttattggctgcgggaatttcacctcgatggcctaaggctcgatgcggtgtcatccatgttgtacctcgactacagccgcgaacctgggcaatggctgcccaatgcctatggcggacgggagaatttagaggcgattcattttctgcaaatgttgaatcaacgcttgtatcaagccttccccggcatttgcatgatagctgaagagtcaaccgcctttgcaggtgtgactaagccgacggattgcggcgggctggggtttggttttaagtggaatatgggctggatgaacgacagcctaagttacttgggccgcgatcccatctatcgccagtatcaccataaccagctgacctttagtttgatgtatgcctattcggagcaatttatgctgtcgataagccacgatgaagtagtgcacggcaagggctctttactgcataaaatccccggcgatgattggcaaaaattcgctaccctcagggcctattacggctttatgtgggggcatccgggcaaaaaactactgtttatgggcagcgagttcgcccagcgtgacgaatggaaccataaccatagcctcgattggcatttgctcgccttcgagcctcaccaaggcgtgcagcgctggcttcgcgatctgaatcagctttatcgccaattccccgccttatccgtgctcgactatgagtctcagggttttcgctggctcgattgtgacaatggtcgcgacagtatttttagctttgttcgctatggcgagggtagtgatgtgcccatagtgtttgtggtgaatatgacgcccactctgcaccaaggatttcgtatcggcttgccccaaggcggggatttctgtgagtacctcaatagcgacagccatctctatggtggcagcaatcaggggaatgcgggcaaggtaattgccgaagatttaccttggcagggcatggcatcgagcgcgttgatcactgtgccgcccctaggttgcttaatcctcgggcctgcgacggatgcaccaagagataccagcctatga

SEQ ID NO: 238232 - DNA, 1927 bp, Unknown
  Bacterial polypeptide expressing nucleotide sequence isolated from the Sargasso Sea
actggatatcgacgcgctcgtcgaagcgcgtcaccccgatcctttctcgcagctcggcatgcatcagacggacgcgggtccggtagtgcgcgcgttgctgccgaacgcttcgcacgtcaaggttatcgcgcgtgccgatggttcgacgctcggcgaactcgaacagctcaaaccgggactgttcgccggtcgcgtgagttcggcggcgccctatcgtctgcgtatcgactggcacggcaccgtgcaggaaatcgaggatacgtattcgttcggccccattctcggcgacgaaccgctggggcgtctcgctggcggcgatccctatgcggtgctcgagtgcctcggcgcacgcccgatggaagtggacggcgtgccgggcgtgcgcttcgcagtgtgggcgccgaatgcgcggcgcgtgtcggtagtcggcgacttcaattcatgggacgggcgccgtcatccgatgcgactgcgtcaccaggccggcgtgtgggaattgttcgtgccgcgcgtcggcccgggcacgcgttacaagtacgagttgcttgcccgtgacggccatccgctgccgttgaaggccgatccgtgtgccatgcaaacggaaaagccgccgggcaccgcgtcggtggtcgcgcacgtcgacgaaatcgagcagttcgcgtggacggaccacgagtggatccaatcgcgcgccgataaacagacgccgcgcgcgccgatctcgatctacgaagtgcacgccgaatcgtggctgcgcgtcgctgaagaggggcagcgcggtttgacctgggaggaactcgccgaacggctgattccctacgttaaaagcatgggcttcacgcatgtcgagttcatgccgatcgcggagcatccgttcggcggctcgtggggttatcagccgcttggacagttcgcgccatccgcccgtttcggcaagcccgagcagttcgcgctgttcgtcgacaaggcgcacgcggccggtctcggcgtgattctcgactgggtgccggcgcactttccgaacgacgcacatggcctgatcgacttcgacggcacgccgctctacgagcacgccgatccacgcgaaggctatcaccaggactggaacacgatgatctacaacctcggccgcaacgaggtgagcgcgttcctggtggcgtcgggactcgcctggttgaagcgctatcacgtcgacggcctgcgcgtggatgcggtcgcctcgatgttgtatcgcgactattcgcgcaacgccggagagtgggtgccgaacatttacggcggccgcgaaaatctcgaatcgatcgcgtttctgaagcggctgaatcatgaagtcggctatgtgccaggcgttccgggcgcgatcacgattgcggaagaatcgaccgcatggccaggggtgacggcgcgcgtcgaagacggcggcctcggcttccagttcaagtggaacatgggctggatgcacgacacgctgcattacatgcaggaagacccggtgtaccgccaataccatcatcacatgatgacgttcggcatggtgtacgcgtattccgagcgtttcgtgctgccgctttcgcacgacgaagtggtgcacggcaaaggctcgctgcttggcaagatgcccggcgaccggtggcaaaaattcgccaacctgcgggcgtacttcggcttcatgtggacgcatccgggcaagaagctgctgttcatgggcggcgaattcggccagatggccgaattcaaccatgacgcgtcgccacactggcatctgctcgacgatccgaaccatcacggcgtacagatgctcgtgcgcgatctgaaccatctgtaccacgaggaccccgcgctacatcggctcgacagcgagccaggcggcttccagtggctggtcggcgaaaacagcggcaacagcgtgtatgcctaccgccgcagc

SEQ ID NO: 238233 - DNA, 2266 bp, Unknown
  Bacterial polypeptide expressing nucleotide sequence isolated from the Sargasso Sea
atgatcgaaacaattcaagcagactggattaaatcagaagctatcaacctagaaaattgttgcaatgataatccattaaaaatattaggtcctcatttttatgaagagcaatgggtaataagggtatggatgcctgaagcagaagaaattaaaataaattttaaaaataaaatctataaggcagaaaccataaaccataaatggctttttgaagcaatcctgcctgaaaatccaaattctaattacgaaataaacattacacgaggaggaatcacacacacacaacatgacccttggtcatatagagaagagtggatgggagaagttgataggcatctttttgcagaaggtaatcatcatcatatttgggaaaaaatgggggcacatctcattgaagaaaagaatcaaaaaggtgttatgttttgcatttgggccccgaatgcaaaatcaatttcgataattggagatataaattcttgggatggaagacatcatccaatgcaaaaaagattaggggggatttgggaacttttcatgccaacaatggaagagggagacaaatataaatatgaaataagaacacaacaaggtcatatttatgagaaagctgatccatatggtttccttcatgaaattcgacctcaaaatggttcaatagtttcaagattgaaaaactttaattggaatgatagttcttggatttcaaatagagattcttcaagtcaacttaacaagccaatttcagtttatgaaatgcatttaggaagttggctccatgaatcaacagataataaatatcttgaagaaaatggtgaaccaagacagccagtgcctgcagccgatttaaaacctgaaacaagattattaacttatccagaattaaccgaaaaactgatcccttacgttaaggagagaggatttactcatattgaactaatgccaatatctgaacatcctttcgatggatcatggggatatcaggttacaggctggtatgcaccaacaagtagatttggcaccccaaatgaatttagagagtttgtcaataaatgtcatgaagagggcctaggtgtaattctcgattgggtacctggtcattttccaaaagataagcatggtttagcattttttgatggttgtcatctttatgaacatggagattcacgcataggtgaacacaaggagtggggaaccctgatatttaattacagtcgaaacgaagtaaggaatttcctagtagccaatctcgtctattggtttgaagagtttcatattgatggcataagagtagatgctgtagcttcaatgctttacagagattatctacgcccggatggagagtggatacccaatgaaaatggtggaaatgaaaatacagaagcagttaaatttctgcaacaggctaatcatgtacttttccaacattttccaggtgcactttctatcgctgaagaatcaacgacttggccaatggtaactaaaccaactgacatgggagggttaggatttaatttgaaatggaatatgggatggatgcacgatatgctcgattactttgagatagatccttggtttaggcaattccatcaaaatagtgtaactttctcaataacatataactatacagaaaactttatgcttgctcttagtcatgatgaggttgtccatgggaaaagtcatcttttacataaaatgcctggcgatgactggaaaaaatatgcaaatactcgagctttattaagttatatgtggacccaccctggtaaaaaaacgatatttatgggaatggaatttggacaaagacaagaatggaatgtttgggatgatctgcaatgggagttactagaatttgaacctcataaaggtatcagaaacttgattgatgatctaaacacactttacaaaaatgaacctgcgttatggaaaaatgactttgatccttatggattccaatggattgattgtgatgacaaatctaattcagttataagtttcatgagaagagaaaacgaaaccaatgagtggcttgttgttgttgctaactttacacctaatactcatggatcatacaaagtaggtgttcctgtgaaaggattctataaagaaatatttaattcagatgcatctagatacggaggcagtaacaaagggaatatgggcggtaaagaaactataaattacaacattcatgattatcaaaatgctctagaacttgctttgcccccattaagcgtaagcatctttaaacatcaatcaaaagaataag

SEQ ID NO: 238234 - DNA, 1966 bp, Unknown
  Bacterial polypeptide expressing nucleotide sequence isolated from the Sargasso Sea
tctgcatcattgtggctcatgcaggaatcgttataccttcttactcatcttcctttttctccttgaacaaatgctgactgattacgacctacatctcttgggcgaaggtagacactggaaaagctacgacaagcttggcgcgcaactgtgtacacgtgatggacaacagggagttcattttgctctctgggcgccgaatgctgaagcggtcagtgttgttggtgatttcaatggctgggctggccacaaccacatgatgagcaagctgatgccgtccggcttctggcaactcttcgttcctggtgttgggcctaatactgcctacaagttccgtgtgaaaacaactgaagggactattgaccgcgccgatccccacggctattcagctgaggtgccaccacagaatgcttctctcgtcgcagatttaagtgattacaactggagcgactcgcaatggatggagcaaaggcagcggcgagattggttcagtgaaccaatctcattctatgaagttcatctcggaagttggaggcgaccaggagatgacccgcatcgctggctgacataccgtgaccttgagagagaacttattccttactgccttgaaatgggatttacccatttggaatttcttccaccaacagaacatcccctctctgcaagttggggctaccaaacgatcggcttatttgctgcaacaagtcgctttggcacccctcaagatttcatgtcactgatagacggctgccatcaagccggtatcggagtcattattgattgggtacctgcacacttcccaaaagatgaccatgggcttcgccgcctggacgggacggctctctacgaacatgaagacccacgcaggggcgagcaccctgactggggaacactcattttcaactatggtcgcaacgaagtaacgaattatctgatctcgtcagctttattttggttggaccattatcatgttgacggactgcgggttgatgcagtcgcttcgatgctttatctcgactacagccgtcgtgaaggagaatggttgccaaatcgctttggtggccgtgagaaccttgaagcaattgagttcctaaaggaattaaatgtccaagttcatcatcactttcctggaacactgaccatcgccgaggagtccaccgcttggcctggtgtttcgcgaccaactcacactggtggacttggatttagcctcaaatggaatatgggctggatgaacgacaccctgcgattcatgaagcaggatcctattcacagaaagtttcaccatgacgaactaaccttcagcttgatttatgcgtttcatgaaaactttgtactcccactctcacatgacgaagttgttcacggaaaaggctctttacttagccaaatgcctggtgacaggtggcaacaattcgccaacctacggctgctgtattcattcatgtggtttcacccaggcaaaaagctcttattcatgggcaatgagtttggtcagccacaagaatgggattttgacaaaagtctccaatggcaccttcttcgaggggacagccaccgagggctctctcaaaccgtggtggaactcaacagattactacgagaggaaacctctcttcaccagatagatttcgacggacaaggatttgaatggattgattgtcagaattggcaagaaagtattattacctttctaagaaaaggagttgctcaaaaagactcattacttatcgtgtgcaactttacaccagttcctcgagaaaactatcgaataggtgttcccgcggctaatcactacgtggaaatttttaacagtgatgctgctcaccttggaggcagtaatattatcaacggcgaccgactcatgtgtgaacaaattgctcaacatgggcgagagcactccgtctctctcaccgttcctccacttgcagcggttgcattgaaacccttagatgccggcaattcatag

SEQ ID NO: 238235 - DNA, 1828 bp, Unknown
  Bacterial polypeptide expressing nucleotide sequence isolated from the Sargasso Sea
gctgggtgccagctgcgcaccgtggtgcatctggatcagcaagtggagggggtacgctttgcggtttatgcgccgagcgccactgcggtgagcctcatcggcgatttcaacttctgggatggccgtcgccacccgatgcagcgcagccagtgcggtcattgggtgctgttcgtaccgggcctcaaggccggggatcgctacaagttcgaactgaaagacccggcgggcaaccggctgccgcacaagagcgacccggtgggtttctactgcgagcagtacccctcgttcgcctccgtggtctatgaccacgaccagtaccagtggcaggatgccgcctggcgcgagagccagctcaacgacaagcgcgagcagccgctttccatctacgagctgcacgtgggctcctggaagcgtcaccccaacggcgacagcctgagctggcgcgaactggcggtggaactggtggattacgtcaaggggatggaatacacccacatcgagttgctgccggtctccgagcacccgttcagtggctcctggggctaccagccggtgggcatgttctcgcccaccagccgttacggcacggctgatgatttcaaatacttcgtggatcagtgccaccaggccggcatcggcatcattctggactgggtgcctgcccacttcccgtccgatgcccacgggctggcccgcttcgacggcaccccgctctacgagtacgaggatccgcgccgtggctggcacccggactggaactcctacatctatgacttcggtcgcaatacggtgcgccagttcctggtggccagcgccctgttctggctcgacaagttccacgtcgacggcctgcgggtggatgcggtcgcctccatgctctatctggactattcgcgcaacgccggcgagtgggtgcccaacgtcgatggcggcaaccacaactacgaggcgatcagcctgctcaagtggaccaacgaagaggtgtacggcaagtacccccacgccatgaccatcgccgaggagtccaccgcctttgccggggtctcccgtcccaccttcctggggggcctgggctttggcttcaagtggaatatgggctggatgcacgacaccctcacctacatgcagaaagagcctattcaccgtcgctaccaccacaacgacatgaccttctccatggtgtaccactatgacgagaacttcattctgtcgctctcccacgacgaggtggtgcacggcaagcactccatgctctacaagatgccgggggacgagtggcagcaggcggccaacctgcgcgcctacatgggcttcatgtatgcccatcccggcaagaagctcaacttcatgggcaccgagatcgcccagagcaacgagtggaatcacgatgcccagctgccctggcacctgctgcagtatcccaagcacggtggccagcagcggctgatccacgatctcaaccacctctaccgtcatgaacctgccttgtatcaggcggattatgagcaaaacggcttccgctggctggatcacaacgacgctgacaacagcatctttgcctggctgcgggccgacaagcagggggccaacccgctggtggtagcctgcaacttcacgccggtgccgcggcttgcctatcggctcggggtgccggcggccggtcactaccgggtggtgctcaacaccgacagcgagcattactggggcagcaactatgatgtgggtctggtcttcgtcgccgagccgaccccctggcaggggatgatgcacagcatagtgctggatctgccgccgctcgcgaccttgttcatcaaacaggagtcttgat

SEQ ID NO: 238236 - DNA, 1000 bp, Unknown
  Bacterial polypeptide expressing nucleotide sequence isolated from the Sargasso Sea
aatgaacgagatctgcacatccagtcagcaagaaaacgacctcaagaccattcaatctcttttgacgggagattgccatttcccaaggtcttggctcggatttcatgaggaaacgggggaacccaagcaaaaagaatgggttgttcgggtttgggaaccttctgcagttgaagtcaagattgactggaatccgggaaaataccatgccttaggggagccgatgcagaggcttgacgacgcaggaatctttgaatggcggggcaaaagtttgtccaatcggtctccatacctgctccattgtcgttttgaggacggttctcattatcgccggtacgacccttattattttaaagtgcattttgaggagctggaccagcatcttttcgaagaaggaacccatcttaggttgtttgacaaactcggtgcccacctgaaagaaatcgaagggatatggggaacacggttcacggtctgggctcctaatgccaaacgcgtcagtgtggttggtgaattcaatcactggaatgggctgcagcacccgatgcaggctgtcggcagcagcggcatctgggaactcttccttcccggaatcggcgaggggatgctttataaattcgagattaaaggtcaaaacggtgaagtttttctcaaatccgatccctttgcctttgcctcggaattccgtccctcgactgcatccagggttgcaaattttgaagattatgtctggcaggatgaatcctggatggagaaccgcacccggcaggacccgctcaagcagccgatcaacatctatgaagtccatctcggatcctggaaacgtaaagccgaccaggaaaatcgttttctgacgtaccgcgaagcagttgaggaattgattccttataccaaggaaatgggatacacccacctcgaactaatgcctctgggcgagcatccgttggacgcctcatggggttatcaggtgaccagctatttcgcgccttcgtctcgatacggc

SEQ ID NO: 238237 - DNA, 1500 bp, Unknown
  Bacterial polypeptide expressing nucleotide sequence isolated from the Sargasso Sea
gacactcaaagcgacccgttttgcagtgtttgctcccaatgcatccagtgtgagtttgataggtgatatgaatcaatgggatggcaggcgtcatcctatgcagcgcaccgaatgtggtcattgggtgttgctggttcctgaagttggagccggtgttcggtataaatttgaaatcaaagacagctttggtaatttgctaccgcacaaggccgatccgctggcttttgctgccgaacagtacccctcacacgcatcgctggtgttcgaccactcacagtacaaatggcaggatcagaagtggcaagagcgcactgttgatccttatcacgaagctatgagcatctacgagttgcacccgggctcgtggaagcataatcagcatggtgaacctttaacctacactgagcttgcacttgagcttattccttatgtgctggacatgggctacacccatattgagttattaccggtaatggagcatccatactctggctcctggggttatcagccacttggtttgtttgccgcgacttcacgttttggcacccctgaccagttcaaggcctttgtcgatgcctgtcatcaggccggacttggcgtgattttagactgggttccggcgcattttccggaagacgcgcacggactggcccgctttgatggcagccatttgtatgaatacgaagatccgcgccgtggttggcatccggattggaactcctgcatttacgattatggtaaagacccggttcgtcagtttttagtggccagtgcattgttctggttggattacttccacattgacgccttgcgagtcgacgctgtagcttcgatgctgtatctggattactcacgtcgggacggcgagtgggtgccaaatgttgatggtggtaatcacaattacgaagccatcagtctgctacgctggctcaacactgaagtgtatcggcagtatccgaaggccatgatgatagctgaagagtccacttcttttgatggcgtcacccggccggtagatttaggtggtttaggctttggctttaaatggaatatgggctggatgaatgacaccctgcgttacattaaaaaagaccccgcctatcggaagttccaccataacgatttaaccttttctatggtgtacgcgtacaacgagaactttatcctgccgttatctcacgacgaagtggtgcatggcaaaggcagtattatcaacaagatgcctggagatgaatggcaacaagctgcgaatttacgcgcttattatgcatttatgtttgcccatccgggtaaaaagctgaattttatgggcaatgaatttggtcagggcactgagtgggatcataaccagcaattgccatggtatttattatcttttgataaacacaggggtgtacaacagctgttccgtgacttaaacctgacctacaaagcttgccccccattgcatcagttggaccatgaggcggctggttttcgctggattaattatcaggatgc

SEQ ID NO: 238238 - DNA, 2266 bp, Unknown
  Bacterial polypeptide expressing nucleotide sequence isolated from the Sargasso Sea
catgatcgagacaattcaagcagactggattaaatcagaagctatcaacctagaaaattgttgcaatgataatccattaaaaatattaggtcctcatttttatgaagaaaaatgggtaattagggtatggatgcctgaagccgacgaagttaaaataaattttaaaaacaaaacctataagacggaaagcataaaccataaatggctttttgaagctatccttcctgaaaatccaaatcacaattacgaaataaatatttcacgaggagggatcacacatacacaacatgacccttggtcatatagagaagagtggatgggagaagttgatagacatctttttgcagaaggtaatcatcatcatatttgggaaaaaatgggagcacatctcattgaagaaaataatcaaaaaggggtcatgttttgcatttgggctccaaatgcaaaatcaatctcaataattggagatataaattcttgggatggaagacatcatccaatgcaaaagagattagggggaatttgggaactattcatgccatcaatgaaagagggcgacacatataaatacgaaataagaacacaacaaggtcatatttatgagaaagctgatccatatggtttccttcatgaaatcagacctcagaatggttcaatagtttcaaagttgaaaaactttaattggaatgatagttcttggatttcaaacagagattcttctagtcaaattaacaagccaatttcagtttatgaaatgcatttagggagttggctccatgaatcaacagataataaatatctggaggacaatggggaaccaagagacccagtacctgcagccgatttaaaacctggaacacgattattaacttatccagaattaaccaagaaactgatcccttacgtaaaagaaagaggattcactcatattgaactaatgccaatatctgaacatcctttcgatggttcatggggataccaagttacaggctggtatgcaccaacaagtagatttggcaccccaaatgaatttagagagtttgtaaataaatgtcatgaagagggcataggcgtaattcttgattgggtgcccggtcattttccaaaagataagcatggtttagcattttttgatggctgccatctttatgagcatggagattcacgaataggtgaacacaaagaatggggaacactaatatttaattacagcagaaacgaagtaagaaatttcttagtagcaaatctagtttattggtttgaagagtttcatattgatggcataagagtagatgctgtagcttccatgctttacagagattatctacgtcccgatggagaatggatacccaatgaaaatggtgggaatgaaaatatagaagccgttaaatttcttcaacaggctaatcatgtactcttccaacactacccaggtgcactttctatcgctgaagaatcaacaacttggccaatggtaaccaaaccaactgacatgggagggttagggtttaacttgaaatggaatatgggatggatgcacgatatgcttgattattttgaaatagatccttggtttaggcaattccatcaaaatagtgtgactttctcaattacatataactacacagagaactttatgcttgcacttagtcatgatgaggttgtccatggcaaaagtcatcttttgcataaaatgccaggcgatgactggaagaaatatgcaaatactcgagcattactaacttatatgtggactcaccctggtaaaaaaacaatatttatgggaatggaatttgggcaaagacaagaatggaatgtttgggatgatctgcaatgggagttactagaatttgagccccataaaggcatcagaaacttgattgatgacctaaacgttctttataaaaatgaacctgcattatggaaaaatgactttgatccttatggattccaatggatagattgtaatgataaatctaattcggttataagtttcatgagaagagaaaacgataccaatgagtggcttgttgttgttgctaactttacacctaatactcatgggtcatacaaagtaggtgttcctgtggaaggattctataaagaaatatttaattcagatggctctagatacgggggcagtaacaaaggaaatatggggggtaaagaaactataaattacaatattcatgattatcaaaatgctctagaacttgctttgcccccattaagcgtgagtatattcaaacatcaatcaaaagaatag

SEQ ID NO: 238239 - DNA, 2266 bp, Unknown
  Bacterial polypeptide expressing nucleotide sequence isolated from the Sargasso Sea
catgatcgagacaattcaagcagactggattaaatcagaagctatcaacctagaaaattgttgcaatgataatccattaaaaatattaggtcctcatttttatgaagaacaatgggtaattagggtatggatgcctgaagccgacgaagttaaaataaattttaaaaacaatacctataaagcggaaagcataaaccataaatggctttttgaagctattctgcctgaaaatccaaatcataattacgaaataaatatttcacgaggagggatcacacatacacaacatgacccttggtcatatagagaagagtggatgggagaagttgatagacatctttttgcagagggtaatcatcatcatatttgggaaaaaatgggagcacatctcattgaagaaaagaatcaaaaaggagtcatgttttgcatttgggctccaaatgcaaaatcaatctcgataataggagatacaaattcttgggatggaagacatcatccaatgcaaaaaagattagggggaatttgggaactattcatgccaacaatgcaagagggggacacatataaatacgaaataagaacacaacaaggtcatatttatgagaaagctgatccatatggtttccttcatgaaataagacctcaaaatggttcaatagtttcaaaattgaaaaactttaattggaatgatagttcttggatttcaaatagagattcttctagtcaaattaacaagccaatttcagtttatgaaatgcatttaggaagttggctacatgaatcaacagataataaatatttggaggacaatggtgaaccaagagacccagtgcctgcagccgatttaaaacctggaacaagattattaacttatccagaattaaccgagaaactcatcccttacgtaaaagagagaggcttcactcatattgaactaatgccaatatctgaacatcctttcgatggttcatggggataccaagttacaggctggtatgcaccaacaagtagatttggcaccccaaatgaatttagagagtttgtaaataaatgtcatgaagagggcataggcgtaattcttgattgggtgcctggtcattttccaaaagataagcatggtttagcattttttgatggttgtcatctttatgaacatggagattcacgcataggtgaacacaaagaatggggaaccctaatatttaattacagcagaaacgaagtaagaaatttcttagtagccaacctcgtttattggtttgaagagtttcatattgatggcataagagtagatgctgtagcttcaatgctttacagagattatctacgtccagatggagaatggatacccaatgaaaatggtgggaatgaaaatatagaagccgttaaatttcttcaacaggctaatcatgtactcttccaacatttcccaggtgcactttctatcgctgaagaatcaacaacttggccaatggtaaccaaaccaactgacatgggagggttagggtttaacttgaaatggaatatgggatggatgcacgatatgcttgattattttgaaatagatccttggtttaggcaattccatcaaaatagtgtaactttctcaattacatataactatacagagaactttatgcttgcacttagtcatgatgaggttgtccatgggaaaagtcatcttttgcataaaatgcctggcgatgactggaagaaatatgcaaatactcgagcattactaacttatatgtggacccaccctggtaaaaaaacgatatttatgggaatggaatttgggcaaagacaagaatggaatgtttgggatgatctgcaatgggagttactagaatttgagcctcataaaggtatcaggaacttgattgatgacctaaacgttctttataaaaatgaacctgcattatggaaaaatgactttgatccttatggattccaatggattgattgtaatgacaaatctaattcggttataagtttcatgagaagagaaaacgataccaatgagtggcttgtcgttgttgctaactttacacctaatacccatgggtcatacaaagtaggtgttcctgtggaaggattctataaagaaatatttaattcagatggctctagatacgggggcagtaacaaaggaaatatggggggtaaagaaactataaattacaatattcatgattatcaaaatgctctagaacttgctttgcccccattaagcgtaagtatcttcaaacatcaatcaaaaaaataa

SEQ ID NO: 238240 - DNA, 2179 bp, Unknown
  Bacterial polypeptide expressing nucleotide sequence isolated from the Sargasso Sea
catgtccgtaactcagttagcctctgccagttgttcgtctccattctctgtattgtcctggcaacaaggaacaaccaaaggtttaatgatccgcgcttatttgccagatgcggccaaagttgaagtatttgattttgcgacccgcaaatctttgggtcagatggcggcaaagcctgttttacatggtttatttgaacttgaattacctaaaaaacgtaaagccagtccttattattttcagatagaaacccctcatcatcatggttatgagctggttgacccttatcagtttcaagacgaagcctattacgctgtgcactttgtcaacagcaaaccagagaatctttataaacagctaggtgcacagcttatagagctgaaccttggtaaaaagaaacttaacgcaacccgcttcgctgtttttgctcctaatgcatccagtgtcagtctgataggcgatatgaatcagtgggatggccgccgtcatccgatgcaacgcactgaatgtggtcattgggtgttggtgatgccagaggttggcgctggtgtgcgttataaatttgaaatcaaagacgcttttggtaatttattacctcataaagcagatcctttggcctttgccgctgaacaatatccttctcatgcttcgttggttttcgatcactctcagtacaagtggcaggataaaacatggcaagagcggcattttgatccttatcatgaagccatgagcatttatgagctgcatcctggctcctggaagcacaatcagcatggtgagccactcacctatactgagcttgcgcttgagcttattccttatgtgttggatatgggctacacccatatcgaattactgcctgtgatggaacatccatattctggttcatggggttatcagccgttggggttgtttgccgcaacttcacgttttggtactccggatcagttcaaagcttttgtcgatgcgtgccaccaggccggaatcggcgtgattttagattgggttccagctcacttcccggaagatgcgcatggcctggcccgttttgatggtagtcatttatatgaatacgaagatccacgccgtggttggcacccggactggaattcctgcatttatgattacggcaaagatcctgtaaggcagtttttagtcgccagtgctttgttctggctggattactttcatattgacgcgctacgggtagatgcggtggcgtcgatgttgtatctggattattcgcgtcgtgatggagaatgggtgcctaatatcgacggtggtaatcataactatgaagccattagtttattacggtggctgaatactgaagtgtatcgccagtatccaaaagccatgatgatagcggaagagtcaacatcatttaacggcgtgacccgacctgtggatttaggcgggttaggctttggctttaaatggaacatgggctggatgaacgacacgctgcgttacattaaaaaagaccctgcctatcgtaagttccaccataacgatttaactttctctatggtgtacgcctttaatgagaacttcattttgcctttgtcacacgacgaagtggtgcatggcaaaggcagtatcatcaataagatgcctggggatgaatggcaacaagccgctaatttaagggcttattacgcctttatgtttgcgcacccagggaaaaagttaaactttatgggcaatgagttcggtcagggcaccgaatgggatcacaaccagcaattgccgtggtttttattatctttcgaaaagcataaaggcatacagcaattattccgtgatttaaacctgacgtacaaagcctgtgcgcctctgcatcaactggatcacgaaccagcgggattccgctggattaattatcaggatgctgaacacagcactttaagtttctaccgtttagatcaacaaggccaggctgtgtatgtggtcagtaactttacgccaataccacgcagcgctttccgtttatctgtggcagaacaaggcgaatacgaagtgatcctcaacacagacagcgaatattactggggcagtaattatccggtgggtgaatatttgccagcctttcctgccgcagcatttggcttagactatatggtgcaattggatttacctcctttgtcgaccctttatgtgagacgtaaatcatcgtga

SEQ ID NO: 238241 - DNA, 1667 bp, Unknown
  Bacterial polypeptide expressing nucleotide sequence isolated from the Sargasso Sea
atacttgcactttggcgcgcactttaccaaccagcaagatgtagatggtgttcgtttttgtttgtgggcacctaatgcagccagcgtttcaattattggtgagtttaatttttggcaagcgaatcgacattttatgcgttttcaccctgccagtggtgtgtgggagttattcattcccgagcttaaagcagacatgtgctacaaatttgccattacagcgcaaagtggtgaggtaatagaaaaagcagatccttacgcttttaaaatgcaacaggcacctggtaccgcgagtgttcttcaatacaaaccagaggcaatagcgttaagtgaacaagcaataagcaataggcaaaagcgtaatcatatagacgcaccaatcagtatttatgaggtgcacttagcgtcgtggcagcgaggtgaaggtaatcgttatttaagttataccgaacttgccgacaaactcgtaagctacgcgcttgaaatgaactttacccacttacagcttatgcccataagtgaatatccgtttgacggttcatggggctatcagcctgttgggctgtttgctccaaccagtcgttttggcgattacaacagctttaaatattttgtagagcaatgccataaatataacgtagggattttacttgattgggttcctgggcatttcccaagtgatccccatggtttacaccgatttgatggtacgcacttgtacgaacatgccgatatgcgccaaggctttcatccagattggaatacttatatttataattatgaccgtccagaagttaagagctttttgatttctaatgcaatgtattggcttcatcaatttggcttagatggtttaagagtagatgccgttgcgtcaatgttgtacttagattacagccgtaaagaaggtgagtggatacctaattgctatggcggtcgcgaaaacctcggtgcaattgaatgcctcaaacaggttaatttacgcagttataaaaacaaccctggcattatgatggtggcagaagagtcgactgcttggccaggtgttacgcagagtgttgagcataatggcctaggctttggctataaatggaatatggggtggatgaacgatagcttgttgtatatgcaacgcgacccactttataagcaacatcaccatcacgaaatcacgttttcgatggtatatgcatttagtgaaaactttattttaccgctgagtcacgatgaagttgttcatgggaaaagcgcgctaattgaaaaaatgccgggcgatgattggcaaaaattcgcaaatttacgtgcttattatgcatttatgtgggcacacccaggtaaaaagttgttatttatggggggggaaatagctcaacgtgctgagtgggggcatgatcattctattgattggcatttactagaacatgaaagtcataaaggtataaagcagacagtaaaaacgttaaatgaggtttataaaaatcaacccgcgctgtatgaacttgactcaagtgccgcaggatttgattggattgacaacaataataacgagcaaagtattttaagctttgtacgttacgctaaaaatgcccatgactttgtagttgtgattgccaactttacgcctatgtcatatcaagaatataccttaggcgttccgagtaaaggcgttt

SEQ ID NO: 238242 - DNA, 1813 bp, Unknown
  Bacterial polypeptide expressing nucleotide sequence isolated from the Sargasso Sea
gtaccgtcagcttggcgcgcagttgattgagctggatattggcacaaaaaaaataccggcaacccgttttgcggtgtatgcacctaacgccagtgccgtcagcctcattggtgatatgaatagctgggatggcagagtacacccgatgcagcgcaccgagtgtgggcattgggtactggtgctgccggaagtagcccagggcgtgcgttacaaatacgaaataaaggaccgacacggccacttgctgccgcataaagctgatcctatggcgttttatgctgagcaatatccatcgcatgcatcgttagtgtttgatcatcagcattaccaatggcaggacagcgattggtgtaaccgcaaagctgttaatccgctgcacagcccaatcagtatttatgagctgcaagccggtagctggaaacggcagaacgataatcaaccgctcagttaccgtgaactggccgaacagcttatcccttatgtgctggatatgggctatacccatatcgagttattaccggtgatggagcatccgtttgatgggtcctggggttatcagccgcttggcctgttcgcgccgacatcgcgttttggcaatccggatgattttaagtattttgttgatcaatgccatcaggcaggcattggcgttattctggactgggtgccggcgcatttcccggaagatggtcatggtctggcccgctttgatggtagccatctttatgaatacgaagaccctcgtagaggttggcatcctgactggaactcctgtatttacgattatggaaaaggttatgtgcgccagtttctggttgccagtgctttattttggctggagcattttcatatcgacgggttgcgcgtagatgccgtcgcttcgatgttgtactgggactattcgcgtaaagaaggcgagtggatcccgaatatcgacggtggcaaccataattatgaggccataagtttctttcgctggtttaatactgaggtatacagcaaataccccaaagcgatgacaatcgccgaagagtcgacatcctttcccatggtgtcgcgccctgtagatatggggggcttgggttttggttttaaatggaatatgggctggatgaatgacagcttgcgttacatcagtaaagatccggcataccggcgttatcatcataacgacctgacgttttcgatggtgtatgcctataacgaaaactttattcttccgctttcgcatgacgaagtggtgcacggcaaaggcagtttactgaacaaaatgcctggcgatgaatggcaacaagctgctaacttaagggcctattatgcttttatgtttgctcacccgggaaagaagctgaattttatggggaacgagtttgctcaggggcgcgagtggaatcatacccaaagtctggactggcacctgcttgggtatgataagcacaggggcatacagcagctgtttcgtgatttaaaccaaacgtatcgccgctgtgcgccactgtatgagctggactatcagcacgatggtttcagttggctcgatcatcaggatgccgataacagcacgttgagttttttacgccgtgacagtcagggcaacactatttatgtggtcagtaattttacaccggtgccgcgtgcagattttctgctgggtgttgaacagccaggtgattacgaagttattcttaacaccgacagtgagtattactggggcagcaattatgaggtaggcagtgcacttcacagtattgcgatgccttatcatggtaaagcacagcatatctgtctgcagctgccgccaatggccacctta

SEQ ID NO: 238243 - DNA, 484 bp, Unknown
  Bacterial polypeptide expressing nucleotide sequence isolated from the Sargasso Sea
tatggggaacgagcttgcgcaggcacgagaatggaaccatgacagtagtttagactggcacttgctcgattacgaaaaacacaaaggcattcaagcgctttataaggcgctcaaccacctctatacgtctacgccagcgctttacgagcaagaccacgaaccagggggctttgcttggctggaccacaataatgcagaccaaagcgtggtttcatttgttcgcatgtcaaaagatgcgaagcaaaaagtatatgtggtatctaattttacgcctgtgccacgtcagaacttcagaataggcgtagatgatgcatgcacgctaacgctagcactaaacactgatgatggtgcatattggggtagtggctacgacgttgcttctactgttaatacgcaaaccataccttggaatgagcgtactcactctgcagaaatcacgttaccgccgctagccacggtattttatgttgccaatgtggattaa

SEQ ID NO: 238244 - DNA, 961 bp, Unknown
  Bacterial polypeptide expressing nucleotide sequence isolated from the Sargasso Sea
gccaacgagcatggcggccgcgaaaacctggaggctgtccgcttcctgcagcaggccaattcggtcctgttccactacttccctggagccctctccatcgccgaggaatcaaccacctggcccctggtgaccatgcccacgtcgatgggtggtctggggttcaacctcaaatggaacatgggctggatgcacgacatgctcgattacttcgagcttgatcattggttccgccagttccatcagaacaacatcaccttctcgatctggtatcaccacactgagaacttcatgttggccctcagccacgacgaggtggtccatggcaagagtcacctgctgcacaagatgcccggcagcgatgagctgaaattcgccaatgtgcgtgctctgctggcctacatgtggacccacccaggcaagaaaaccatcttcatggggatggaattcggtcaacgcggcgagtggaatgtctggggtgatctggagtgggacaaactccagttcagcgaacaccagggcctggtcaatctggtcgatgacctcaacgcgttctacaaatccgaaccggcgctgtggcgtaacgactttgatcactacggattccagtggattgactgcgacgacaccaatcacagcgttgtcagcttcatgcgccgtgatgaaaaagaaggcaattgggttgtggtggtctgcaacttcacgcctgtctcccacggcaattaccgcatcggcgtgcctgtcgagggcttctacagcgaggtcttcaatagcgatggcagccgctacggcggcagcaatctgggcaacttgggcggcaaatttgccgatgactggggcatgcacggctacggccaatccctggagctatgcctgccgccgctgaccgtgctcgtgttcaagcacgacgcctcaaagaaaaaggtcgcagcaatccatgaagctggggccatttccggctgaa

SEQ ID NO: 238245 - DNA, 1068 bp, Unknown
  Bacterial polypeptide expressing nucleotide sequence isolated from the Sargasso Sea
ctgcatctacaacctccggccgcaccgaagtacacggcttcatgctggctagcgcgctgtactggctgcgcgaataccacgtcgacggcctgcgcgtggatgcagtggcgtcgatgctctaccgcgattattcacgcgaagcagggcagtggattcccaaccgccacggtggccgcgagaacctggaggccatcgaatttctccagcatctcaacgaggtggtgcgcagcgaagtgcccggcgcgctgatgatcgccgaggaatctaccgcctggcctggcgtcagtcggccggtgcagcagggcggcctgggcttcagccacaagtggaacatgggctggatgaacgacagcctgagctacatccagcaggacccgatgtaccgcctgcaccatcaccaccagatcacctttggcctgcattacgccttctccgagcgtttcatcctgccgatctcccatgacgaagtggtgcacggcaaacgctcgctgctcgggcgcatgcccggtgatcgctggcagcaattcgccaacctgcgcctgttcctcgccctgatgtggagtcacccgggcaagaagctgctgttcatgggctgcgagttcggccagtggcgcgaatgggaccacgaccagcaactggactggtacctgctgcagtaccccgagcatgccgctgcccaggcgctggttcgcgagctgaatcgtctgtaccgcgaagagccggcgttgcaccgcctcgacgaccaggacagcggttttcagtggctggtaggcgatgacgcgcgcaacagcgtattcgcctggctgcgcaagggcggcgaaggcagtgcgtcgttgctggtggtgcacaatttcaccccgcaggtgctcgacggctaccgcatcggcgtgccgcacgcgggccgctggcaggtgctgctcaataccgatgaccgttgctggagcggctcaggggccggcagcgagggtgagctgcacagcgagcagatgaccgctcacggccaatccgattcgctgaatttgcagttgcctcctctgggtgcgctgattctgcgaccggtgcaataag

SEQ ID NO: 238246 - DNA, 2157 bp, Unknown
  Bacterial polypeptide expressing nucleotide sequence isolated from the Sargasso Sea
aatgggtagtaagaatatggatgcctgaagcagatgaagttaaaataaactttaaaaataaaacatataaggcagtaagcataaaccataaatggctttttgaagcaatcctgcctgaaaatccaaattctaattacgaaataaatatttcaagaggaggtatcaatcatacacaatatgacccctggtcttatagagaagagtggatgggagaaatcgataggcatcttttttcagaaggtaatcatcatcatatctgggaaaaaatgggagctcatctcattgaagaaaataatcaaaagggtgtcatgttttgcatttgggctccaaatgcaaaatcaatctcgataattggagatataaattcttgggatggaagacatcatccaatgcaaaaaagattagggggaatttgggaactattcatgccaacaatgaaagagggggacacatataaatatgaaataagaacacaacaaggtcatatttatgaaaaagctgatccatatggtttccttcatgagattagacctcaaaacggttcaatagtttcaaaattgaaaaactttaattggaatgatagttcttggatttctaatagagattcctctagtcaaattaacaagccaatttcagtttatgagatgcatttgggaagttggctccatgaatcaatagataataaatatcttgaagacaatggggaacctagagacccagtgcccgctgcagatttaaaacctggaacaagattattaacttatccagaattaactgaaaaactcataccttatgtaaaagagagaggatttactcatattgaactaatgccaatttctgaacatcccttcgatggttcatggggataccaggttacaggctggtatgcaccaactagtagatttggcgctccaaatgaatttagagaatttgtcaataaatgtcatgcagagggcataggtgtaattcttgattgggtacctggtcatttcccaaaagataagcatggtttagcattttttgatggttgtcatctttatgaacatggggattcacgcataggtgaacacaaagaatggggcactttaatctttaattacagcagaaacgaagtaagaaatttcctagtagccaaccttgtttattggtttgaagaatttcatattgatggcataagagtagatgctgtagcttcaatgttatacagagattatttacgcccagatggagaatggataccaaatgagaatggcggcaatgaaaatacagaagctgttaaatttcttcaacaggcgaatcatgtactcttccaacatttccctggtgcactttctattgctgaagagtcaacaacttggccaatggtaaccaaaccaacagacatgggaggacttgggtttaatttaaaatggaatatgggatggatgcacgatatgctcgattattttgagatagatccttggttcagacaattccatcaaaatagtgtgactttctcaataacatacaactatacagagaactttatgcttgctcttagtcatgatgaggttgtccacggaaaaagtcaccttttgcataaaatgcctggcgatgactggaagaaatatgccaatactcgtgctttactaacttatatgtggacccatcccggtaaaaaaacaatatttatgggaatggaatttggacaaagacaagaatggaatgtttgggatgatcttcaatgggacttattagaatttgaacctcataaaggtatcagaaacttggttgatgacttaaatgaactctataaaaatgaacctgcgttatggaaaaatgactttgatccttatggattccaatggattgattgtaatgacaaatctaattcagtaataagttttatgagaagagaaaatgataccaatgagtggctcgtgatagttgctaattttacacctaatactcatggttcatataaagtaggagttcctttagaaggattctataaagagatctttaattctgatggctctagatacggaggaagtaataaagggaacatgggcggtaaagaaactataaattacaatattcatgattatcaaaatgctctggaaattgctttgcccccattaagcgtgagtatctttaaacatcagtcaaaaaaataag

SEQ ID NO: 238247 - DNA, 1168 bp, Unknown
  Bacterial polypeptide expressing nucleotide sequence isolated from the Sargasso Sea
atgcaattagcgcagcagtttgaacaggtattatgttctcagccgttttcccatttaggtgtagttaaaaatcagcagaagtcggtacttcgcgtttggcgtcctaatgtcagcaagataacgattgaatgggagaatgcagcgctagcaaatgtaaccgttacctccaaaaatggtctttttgaaacaccactgcctaaagaatatcagggtgaggtttatcgcgttatcgccgaaggcttgaatgacgataagggctatatcgatccttatcaattctccgagcaggcgtatcatgcggtacactacatcgatagcaagccttcaaacttgtatgagcaagcgggcgcgcaacttttaacactcacttcatcacaaggcgatgcgataaaaggtgtcaggttctgcgttttcgcgcccaatgcgagtacggtgtcgctcattggcgatttcaatcagtgggatgggcgcacgcatcctatggaaaagacctctatgggatactgggtactgtttgtgccagaactcgcagagggagagcgctacaagtatcacattaaagatgcacacggccacgacctaccgcacaaggctgacccacttggcttcagtgcagagcagtatccttctcatgcttcgaaaatttacaaccacaataactatgagtggaatgatagtgcatggatggaaaagcgaaaggggaataagtacaacagcccaatgagcatttatgaagtgcaccttggctcttggaagcgcccgggtattgatactgatgcgcgctaccttacttacaaagcgcttgccgatgacttaataagctacgtcagcgatatgggttacactcacgttgaactgctgcctatttccgagtttcctttcgacggttcgtggggctatcagcccgtgggaatgttcgcaccaacgagtagatttggaaacccagatgaatttaaatactttgttgataaggcccaccaagcaggtataggcgtaattatcgactgggtacctgcgcatttcccagaagacggccatggcttggcgcgatttgatggttcttgtgtttatgaatatgaagatccgagaaaaggttggcatccggattggaattcttgtatttacgatttcggcaaagacacagttcgtcaatttttagttgcaaacg

SEQ ID NO: 238248 - DNA, 1223 bp, Unknown
  Bacterial polypeptide expressing nucleotide sequence isolated from the Sargasso Sea
gatgactcaagcccagacttacttctatgacggtagcgatgtcgcgctgttaaacggtcaatatacagatgtgttttccctgctcggcatgcacagcatcaacgagggcaaggccttggtggtgcgctgttttttacgcaacgcccaaaaggttgatgtgataagtcttaaggatggccgtaaggtggcgagccttgagcgcgtcaatgaggcggggctgtttgcgggtacgcttggaagacgggttaaaccctttttatattcgctacgggtgatttatcccctctgcgagctggatattatcgatccctatcagtttggttccctcctcgatagtcaggacttatatctcttcggtgagggaagttctgagcaggcctatcgttttttaggtgcgaattggcgccaagtcgatagcgtcgaaggtgtgcatttttgcgtatgggcacccaatgctaagcgagtctctgtggtgggggattttaaccactgggatgatactcgccatgtgatgcgccaacatctgggcaatggcttgtgggagattttcctgcctgatgttgccgaaggcgcgcactataagtttgatttggtttatcaaaatggcgagcgccacgcaaaatctgaccctatggcgacccaaatggaatgtgcgccgcacaatgcctccatagtgccgaaaaaacaccaacatccttgggcagattcacaatggatgcacaaacgcgcgagcacggcttggcatcgcgccgctatgtctatctacgaagtgcagctaggctcttggcgccgaaaaggtgagtttggtgagcaatattttgattatcaagacttaatccagcagttgatcccctatgtgaaggagcaaggctttacccatattgagttgatgccagtcagtgagtatcccttcgacggctcttgggggtatcaacccgttggcctgtatgcgccgacccatcgttttggcgatgctaatggcttaaaggcctttatcgatgcctgccatcaggccgagattggcgtgttactcgattgggtcgcggcgcatttccctaaggatccccacggtcttgtgcgtttcgatggtacttgcctctatgaacatgaagacccgcgcaaaggcacgcaccccgattgggatacgctgatctataactatgaccgcggtgaggtgcgcagttttctgctcagcaatgcctgctattggctgcgggagtttc

SEQ ID NO: 238249 - DNA, 1120 bp, Unknown
  Bacterial polypeptide expressing nucleotide sequence isolated from the Sargasso Sea
atgatcgagacaattcaagcagactggattaaatcagaagctatcaacctagaaaattgttgcaatgataatccattaaaaatattgggtcctcatttttatgaagagcaatgggtaataagggtatggatgcctgaagccgacgaagttaaaataaaatttaaaaataatacctacaaggccgaaaacataaaccataaatggctttttgaagcaatccttcctgaaaatccaaattctaattacgaaataaatatctcacgaggtgggatcaaacatacacaacatgacccttggtcatatatagaagagtggatgggagaagttgataggcatctttttgcagaaggtaatcaccatcatatttgggaaaaaatgggagcacatctcattgaagaaaagaatcaaaaaggagtcatgttttgcatttgggctccaaatgcaaaatcaatctcgataattggagatataaattcttgggatggaagacatcatccaatgcaaaaaagattagggggaatttgggaactattcataccaacaatgcaagagggagacaaatataaatatgaaataaggacacaacaaggccatatttatgagaaagctgatccatatggtttccttcatgaaatcaggcctcaaaatggttcaatagtttcaaaattgaaaaactttaattggaatgatagttcttggatttcaaatagagattcttccagtcaaattaacaagccaatttcagtttatgaaatgcatttaggaagttggctccatgaatcaacagataataaatatcttgaagacaatggagaaccaagagacccagtggctgccgccgatttaaaacctgggacaagattattaacttatccagaattaacagaaaaactcatcccatacgtaaaagagagaggatttacacatattgaactaatgccaatatctgaacatcctttcgatggttcatggggataccaggttacaggctggtatgcaccaacaagtagatttggcaccccaaatgaatttagagagtttgttaataaatgtcatgaagagggcctaggagtaattcttgattgggtacctggtcattttccaaaagataagcatggtt

SEQ ID NO: 238250 - DNA, 2173 bp, Unknown
  Bacterial polypeptide expressing nucleotide sequence isolated from the Sargasso Sea
ctgctcgccggccgtcatcccgatccgttcgcgtgcctcggcccgcacgggcaggccgaccaggtcgtcgtgcgcgcactgctgcccggcgcgaaaagcgtgcatgcgctgtcgccggaaggcgccgagctcggcacgctcgcctgcgtcgatcgcgccggctgcttcgcgggaacgatcccgcgcaacggcggcgcgccccactatctgctcgcgatcgactggcccgacgcgcggcaggtgatcgacgatgcgtatgcgttcggcacgctgctcgacgacgcggtgctcgcccgcttctccgccggcgacccggccgccgtgctcgactgcctcggcgctacgcccacgtgcatcgacgacaccgacggcgtgcgcttcgcggtctgggcgccgaacgcgcagcgcgtgtcggtggtcggcgatttcaacggatgggacggccgccggcatccgatgcggctgcggcggccgtcgggcgtgtgggagctgttcgtgccgggcatcggcgcgggcgagtgctacaagtacgagctgcgcgcggccgacgggcgcgtgctgccgcacaaggccgatccctgcgcacgcgcgaccgaggcgccgccgcgcacggcgtcggtcgtcgccgacgtcgcggcgctcgacgcgttcgcgtggcacgacgacagctggatgcacgcgcggccgcacgccgaccgctaccgcgtgccgtggtcgatctacgaggtgcatgcggaatcgtggctacgcgtgcccgaggagatgaaccgcagcgcgacctgggacgaactcgccgagcggctgattccatacgtgaagggcatgggcttcacgcacgtcgagttcatgccgatcgccgaatacccgttcggcggctcgtggggctaccagccgctcgcgcagttcgcgccgtccgcgcgcttcgggccggtcgacggtttcgcgcgcttcgtcgaccgcgcgcatgcggccggcatcggcgtgctcgtcgactgggtgcccgcccacttcccgaacgatgcgcacgggctcgcgcaattcgacggcagcgcgctgtacgagcatgccgatccgcgcgaagggatgcacccggactggaacacgtgcgtgttcaacgtcgggcgcaccgaagtcggcgcattcctcgtcgcgtcggcgctcgcgtgggcgcgccggtatcacgtcgacggcatccgcgtcgacgcggtcgcgtcgatgctgtaccgcgactattcgcgtgcggaaggcgaatgggtgccgaacgtgcacggcggccgcgagaacctcgaatcggtcgcattcctgcgcatgctgaacgacacgttgcacggtgcggccgcgccggcgggcgtcgtcaccgtcgcggaggaatcgaccgcgtggccgggcgtcaccgcgccgaccggcgacggcgggctcggcttcgacttcaagtggaacatgggctggatgcacgacacgctcgcgtatctgcacgaagacccgatccaccgccgctatcaccacgaccggatgacgttcgggctcgtgtacgcgttctccgagcgtttcgtgctgccgctgtcgcacgacgaagtcgtgcacggcaagggctcgctcgtcgcgaagatgcccggcgacgcatggcagcggctcgcgacactgcgcgcgtacttcggcttcatgtgggcccacccgggcaagaagctgctgttcatgggcagcgaattcgcgcaatgggccgagttcgcgcacgacgcgacgccgcactgggacctgctcgacgcacctgcgcatcgcggcgtgcagcggctcgtgcgcgacctgaaccgcacctatgcggccgaaccggcgctgcatgcgctcgactgccacgcggccggcttctcctggctgatcggcgacgatcgcgacaacagcgtgttcgcgttcgcgcgccgcgacgacgcggggcatctcgtcgtcgcggtctgcaacttcacgcccgtgccgcgcgccggttatcgcgtcgggctgcccgcgcccggccactggcgcgaactgatgaacaccgatgccgcgccgtacggcggcaccaacgccggcaacgacggcgccgtgtgggccgaagccgtgcccgcccacggcgaagcgtggtcggcgaccttgcgcctgccgccgctcgcgacgctgtggctgacgcccgcctcatgaa

SEQ ID NO: 238251 - DNA, 2236 bp, Unknown
  Bacterial polypeptide expressing nucleotide sequence isolated from the Sargasso Sea
atgactcaagcccagacttacttctatgacggtagcgatgttgcgctgttaaacggtcaatatacggatgtgttttctctgctcggcatgcacagcatcaacgagggcaaggccttggtggtgcgctgttttttacgcaatgcccaaaaggttgatgtaataagccttaaggatggccgtaaggtggtgagccttgagcgcgttaatgaagcagggctgtttgcgggcacgcttggcagacgggttaaaccctttttgtatgcgctgcgggtgacttatcccctctgccagctggatattatcgacccctatcagtttggctccctcctcgatagtcaggacttatacctcttcggcgaaggaagctctgagcaggcctatcgctttttaggtgcgaattggcgccaagtcgatagcgtcgaaggcgtgcatttttgcgtatgggcccccaatgctaaacgggtttctgtggtgggggattttaatcactgggacgatactcgccatgtgatgcgccaacatatggccaacggcttgtgggagattttcctgcctgatgttgccgaaggcgcgcactataagtttgatttggtttatcaaaatggcgagcgacacgccaaatctgaccctatggcgacccaaatggaatgtgcgccgcacaatgcctccatagtgccgaaaaaacaccaacatccttgggcagattcacaatggatggacaaacgggcgagcacggcttggcatcgcgccgctatgtctatctacgaagtgcagttaggctcttggcgccgaaaaggcgagtttggtgagcaatattttgattatcaagacttaattgagcagttgatcccctatgtgaaggagcaaggctttacccatatcgagttgatgcctgtcagcgagtatcccttcgacggttcttgggggtatcaacccgttggcctgtatgcgccgacccatcgttttggcgatgccaatggcttaaaggcctttatcgatgcctgccatcaggccgagattggcgtgttactcgattgggtcgcggcgcatttccctaaggatccccacggccttgtgcgtttcgatggtacttgcctctatgaacatgaagacccgcgcaaaggcacgcaccccgattgggatacgctgatctataactacgaccgcggtgaggtgcggagctttctgctcagcaatgcctgttattggctgcgggaatttcacttagatggcctgcggctcgatgcggtgtcatccatgttgtacctcgactacagtcgcgaacctgggcaatggctgcccaatgcctatggcggacgggagaatttagaggcaattcattttctgcaaatgttgaatcaacgtttgtatcaagccttccccggcatttgcatgatagccgaagagtcaaccgcctttgcgggggtgactaagccgacggatagcggtgggctggggtttggttttaagtggaatatgggctggatgaacgacagcctaagctacttgggccgcgatcccatctatcgccagtatcaccataaccagctgacctttagcctgatgtatgcctattcggagcaatttatgttgtcgataagccacgatgaagtggtgcatggcaagggctctttgttgcataaaattcccggcgatgattggcaaaaattcgccaccctcagggcctattacggctttatgtgggggcatccgggcaaaaaattactgtttatgggcagcgagttcgcccagcgagacgaatggaaccataaccatagcctcgattggcatttgctcgcttttgaaccccaccaaggcgtacagcgctggcttcgggatctgaattggctttatcgacaattccccgccttatccgtgctcgactatgagtcacaggggtttcgctggcttgattgtgacaatggtcgcgacagtatttttagctttgttcgctatggcgagggcagtgatgtgcccttggtgtttgtggtgaacatgacgccaaccctgcaccaaggatttcgtatcggcttgccccaaggcggggatttttgtgagtacctcaatagcgacagccatctctatggcggtagcaatcaggggaatgcgggcaaggtgattgccgaagatttaccttggcagggcatggcatcgagcgcgttgatcactgtgccgcccctgggttgcttaatcctcgggcctgcgacggatgcgccaagagataccagcctatgac

SEQ ID NO: 238252 - DNA, 804 bp, Unknown
  Bacterial polypeptide expressing nucleotide sequence isolated from the Sargasso Sea
gatgagagatatcccagatactcctttaaaaatcgcaatagtagcaggtgaaaagtcaggtgacgaactgggcgcacctttaatgaaatccttgaaatcaattaatccttccgttgagtttgtaggagttgggggtgcgaagatgacttctgaggggcttgaatcatactttgatatgactgagatatccgtaatgggtattattgaacctttattaaatttaagaaaattattaaaacttagaaagggtttaaaaaaataccttctccatcataaacccgatatttttattggtattgactcacctgacttcaatctcccaatttcaaattttttgaaaaagaatcttcaaatcaagacaatacaatacgtgagcccctcggtttgggcatggcgaaaaggtcgcataaaatcaatggagagttcaatagattctgttttaaccctttttccttttgaagagaccgcttattccaattcgaagattaagacatgttatgtaggacaccctttgtcttacgaaattgatattaccaatatggaaatagaatccaaagttcaaaatagtattgcattattaccgggaagcaggacttcagagatcttattaatgggtgatttaatgattaaggcggcaaagaaacttaagctaatgaatccaaactaccaattttttatgccattatcagatgcttctcatctagacctttttaaagaagatatgaaagaatttattaatattacatatgaaaattcccaagatattttaaagaaatcctctatggcaattattacatctggaac

SEQ ID NO: 238253 - DNA, 230 bp, Unknown
  Bacterial polypeptide expressing nucleotide sequence isolated from the Sargasso Sea
cctggtggcaaccgctgaaaccgggcaggtcagctcccgcaaggtaaccattgcaatcatcgccggcgaggcatcgggggatatcctcggtgccgggctgattcgctcgttgcgcaaacgctatccgaaagcgcgctttgtgggcatcggcggcgacgaaatgatcgccgaaggctttcactccctggtgcccaatggaaggctttccgtgatggggctgggtgaaagtg

SEQ ID NO: 238254 - DNA, 304 bp, Unknown
  Bacterial polypeptide expressing nucleotide sequence isolated from the Sargasso Sea
gttgagcattaaagttggaattgtatctgcagaaccttcaggagaccttctaggaagtaagttaattgaacaaataaaagacaaatttggggacattgaagttatcggagtgggagatggtgatctttcacattttggcacatcaaaaaatagaaaaataattgaagtcatgggatttattgatcctatgaaaaatttttttaacatcaaaaagtttcaaaaaaaactaattaaacaatttaaagataaacaaatagatatttttattgggatagatgctcctgattttaatttgaaatcacaa

SEQ ID NO: 238255 - DNA, 460 bp, Unknown
  Bacterial polypeptide expressing nucleotide sequence isolated from the Sargasso Sea
aatattccaaacattcaggtaattattggtaaagcacctggtgtgactttaccaattataccagaatttataaaaattgaagaaatcgatcctcagttaacaatgttttacggtgatgccgcattagtggcttctggtacagcaacattagaagctgcagttcttgatatccctatggtagtatcataccgcttttcactgccaacttggatttttgccaagaagatggctacagtttcctacgcatcaatagtaaatctaattgccgatgaccttatcgttccagaatttatccaatcagagatgacccccgaaaatcttacaaatgctgtgataccccttttaaataaaactgcagaacgaaaaaacatgttattaggatatgaaaaagtgcgccgcacgcttggtattccaggagtctatgatcgtgctgctaaagctattctaaacagactttaat

SEQ ID NO: 238256 - DNA, 886 bp, Unknown
  Bacterial polypeptide expressing nucleotide sequence isolated from the Sargasso Sea
tcagggtgtcactcactttacagcttcctcagatgaagatgccctcgatctaacccgagaattgattggattactcccctcaaacaacctttcaggaacccctctcaaaaatactggcgattcagcgacacggttgtgtgaatcgttagactctattgttcccgacgatccaaacaaaccctatgatgtaaatgaggtcatttctgaaattcttgactcgggagcattccttgaggttcaagctagctttgcagcgaacattgttgttggatttggtcgcttaaatggttcaaccattggggttgtggccaatcaacccaaggtactggctggttgcctagatatcgacgcatccaccaaagcggctcgatttgttcgattctgtgatgcgttcggaattcctttggtcaccttggtcgatgttcctggcttccttccgggtgccaatcaagaatggggaggaatcattcgacatggtgcaaaattactctacgcgtattctgaagccaccgttccgaagatgactgtgatcatgcgcaaggcgtacggtggtgcctacgatgtaatgtgttccaagcatattcgtgcagattacaatgtagcatggccctctgcagagctggctgtaatgggtgctgatggagccgttcaaatcattcaccgtagaagaatccatgctgctggaaatccagaagaagagcgccaacgcctggtggatgaatatactgagagatttgcaaatccttaccaagccgctgccatgggttacatcgacgatgtaatcgaacctagcgatacccgtaaccgcttggtaaaggccctagccatgctgcttgacaaagaagaaacgcgaccagcaagaaagcacggaaatatccccctttga

SEQ ID NO: 238257 - DNA, 580 bp, Unknown
  Bacterial polypeptide expressing nucleotide sequence isolated from the Sargasso Sea
ttttgagaaacatctttttaaaaaagatagacccgtacttattttactacccggcagtaggcaacaagaagttgatcatcactggcctatctttttagatacaataacagatctcaataaaaaattcccaggattacaaacggtcgttataaaatctgataatatagaattattgccaatgccagagcatataaaaattgaattctcttcagaatatgcaatgccaaatggtacagctgcaataagtgcctctggaactgcaactctggaatgtgcaatggcaaacttaccaacagttgtttgttataaaatgtcttatctcaattggatactttttaatttatttggaaaagtgaaatacatttcaatcgttaacctaattgcaaaaaagaaaatcattcctgagctgatacaacataaaatgacatcaaaaaatattataaaaaaaatattcccctaccttgatataaaatcagaaaaaagaataaaaaccataaatcaatttgatattctccgaaaaaatttagggaaacaaggtgtttttgatagaattgctaattttatattaagagaaaattaa

SEQ ID NO: 238258 - DNA, 526 bp, Unknown
  Bacterial polypeptide expressing nucleotide sequence isolated from the Sargasso Sea
ttgagtattaaaattggaattgtttctgcagaaccctcaggagaccttctaggaagtagattaattgaacaaataaaagataaatttggggacattgaagttattggtatcggtgatggagatcttttacagcatggtacatccaaaaatagaaaaataatcgaagtcatgggatttatagatcctttgaaaaatttttttaacatcaaaaagtttcaaaaaaaattaattaaacaatttaaagacgaacagatagatatttttattggtatagatgctcctgattttaatttcgaaattcataaacaattacacagagaaaatatcttaacagtccatgtagtatgcccatctgtctgggcatggcgtaaaggtagagcaaaaaaatttaaattcgttgactatatgctctgtttatttccttttgagcttgattactgtaatgaagtgaataaaggagcaatttgcattggacatcctcttttaagcaataaaaatctttataccggcgataaggaagatgagt

SEQ ID NO: 238259 - DNA, 710 bp, Unknown
  Bacterial polypeptide expressing nucleotide sequence isolated from the Sargasso Sea
taaaaaacatcatatgccagcaagctttgtggggcaccctatagcttatgagtatgatattaaggtgaataaaaatttagagaaaaaatctttaggtttagaaaaatcatcagatagagctaataaaagtatttttatagccttattgccaggctctagggtcagtgaggttgcccgaatgttgtctatttttttggctgtggcagataagttatataaaaaaaacgaaaaccttaaatttctgattccgcgtgcacataagaatttgaaaaatttattagataataacttatctaagtatccagatctgccggttaaagtttttgaaggtgaggctcaagctgttttaaaatcttcacagatagcattaataacatcaggtacagcaaccttagaagctttaatggccaagactcttatggtcgtggcttatgtggctcccagtattagttatttagtgtataagcatttagtaaaaaccccatatattggcttgcctaatattttagcgggtaaaatgattgtccccgagtttattcaaaagcaagcaacagtggataatttagttgttagtgcgcaagagcaaattgatattttatattcgaaggaaggaagtaatttattggctgagtttgcaaaaacacatcaaagcctaagggttcgttctgatgtacttttggatgtaattgctagagtttgcaaagattaga

SEQ ID NO: 238260 - DNA, 1126 bp, Unknown
  Bacterial polypeptide expressing nucleotide sequence isolated from the Sargasso Sea
atggcacattttgtagtcgtagcaggggaaccgtctggagatgtgcttggcgctaaattaatttcagacttaaaaaagatcaatccagatcatcagttttcagggattgctggcccaagaatgatagcagagggttgtgaaccatggtttgagatttcagacttatctgtgatgggtttaacggaagtgattaaacatctaccaaggattcttaaaataaggaaggcagtgattgagaagtctattgatattgagccagatgcttatatcggcattgattatccagaatttaatctcagtattgagaagtcactgaaaaaaagaaaaatcaaaaccatacaaatggtctgtccaagtttttgggcttggagggaagcgagggcaaataaattcaaatcagcaatagatttgatgctatgtttattcccctttgagcccgaactactcaaagataagggtgttgaagcagctttcataggccatcctcttgctgaagagattaagatggatagttctcatcgctcatcatctgacattgagtctgtgaatatcgctcttctgccaggaagtagacgaaaagaaattgattttcaccttgaagttatattggatgcagcagtgatgattcgtgatcaactatccataaccaaaaaagaggttgtattttttataccaacaagattcaaagaaatggaagattggatcaagtcctttaaaaaatttaatgatctaaaaattaaaatattcaaagaaaccagcgattgtttatcagacagcgatctgatcataaccaaatcaggaacatccacattagagtcagcactatataaaaagaaaacaattgtggtttataagatgtcagcagtttcattctttttattaacaaaattaaacctaatcaatgtgagctatgcttcacttccaaatattttattgggcaatgagtgctttaaagaatttattcaagatgattttaaagcagagggcattgcaaatgaggccataagattattgcaagttgatacagatgcttatcttattcccttaaaaaaacttcacgaagatttaagatctcccgagcaggatgcttcttctatgatcactcgatttttaggcttatcttgag

SEQ ID NO: 238261 - DNA, 1150 bp, Unknown
  Bacterial polypeptide expressing nucleotide sequence isolated from the Sargasso Sea
aatgctccgtatagggattgttgtaggtgaaccttctggtgatactcttggcgcaggtcttgttcgtgaattgagaaaaaaaaataaaaatttaaaaattgaaggtattggcggcgagaaacttaaaaatgaaaagatggatcttttatttccaatggaaatattatctgttatgggttttactgaagtcctaggaagatattttgaattaagaagcattagaaataagttaataaaacattttttaaaaaatcctccagatatattcatcggaattgattcgccagactttaatttgtatatagaaaaaagattacgtaaggcaggaattaaaactatacattatgttagtccatctgtgtgggcatggagaatgggcagagtaaaaaaaataaaagattctgttgatttaatcttgaatgtatttccatttgagactcagatttatgataggtatggagtacctaataagtatattggacatccattagctgatcttttatctagtacaccaaatattgaatcttctagaaatagtttaggcttgccgttagataaaagaataattgctttattaccaggaagtcgaagaaatgaaataaagagaatcgcagctcctttattaaaagcatctttaattgcgaaagaaaaagacaagaatcttttatttatttgtgcattaattgataatgactcattagaaatcttcaaaaagataaagaataaaatcgcgccaaatttagatgtaaatgtatatatcgcaaaaacacatcaagcgatagaatcatcggatattgttatgctcgcatctggaaccgcaacacttgagtcaatgttattatataaaccaatgattgtagcctataaaatgtcatggcttacctatttaatagttaagttgttggccaaactgccatatgcatcaatacctaatattttagcaaatgattgtatagttcccgaatgtttacaatatagatgtacgcctaaaatactagcttcagaattagataagttcttaaactctactaaaaatataaaaaaaataactagttattatgaaaaattctcgaaaaaactaagaaaacaagctgattatggagctgcaaatgcggtgctccaactaatagaaaatgataagctcaattga

SEQ ID NO: 238262 - DNA, 622 bp, Unknown
  Bacterial polypeptide expressing nucleotide sequence isolated from the Sargasso Sea
gatggcagattccccccgcgtcgcgatggtggcgggcgagacgtcgggcgacttactggcgggcttgctgatcgacggcatgcaggcgcattggccggggctgcaatccagcggcattggcgggccgcagatggcgcgccgtggctttgctgcctggtggcccagcgataaactggcggtacacggctacagcatggaggtgctgcgccggctgcgcgagttgctgcgcatccgcaagcagctgcgcgaacgcctgctcaaagaccgccccgatgtgttcatcggcgtggatgctcctgatttcaatctgggcctggaggccgatttgcgcgctgcgggcatcaagaccgtgcatttcgtgtgtccgtccatctgggcctggcgtgcagaccgcgtcgaaaagatccgccgcagcgcagaccatgtgctctgcatcttcccgttcgagccagagttgcttgcgcagcatggcatagccgccacctacgtgggccaccctctggcgggcgtgattcccatggtgccggaccgtacggccgcgcgcgctcagctgggcctgagggatgaggacgaagttctggccatcctgccgggaagccgctcttccgagatccagtacatc

SEQ ID NO: 238263 - DNA, 1081 bp, Unknown
  Bacterial polypeptide expressing nucleotide sequence isolated from the Sargasso Sea
ttgagcattaaagttggaattgtttctgcagaaccttcaggagaccttctaggaagtagattaattgaacaaataaaagataaatttggggacattgaagttattggtgtcggtgatggagatcttttacagcatggcacatcaaataatagaaaaataattgaagttatgggatttatcgatcctttgaaaaatttttttaacatcaaaaagtttcaaaaaaaactaattaaacaatttaaagacgaacaaatagatatttttattggtatagatgctcctgattttaattttgaaattcataaacaattaaacagagaaaatatcttaacagtccacgtagtatgtccatctgtttgggcatggcgtaaaggtagagcaaaaaaattcaaattcgttgactacatgctctgtttatttccttttgagcttgattactgtaaagaagtgaataaaggagcactatgcattggacatcctcttttaaccaataaaaatctttacaccggtggcaaggaagatgatttgatatgtcttttgccaggaagtagaaagtcagaaatagaacaccatttaccagtgatgataaaaagctttaagttattttcagaaaacacaaaatttaaagcaattattcctgcatacgaccaagcaacacttgagttaattaatgcttatataaaaaatgaggttagtattagcgcaaaagtagtaaaagctagagagataatgagagaggcctctcttgcaatatgttgttctggaactgctacattagaatgcatgcttgctgaaattccaacaactgtaatttataaaactaattttattaattattggatttataaaattttggtgaatgctaaattcgtagcattacctaacctaatagcgggaaaacaagttatgaaagagcttctgcagaataaaatgactgtagaaaacattgttgaggatctgaaaaataattttaaaaataaagatagaatttcaactgaacttaaaaaggcttcgaacttattaacagaaccaaatttttcaggatttcttgatcaaattaatgattattgcaggcgttgat

SEQ ID NO: 238264 - DNA, 555 bp, Unknown
  Bacterial polypeptide expressing nucleotide sequence isolated from the Sargasso Sea
aaagtgtagctttgcttcctggtagtagaaaatctgagatttctcttctcgctgatgaaatgattaaagcagctaaagaattaagaagaaaagataaatcttataaattttacatgcctttatcagataaaaaacatttagatctaataaatgaacctttagaagacttagtaaaggtttcttttaataattctcaagaagtgctatctaattgtgagattggaattatcacttcaggcactgcgacattggaagcttcattattaagaacaccatgtgtaactctttacaagactggctggttgagcttcagattaattaaaccattacttaggatagataatttttctttacctaatcttttggctggtaaagagcttttacctgaattactacaagatgaagttaacgtagtaaatataattaatgctatagaaaagataaaccttaagggtttggattgctactataaagagttccatactatccatgaaaatttaaaagctgggagttctgaaacagcagctaaagaaatatctcatttaatagattgat

SEQ ID NO: 238265 - DNA, 436 bp, Unknown
  Bacterial polypeptide expressing nucleotide sequence isolated from the Sargasso Sea
aagcaaatcaaacaacaggtcgcgccggatttagtggtgcaactggaaattggtaaagcccgcaccgttttaactgcggctgatgctgtgtttatcgcctcaggtactgccaccttagaagccatgctggccaaaaccgctatggtggtgggctacaagatgaactggctgacgcatcaaattgccaaatggttagtgaaattgaagttctttagcctgccgaatttactggctgataaagccttagtgactgaactgctgcaagagcaggtaacggtagataatttagtcaaagctatggcacctttattacaagatcaaaaagcgcagcaagcatgcgtgggctcttttacagagctgcatcaattgatccgctgtaacgccagcgaacaagctgctgcggcaatagcaaaagtgatggaaaaccctgtatgag

SEQ ID NO: 238266 - DNA, 683 bp, Unknown
  Bacterial polypeptide expressing nucleotide sequence isolated from the Sargasso Sea
aattacttatttcccttttgaagaaggtgcttacaagaattcaaatgtaagaatctgttatgcaggacacccaatagcctatagattaaatcaagatcaggatgaactgattaaaagaaaagagctaagaagtgtagctttacttcctggtagtagaaaatctgagatttctcttctcgctgatgaaatgattaaagcagctaaagaattaagaagaaatgatgaatcttataaattttacatgccattatcagataaaaaacatctagatctaatcaaggaacctttagaagatctagtgaaggtttcttttaacaattctcaagaagtcctatctaaatgtgagattggaatcattacttcgggcactgcgacattggaggcttcgttattaaggactccatgtgtaactctttataaaacaggttggttgagttatagattaattaaacccttgcttcaaatagatcatttttctttacctaatcttttagctggcaaagaacttttacctgaattacttcaagatgaagttaacgtaaaaaatataattaatgctatagaaaagataagccttaaaggtttggattattactataaagagtttcatgatatccatgaaaatctaaaagccgggagttctgaaactgccgctaaagaaatatcacatttaatagattgat

SEQ ID NO: 238267 - DNA, 951 bp, Unknown
  Bacterial polypeptide expressing nucleotide sequence isolated from the Sargasso Sea
ttatcaaagatcttaaacgtatttttccttcttcctctttcattggtgtgggaggaagaagaatgcaacaagagggtctagattctttttttgagatgagaaagatatctgtcatgggaatcattgaacctcttttgaagatctcggaactgttaacattaagaaaaaaactcaaagaatatctttctgcagaagctccagatatctttattggtatagattctcctgattttaatttagccatttccaggcatttaaaaatgcaaaagataaaaacagttcaatacgttagtccttctatctgggcttggagaaaaggtaggataaaaactatagaaaaatctgttgataaagttctaactttatttccttttgaacttcttgcttacagtgaatcctcagtagaggcttcttttgttggccatcctttagctcataaaatcccaagagttttaaataaagaaagtataagaaatactaaatttcatttaaacgaaggtgaaaaaatgattgctttattacccggcagcaggaagtcagaagtaaaaatgatcggagaggttttattgaaaacagccaaattaattaaagaattagaagagaaagcatgcttttttatgcctttagctgatataggacacaaagaattgatacctaattggcaggattacccttgggtaaacttctctgaaaaaaatgcgcaagatgttcttgcaggctctcatttaggcatagtaacttccggaacagcctccttagaagctgcactatttaaaacaccagtagtagttgtttacaaaacaagttggatcacttatttgctggttaagccactgctaaggattaaacaattttctttgcctaaccttttagcaggaagttctattcttccagaactactccaatatgaagtgaccgataaaaatctttttaatgcgtacaaagattaga

SEQ ID NO: 238268 - DNA, 400 bp, Unknown
  Bacterial polypeptide expressing nucleotide sequence isolated from the Sargasso Sea
ctgtcggtgacagatctttctcacgcgaccatcagcgagcgtaaaatcacattcggaatcattgccggtgaggcatcgggggatatcctcggtgccggcctgatccgttcgctgcgccaacgctatccccgggcccggttcgtcggcattggcggggaggaaatggttgcggagggatttcattccctggtgccgatggaacgtctttcggtcatggggctggtggaggtccttggacgaattcgtgaactgttcagcatccgggcccggctcctggactatttcttcgccacgccaccggatgttgtgatcggtatcgattctccggattttacgcttgcgatcgaacggcgctgccacgaggccggcattctttccgtgcattatgtcagcccatccg

SEQ ID NO: 238269 - DNA, 697 bp, Unknown
  Bacterial polypeptide expressing nucleotide sequence isolated from the Sargasso Sea
ttcgaggtggatatctacagagaggccggcattgacgcgatgtgtgtgggccacccgttggtggatgagctccagcagttaccggtagcagaagagctgcgcgtcgccatgggactcccgcccaccaaaaccttgctggccgtgctgccgggtagtcgggagggggaggtgcggcatttgatgcccgtctttgctgacgccatgcagctgctacaggcacgacataccaacctacattttgtgatcccggcggccaatgccgcgcggcaccaacagattgagtcgatgcttcagtcgaagtcgctatcggtgagcctgattcgcggtcaggggcgtgaggtcatgcgatgtagcgatgcgatcatgatcgcctctggcaccgcgacactcgaagcgatgctgttgcgcaaaccaatggtcattagttaccgcatggcatcgctgtcttggggcatcctgtcgcgcctagtgaagactccgcatgttggtttgcccaacgtgttggccggtgaagagattgtcccggagctcctgcagcaccatgccactgcctcgcggcttgccgacgcagtttcgggactcttggagggtgatggggcgaggcaggtaggacgattcgacgaattggctgggctgatcggcggcaactttgccgagcgcagtatcgatgcgctgttgccgttggttaaggagtgat

SEQ ID NO: 238270 - DNA, 460 bp, Unknown
  Bacterial polypeptide expressing nucleotide sequence isolated from the Sargasso Sea
gatgccggtaaaaccgctacgtattgccgttgtcgccggcgaaccctccggcgacgttctggcagcaggtcttattactgccttaaaacgtcgttaccccgatgccgtctttgaaggtattgccgggccgaatatgcaggctgcgggttgcaccagtctgtttgatatcgaaatcctatcggtcatgggactggtagaagtgctctccagtattcgaccgatcctaaaagttaaaaacgaactcattgctcattttataaagcacccgccggatgtgtatattggggttgacgcgcctgactttaatctacgggtagaaaccgcgctaaagcaacaggggattaaaactgtccattatgtcagtccgacagtatgggcctggcgtgaaaagcgtatcttcaagattgcgaaagcgactaaccgagtgctgggcattttcccgtttgagcaagccgtttac

SEQ ID NO: 238271 - DNA, 923 bp, Unknown
  Bacterial polypeptide expressing nucleotide sequence isolated from the Sargasso Sea
tctgtgcgcgggtgaagcgtctggcgatctactcgcaggctcgattttgcgggcctggcagcgacgcggcacttcgctcgacatcacaggcattggcggcgatcagatgcaggccgcgggccttgagtcactctgcgccatagaccggttggccgtagtgggcctggcagaaccactgaaacggttgcccgaactgctgggcatccgccggcgcctcatcgcgcagcagcagcgggtggcgccggatctctttgtcggcgtcgacagccccgatttcaatctgcccgtcgagcgccgcctgcgcgcgtctggcatccccactgctcatctggttggtccctcagtatgggcatggcgacggaggcggctccggggtatccgggaatcggttgatcgcatgctgtgcttgttgcccttcgaggtagatatctaccgagaggccggcattgacgcggtttgtgtaggccatccaatggtagacgagctccagcagttacccgcagcagatgaactccgtgccgccatgaggctgccgtctaacaaaaccttggtggcagtgctacccggcagtcgggagggggaggttcggcatttgatgcccgtctttgctgacgccatgcagttgctacaggcacgacataccggtctccattttgtgatcccggctgccaacgccgagcggcaccaacagattgaatcggtgctgcaatcgacagcgctatcggtgagtctgatccgaggacaggggcgtgaagtgatgagatgcagcgatgcgatcatgatcgcatcgggtaccgcgacgctggaagcaatgctgttgcgcaaaccgatggtcatcagttaccgcatggcatcgctgtcatgggccattctgtcgcgcctggtgacgaccccatatgtcggtttgcccaatgtgttgggcg

SEQ ID NO: 238272 - DNA, 661 bp, Unknown
  Bacterial polypeptide expressing nucleotide sequence isolated from the Sargasso Sea
gtgcgcttcgttggtcatccgctggccgatgcgattccgcagcaggctgatcgtgctgctgcgcgcgaggcgctggatctgccgcaggacgaaccggtagtggccttgatgcccggcagtcgtggtggtgaagtcgcgcgtctcggtgagctgtttctcgatgcggcgattcgtctgcgcgcactgcgcccaggtattcatttcctgctgccttgcgccacgcccgagcgtcgcgagcagctggagcagatgctggctgggcgtgatttgccgctgacgctgctcaatgggcgctcccatgaagcgttggctgcctgcgatgcggtgttgatcgcttcgggtactgcgaccctggaagcgctgctgtacaagcggccgatggtggtggcgtatcgcgtagcgccgctgacctatcgcatcctcaaacgcctggtgaagagcccctatatctcgctgcccaatctgctggccgagcgtctgctggtgcctgagctgattcaggatgcagcgactcccgaggctctggcccaggccgtggcgccgttgatcgacggtgggcaagtgcagaccgagggcttcgacgtgattcaccgtgcgctgcgccgcgacgcctcggtgtcggcggctgaggccgtgctcaagctggcagggcgtggctgat

SEQ ID NO: 238273 - DNA, 577 bp, Unknown
  Bacterial polypeptide expressing nucleotide sequence isolated from the Sargasso Sea
ctgataaaaacaaaagaagctaaaagcgtagcgctgcttcctggaagcagaaagtctgagattgctcttttggctgatgaaatgataagaacagcaaaaaaattaaaaaatattgatagttcgtataagttttatatgcctttatctgacaaagggcatctagatttgattaatgagccttttgaagactgggtagaggtttcttttaataattctcaagaagttctatctaagtgtcaaatcggaattattacatcaggaacagcaacattagaagcattattgttgaggacgccatgtgttactctttataaaacaaactggttaagttatagaataattaaaccattgctttcaattgagaatttttctttaccaaatcttttgtcaggaaatacatttttgcccgaacttctgcaagatgaagttaattcagaaaatataatagagtctttaaatgttattaactcaaagggtatggactactactataaagagtttcataaaattcatgagaatttaaaagctggcagttcagaaacggcagctaacgaaatatccaatttaatagattgat

SEQ ID NO: 238274 - DNA, 766 bp, Unknown
  Bacterial polypeptide expressing nucleotide sequence isolated from the Sargasso Sea
tatgtctaggcctatccgtatcggcatggttgccggagagccctctggtgacgtgcttgccgccggaatggttgcagagttaaaacgccaataccctgatgctgttatcgaaggtattggcggtccaaatatgataaacgcgggttttcatagtctgttcgatatggaaaccttgtcggttatgggacttgttgaagttctctcccatctacctgccatcttgaaagttaaaaagcagcttcttgctcacttcgagcaaaatccgccagatatttttgtgggtattgatgcgcctgatttcaatctaagagtagaaaaagcgcttaaagcacgcggtatcaaaaccatgcactatgtgagtcctactgtgtgggcgtggcgtgaaaagcgcatccataaaatagcgaaagcgactaatcgtgtgttgggtttatttcctttcgagcagcaggtttacgataaataccatgttccctatacctttgtgggacacacaatggctgacgctatagcaattgagcccgaccaaaatgcggcgcgccaagaattaggtgtagatagtaatgcttccgtattggctgtacttcccggctcacgaagaggcgaagtagatacgctacttccagtatttctggagaccatagaagctattcatgctaaacgcagcgacattcaatttcttattcctgcggcaaatgagcatcgtcttgcgcaaataaaagcactcttacttgaagctgataatgcagaagaacgcttacctatt

SEQ ID NO: 238275 - DNA, 1171 bp, Unknown
  Bacterial polypeptide expressing nucleotide sequence isolated from the Sargasso Sea
gatgccgcttccgaccactcagctccggctcgcgatggtggccggcgaaccgtcgggcgacctgctcggcgcgtcgctgctcggcgggctgcgcgagcggctgcccgaatcggcccagtactacgggatcggcggcccgcgaatgatcgcacacggcttcgactcgcactggcagatggacaagctgaccgtgcgcggctatgtcgaggcgttgggccagattcccgagatcctgcggattcgcggcgagctgaagcgccagttgctcgccgagcggccggacgcgttcatcggcgtcgatgcgcccgatttcaacttcaacgtcgaacaggcggcgcgcgacgcgggcatcccgtcgatccacttcgtgtgcccgtcgatctgggcatggcgcggcggccggatcaagaagatcgcgaagtccgtcgatcacatgctgtgcctgtttccgttcgaaccggcgattctcgacaaggcaggcgttgcgtcgacctacgtcggccatccgctcgccgacgagattccgctcgagcccgacacgcacggcgcgcgcatcgcgctcggattgccggccgacggcccggtgatcgccgtgttgccgggcagccggcgctcggaaatcgcactgatcggcccgacgttcttcgcggcaatggcgctgatgcagcagcgcgagcccggcgtacggttcgtgatgccggcggccacgcccgcgctgcgcgcgctgctgcaaccgctcgtcgatgcccatccgcagctcgcgctgacgatcaccgacggccgctcgcaggttgcgatgacggctgccgacgcgatcctcgtgaagagcggcacggtcacgctggaagccgcgctgctgaagaagccgatggtgatctcatacaaggtgccctggctgaccgggcagatcatgcggcggcagggttacctgccgtacgtcggcttgccgaacatcctggcggggcgcttcgtcgtgcccgagctgctgcagcatttcgcgacgcccgaggcgcttgccgatgcgacgctcacgcagctgcgcgacgacgcgaaccgtcgcacgctgaccgaagtctttaccgaaatgcatctttcgctgcggcagaacacggctgcgaaggcggccgaagcggtcgtgcgcgtgctcgaacaacgcaaggggcgcgcatga

SEQ ID NO: 238276 - DNA, 218 bp, Unknown
  Bacterial polypeptide expressing nucleotide sequence isolated from the Sargasso Sea
tatgagcaaaaaatctcaattagtgtttgcaatggtcgccggagaactctccggcgatattttaggtgcaggtttaatggccgcactgcaaaaaacacaccccaacgcccgttttgtcggtattggtggacctcgaatggaagccctaggcttcgaatccctgtttgcgatggaagaatttagccgtgatggggatagtcgaagtgctatcacgtctg

SEQ ID NO: 238277 - DNA, 1171 bp, Unknown
  Bacterial polypeptide expressing nucleotide sequence isolated from the Sargasso Sea
atggccctcaacccaagtccgatacgcgtggcgatggtcgccggcgagccgtccggcgacctgctggcggcctcgctgctcgaaggcctcgcgagccatctgcctgcctccacgcactactacgggattggcggcccgcgcatgattgcgcagggcttcgacgcgcactggccgatggaaaagctgaccgtgcgcggctatgtcgaagtgctacggcatatccccggaatcctcggcatccgcaacgaactgaagcggcaactgctggctgaaccgccgtcggtgttcgtcggcgtggatgcacccgatttcaatttcggcctcgagcatccgctgcgcgaggcgggtattccgaccgttcatttcgtctgcccgtccatctgggcgtggcggggcgggcgcatcaagaagatcgccaaggcggtcgaccacatgctctgcgtgttcccgttcgaaaaggcgctgctggaaaaggccggtgtcgcggcctcctacgtcggtcatccgctcgctgacgagattccgctcgtgcccgatacgctaggcgcgcggcgcacgctcggcctcgctgaaagtgggccgatcatcgcggtgctgccgggcagccggcgctcggagatcgacctgatcggtccgacgttctttgccgcgatggaaatgatgcagcaccaggagcctggcttgcgtttcgtgatgccggcggccacccccgcgttacgcgaaatgctgcggccgctggtcgacgcgcatcccgggctcgcgctgaccattaccgaaggccagtcgcaactcgcgatgacggcggccgacgcgattctcgtcaagagcggcacggtgacgctggaagccgcgttgctgaaaaagccgatggtgatttcgtacaaggtgccctggctgaccggacagatcatgcgccgccagggctatctgccgtatgtcggcttgccgaacattctggccgggcgtttcgtcgtgccggaaattctgcagcatttcgcgacgccgcaggcgctcgccgaggccacgctgaaacagttgcgcgacgaggccaaccggcgcacgctgacggaaatcttcacggagatgcatcacgtgctgaagcagaacaccgcgcagcgtgcggcggaagtggtggcgagcgtcattgaaaagcgcagggcgctgccgtgac

SEQ ID NO: 238278 - DNA, 1114 bp, Unknown
  Bacterial polypeptide expressing nucleotide sequence isolated from the Sargasso Sea
tttgaattcatcaaaaaacataaaggtagcaattgttgctggagaaaaatctggtgatgagttgggaggtcctctgatggaatctttaaaaaatcattttccaaatgtttcttttataggcgtaggaggtgaaaaaatgaagctccaaggactatcctctgtatttcctatgcacaagatatctgtaatgggtattattgaaccactccttaaaatcaaagaactgttgtcacttagaagaaacttaaagaacttttttttaaacgaaaaaccagatatttttataggaatagattctcctgacttcaatctccccttatcaaaatacttaaaaaaagaactagggcttaaatccgttcaatatgttagtccatctatttgggcttggagaaaaggtagaattaaaaaaatagaacagtctgttgatagcgttataactttatttccatttgaggaagaagcatacattgattcaaacgtaagggtttgttacgcaggtcaccctctggcatatagattaaaccaaaatgagaaagagctgataaaagcaaaagaagctaaaagtgtagcgctacttcctggaagcaggaaatctgagattactcttttagctgatgaaatgataagaacagcaaaaaaattaaaaaatgtcgatagttcgtataagttctatatgcctttatctgacagagcgcacctagacctgattaacgagcctttagaagactgggtagaggtttctttgaataactctgaagaagttctatctaagtgtcaaatcggaattatcacatcaggaacagcaacattagaagcattattgttgaggacgccatgtgttactctttataaaacaaactggttaagttatagaataattaaaccattactttcaattgagaatttttctttaccaaatcttttgtcaggaaatacatttctgcccgaacttcttcaagacgaagttaattcagaaaatataatcgaatctttaaattttattaactcaaagggtatggattacttctataaagagtttcataaaattcatgagaatctaaaagctggcagttcagaaacggccgctaatgaaatatccaatttaatagattga

SEQ ID NO: 238279 - DNA, 1123 bp, Unknown
  Bacterial polypeptide expressing nucleotide sequence isolated from the Sargasso Sea
gatgtctgactcctttcattcaaaaaaaataaaaatagcaatagttgctggtgagaaatcaggagatgaattagggggtcccttgatggaatgtctgaagaacaattttgaagacgtttgcttcatagggataggaggtgaaaagatgaaacgtcaaggactttcatccttattccctatggagaatatatctgtaatggggatcattgagcctttactcaagttgaaagcgctattatcttttagaaaagaattaaaggaatttttcttattagaaaaaccagatatctttataggaatagactccccagatttcaacctacctatatcaaaatttttaaaaaaagagttagaaattaagactgttcaatacgttagtccttccgtttgggcttggcgaaaaggaagaattaaaacgatagaacagtcagttgattctgtaataactttatttccttttgaaaaaaatgcttataaggattcaagtgtcagaatatgttatgcaggtcatccattggcatatagattcaatgttgatcctaataagctgatcaaaggcaaagaagcaaaaagtatagccctgcttcctggtagtagaaagtctgaagtttctcttctagcagatgaaatggtgaaggcagcaaaagaaataagaaaaagagataaatcttttaaattttacatgcctttatcagaaaaaagccatcttgagttgataaatgagctattagaagattttatagaggtttcttataataattcacacgaagttttatctaaatgtgagataggtattattacgtcaggcacagcaacattagaggctttattactaaggactccttgtgtaactctatataaaactaattggttgagttacaaaataataaaacctttgctttccatagatcaattttctttacctaatcttttagctggaaataatcttctacctgaacttcttcaagatcatgtagattccgataatataattagagcattagatgaaatagaaaaaaaaggtttagatttctactataaagagtttcatagaatacatgataatttaagagcagggagttcagaaacagctgctaacgaagtgtttgatttaataggttga

SEQ ID NO: 238280 - DNA, 1123 bp, Unknown
  Bacterial polypeptide expressing nucleotide sequence isolated from the Sargasso Sea
gttgatagggaatacccttgaaaatactcctttaaagatcgcaatagtggcaggtgaaaggtcaggtgacgaattaggcgcacctttgatgaaatccttgaaatcgatcaatccttcaattgaatttgtaggtgtcgggggctcgaagatgacttctgaggggcttgaatcttactttgatatgagtgagatatcagtaatgggtattattgaacccttattaaatttaagaaaattattaaaacttagaaagggtttaaaaaaatatttacaccatcagaagcccgatatttttataggtattgactcacctgacttcaatcttcccattgcaaattttttgaaaaagaatcttcaaattaagacaatacaatacgttagtccttcagtttgggcatggcgtaaaggtcgcataaaatcaatggagagatcaatagattctgttttaaccctttttccttttgaagagactgcttattccaattcgaagattaagacatgttatgtaggacaccctttgtcttacaaaattgatattaataatatggaaatagaatccaaagttcaaaatagtattgcgttattaccaggaagtaggaagtcagagatcttactaatgggtgatttgatgattaaggcggcaaagaaacttaagctaatgaatccaaactaccaattttttatgccattatcagattcatctcatctagacctttttaatgaagttatagaagatttcatccatatttcatatgaaaattctcaagatattttaaagaaatcttctatggcaattattacatctggaactgcaaccttagaggctgccttgtcattcactccttgtatcgctgtatataagactaattggttgtcatatttattaattaaacctttacttcatattgactctttttcattaccaaatttaattttaggtaagaaaattttacctgagctattgcagtctgaagcaactatagaaaagataatctcttcagtaaatctactagaggacagaggctttgaattctatagaaatgagtttacttttattaaagaaacgctaatggctgggggagcagataaggcgtctgttgaggttttaaagttattaaattga

SEQ ID NO: 238281 - DNA, 958 bp, Unknown
  Bacterial polypeptide expressing nucleotide sequence isolated from the Sargasso Sea
gaatcttactttgatatgagtgagatatccgtaatgggtattattgaacctttattaaatttaagaaaattattaaaacttagaaagggattaaaaaagtatttgctacaacaaaatcccgacatttttattggcattgactcacctgattttaatcttccagttgcaaattttttgaaaaagaatcttcaaatcaagacaatacaatacgtcagtccgtcagtttgggcatggcgaaaaggtcgaataaaatctatggagagatcaatagattctgttttaaccctttttccttttgaagagaccgcttattcaaattcgaagattaagacttgttatgtaggacaccctttatcttacaaaattgatattactaatatggaaatagaatccaaagttcaaaatagtattgctttattaccaggaagcaggacttcagagatcttacttatgggtgatttaatgattaaggcggcaaagaaactaaagctaatgaatcctaactaccaattttttatgccattatctgattcatctcatctagacctttttaaggaagatatggaagatttcattcatatttcatacgaaaattctcaagatattttaaagaaatcttctatggcaattattacatctggaacagctaccctagaggccgccttatcattcactccttgtatagccgtatataagactaattggttgtcttatttattcattaaaccttttcttcatattgactctttttcgttaccaaatttaattttaggtaagaaaattttacctgagctattgcagtctgaagcaactatagaaaagataatctcttcagtaaatctactagaggatagaggctttgaattctatagaaatgagtttacttttattagagaaacgctaaaggctgggggggcagataaggcgtctgttgaggttttaaagttattaaattgat

SEQ ID NO: 238282 - DNA, 301 bp, Unknown
  Bacterial polypeptide expressing nucleotide sequence isolated from the Sargasso Sea
catgctggtgaaaaagccgatggtggtgggctacaagctcaagccgttcagctactggctggcccagcggctggtgaagaccgaattcgtctccctgcccaacctgctggccggtcgcatgctggtgcccgagctcatccagcacgaatgcaccccggagaatctggtggtcgaggtgagcaagttcttcgagcacgacaacagcgcgctggtgaataccttcaccgagctgcaccagctcatccgctgcaacgcggatcagcaggcggccgaagcggtggccgagctgctcggcagataa

SEQ ID NO: 238283 - DNA, 545 bp, Unknown
  Bacterial polypeptide expressing nucleotide sequence isolated from the Sargasso Sea
tatgagcagacctattcgcgtcgcactggtcgccggtgaggcgtccggtgacatcctcggttccggcctgatgcaggccatcaagcagcgccatccgggtgccgagttcatcggtgttggcggcgcgcgcatggaggccgagggccttaaatcctatttcccgatggagcgcctggccgtgatgggcctggtcgaggtactgggccgtctgttcgagttactggggcgtcgtcggcaactggctcgcgatctgatcgccgcgcaacctgatgttttcatcggtatcgatgcgcccgatttcaacctgggcctggagctcaagctgcgccgtgccggcatcaagaccgtgcactacgtcagcccctcggtctgggcctggcggcagaagcgtgtactgaagatccgcgaagcctgcgacctgatgctgaccctgttcccgttcgaggcgcagttctacgacgagcataaggtgccggtgcgcttcgttggtcatccgctggccgatgcgattccgcagcaagctgatcgtgctgctgcgcgcgagg

SEQ ID NO: 238284 - DNA, 931 bp, Unknown
  Bacterial polypeptide expressing nucleotide sequence isolated from the Sargasso Sea
gtcgccggagaacactccggcgatattttaggtgctgatctgatccgggctttaaagctgttgtacccgcatgctgaattttacggcataggcggtgagcggatgaaagcagaaggctttagtgctttgtttgatatggaagagctagcggtgatgggcatagtggaagtattaggccgcttgccacgtttgcttaaggttcgcaaagagctgctgcagcatctgaccgacactcaacctgatgtgtttattggcattgacgcaccagattttaatattccagtggagctcaaactcaaagctgctggtattaaaaccgtgcattatgtcagcccttcggtctgggcctggcggcaaaaacgtatttttaaaatagccaaagccaccaatatggtgctggcgttattgccttttgaaaaagctttttacgacaaatttgctgtgccttgcagttttgtgggtcatacgctggccgatcaaatgcctttgcagcctgataaagccgctgccaaaactgaactgggtttaaaccccgaagcaccggtgctggccattatgccgggtagcagaaccaatgaaatcaaattattagctgcagattatttgcttgctgcacaggaactaaaacgtcagcaaccagatttacagctgatttgtaatatggtgacagagcaaaaagcagcgttgttccgccagatcaaacaacaggtcgcaccggatttggtggtgcagctggaaattggcaaagcccgtaccgttttaaccgcggctgatgctgtgtttatcgcctcaggtactgccaccttagaagccatgctggccaaaaccgctatggtggtgggttataagatgaactggctgacgcatcaaattgccaaacgtttagtgaaattgaagttcttcagcctgccgaatttatggctgataaagc

SEQ ID NO: 238285 - DNA, 788 bp, Unknown
  Bacterial polypeptide expressing nucleotide sequence isolated from the Sargasso Sea
tgccggcatcaagaccgtgcactacgtcagcccctcggtctgggcctggcggcagaagcgtgtactgaagatccgcgaagcctgcgacctgatgctgaccctgttcccgttcgaggcgcagttctacgacgagcatcaggtgccggtgcgcttcgttggtcatccgctggccgatgcgattccgcagcaagctgatcgtgctgctgcgcgcgaggcgctggatctgccgcaggatgagcccgtggtggccttgatgcccggcagtcgcggtggtgaagtcgcgcgtctcggtgagctgtttctcgatgcggcgattcgtctgcgtgcactgcgcccaggtattcatttcctgctgccttgcgccacacccgagcgtcgcgagcagctggagcagatgctggccgggcgggatttgccgctgacgctgctcaatgggcgctcccatgaagcgttggctgcctgcgatgcggtgttgatcgcttcgggtaccgcgaccctggaagcgctgctgtacaagcggccgatggtggtggcgtatcgcgtagcgccgctgacctatcgcatcctcaaacgcctggtgaagagcccctatatctcgctgccaaatctgctggccgagcgtctgctggtgcctgagctgattcaggatgcagcgactcccgaggctctggcccaggccgtggcgccgttgatcgacggtgggcaagtgcagaccgagggcttcgacgtgattcaccgtgcgctgcgccgcgacgcctcggtgtcggcggctgaggccgtgctcaagc

SEQ ID NO: 238286 - DNA, 712 bp, Unknown
  Bacterial polypeptide expressing nucleotide sequence isolated from the Sargasso Sea
ttgcggatcgcactggtggccggtgaagcgtccggcgatctgctgggtgcggggctggtgcgtgaactgaaagcacggttcccgaacgccgaattcgccggcatcggcggcgatgccatgcgcagcgccggctgccagacctggcacgacgccagcgaactggcggtgatggggctgaccgaagtactgcgccacctgccacgactgctgaagctgcgctcggcgttccgccagcgtgcgctggaatggcagccggacgtgttcatcggcatcgacgcccccgacttcaaccttggcatcgagcgctggctcaagcagcgtggcgtgcgcaccgtgcactacgtcagcccctcggtctgggcctggcgcgagaagcgcgccgaaaagatcggcaacagcgccgacctggtgctgtgcctgttcccgatggaaccgccgatctacgccaggcacggcatcgatgcgcgttttgtcggccatccgatggccgacgacattccactgcagggcaaccgcgaggaggcgcgcgccgcgcttggcctgccgacctcggccaaggtgctggcggtattgcccggcagccgcctgggcgagatctcacgcctgggagaaccgttcttcgaagccgcctggcaggtctccgaacgcatccccggcctacatgtggtggtgcctgccgccaatccggcgtgcaggcagctgatcgaagaac

SEQ ID NO: 238287 - DNA, 826 bp, Unknown
  Bacterial polypeptide expressing nucleotide sequence isolated from the Sargasso Sea
ctggcggtgatgggcattgtggaagtgctaggccgctgcccacgtttactgcaggtgaagcgtgaaatcctggccgcactgttggcggataagcccgatgtttttgttggtatcgatgcgcccgattttaacctgccggtagagcttaaactgaaacaggccgggattaaaacagtacattacgtcagcccttctgtctgggcctggcgacataaacgtatttttaaaattgcagcggcaacggatatggtgttgtcattgttaccgtttgagaaagccttttacgataagtatcaggtgccctgtacttttgttggccatacgatggcggacaatatgccgctggatgtcgacaaagctaaggctaaagttgagctggggcttgatccggcgagacctgtgctggctattatgcctggtagccgcactaacgaaattaaactgctggcaccggattttcttcaagcggcattattactgcagcagcaaataccgcagttgcagtttgtaactaatatggttacagaaactaaagccgggcaattcaatgccattaagcaacagctggcaccagagctggctgtaacaagctttaccggccaggcgcgtcaggtgctgttggcgtctgatgcgacttttattacctcaggtaccgccactctggaagctatgttggcgaaatgcctgatggtcgtggcgtaccgtgcaaactggctgacctatcagataggtaaacgtctggtgaagctttcacattttagtttgcctaatttactggccggacacggcatggtcacagagttattgcagcatgaggtaacaccgc

SEQ ID NO: 238288 - DNA, 1175 bp, Unknown
  Bacterial polypeptide expressing nucleotide sequence isolated from the Sargasso Sea
cgagcagcttcagaacgccgcgccggtgcgccgcatcggcatggtgcccggcgaggcttccggcgatttgctggcctcgctgctgctgaaggggctgcgcgcacaactgcctgccgacatcgcctacaacggcattggcggtgcgcgcatgacggagcagggtttccagtcgaactggccgatgcacaacctgtcggtgaacggctacgtggaagtgcttggccagttgcgtgagattctcacgatccgcaaggaactcaagcagaacctgctgactgcgccccccctggcgttcatcggcgtggacgcacccgacttcaatttcaacgtcgagatcgccatgcggcaggcgggtgtgccggtggtgcacttcgtgagcccgtcgatctgggcgtggcgagcgggccgtatcaagacgatcgcccgcgccgtcgaccatatcctctgcctgttcccgttcgagccggagatttacgccaaggccggcattccggccacgtacgtcgggcatccgcttgcggacgagattccgctggtgccggacgttgagggcgctcgcacccgcctggggctgccgttgggccgcaaggtcgttgcggtgctgccgggcagccgcaattccgaagtgaagcatctcgggccgacgctgtttgcggcgatgtcgcgcatgcaggcggtcgagccggaactggcgtttgtgctgccggcggccaatgcgacgctgcgcgagcgcatcgatgccatgcgcgcggagcatccgggcctgcatctgtgggtcgtcgagggacagtcgcacgcagccatggaagcggctgacgtgatcctgctggccagcggcacggccacgctggaagcggcgctgtacaagaaaccgatggtcatcacctacaaggtgccctggttgaccgcgcagatcatgaagcgcaaaggctatctgccgtatgttgggctgccgaacatcctgtccggccgctttgtcgtgccggaactgctgcaggatgacgcgacccccgaggcactcgcgcgcgaaacgctgctgcaactcagcgaccatggcaacgccacgttcctgcgtgaacacttcacgcagatgcacctgacgcttaagcagaacatggcggagattggagcgaaagtcgttgtcgatctgctacgcagtcgcagtaagctttaag

SEQ ID NO: 238289 - DNA, 1159 bp, Unknown
  Bacterial polypeptide expressing nucleotide sequence isolated from the Sargasso Sea
atgagcaaaaaatctcaattagtgtttgcaatggtcgccggagaactctccggcgatattttaggtgcaggtttaatggctgcactgcaaaaaacacaccccaacgcccgttttatcggtattggtggacctcgaatggaagccctaggcttcgaatccctgttcgcgatggaagaattagccgtgatggggatagtcgaagtgctatcacgtttgccacgcttactccatgtgcgctcatccctgattaagtccatcaccgaacttaagcccgattgctttattggtatcgatgcaccggattttaatatcggccttgagcttaagttaaaggcgcaggggattaaaaccgttcactacgtgagcccttcggtatgggcatggcgccctaagcggatttttaaaatcgctaaggccaccaatatggtgctgtcgttattgccctttgagaaggccttttacgataagcatcaggtgccttgtacctttgttggtcataccttggccgatgatattccgttagagagtgataaagcgagcgcccgtcagttgctggcgttagatcctgaggccgaatacctcgccattttacccggctcacgcggcggtgagttaaagcaattggccgagccctttgtgaaggctgcgctacttatcaagcagcaatttcccgatattcgctttgtgacgcctttagtgaaccaaaagcgccgtgagcagtttgagcaagcattaaaagcgtatgcgccggatctggaaatccacatggtggaaggcaaatcacgcgaagtgatggccgctgccgatggcattttactggcatcgggtacggcaacacttgaggccatgctgatcaagcgccctatggtcgtcgcctatcgcgtgagtccgctgacctatcagatagcgaaaaccatgatgcaggtgaaccgtttctccctgccaaatctgttagcggggcgagatgtggtgccagagcttatccagcacgattgcaccccagagaagattgccgaagcggttggcgtagagctgaaccgcgactttacgccaatcaaagccgagtttgagcgtttacaccaaatgttgcgctgcgatgccagccaaaaagcggccgaggctgtgctagcgctcgtcgatgctaaggatgtgaactgat

SEQ ID NO: 238290 - DNA, 1171 bp, Unknown
  Bacterial polypeptide expressing nucleotide sequence isolated from the Sargasso Sea
atgataaaagacttaaataacaaccacatagttaaaatcgccttagtcgccggggaacactccggcgatattttaggtgctgatttaatccgtgctttaaagctgctgtatccgcaggctgaattttacggcataggcggtgagcgcatgaaagcggaaggctttcaggctttgtttgatatggaagagctggcggtgatgggcatagtggaagtcttaggccgcttgcctcgcctactgcaagtgcgcaaagagctgctagcgaatcttactgccacacagcctgatgtctttattggcatagatgcgccggattttaatattccggtggagcttaaactcaaagccgctggtattaaaactgtgcattatgtcagcccttcggtctgggcatggcggcaaaaacgtatttttaaaatagccaaagcgaccaacatggtgctggcgttattgccttttgaaaaagctttttacgacaagtttgctgtgccttgtagttttgttggccatacgctggctgatcaaatgcctttgcagccagataaagccgctgctaaaactgaacttggtttaaaaccagaagcgccagtgctggcgatcatgccgggcagcagaaccaatgaaatcaaattattagctgcagattacctgcttgcggcagcagagcttaaagctcagcaacctgaattgcagctgatttgtaatatggtgacagagcaaaaagcagagttgttccgtcagatcaaacagcagattgcccctgatctagcagtgcaactggaaataggcaaagcccgaacgacgctaacggcggctgatgcagtctttatcgcctcaggcacggccactttagaagccatgctggccaaaaccgctatggtggtgggctataagatgaactggctgacgcaccaaattgccaaacgcttagtgaaactgaaattcttcagcctaccgaatttattggctgatcaagctttagtgacagaactgctgcaagagcaggtcacagtgcagaacttagtcaaagctatggcacctttattacaagatcaaaatgcgcagcaagcatgtgtgggctcttttacagagctgcatcaactgatccgttgtaacgccagcgaacaagcagctgcggcaatagcaaaagtgatggaaaaccctgtatgag

SEQ ID NO: 238291 - DNA, 925 bp, Unknown
  Bacterial polypeptide expressing nucleotide sequence isolated from the Sargasso Sea
actgagatggcgcaagccgagccggccatccagctctacgtggatttcctcaaagacaacgagcgcgggatcatccgtgcctgatcccgttcgcatcggtatcgtcgccggagaggtttccggcgacattctggctgccggcctggtgcgcgagctgcaggcccgctacctggatgcgcagttcgaagggatcgccgggccgcgcatgcaggccctcggcgtgaaggcgctgttcgaaatggaagagctttccgtcatggggatcaccgaggtgctgggccgtctgccgcgcattctcaaggtccgccgcgaactgctgcgccacttcatcgccaatccgcccgacatcttcatcggggtggatgcaccggatttcaatatcggggtggagctcaaactgcgccgcgccggtatcaagacggttcactacgtcagcccctcggtgtgggcctggcgccagaaccgcattcacaagatcaaggccgccaccgacatggtgctcgccttcctgccgttcgagaaagccttctacgaccgcttcgatgccccttgccgcttcgtcggccacaccatggcggacgacattccgctggtgccggatcaggccgcggtacgcagaaccctcggcatcgacgccaaccggcgctggctggcggtgctgccgggcagccgcagtgccgaggtgggctttatgtcgcccctgtttctcgaggcctgcaagcacctgacggtgcgctatccggatctcggtttcatcgtgccgctggtcaaccagaagcggcgcgagcagttcctggccatcaaggccgagctggcgccggatctcgacatggtgctgctggaagggcagggccgtgaggcgatgatcgccgccgacgtggtgatgctggcctccggcaccgcggcgctgaagccatgctggtga

SEQ ID NO: 238292 - DNA, 1153 bp, Unknown
  Bacterial polypeptide expressing nucleotide sequence isolated from the Sargasso Sea
atgttgcgtataggtattgtcactggagagccatcgggtgatatgcttggtgccggattagtccaagaattaagtaaaaaggtaaaaagtttatcaattgaaggtataggcggtgaaaaactagcaaaaaaagatatgagtatattatttccaatggaaaaattatctgtaatgggatttacagaagtagttggaagatattttgaattaaaaagaatacaaggagaattgataaagcattttataaaaaatccacctgatatttttattggtattgatgcaccagattttaatttatttttagaaaagcaattacgtaaagcaggaattaaaacagttcattatgttagtccttcagtgtgggcatggagggccggtcgaataaagagaattaaagaatctgctgatttaattttaaatttattcccatttgagacagatatttataataaatttagtatacctaatgagtatgtaggacacccactcgcagataaattaccaacggaaccaaacacccagttagcaagggaaaagttaagtatcccgctcaataaaaaagtcattgcacttcttcctggtagtcgtttaacagaaattaagagaatcggtgttccgttacttaaagcagcattaattgcacagaataagcacaacgatcttttttttgtaagctcattagccgataagaaagcttcaaaaatttttaaagaattaaaaatgaaagttacgccaaaattgaatattagtatatattcagaaaaaactcaccgcgtcatcgaatcagcaaatataattttactcgcatctggtactgtgtcgcttgaagcaatgttactaaaaaagccaatgattgttgcgtataaactttcgtggccaacatatttcatagtaaaattattatcaaaaatacaatatgcctcattacctaatatacttgctggtgagaatattgtacccgaatgtttgcaatttaactgtagagcaaaagttttagcgtcagaactagataaattattaaattctgataagtatataaagaaagtaacaaatcattttacaaaattgtcaattggactcagaaagaaagctgattataaagcagcaaatgcaatcctaaaattggtagaaagcaataatgctaatcgatgat

SEQ ID NO: 238293 - DNA, 1159 bp, Unknown
  Bacterial polypeptide expressing nucleotide sequence isolated from the Sargasso Sea
tatgagcaaaaaatctcaattagtgtttgcaatggtcgccggagaactctccggcgatattttaggtgcgggtttgatggccgcgctgcaaaaagcacatcccaatgcccgttttgttggtattggtggacctcgtatggaagccttaggcttcgaatccctgttcgcgatggaagaattagccgtgatggggatagttgaagtgctatcgcgcctgccacgcctgctccatgtccgagcttcgttaattaagtccatcaccgagcttaagcctgattgctttatcggtattgatgcgccggatttcaatatcggtctcgagcttaaattaaaggctcaggggattaaaaccgttcactatgtgagtccttcggtgtgggcatggcggcctaagcggatctttaaaatcgccaaggcgactaatatggtgctgtcattattgcccttcgagaaagccttctacgataagcatcaagtgccttgtacctttgtcggtcatactttagccgacgacattccgcttgagagtgataaagcaagtgcgcgtcaattgctggagttagatcctgaggctgaatatctcgcgattttacctggttcgcgcggcggtgagctaaagcaattggctgagccctttgtgaaggcggcgctacttatcaagcagcaatttcccgatattcgctttgtgacgcctttagtgaatcaacagcgccgtgagcagtttgaacaagcgttaaaagattatgcgccggatttagaaattcacatggtggaaggcaagtcacgcgaagtgatggccgctgccgatggtattttactcgcctcgggtacagcgacgttagaggccatgctgattaaacgcccaatggtggtggcgtaccgcgtgagtccactgacctatcgtattgccaagagcatgatgcaggtgaatcgtttctcgctgccaaatttattagcggggcgagatgtggtaccagagcttattcagcatgattgcacgccagagaaaatagctgccgcggttggcgttgaacttaaccgcgactttgcaccaatcaaagccgagtttgaacgtttgcatcaactgctgcgttgcgatgccagccagaaggcggcagaggcggttttggctctggttgatgttaaggatgtgaactaa

SEQ ID NO: 238294 - DNA, 1810 bp, Unknown
  Bacterial polypeptide expressing nucleotide sequence isolated from the Sargasso Sea
atgtttgatgccccggtcgatttcaggtctgaagtgatttatttcctgattgttgaccgttttcacgatggtcacgatgttgctggtgatcaggagggttcggaaaaagaagaggccaaggggctttttgacaagtccaggcaagactgggggaaatactggggtggcaatctgcagggaattattaacaagattgattatttgaaggagcttggtataactgcgctttggttgtctcccctgtttgaacaggtcagcgatctgcagttcagccgtgcaccgatgcatggatattggacccgtgatttcaaacggatcaatccacgcttcgtcaaggtcggcgagtcaaccagcatttcgcagtctccaaccctcaagactcttgtggatgcctgtcatgcggctggtatcaagattgtgctggatattgtttgcaaccatagttcgcctgatatcaatggaagcaagggtgtcgtgctggatgatggtcagcccctggctgatttcaaccatgatcacaatggtttttactaccatgaaggtgaaattactgattgggaagatgaatatcagctgatccatcttgagatgatggggttggcaacatttaatgaaaaaaatattcattatcgcaattacatcaagtcggcaattcagatgtggcttgatgccggtgtcgatgccttgcgcgttgacacgctcaaacacatgccgatctggttctggcaggaattcaccacagccatgaaggctcacaagccagggctgttcatgtttggtgagtatggcttcagcaagccttgggagcaaaggtctgttgattacgccaacaacatcggcatgtccattcttgatttcggtctctgtgatggcatccgcttttgcttttctggccaggagcctggcggcttccatcaggtggaacgggtgctgagctatgaccgtgtctatcaacgtgccaatgaattggtgacgtttattgacaaccacgacatgccgcggttcctgtccattgttccggattcccgcaagctggacctggccctggttcttttaaccacgctccgtggtgttccctgtctgttctatggaacagagcagtacctgaacaatggaaccaatggtggtcaggatccctacaaccgtccaatgatggagtcctgggatacgtcaagtcactcgttcaagctggtccagactctgctggatctgcgtcaccgcaaccaggctctatccctcggatcgcaccgtacggcttggatcaatgacgatttctacctctacacccgtaattttcgcgattccgcggtgatggtgatggtcaacaagagtgatgatgaacatgttgttgatgcagaaaatattcagatgccagatggttcctacacttgtttgatcacaggctttcccgtgaacatcagcaacggtcgcctgcagggatatcgcgtacatggcaattcggccatggtgatcagtgccgagggagttccggtggaggcccccctggtggtggtgttccagatcaacggatttgagacacaacccggtcaatcaattgccattattggtgattgtgacgagctgggccattgggatcacgccaaggcttacggcatggaatacgtcaatcagaacacctggacggcaaccgtcggtttcaatggttcaggaccatccgttctcaacttcaagttcattgtgttccaggagaatggagatcccatcgtcgaatatctgatcaatcgcaagactgttcttccccaggaaggtcggattgccgttgattgtttctggaatcaggccaattgat

SEQ ID NO: 238295 - DNA, 810 bp, Unknown
  Bacterial polypeptide expressing nucleotide sequence isolated from the Sargasso Sea
catgcaatggcacggtattcctatttatttcgtagactcgccagaacattttatgcgtgaaggactatatgccaacgcatttgaagcctacgaagacaacggtgagcgctttagttttttcagtggtgccgtacttcaaaccctaaaagctatcgataaaaagccagacgttattcactgtcacgactggcatgcagccatgcttccatttttacttacccatgacaaatcagggtatttcgacagcactaaaacggtattcactatccacaatgccgctttccaaggcgttcataggctggaaactatcccgtttcttcgccatcaccctaatattctggcgcaagttcacggcggttacataaacatgctgcaaagcggcattgaatttgccacgaaggtgacaacggtgagcccaaactatgcaagagagctactcactgacttgggtagtcatggccttcatgaacgcctggtaagccgtcaagccgatctaagtggcattctgaacggatgcgactacacccagtggaacccagagacagatacattcctacctgagaactacagtgtagataatcttcaccccaaaacatcatgtaagcgagcattacaagaaaagtcaggattacctgagaatggcaatgtacctcttattggaatggtgtgccggctgactgaacaaaaaggctttggctacatactgcccattttggacgatttaattaagcacaatgttcaaatggtaattgtgggcacgggcgaccctaaagtgtgtatggaccttggcgaattcgctcaacaacaccc

SEQ ID NO: 238296 - DNA, 790 bp, Unknown
  Bacterial polypeptide expressing nucleotide sequence isolated from the Sargasso Sea
gcggatgtagggattactggtttggatagatatctagagtataaaaccgatgatcggtatgttggtaaaatagttaacgatttgggttatggtggttgtgaatttgttctcgccgtgccagagtcttggattgacgtgaatggcttggatgatttatctgacctgacaaatgagtatcgtcagaaaggacttgatttaaggatagcaactaaatacccgaaactgctcaataattatttgtatgataacggcatatataattatcgaattgtagctgtaagtggtgccctggaagctgctcctgctgcaggatatgctgatcttattgcagatttgacggccacaggaaccactttgcgtgctaataatttaaaacaaatcgaaaaaggtacagtcttaaagtcacaagcctgtcttataggtaatcctgaatctattcgtaataatagtaacaagcatgacttggcaatgaaattgattgacttgattaaatctaacattagggctgcagagtattacagattgacagctaatgtacagtgcgattctgaagaaacgttggcaagtctcgtgctgtctcacccagatatatcaggaatacatggaccaacagtgtctagattgcatagtaaatctaatacttcttggtttagtttgagcgtagtcgtatcaaaatcgaagctatcagaatgtgtgtctcagattagagactgtggaggaatcagcatcgctgcttccaagatagattacctattcaatgcagaagtggttgaaaataatcaagtgttca

SEQ ID NO: 238297 - DNA, 804 bp, Unknown
  Bacterial polypeptide expressing nucleotide sequence isolated from the Sargasso Sea
aatggttgcggcggaaaatggggcgctgaaaggggcgaaagtgggcggtatggcggatgtgatccgtgacttgccccaagcgctcgcgggtgttgagatccaagccgatgtaattatgccaagctacggatttttaacgggccttggggccaaacttatccatgagtttgaggtaagttttgccgggcgacaggagccgattaagctgtattggctggcgcaccctaaggtgcagggtgccaatatttacttgctcgagcatgggctctggcaatcgagccccgggcagatttatagccaaggcacgagcgaccgccccttcgccgatgatgcgactaagtttgcacttttgtgtgcaagcgtagccaaagccttagtggcagggcttgtgcctatgcctcagcttttacacctgcacgactggcacactggatgtttagcaatgctgcgggcgctggcgcctgagtatcaagcattgcaaagcatagaatgtgtgttttcgattcataaccttgcgctgcaggggataaggccgctgagccatgatacctcaagctttgcggcttggttccctcacttattcgcccagttagatgagggccaacgcgcccagattatcgatccccgctatccccattgcatcaatccgatgcggatggggataacgctggcggataaagtgcatctcgtctcaccgacctacgccaaggaagtgttgtttccctcccgccccgagttgggtttcttcggtggtgaaggcttggaggcggatttacaacgcaaagctgagcaggggcgagtgct

SEQ ID NO: 238298 - DNA, 466 bp, Unknown
  Bacterial polypeptide expressing nucleotide sequence isolated from the Sargasso Sea
attgaccctcatcttccagcgaaatattcctccagtgatagaagaggaaaaattttatttcaaacagggttatgataaccgtcttgcccaccttatcgaagccggatgcgatctctatctgatgccttccctgtatgagccctgtgggctgaatcagatctacagtttgcgttacgggaccctgccaatcgtccgtaaagtgggaggattgaaagataccgtggaggattacagaaatccaaaagcccacggcaatggttttatgtttgaggaaccgacagaagaggctttgatccaggtcatgaggaaagcgctgcaaacttttcagattcatcagaaaattttcaacaagatgatttctgatgcaatgaatcaacgatttctctgggaaaactcagcaaagtcataccagaacctttatgctaaggctctttccagtcaggcagttgaacgcccaagagtctaa

SEQ ID NO: 238299 - DNA, 550 bp, Unknown
  Bacterial polypeptide expressing nucleotide sequence isolated from the Sargasso Sea
atgcgtatcttgcaggcgactagcgaattcttcccttactccaaaaccggtggacttgccgacatggtcgccggcctcagcggcgcactggccgaattgagtgaagacgtcacggtggccacaccgttgtatcggggtattcgagaacaagtgcccgatctcaagccgtttggacccaaagtcattttgcctctcggtaaacagacttttaccggtcgatggtggaaagcgactgaatcgaacgggctgacacttttgtttttggagcaggaaggtttctatgatcgacctgggttatacatggcgaatggcgatggatattgggataaccccgaaagattcatgtttctcagtaaagctgtggcacaattggctggcgaatatgatgtggttcatgtgcatgactggcagacagcttttgtgccgatgctgctacgcgccagcggctctcgagtgattccacgcacagtgctcacaatccataatttggcctaccaaggccaatgcgaagcaacgcgatttgagattactaatttgccatggaattggt

SEQ ID NO: 238300 - DNA, 157 bp, Unknown
  Bacterial polypeptide expressing nucleotide sequence isolated from the Sargasso Sea
tgcccctggtacatgcagggtgaccacaccatggccgcagccctgctctacgccgatcgggtcaacgccgtgtcccccacctacgccgaggaaatccgcacggcggagtacggcgaaaagctggacgggttgctcaatttcgtctccggcaagctgc

SEQ ID NO: 238301 - DNA, 592 bp, Unknown
  Bacterial polypeptide expressing nucleotide sequence isolated from the Sargasso Sea
aactgacattccattgatcggaatggttagccgcttgacggggcttaaagggttttcattcctgattccggctctgcaggaaatccttgaaatggacctgcaatttatactgcttggcgatggagaaccgggaattgcggatgccttgaataagatcaggaaatcaggagcaggaaaattttatttcaaacagggctacgataaccgtcttgcccacctgatcgaagccgggtgcgacctctatctgatgccttccctgtatgagccctgtgggctgaatcagatctacagtttgcgttacggcaccctgccgatcgtccgtaaagtgggaggattgaaagataccgtggcggattacagaaatgcaaaagaccacggcaatggttttatgtttcaggaaccgacagaagaggctttgatccaggtcatgaggaaagcgctgaaaacatttcagagtcatcctaaaatcttcaacaagatgatttctgatgcaatgaatcaacggtttctctgggaaaactcagcaaagtcataccagaagctttattttaaggctctttccagtcagccacttgaacgccctagattctaa

SEQ ID NO: 238302 - DNA, 658 bp, Unknown
  Bacterial polypeptide expressing nucleotide sequence isolated from the Sargasso Sea
gctgcacgtcgtccacgtctccgtcgagatggcgcccatcgcgaaggttggcggcctcggcgacgtggtcaccgcgctcgcgcgcgcggttcacgaccagggcaacatggtggagatcatcctcccgaagtactcgttcttcaacatgtccccgatgctcggcgggatgcagtacgagacgcagttcgagtggggggggaccaccatcgtggtgcagcggtgcatcgtggagggcatccaggttttcttcatcgaaccccagaacggcttcttcgacgtcgggtccgtgtacggcaggaacgacgacggcgtcaagttcgactacttctgcaacgcggcgctggagttcctcacgtgcacgcagaggcaacccgacatcctgcactgccacgattggtccaccgcggaggttgcctctgcgtactggggcaactaccatcactacggactttggaagcccaaggttgtgttcaccatccacaacatgaactacgggcagatgaagatcggggaggcgagcttccactcgcagatcaccaccaccgtgtccccctcgtacgccggcgaggttgccggccaccccgcggtgaaccagaacctccacaagttccacggcgtgcgcaacggcatcgacaccgagatctggaccccgagacgg

SEQ ID NO: 238303 - DNA, 538 bp, Unknown
  Bacterial polypeptide expressing nucleotide sequence isolated from the Sargasso Sea
aatgagcaaagaacgactttatatatttgacacaacattgagagatggtgcacagacccaaggtgtacatttttcaattgatgaaaaaacaaagattgcacatgccttagatgatcttggtgttgattacatagaagggggttggccaggtgctaatccatctgatacagaattttttcaaaaaggtttagatttaaaaaactctacctttactgcttttgggatgaccaaaaaaactggaagaagtgctgaaaatgatccaggcttatcagcaattctaaattcaaatactaaatctgtttgtttagttggaaagtcatgggattttcatgttgatgttgcattaggtatatccaatgaagaaaatttagaaaatataaaagagactacaaaacattttgtcaaaaataataaagaattcatgtttgatgccgaacacttttttgatggttataaggcaaacccaaaatatgctttagcttgtgttaaagctgcttatgataatggcgctaaatggatagttctttgtgatactaat

SEQ ID NO: 238304 - DNA, 610 bp, Unknown
  Bacterial polypeptide expressing nucleotide sequence isolated from the Sargasso Sea
atgagtaaagaaagattatacatatttgacacaacacttagagatggagcacaaactcaaggcgtgcatttttcaattgatgaaaaagcaaaaattgcgcatgctttagatgatcttggtgtagattacattgaaggaggttggccaggtgctaatccgtctgatacggaattttttcagaaaggtttagatttaaagaagtctacctttaccgcttttggaatgacaaaaaaagcgggacgaagtgctgaaaatgatccaggtttgtcagcaattttaaattctaatactaaatctgtttgtttagttggaaagtcttgggattttcatgtcgatgttgcattaggaatatctaaagaggaaaatttagaaaacattaaagaaacaacaaagcattttgtaaaaaacaataaagagttcatgtttgatgcagaacatttctttgatggctacaaggcaaaccccaaatatgctttagcttgcatcaaagctgcttatgataacggagctaaatggatagttctatgtgatactaatggcggcacacttcctcatgaagtaactaagatagtaaaagaagtttctgaacacatacctgtgaaaatttagg

SEQ ID NO: 238305 - DNA, 714 bp, Unknown
  Bacterial polypeptide expressing nucleotide sequence isolated from the Sargasso Sea
tttgaaaagctggctgaaaatagatgattccgattttcatcccgactgcttcgaagattttggcggagtgaacctccttaaaggaggcatgctttcggaagatcaggtgaatacggtcagtcccaggtatgccgaggaattgaaaacccctctagtagggcatgggctgcatcctttttatcagcgtttgaaacaagatttttccggcatcctcaacggctgtgattatgggcagtggaatccagagattgaccctcatcttccaacgaattattactccagtgatagaagggggaaagtgttatgtaaaacaacattagtggaggaagcaggattgaagtatcaacctggcactccattgatcggaatggtcagccgattgacggggcagaaagggttttcactcctgatccatactctgcaggaaatccttgaaatggacctgcaattggtactgcttggcgatggagagcctggaattgcagatgccttgaaaaagatcggaaaatcaggagtaggaaaattttatttcaaacagggctatgataaccgtcttgcccacctgatcgaagccggatgcgatctctatctgatgccttccctgtatgagccctgtgggctgaatcagatctacagtttgcgttacgggaccctgccgatcgtccgtaaagtgggaggattgaaaaataccgtggtggacttcaaaaatgcaaa

SEQ ID NO: 238306 - DNA, 852 bp, Unknown
  Bacterial polypeptide expressing nucleotide sequence isolated from the Sargasso Sea
tagatctaaatggcattcagagtgggatgtatttgacaataatgatttagatgggaatggcctgccaagcataggtgaaaatggcgttgatgaatttgatgaaaaagatttttcactgaactatggaaatttaagcaacgtttataaagatgcgaatgacgacggtgttgatgattatcctgagttcaatgtacgaaattatcgttacgacctacgtgtagactgggaacccaattctgatttttcattaaacctatcccatggttttgcttgggcaaaaaacattaatattaccgggattgctcgctatctagctgacgggtggatatatagatactaccaaagtagaatgaggtggaaaaatctatttttacagtcctatttaaatagcagctactcaggtgatccatctcgtcctacaagaaaccttgcaaccggtagtatcatctacgatcgttcaaaaaagtttagtctgcaattacaacaccttaatgaatggagaggcggagacataagatttgtttggggcctagactacttcctaacaatgccagacaccagaggaaccatcctttcagataaggatcttctagacagacgagataataatgggaacggagagtctggctccccatatgtgtttgatgataaaagtgatgatacatggtacgatgatggagaaagatttacaagatggagcacagaagataattcacagtttgcgacaccggatgatgatgctgaccaggacgcagtttacggtgcaatagcggatggaatagataacgatggtgacagtgatgattttgatgaccttaatcagaatggcattccagactttgtggatgcaaa

SEQ ID NO: 238307 - DNA, 532 bp, Unknown
  Bacterial polypeptide expressing nucleotide sequence isolated from the Sargasso Sea
aatgagtaaagaaagattattcatatttgatacaacattaagagatggagcacaaactcaaggtgtgcatttttcaattgatgaaaaagcaaagatcgctcatgcattggatgctctgggtgtagattatatagaaggaggttggccaggcgctaatccgtctgatacagaattctttcagaaaggtttagatttaaaaaactctaccttcactgcttttggaatgacaaaaaaaaaaggacgaagtgctgaaaatgatccaggtttgtcagcaattttaaattctaatactaaatctgtttgtttagttgggaagtcttgggattttcatgttgatgttgctttaggaatatccaatgaagaaaatttagaaaatattaaagagacaaccaagcattttgtaaaaaataataaagagttcatgtttgatgcagaacatttctttgatggctacaaggcaaaccccaactatgctttagcttgtatcaaagctgcttatgataatggagctaaatggatagttcctttgtga

SEQ ID NO: 238308 - DNA, 329 bp, Unknown
  Bacterial polypeptide expressing nucleotide sequence isolated from the Sargasso Sea
aatgagcaaagaaagactttatatatttgatacaacattgagagatggggcccaaactcaaggtgtacacttttcaatcgacgaaaaaacaaaaattgctcatgcattagatgatcttggtgtagattatatagaaggaggttggcctggcgctaatccatctgatacagagttttttcaaaaaggtttagatttaaaaaattctattttcactgcttttggaatgactaaaaaaacaggacgaagtgccgaaaatgacccaggcttgtctgcaattttaaattcagatacaaaatctgtttgtttagtgggaaaatcttgggatttcc

SEQ ID NO: 238309 - DNA, 295 bp, Unknown
  Bacterial polypeptide expressing nucleotide sequence isolated from the Sargasso Sea
aatgagtaaagaacgattatacatatttgatacaacattgagagatggggcccaaacccaaggtgtgcatttttcaattgatgaaaaaacaaaaattgcgcatgctttagatgatcttggtgtagattatatagagggaggttggccaggtgctaatccatctgatacagaattttttcagaaaggtttagatttaaaaaactccaccttcactgcttttggaatgacaaagaaagctggacgaagtgctgaaaatgatccaggtttgtcagcgattttaaattcaaatactaaa

SEQ ID NO: 238310 - DNA, 1405 bp, Unknown
  Bacterial polypeptide expressing nucleotide sequence isolated from the Sargasso Sea
aatgcgtgtgttgtttttatgcagtgaatttgaaggtgtcattaaaaccggtggtttagccgacgcctgtcgaggtttagcattgcagatgcaaaaacttgggcatgacgtcaaagtactgatccctcgttatggcagcctctatgcagtgcctgttgaagaaagctggagttctgtttattttgctttaggtggtcatgcgcagggctgtgcagtgcgacaagttgtgaatgcggaagtaccgcttttactgatcgagcaccatgattattttggccggccgcgaccttatgacgatggtcaacaggcctatgctgacaatgcgttacgttttgctttcttttgcaaggcagccttgcagttttgtgttgatacgggctggataccggatctgatccatggccatgactggcagaccggtattgccgcctattacttaaaacagtattaccagcaggctttgcccggcactaaaatgctgtttactattcataacggtgcttatcagcaagctttatccgctcaggacagggcacaaacagaagtgtactcatccgattctatagcatgctccagtatgttggctttgggactggcgcacgcggataaggtgaatacggtcagtaaaggttatgccagtgagttactgtctgaacctgcagccaatggtttagcggctttgtatcaatcccgacttgctgatttctctggcatcttaaatggatgcgactatgaacaatgggaccctgccactgatatctatctgagttctaactacagtcagagtgaactcgaaggcaaacaggcctgtaaagagcggatgagacaaaggtatcatctggagctaagcacggcgccactttttgtactggttagccggatcaccgaacaaaaaggttttgcttacttactgcctgcactggagcagtggctcagtgatgcggatgcacaggtactaatgatggggactggggatcagatgtacgccgggcgactgcgtgcgctgaacgaaaagtttccggggcgctttgtgtttgtcgaaggttttgatgaagccttatcacaccaattggaggcagcgggtgatttttttctgatgccttctttgtttgagccttgtggcttaaaccagatttatagcctacgttatggcacagtaccgctggtgcgtttaacggggggcttaaaagacacagtacgggatttgacggacagcgagcccacaggagtaggttttgtagaacctacgatgcaggctctgcaggaagccttgaacagagctgtgaccttgtatcagcaaaagaccttatacaaagaaatacagcaacgtggtatgcaacaacgtttcggttgggctgagtctgccttgcagtatcagatgttgtaccaacaacttaagccttaa

SEQ ID NO: 238311 - DNA, 298 bp, Unknown
  Bacterial polypeptide expressing nucleotide sequence isolated from the Sargasso Sea
atgagtaaagaaagattatatatatttgatacaacattgagagatggagctcaaactcaaggtgtgcatttttcaatagatgaaaaaacaaaaattgcacatgctttagatgatctgggtgtagattatatagagggaggttggccaggagctaacccatctgatacagaattttttcaaaaaggtttagatttaaaaaattccactttcacagcattcggaatgactaaaaaagcaggacgaagtgccgaaaatgatctaggtttgtcagcaattctaaactctaataccaagtctg

SEQ ID NO: 238312 - DNA, 549 bp, Unknown
  Bacterial polypeptide expressing nucleotide sequence isolated from the Sargasso Sea
attctcaaattgcaattttaggaacaggtgatagatctttagaatctggattatggcaattagccttagattatcctggaagattttcagtgtttcttacttatgatgattctttatcaaggcttatatatggagggtctgatgcattcttaatgccaagccgatttgaaccctgcggtatcagtcaattacttgctatgagatatggatcaattccaatagtaagaagagttggaggcttggttgatactgttttgcctcatgatccagaaaataatagtggtacaggtttttgttttgatcgatttgaaccgattgacttttatactgctctagtaagatcgtgggaggcatttaggcataaagatagttggaaatcattacaactcagagcgatgagtcaagaatttagttggcagagatcggcattagaatatgaatcgatgtataaagatgtatgtggcataaaggcgccatccccggatattgctgaagttgaaaagttttcttatgggcaatctgctgatccttctcttaaaaaaatgtgat

SEQ ID NO: 238313 - DNA, 577 bp, Unknown
  Bacterial polypeptide expressing nucleotide sequence isolated from the Sargasso Sea
gccaaacttttatttagacgaaagcaaacctctttttgcctttatcggaaggctagtatatgaaaaaggaaccgatttactacctcaagttattgaaaaagcacttacgcaaaatgatatttcaattttaatattaggttcaggaaatgaagaaactcaaaatcaattaaaagcactcatttcatctcatccaaattactattatgcttttattggttatgacgaaaaactatcacacaatatttatgctggtgctgattttttattgatgccttcgcgtgttgaaccttgtggtttaaaccaaatgtatgctcttcgttatggaacaattccaattgtcagaagtattggaggtttaaaagatacaataattgatattgataaaaatggttttggtatcacgcatgatgaagttacaatcagtcaaattacaaatgcaattaatcgagctaaaaaactgtatttaaaccaatccaaatttaatagaatacgaaaacaaattatggaaattgaccattcttgggatgtttctgcaaatgaatatattacattatataaatctttactgaaaaactaa

SEQ ID NO: 238314 - DNA, 285 bp, Unknown
  Bacterial polypeptide expressing nucleotide sequence isolated from the Sargasso Sea
tcattacaacggcgggggcatttacctgattgatgccccgcatctctacgaacgtccggggagtccgtatcacgatacgaacctgtttgcctacaccgataacgtgctgcgttttgcgctgttgggatgggttggatgtgaaatggcctgcgggcttgatccattctggcgcccggatgtggtgcatgcgcacgacgggcacgcgggcctggcgcctgcgtatctggccgcgcgtggacgtccggcgaaatcggtatccaccgtgcacaacctggcgtatcaggg

SEQ ID NO: 238315 - DNA, 707 bp, Unknown
  Bacterial polypeptide expressing nucleotide sequence isolated from the Sargasso Sea
tttaaaaaataggacagaaaataagaaaattcttcagagagaaatgggtcttgaagttaatcctaaaaaatatcttttaggtatggttagtaggttggttgatcagaaaggagttgatttacttttacaagtttcaagaagacttttagcatatacagattcgcaaatagctgttttaggaactggagatagatatttagaatcaggattatggcaactggcattagattatccgggaagattttcagtattccttacctatgatgattctttatcaagacttatatatggggggtctgatgcattcttaatgccaagcagattcgaaccttgtgggattagtcaactgctcgccatgaggtatggctctgttccaatagtaagacgagttggagggttagttgacacagttttacctcatgaccctgaaaataatagcgggacaggtttttgcttcgatcgctttgagcctatagatttctatacttctttggtgaggtcttgggaagcatttagacataaagatagttgggaattattacaaaaaagagctatgagccaagagttcagttggcaaagatcagcactcgaatacgaaattatgtataaagatgtttgcggaataaaggaaccatcaccagatgttgctgaagttgaaaagttctcttatggacaatctgctgatccatcattaaaaaaaacatgac

SEQ ID NO: 238316 - DNA, 526 bp, Unknown
  Bacterial polypeptide expressing nucleotide sequence isolated from the Sargasso Sea
tatttagagtcatctttatggcaacttgcaattgagtatcctggtcgtttttctgtttttcttacttacgatgatgcattatctaggctcatttatggaggcgctgatgcattcctaatgcctagtcgctttgagccgtgtggtatcagtcagttattagctatgcgttatggtgcaattcctatcgttagaaaagtaggtggtttagtagatacagtagagccttataaccccatgaatgaaacaggttccggattttgctttgatcggtatgaaccaattgacttttatacatcattagttcgttcttgggaagcatatagacatcaaaaaagttggaagcagttgcaattaagagcaatgtcaaataaatatagttgggatagatccgcgaaggaatatgaattaatgtacaaagacgtttgtggaattaaggagccttctcctgatgcggcagaggttgaaaagttttcttatggccaagaagcagatccttcaagaaaaggcaaaaaaataaaattatagg

SEQ ID NO: 238317 - DNA, 562 bp, Unknown
  Bacterial polypeptide expressing nucleotide sequence isolated from the Sargasso Sea
cggccgttgcgctgtcttcctcacctacgacgacgacctctcccgcctgatctacgccggcagtgacgccttcctgatgcccagccgcttcgagccctgtggcatcagccagttgtatgccatgcgctacggctccgttcccgtggtgcgcaaggtgggcggcctggtggacaccgttcctccccacagccccgccgatgccagcgggaccggtttctgcttcgatcgcttcgagccggtggacttctacaccgccctggtgcgggcctgggaggcctatcgccatcgcgacagctggcaggcgttgcagaagcgcggcatgcagcaggactacagctgggaccgctccgccatcgattacgacgtcatgtaccgcgatgtctgcggtctgaaggaacccacccccgatgctgcgatggtggaacacttctgccaaggacaggcggcgtatccctcccgccctgaggatgatggactgactgtggctcccgcagcggtctccgcaccgtctggcccgagccgcaatcccctcaaccgtctcttcggccgcagggccggctga

SEQ ID NO: 238318 - DNA, 428 bp, Unknown
  Bacterial polypeptide expressing nucleotide sequence isolated from the Sargasso Sea
atatggcggatctgatgcattcttaatgcccagtagatttgaaccttgtgggataagtcaactcctggctatgagatatggctctattccaatagtaaggcgggttggaggtttagttgatacagttttacctcatgatccagaaaataatagtggtacaggtttctgctttgatcgatttgaacctatagatttctatacttctttagtaaggtcctgggaagcctttaggcataaagatagttgggaattactacaaaagagagctatgagccaagagtttagttggcaaagatcagctcttgaatacgaaattatgtataaggatgtttgcggaataaaggaaccatcaccagatgttgctgaagttgagaaattttcttatggacaatcagctgatccatctttgaaaaaaagtatgacttaaa

SEQ ID NO: 238319 - DNA, 616 bp, Unknown
  Bacterial polypeptide expressing nucleotide sequence isolated from the Sargasso Sea
taggttggttgatcagaaaggggttgacttacttctacaagtttcgagaagacttttagcatatacagattcgcaaatagttgttctagggactggagatagatatttagagtcaggattatggcaacttgcattagattacccaggaagattttctgtatttcttacctatgatgattctttatcaagacttatatatggtggctctgatgcatttttaatgccaagtagattcgaaccttgtggcattagtcaactacttgccatgagatatggttctatcccaatagtaaggcgagtgggaggtttagttgatacagttttacctcatgatccagaaaataatagcggtactggtttttgcttcgatcgctttgaacctatagatttctatacatctttagtaaggtcttgggaggcatttaggcataaagatagttgggaattgttgcaaaaaagagcaatgagtcaagagtttagttggcaaagatcggcactcgaatatgaaattatgtataaagatgtttgtggaataaaagaaccatctccagattttgttgaagttgaaaaattctcttacggacaatcggctgatccatccttaaaaaacatatga

SEQ ID NO: 238320 - DNA, 538 bp, Unknown
  Bacterial polypeptide expressing nucleotide sequence isolated from the Sargasso Sea
tttaaggactggagatagatatttagagtcaggattatggcaacttgcactagattacccaggaagattttcagtatttcttacctatgatgattctttatcaagactcatatatggtggctctgatgcattcttaatgccaagtagattcgaaccttgtggtattagtcaacttcttgcaatgaggtacggttctattccaatagtaaggcgagtaggaggtttagttgatacagttttaccacatgatccagaaaataacagtggcacgggtttttgcttcgatcgctttgaacctatagatttctatacatctttagtaaggtcttgggaggcctttaggcataaagatagttgggaattattgcaaaaaagagcaatgagtcaagagtttagttggcaaagatctgcactcgaatacgaaattatgtacaaagatgtttgtggaataaaagaaccatcaccagattttgctgaagttgaaaaattctcttacggacaatcggccgatccatctttaaaaaaaagtatgacttaa

SEQ ID NO: 238321 - DNA, 613 bp, Unknown
  Bacterial polypeptide expressing nucleotide sequence isolated from the Sargasso Sea
actagtagaccaaaaaggtgttgatttagttttacaagtttccagaagattactcgcatatacagattctcaaatcgctattttaggtacaggtgacagatctttagaatctggattatggcaattagcattggattatcccggaagattttctgtgtttcttacttatgatgattctttatcaaggctgatatatggaggatctgatgcattcttaatgccaagtagattcgaaccctgcggtatcagtcaattacttgctatgagatatggatcaattccaatagtaagaagagttggaggcttggtggatactgttttgcctcatgatccagagaataatagtggaacaggtttttgctttgatcgatttgaaccaattgacttttatactgctctagtaaggtcgtgggaggcatttaggcataaagatagttggaaatcattacagctaagagctatgagtcaagaatttagttgggagagatcggcattagaatacgaatcgatgtataaagatgtctgtggtattaaagcaccatccccggatgttgctgaagttgaaaagttttcctatgggcaatccgctgatccttctctaaaaaaaaagtga

SEQ ID NO: 238322 - DNA, 853 bp, Unknown
  Bacterial polypeptide expressing nucleotide sequence isolated from the Sargasso Sea
gattaaaacccatgaatacggggaaagtctcgaaggattacttaattacatttcaggtaaattacgtggaattcttaatggcatagatcttgatgaatggaatccagctaaagatccagttttacctgcaaaatttagtattaagaatttagaaaataggctagaaaataaaaaaattctgcagagagaaatgggtctcgaaattaatcctaaaaaatatcttttaggtatggtcagtaggttggttgatcagaaaggggttgacttacttctacaagtttcgagaagacttttagcatatacagattcgcaaatagttgttctagggactggagatagatatttagagtcaggattatggcaacttgcattagattacccaggaagattttctgtatttcttacctatgatgattctttatcaagacttatatatggtggctctgatgcatttttaatgccaagtagattcgaaccttgtggcattagtcaactacttgccatgagatatggttctatcccaatagtaaggcgagtgggaggtttagttgatacagttttacctcatgatccagaaaataatagcggtactggtttttgcttcgatcgctttgaacctatagatttctatacatctttagtaaggtcttgggaggcatttaggcataaagatagttgggaattgttgcaaaaaagagcaatgagtcaagagtttagttggcaaagatcggcactcgaatatgaaattatgtataaagatgtttgtggaataaaagaaccatctccagattttgttgaagttgaaaaattctcttacggacaatcggctgatccatccttaaaaaaaatatga

SEQ ID NO: 238323 - DNA, 451 bp, Unknown
  Bacterial polypeptide expressing nucleotide sequence isolated from the Sargasso Sea
aatgagaattcttcttgcggctgctgaatgtgctccaatgatcaaagttggagggatgggagatgtggttggttcgttacctccatctttgataaaacttggtcacgatgtaagggtaataattccaggatatgggaaattgtggagtcttttagaagtatccgatgaaccagtatttagagcgaatacaatgggcactgattttgccgtatataaagcaaaacatcccttacataattatgtaatttacctagttgggcatccaacatttgactctgaccaaatatacggaggcgaaaatgaagactggcgctttacattttttgctagtgctactgcagaatttgcttggaattgttggaaacctcaagttctccattgccatgattggcacactggaatgattcctgtgtggatgcatcaggaccctgaaattagcactgtcttcaca

SEQ ID NO: 238324 - DNA, 412 bp, Unknown
  Bacterial polypeptide expressing nucleotide sequence isolated from the Sargasso Sea
gcgacgccatccggggcgcattggcgtgcatattggtttcgatgaaagcgatgccaggcgcctgtatgccggtagcgacttcctgctcatgccttcgcgtttcgagccctgtggtctcagccagatgtacgcccagcgctacgcctcgctgcccattgcccgctgcacgggcggtctggccgacaccatcgaggatggcgtcagcggctttctcttcgacgcgcctcaggccgatgcttatcgccaggccatcgaccgcgcgctgcaggtcttcgaccatcccgagctgctggaagccatgcgctgccaggccatgagcgccccgctctactggcgccagtcggtgcagccatatgaccgcctttttcaacgtctgctaagccggaccagtgtgcaacgggcgccgcgctga

SEQ ID NO: 238325 - DNA, 502 bp, Unknown
  Bacterial polypeptide expressing nucleotide sequence isolated from the Sargasso Sea
attgcaacttgcattagattacccaggaagattttctgtatttcttacctatgatgattctttatcaagacttatatatggtggctctgatgcatttttaatgccaagtagattcgaaccttgtggtattagtcaacttcttgccatgaggtatggttctattcccatagtaaggcgagtaggaggtttagttgacacagttttaccccatgatccagaaaataatagtggcacaggtttttgcttcgatcgctttgaacctatagatttctatacatctttagtaagatcttgggaggcctttaggcataaagatagttgggaatttttgcaaaaaagagcaatgagccaagagtttagttggcaaagatccgcacttgaatacgaaattatgtataaagatgtttgtggaataaaagaaccatctccagatgttgctgaagttgagaaattttcttacggacaatcagctgatccatctttaaaaaaaagtatgacttaa

SEQ ID NO: 238326 - DNA, 1210 bp, Unknown
  Bacterial polypeptide expressing nucleotide sequence isolated from the Sargasso Sea
atggctgactttgtcttcagcagcggcgtcggcgaaggcgcgcaatacgacaacaagtctggtcgcgattatcacattccgacgcgcgggggtacggcgaagaaaccgtctctacacatcgtgcacgtggcggtggagatggcgcccatcgccaaggtgggcggcttggccgacgtcgtcaccgccatcggtcgcgccacgcaagacctcggccacatggtcgaagtcgtccttcccaagtatcaattcttcaacagctccgtcttgttgggatcgagagagtacgagacgcacttcgattggggtggaacgacgattcgcgtcgaaaagtgcacggtggagggactgcagtgctttttcatcgagcctcaaaacggcatgttccaaaccgactccgtgtacggcagaaacgacgactcggcgcggttcaactttttctgcaacgccgctttggagtttttgacgcgcaccgcgcgtcaaccggatattttgcactgccacgattggagctccgccgaggtggcgcgttcgtactgggagcactaccatcacaacggtttgaccaagcccaagatcgcgtttacgattcacaacatgaattacggccaagccaagctggccgaggcggtgtaccactctcagatcacgaccacggtgtcgccgtcgtacgccggcgaggtgtcgggaagctccgttatcggcgataacggtcacaaattcaccggcattcgcaacggcatcgatcccgacatttgggatcccgagacggatggtttcgttccgttgaaatacgatgcgtcgagcgtggagaagggtaaggctgccgcgcgcgctgaacttcgcaatcgtctcgggatgacgggttgggacgataagccgatcgtcggcgtcgtctctcgtctcaccgcgcaaaagggtgtgcacttgatcaagcacgccgcgcatcacaccctctcgcgcggcggtcaattcgtgctcctcggcagcgcgcccgatccgaagattcagggtgaattcaacgccctcgcgaacgatctcgcgggcgataactctggattcttttttgcctttgacgaaccgttatcgcacctcatgtacgcgggatgcgacgtcgtcctcgtgccctccatgtttgaaccgtgcggattgacgcagatgatttccatgcgatacggcgcgattccccgtcgtccgagccaccggtggattg

SEQ ID NO: 238327 - DNA, 844 bp, Unknown
  Bacterial polypeptide expressing nucleotide sequence isolated from the Sargasso Sea
tatgggggaaagccttgaaggattacttaattacatttcaggtaaattaaggggaattcttaatggtatagatcttgatgaatggaatccagccaaagatccagttttacctgcaaaatttagtattaaaaatttagaaaataggctagaaaataaaaaaattctgcagagagaaatgggtctcgaagttaaccctaaaaaataccttttaggaatggtcagtaggttagttgatcagaaaggggttgacttacttctacaagtttcaagaagacttctagcatatacagattcgcaaatagttgttttagggactggagatagatatttagagtcaggattatggcaacttgcattagattacccaggaagattttctgtatttcttacctatgatgattctttatcaagacttatatatggtggctctgatgcatttttaatgccaagtagatttgaaccttgtggtattagtcaactgcttgctatgagatatggttcaattccaatagtaaggcgagtaggaggtttagttgacacagttttacctcatgatccagaaaataatagtggcactggtttttgcttcgatcgctttgaacctatagatttttatacatctttagtaaggtcttgggaggcctttaggcatagagatagttgggaattattgcaaaaaagagcaatgagccaagagtttagttggcaaagatccgcactcgaatacgaaattatgtataaagatgtttgtggaataaaagaaccatctccagattttgctgaagttgaaaagttctcttacggacaatctgctgatccatctttaaaaaaaagtatgacttaa

SEQ ID NO: 238328 - DNA, 295 bp, Unknown
  Bacterial polypeptide expressing nucleotide sequence isolated from the Sargasso Sea
atgcagatcgtgttcgtctcgagcgaggtggcgccgtggtctaagactggtggactcgcggacgtgtgcggttctttgccgcaggcgctcgtcgcgcgcggacaccgcgtcatggtgatcgcgccgagatatcaaaatggatccaaatcggacgtgttgtatgatggtgcattcgatacgtgcgtcaaatcgaaggttggatgctttggtggcgagcaagaggtgggattctttcatcaaatgaagaatgacgtggattacgtctttgtcgatcacccgtcgttccatcgaaagg

SEQ ID NO: 238329 - DNA, 970 bp, Unknown
  Bacterial polypeptide expressing nucleotide sequence isolated from the Sargasso Sea
ctgttcgttgcctcggaagttgaggggcttgtgaagaccgggggtctggctgacgtggccagagccctgccgctgtacctggcccagaaggggcatgatgtcaggatcatgctgcccttctacaagacgataaagcgacgggatgaggccaaacagctggtctcgcgctggctgccaacccacccgggcctgccggatatcggctatcgcatctatcagatggatctggagggagtctgcgtctatctgctcgactgcccgcagtacttcgatcgcccccagctctacgccgagaacaaccaggcctatccggacaacggcgagcgcttcgcctttctggccgcggctgcgctgcacgccagcgaacagctcgcctttgctcccgacatagtgcactgcaacgactggcacaccggcctgctgccgctgctgctgaaaacccgtcacgcccacaaccccttcttccagcacacccgcagcgtgatcagcattcacaacgcggcctttcagggggtattcgagcgccagcagttctgggccgtgcccgagattgccgactacgaacagcgcatcagctacgactacggccacgtcaacctgctcaagtgcggcgtgctctatgccgacaagatcaacgccgtcagccccaactatgccagcgaattgctgactcaccttggtgcccacggcatggccagcatcttccagcaacgggcggcggatctgcgcggcatcctcaacggctgtgactatcaggactgggatccggcgttcgacgactttctgccggctacctatgacgtcgacaaccttgccggcaagcgcatctgcaagcagagcctgcaacaggagaccggcctgccagtggtggatctgcccatctatggcatggtgtgccggctgaccgagcagaagggtgttcacctgctgctgccagtgctggacaagtttctgcatcacaaggtgcagg

SEQ ID NO: 238330 - DNA, 1024 bp, Unknown
  Bacterial polypeptide expressing nucleotide sequence isolated from the Sargasso Sea
tgtcacgactggcatgcggccatgctgccgtttttacttacccacgacaaatctgggtattttgacggtactaaaaccatattcactattcataacgcggcttttcaaggcgtgcataagcttgagagcattccctttcttcgccatcatccaaacattctggcgcaagtgcacggcggttacatcaatatgctgcagagcgggattgagtttgccacgaaagtgacaaccgtaagccctaactatgcaagcgagttactcactgacctgggtagtcatggcctgcacgagcggcttgtaaatcgtcaagccgacttaagcggtattcttaacggatgtgactacacgcagtggaaccccgagacagatacattcctacctgagaattacagtgtagagaatcttcatccaaagaccgcatgtaaacgagcattacaggagaagtcgggattacctgagaatggcaacgtaccgcttattggaatggtgtgccggctgactgaacaaaaaggctttggctacatactgcccattttggacgatttaattaagcacaatgttcaaatggtaattgtgggcacgggcgaccctaaagtgtgtatggaccttggcgaattcgctcaacaacaccctgaccaattcgcgtttataaatgggtttagttccgaacatgcccatttggtagaagccggcgctgatttcttcctaatgccttctcagtttgagccgtgcggattgaaccagatgtacagcttagcttatggaaccatccccatcgtacgttcggtaggcggactcaaagacacggttatcgattacagcaacgatagtgaaggtacgggttttgtgtttgatgatcctacgccatatgcactgctatcttgcattcgtcgagctctgctggcgttctacgaagatgccggaaaattcagagcaatgcagcaacggggtatgcgaacgcgattcacatgggaagcagcggcgaagaattaccagcaactatacgtttcaaccctcacctaaa

SEQ ID NO: 238331 - DNA, 862 bp, Unknown
  Bacterial polypeptide expressing nucleotide sequence isolated from the Sargasso Sea
aacggccagatttcgttcctgaaggcagggttgtactacgcagaccacattacggcagtgagtccaacttacgcgcgggagattaccgagccgcagtttgcctatggtatggaaggtctgttgcagcagcgtcatcgggaaggacggctttccggcgtgctgaacggtgtggatgaaaaaatctggagcccggaaaccgacctgctgctggcgtcgcgctatacgcgtgacacgctggaagaaaaggcggagaacaaacgtcagctacagatcgcgatgggacttaaggttaacgacaaagtgcctctgtttgccgtagtcagccgtctgaccagtcagaaagggttggatctggtgttggaggctctgccgggtctgttagagcagggggggcaactggcgttacttggcgcgggcgatccagtgttgcaggaaggtttcctcgccgcagcggcggaacatccggggcaagtgggcgtgcagattggctatcacgaagccttctcgcaccgcatcatggggggggccgatgtgatattggttcccagccgttttgagccatgtggcttaacgcagttgtatggactgaagtacggcacgctgccgctggtgcggcgcaccggtgggctggctgatacggtctctgacagttcgctggaaaacctggcggacggtatcgccagtgggtttgtatttgaagatagtaatgcctggtcgctactacgtgcgatccggcgtgctttcgtattgtggtcccggccttcgctgtggcggtttgtacaacgtcaggccatgaccatggattttagctggcaagtcgcggcgaagtcataccgtgagctttactatcgcttgaaataga

SEQ ID NO: 238332 - DNA, 583 bp, Unknown
  Bacterial polypeptide expressing nucleotide sequence isolated from the Sargasso Sea
gatgcgcatcctctttgctgcggccgaatgcgcaccgatggtgaaagtcggcggcatgggggatgtggtgggttcactgccccctgctttggctgagttaggtcacgatgtccgcgtgatcatgccggggtacgggaagctctggtctcagctggacatacctgctgaaccgatctggcgagcccagaccatgggcaccgacttcgcggtctatgagacccggcaccccaagactggtctgaccatctatttgctcggtcatcctgtctttgacggtgagcgcatttatggcggtgaagacgaggactggcgcttcacgttcttcgctagcgccacctccgaatttgcttggaacgtctggaagccccaggtgctccattgccacgattggcataccggcatgatcccggtgtggatgcaccaggatcctgagatcagtacggtcttcacgatccacaacctcaagtaccaaggcccttggcgctggaaactcgagcgcatgacctggtgcccctggtacatgcaaggtgaccacaccatggcggccgctcttttgtacgccgatcgggtcaatgctgtttca

SEQ ID NO: 238333 - DNA, 805 bp, Unknown
  Bacterial polypeptide expressing nucleotide sequence isolated from the Sargasso Sea
atgagaattcttcttgccgctgctgaatgtgctccaatgatcaaagttggaggtatgggagatgtggttggttcgttgcctccatctttgataaaacttggtcacgatgtaagggtaataattccaggatatggaaaattgtggagtcttttagaggtatcgaacgaaccagtctttagagcaaatacaatgggcactgattttgcggtatatgaagcaaaacatctcattcacaattatgtgatttacctagtgggtcatccaacatttgactctgaccaaatatatggaggcgaaaatgaggactggcgctttacattttttgctagtgccactgcagaatttgcctggaattgttggaaacctcaagttctccattgccatgattggcacactggaatgattcctgtgtggatgcatcaggatcccgaaattagtactgtcttcacaattcataatttaaaatatcaaggcccttggaggtggaaacttgaaaaaatgacttggtgtccttggtatatgcatggagaccacacgatggctgcagcaatgttgtacgcagatagggtcaatgctgtttctccgacttatgcagatgagattaaaacccatgaatacggggaaagcctcgaaggattacttaattacatttcaggtaaattaaggggaattcttaatggcatagatcttgatgaatggaatccagccaaagatccagttttacctgcacaattcagtattaagaatttagaaaataggctagaaaataaaaaaattctgcagagagaaatgggtctcgaagtta

SEQ ID NO: 238334 - DNA, 710 bp, Unknown
  Bacterial polypeptide expressing nucleotide sequence isolated from the Sargasso Sea
gcatgcgggcctcacgccggcttatctggccgcccgcggcaaccccgccaggtcagtgtttacggtgcacaacattgcctatcaggggttgttcctcgcccggcatatggcggagatcgctttaccgtggtcattcttccagatgcatggggtggagtttaaaggacagatctccttccttaagtcgggcctctatttcgctgaccatatcaccaccgtcagcccgacgtatgcccgtgaaattaccgaaccgcagtacgcgttcggtctggaagagttgctgcggcaacgtcagcgggaagggcgactgtcggggatccttaacggcgtcgacgaaagcatctgggatccgcgccgcgatccgctgctggctgcgccttacgaccggaactcgctggctgagaaagcgaagaacaagcagcagctgcagacgacgctggggctgaaggaggacggccgggcgctgttgttcaccgtcgtgagccggctcaccagccagaaggggctggatctgctccttggcacactgccgggaatcattgcgcagggagggcagctggcgctactgggatccggcgacccggatttgcaggcccgttttcttgccgctgcggcgcaatactccgggcaggtgagtatccggatcggttacgacgaggcgctgtcgcatcagatgattggcggcgccgacgtcatcctggtgcccagcc

SEQ ID NO: 238335 - DNA, 880 bp, Unknown
  Bacterial polypeptide expressing nucleotide sequence isolated from the Sargasso Sea
ctgtttgctgctgctgaatgcgccccaatgataaaggttggaggtatgggtgatgttgttggttcattacctcctgcgcttaaaaaacttggacatgatgttcgattaataattccagggtatggaaaactatggaccttgatggatattgctcctgaacctatctttcggggcaatacaatgggtgttgacttcgctgtttttgaaacaaggcatccctctaatggattgccaatttatttagttggacatccatgtttcgattctgagcgtatttacggtggagaagatgaagattggagatttactttttttgctagtgcagtttctgaatttgcatggaactcatggaaaccacaagtcttgcattgtcatgattggcatactggaatgatcccagtttggatgcatcaagacccagaaatcagcacggtatttactattcataatctcaagtatcaaggcccatggagatggaaacttgatcaaataacttggtgcccatggtatatgcatggagatcacaccatggcatcagcaatgttgtatgccgatagagtgaatgcagtatctccaacttattcgagagaaattcgaacatctgaatatggagaaaaattagaaggacttttaaattatatttctgggaaattacgtggaatattaaatggagttgatctggatgcgtggaatccagcaacggataattcattgccagctaaatttaatgtagataatatctctggtagagcaattaataaaagagtccttcaagaaagaatgggacttgaagtgaatccagataaatatctaatgggaatggttggtaggcttgttgatcaaaaaggtattgaccttctactacaagttgctaataggc

SEQ ID NO: 238336 - DNA, 652 bp, Unknown
  Bacterial polypeptide expressing nucleotide sequence isolated from the Sargasso Sea
aatgcgaattcttcttgccgctgctgaatgtgctccaatgatcaaagttggaggtatgggagatgtggttggttcgttacctccatctttgataaaacttggtcacgatgtaagggtaataattccaggatatgggaaattatggagtcttttagaggtatctaacgaaccagtctttagagcaaatacgatgggcactgatttcgccgtttatgaagcaaaacatcccattcataattatgtgatttacctagtgggtcatccaacatttgactctgaccaaatatacggaggtgaaaatgaggactggcgctttacattttttgcaagtgccactgcagaatttgcttggaattgttggaaacctcaagttctccattgccatgattggcatactggaatgattcctgtatggatgcatcaagaccctgaaattagcactgtcttcacaattcataatttaaaataccaaggcccttggagatggaaactagaaaaaatgacttggtgtccttggtatatgcatggagaccatacaatggctgcggcaatgttgtacgcagatagagtaaatgctgtttctcctacttatgcagatgaaattaaaacccatgaatacggggaaagccttgaaggattacttaattacatt

SEQ ID NO: 238337 - DNA, 625 bp, Unknown
  Bacterial polypeptide expressing nucleotide sequence isolated from the Sargasso Sea
gatgcgcatcctcttcgccgctgctgaatgcgcgccgatggtgaaagtcggtggcatgggcgatgtggtcggctcactgccgcccgctctggctgaactgggccacgacgttcggatcatcatgccgggttacggcaagctctggtccagcctgcaggtgagcagcgaacccatctggcgggcccagaccatgggcacggaattcgctgtgttcgagacccgtcaccccaccaacggcctcaccatctatctggtgggccatccgacctttgatggcgaacgcatctacggcggtgaggacgaagactggcgcttcaccttcttcgccagtgccacctccgagttcgcctggaacatgtggaagccccaggtgctgcactgccatgactggcacaccggcatgattccggtgtggatgcaccaggaccctgagatcagcacggtcttcaccattcacaacctcaagtaccagggcccctggcgctggaagctcgagcgcatgacctggtgcccctggtacatgcagggcgatcacaccatggcggcggctctgctttatgccgaccgggtcaatgctgtctcccccacctatgccccaggagatccgcactgccgaatacggcga

SEQ ID NO: 238338 - DNA, 895 bp, Unknown
  Bacterial polypeptide expressing nucleotide sequence isolated from the Sargasso Sea
gatgattcctgtatggatgcatcagacccccgaaattagcactgtcttcacaattcataatttaaaatatcaaggcccttggagatggaaactagaaaaaatgacttggtgtccttggtatatgcatggagaccacactatggctgcggcaatgttgtacgcagatagagtgaatgctgtttctccgacttatgcagatgaaattaaaacccacgaatacggggaaagtcttgaaggattacttaattacgtctcaggtaaattaaggggaattcttaatggcatagatcttgatgaatggaatccagccaaagatccagttttacccgcaaaatttagtattaagaatttagaaaataggcaagaaaataaaaaaattctgcagagagaaatgggtcttgaagttaatcctaaaaaatatctcttaggtatggttagtaggttagttgatcagaaaggggttgacttacttctacaagtttcgagaagacttttagcctatacagattctcaaatagttgttttagggactggagatagatatttagagtctggattatggcaactggcattagattacccaggaagattttcagtatttcttacatatgatgattctttatcaaggcttatatatggcggatctgatgcattcttaatgcctagtagatttgaaccttgtggtattagtcaactcctggctatgagatatggctctattccaatagtaaggcgagttggaggtttagttgatacagttttacctcatgatccagaaaataatagtggtacaggtttctgctttgatcgctttgagcctatagatttctatacttctttagtaaggtcctgggaagcctttaggcataaagatagttgggaattactgcaaaaa

SEQ ID NO: 238339 - DNA, 778 bp, Unknown
  Bacterial polypeptide expressing nucleotide sequence isolated from the Sargasso Sea
ccaccgggttcagtatggcatggggctggagggcctgatcgcccagcgcgccgaatgcgtcagcggcatcgtcaacggtatcgaccccgccatctggagcccaaaggccgaccccgccctgcccgcccccttcaccgtcgacacgctgaacaaccgtatcgccaacaagcgtgcagtcgagcaggcgttcgggctggacgaggatgacagcccgatcttcaccgtcatcagccgcctgacctggcaaaagggcatggacgtgttggtcgaggtgatcgacgatctggtggcgctgggcggacggctggtcgtgctgggcaccggcgacccggcgctggagatcgccttcgccaccgccgcccttcgccatcccggccgcgtcgccgtgcgcatcggctatgacgagccggtctcgcacctgctccagggtggctgcgatgcgatcgtcatcccttcgcgattcgagccgtgcgggctgacccagctttatgcgctcgcctatggctgcgttcccgtggtcgcgcgcaccggcgggctggccgatacgatcatcgacgccaatgaggccgcgctggccatgggcgtcgcgaccgggctccagttcgatactgtcaccgcggacaatatcgtcgccgtgctgcgtcgcactatgagactctatgccgaccaagaccaatggcgtaccattcaggtcaatggcatgaacgccgactatagctggcaccatagcggccgccactatgccgaactctatcgatccgtgctggggaacccatga

SEQ ID NO: 238340 - DNA, 865 bp, Unknown
  Bacterial polypeptide expressing nucleotide sequence isolated from the Sargasso Sea
atgagaattcttcttgccgctgccgaatgtgctccaatgatcaaagttggaggtatgggagatgtggttggttcgttgcctccatctttgataaaacttggtcacgatgtaagggtaataattccaggatatggaaaattgtggagtcttttagaggtatcgaatgaaccagtctttagagcaaatacaatgggcactgattttgccgtatataaagcaaaacatcccattcataattatgtgatttacctagtgggtcatccaacatttgactctgaccaaatatacggaggcgaaaatgaggactggcgctttacattttttgccagtgccactgcagaatttgcctggaattgttggaaacctcaagttctccattgccatgattggcacactggaatgattcccgtctggatgcatcaggacccagaaattagtactgtcttcactattcataatttaaaataccaaggcccttggagatggaaacttgaaaaaatgacttggtgtccttggtatatgcatggagaccacacaatggctgcggcaatgttgtacgcagatagggtcaatgctgtttctccgacttatgcagatgaaattaaaacccatgaatacggggaaagcctcgaaggattacttagttacatatcaggtaaattacgaggtattcttaatggtatagatctagatgaatggaatccagccaaagatccagttttgccagctaaatttagtattaagaatttagaaaagaggagtgaaaataagaaaatacttcagagagaaatgggtcttgaagttaatcctaaaaaatatcttttagggatggttagtaggttgattgatcaaacaaggagttgat

SEQ ID NO: 238341 - DNA, 505 bp, Unknown
  Bacterial polypeptide expressing nucleotide sequence isolated from the Sargasso Sea
aatgcaggtcttacatgtatgttcagagatgttcccgctgttaaaaaccggcggtctggcggatgtgatcggcgcgctacctgcggcgcaaatcgctgaaggtattgatacgcgcgtgctgctgccggcgttcccggacattcgccgtggcgtcaccgatgcgcaggtggtgacgcggcgggatacttttgccggacgcatgacgctgctgtttggtcactataacggcgtggggatctatttgattgatgccccgcatctctacgaccgcccagggagcccttaccacgatactaaccaacatgcttacaccgacaacgtgctgcgttttgcgctgctgggttgggtaggtagcgagatggcctgcgggctggatcctttctggcgtcctgatgtcgtgcatgctcacgactggcatgcgggcctgactccagcctatctggccgcgcgtggacgaccggcgaaatcggtctttacggtacacaatctggcctatcaggggatg

SEQ ID NO: 238342 - DNA, 505 bp, Unknown
  Bacterial polypeptide expressing nucleotide sequence isolated from the Sargasso Sea
atgagaatccttcttgccgctgctgaatgtgctccaatgatcaaagttggaggtatgggagatgtggttggttcattacctccatctttgatcaaacttggtcacgatgtaagggtaataattccaggctatggaaaattatggagtctcttagatgtatcgaatgaaccagtctttaaagcaaatacaatggggactgatttcgctgtgtacgaagccaagcatccaatacataattatgtgatttacctggttggtcatccaacatttgactctgaccaaatatatggaggtgagaatgaggattggcgctttacattttttgctagtgctactgcagaatttgcttggaattgttggaaacctcaagttctacattgccatgattggcacactggaatgattccagtttggatgcatcaggaccctgatattagtactgttttcacaattcataatttgaaatatcaaggcccctggagatggaaactagaaaaaatgactt

SEQ ID NO: 238343 - DNA, 607 bp, Unknown
  Bacterial polypeptide expressing nucleotide sequence isolated from the Sargasso Sea
aatgagaattcttcttgccgctgctgaatgtgctccaatgatcaaagttggaggtatgggagatgtggtcggttctttgcctccatctttgataaaacttggtcacgatgtaagggtaataattccaggatatggaaaattgtggagtcttttagaggtatcgaatgaaccaatctatagagcaaatacaatgggtactgattttgccgtatataaagcaaaacatcccattcataattatgtgatttacctagtgggtcatccaacatttgactctgaccaaatatacggaggcgaaaatgaggattggcgatttacattttttgctagtgccactgcagaatttgcttggaattgttggaagcctcaagttctccattgccatgattggcacactgggatgattcctgtgtggatgcatcaggaccctgaaattagtactgttttcacaattcataatttaaaataccaaggcccttggaggtggaaacttgaaaaaatgacttggtgtccttggtatatgcatggagatcacacaatggctgcggcaatgttgtatgcagatagggtcaatgctgtttctccgacttatgcagatgaaaattaa

SEQ ID NO: 238344 - DNA, 845 bp, Unknown
  Bacterial polypeptide expressing nucleotide sequence isolated from the Sargasso Sea
gttgtacgcagatagggtcaatgctgtttctcctacttatgcagatgaaattaaaacccatgaatatggggaaagccttgaaggattacttaattacatttcaggtaaattaagaggaattcttaatggcatagatcttgatgaatggaatccagccaaagacccagttttaccagcaaaatttagtattaagaatttagaaaataggctagaaaataaaaaaattctgcagagagaaatgggtctcgaagttaatcctaaaaagtatcttttaggtatggtcagtaggttagttgatcaaaaaggggttgacttacttctacaagtttcaagaagacttttagcatatacagattctcaaatagctgtcttagggactggagatagatatttagagtcaggattatggcaacttgcattagattacccgggaagattttctgtatttcttacttatgatgattctctatcaagacttatatatggtggctctgatgcatttttaatgccaagtaggtttgaaccttgtggcattagtcaactacttgctatgagatatggttctattccaatagtaaggcgtgtaggaggtttagttgacacagttttacctcatgatccagaaaataattgtggcactggtttttgcttcgatcgctttgaaccaatagatttttatacatctttagtaaggtcttgggaggcctttagacataaagatagttgggaattattgcaaaaaagagcaatgagccaagagtttagttggcaaagatccgctctcgaatacgaaattatgtataaggatgtttgtggaataaaagaaccatcaccagatgttgctg

SEQ ID NO: 238345 - DNA, 496 bp, Unknown
  Bacterial polypeptide expressing nucleotide sequence isolated from the Sargasso Sea
ctgccgggcctgcttgagcagggtgggcaactggcgctgcttggcgcaggggacccggtactccaggaaggtttcctcgctgcggccgccgagcatccgggcaaagtcggcgtgcagattggttatcacgaggccttctcacaccgcatcatggggggcgccgacgtgattctggttcccagccgttttgagccctgtggcttaacacaactgtatggcctgaagtacggcacgctgccgctggtgcggcgtaccggtggtctggcggataccgtgaccgacagttcgctggaaaatctggccgatggcgtggccagcggttttgtctttgaggacagcaatgcactatcgctgctgcgggcaattcggcgcgcgttcgtgctgtggtcgcgcccgtcgctctggcgttacgttcagcgtcaggcgatgaatatggattttagctggcaggtcgcggcgcactcttatcgcgaactttatcaacgcttgctgtaac

SEQ ID NO: 238346 - DNA, 1333 bp, Unknown
  Bacterial polypeptide expressing nucleotide sequence isolated from the Sargasso Sea
tcttcttgccgctgctgaatgtgctccaatgatcaaagttggaggtatgggagatgtggtaggttcgttacctccatctttgataaaactaggtcacgatgtaagggtaataattccaggatatgggaaattgtggagccttttagatatatcaaatgaaccagtctttagagcaaacactatgggaactgattttgccatctatgaagcaaaacatcccatacataattatgtgatttacctcgtgggtcatccaacatttgactctgaacaaatatatggaggtgaaaatgaggattggcgctttacgttttttgctagcgctactgcagaatttgcttggaattgttggaagcctcaagttcttcattgccatgattggcatactggaatgattccagtatggatgcatcaggaccccgaaattagtactgttttcacaattcataatttaaaatatcaaggtccttggaggtggaaactagaaaaaatgacttggtgtccttggtatatgcatggagaccacacaatggctgcagcaatgttgtatgcagatagagtaaatgctgtttctccaacttatgcagatgaaattaaaacccatgaatacggggaaagccttgatggattacttaattacatatcaggtaaattacggggtattcttaatggcatagatattgatgaatggaatccagctaaagatccagttttacccgcaaaatttagtattaagaatttagaaaataggcaagaaaataagaaaattcttcagaaagaaatgggtcttgaagttgatcctaaaaaatatctcttaggtatggtaagtaggctggttgatcaaaaaggagttgacttacttttacaagtttcaagaagacttttagcctatacagattctcaaataactgttttagggactggagacagatatttagagtctggattatggcaactggcattagattacccaggaagattctcggtatttcttacctatgatgattctttatcaaggcttatctatggtggctctgatgcattcttaatgccaagtagattcgaaccttgtggcattagtcaactccttgctatgaggtatggctctatcccaatagttaggcgagttggaggtttagttgatacagttttacctcatgacccacaaaataatagtgggacgggtttttgctttgatcgctttgaacctatagatttctatacctctttagtaaggtcttgggaagcctttagacacaaagatagttgggaattacttcaaaaaagagctatgagccaagtttttagttggcaaagatcagctctcgaatat

SEQ ID NO: 238347 - DNA, 961 bp, Unknown
  Bacterial polypeptide expressing nucleotide sequence isolated from the Sargasso Sea
aatgactttgtgtccttggtatatgcatggagaccacactatggctgcggcaatgttgtatgcagatagggtcaatgctgtttctccgacttatgcagatgaaattaaaactcatgaatacggggaaagtcttgaaggattacttaattacatttcaggtaaattaaggggaattcttaatggcatagatcttgatgaatggaatccagccaaagatccagttttaccagcaaaattcagtattaagaatttagaaaatagactagaaaataaaaaaatcctgcagagagaaatgggtcttgaagttgattctaaaaaatatcttttaggtatggtcagtaggttagttgatcagaaaggggttgacttgcttttacaagtttcaagaagactattagcttatacagattctcaaattgctgttttagggactggagatagatatttagagtcaggattatggcaactggcattagattacccaggaagattctcagtatttcttacctatgatgattctttatcaaggcttatctatggtggctcagatgcatttttaatgccaagtagatttgaaccttgtggtattagtcaacttctcgctatgagatatggctctattccaatagttaggcgagttggaggtttagttgatacagttttacctcatgacccagaaaataataatggtacgggtttttgcttcgatcgatttgaacctatagatttctatacatctttagtaaggtcatgggaagcctttaggcataaagatagttgggaattacttcaaaaaagagccatgagccaagagtttagttggcaaagatcagctcgtgaatacgaagttatgtataaggatgtttgcggaataaaagaaccatcgccagatgttgctgaagttgaaaaattttcttacggacaatcagctgatccatctttaaaaaaaagtatgacttaa

SEQ ID NO: 238348 - DNA, 1453 bp, Unknown
  Bacterial polypeptide expressing nucleotide sequence isolated from the Sargasso Sea
aatgagaattcttcttgccgctgctgaatgtgctccaatgatcaaagttggaggtatgggagatgtggttggatcattacctccatcgttgataaaacttggtcacgatgtaagggtaataattccaggttatgggaaattgtggagtcttttagaggtgtcgaatgaaccagtctttagagcaaatacaatgggtactgatttctctgtatttgaagcaaaacatcccattcataattatgtgatttacttggtgggtcatccaacatttgactctgaccaaatatacggaggcgaaaatgaggactggcgttttacattttttgcaagtgccactgcagaatttgcctggaattgttggaaacctcaagttctccattgccatgattggcacactgggatgattcctgtgtggatgcatcaggatcccgaaattagcactgtcttcacaattcataatttaaaatatcaaggcccttggagatggaaactagaaaaaatgacttggtgtccttggtatatgcatggagaccacacaatggctgcggcaatgttgtacgcagatagagtaaatgctgtttctccgacttatgcagatgaaattaaaacttatgaatatggggaaagtcttgaaggattacttaattacatttcaggtaaattacggggaattcttaatggcatagatcttgatgaatggaatccagccaaagatccagttttacccgcaaaatttagtatgaagaatttagaaaatagactagaaaataaaaaaattctgcagagagaaatgggtcttgaagttaatccaaaaaaatacctcttaggtatggttagtaggttagttgatcagaaaggggttgacttacttctacaagtttcaagaagacttttagcctatacagattctcaaatagctgttttagggactggagatagatatttagagtctggattatggcaactggcattagattacccaggaagattttcagtatttcttacatatgatgattctttatcaaggcttatatatggtggatctgatgcattcttaatgcccagtagatttgaaccttgtggtattagtcaactcctagcgatgagatatggctctattcccatagtaaggcgagttggaggtttagttgatacagttttacctcatgatccagaaaataatagtggtacaggtttctgctttgatcgctttgaacctatagatttctatacatctttagtaagatcttgggaggcctttaggcataaagatagttgggaattattgcaaaaaagagcaatgagccaagagtttagttggcaaagatccgcactcgaatacgaaattatgtataaggatgtttgtggaatcaaagaaccatctccagattttgctgaagttgaaaaattctcttatggacaatcagctgatccatctttaaaaaaagtatga

SEQ ID NO: 238349 - DNA, 810 bp, Unknown
  Bacterial polypeptide expressing nucleotide sequence isolated from the Sargasso Sea
tggaaggattgcttcaaggtcgcaccaacagactcgacggcatcgccaacggcatagacatggacgagtggaatccagaggcggacgtcgactgcgaggcgccattttccgtggttgacttgtctggcaagctggagtgtaagcgcgcccttcaaaaagaactcggtttaccgcaacgcgacgatgtccctttgatgggtttcattggacgcttggattggcaaaagggtccggacctcctccaaaacgcgcttcacgacatgatgcgcgaggatgtgcaagtggtgatgctgggaagcggtttgcccgaactcgaggacttcatgcgatgggcagaggaaacgtacaaggataagttccgcggttgggtcggtttctccgttcccatggcgcaccgcatcaccgcggggtgcgatatgttgctcatgccctcgagatttgaaccgtgcggattgaaccaactgtacgccatgcgatacggcacgttgccgatcgcgcacgccacggggggattgaaggataccatcacgccgcacaacgcgttcggggacgccgacaaagtgctcgcgggcacggcggatatggacgcgggcgagggcgtcggcacgggctggttattcaatgaaatgaacgccgacgcgctcatgtgggcgattcgctccgcgtgcgatgtctaccgcaccaatccgaacatgtggcgcgcgatgcaaacgcaagcgatgacgcaagacttatcttgggataacgcggcgaagaagtgggaaaaggttttcgagtggtcgaaaatcgacccgccgcacgccaactaga

SEQ ID NO: 238350 - DNA, 895 bp, Unknown
  Bacterial polypeptide expressing nucleotide sequence isolated from the Sargasso Sea
gcagatagggttaatgcagtttctccgacttatgcagatgaaattaaaacccatgaatacggggaaagccttgaaggattacttaattacatttcaggtaaattaaggggaattcttaatggcatagatcttgatgaatggaatccagcaaaagatccagttttacctgcaaaatttagtactaagaatttagaaaataggctagaaaataagaaaattctgcagagagaaatgggtcttgaagttaatcctaaaaaatatcttttaggtatggttagtaggttagttgatcagaaaggggttgacttacttctacaagtgtcaagaagacttttagcatatacagattcgcaaatagttgttcttgggactggagatagatatttagagtcaggattatggcaacttgcattagattacccaggaagattttcagtatttcttacctatgatgattctttatcaagacttatatatggtggttctgatgcattcttaatgccaagtagattcgaaccttgtggcattagtcaactccttgctatgcgttatgggtctattccaatagtaaggcgagttggaggtttagttgacacagttatacctcatgatcctgaaaataaaattggcacgggtttttgcttcgatcgctttgaacctatagatttttatacatctctagtaaggtcttgggaggcctttaggcataaagatagttgggaattattgcaaaaaagagcaatgagccaagagtttagttggcaaagatcagcactcgaatatgaaattatgtacaaagatgtttgtggaataaaagaaccatctccagatgtagctgaagtagaaaagttttcttacggacaatccgctgatccatctttaaaaaaagtatgac

SEQ ID NO: 238351 - DNA, 1543 bp, Unknown
  Bacterial polypeptide expressing nucleotide sequence isolated from the Sargasso Sea
atgcgcatcctcttcgctgccgcggaatgcgccccgatgatcaaggtcggtggcatgggggatgtggtgggatcgctgcccccggctctggccaagcttggccacgacgtgcggctgatcatgccggggtactccaagctctggagcaagctgacgatctcggacgaacccatctggcgcgcccagacgatgggtacggaattcgcggtttacgagacgaagcatcccggaaatgggatgaccatctatctggtgggacatccggtgttcgatcccgagcggatctatggcggtgaagacgaggactggcgcttcaccttctttgccagtgccgccgctgaattcgcgtggaatgtctggaagccgaatgttcttcactgccacgactggcacaccggcatgattccggtctggatgcaccaggacccggagatcagcacggtcttcaccatccacaacctcaagtaccagggcccctggcgttggaagctggatcgcatcacctggtgcccctggtatatgcagggagatcacaccatggcggcggcactgctgtacgccgaccgggtcaacgccgtgtcccccacctacgccgaggaaatccgtacggcggagtacggcgaaaagctggatggtttgctcaacttcgtctccggcaagttgcgcggcatcctcaatggcatcgaccttgaggcctggaacccccagaccgatcgggctctgccggccaccttcagcgccgatgacctctccggtaaagcggtctgcaagcgggtgttgcaggagcgcatgggccttgaggtgcgtgacgacgcctttgttctcggcatggtcagccgactcgtcgatcagaagggcgtcgatctgcttctgcaggtcgcggaccgtttgctcgcctacaccgacacgcagatcgtggtgctcggcaccggtgaccgtggcctggaatccggcctgtggcagctggcctcccgccatgccggccgttgcgccgtcttcctcacctacgacgacgacctctcccgacttatctatgccggcagtgacgccttcctgatgcccagtcgcttcgagccttgtggcatcagccagctgtacgccatgcgttatggctccgttcctgtggtgcgcaaggtgggcggcctggtggacaccgttcctccccatagtccagccgatgccagcggcactggcttctgcttcgatcgcttcgagccggtcgacttctacaccgcattggtgcgtgcctgggaggcctaccgccatcgcgacagctggcaggagttgcagaagcgcggcatgcagcaggactacagctgggaccgttccgccatcgattacgacgtcatgtaccgcgatgtctgcggtctgaaggaacccacccctgacgctgcgatggtggaacagttctcccagggacaggctgcggatccctcccgcccagaggatgatgcgattaatgcagctcccgaggcggtcaccgcgccgtccggccccagccgcaaccccctcaatcgtctcttcggccgcagggccggctgat

SEQ ID NO: 238352 - DNA, 1183 bp, Unknown
  Bacterial polypeptide expressing nucleotide sequence isolated from the Sargasso Sea
atgagaattcttcttgccgctgctgaatgtgctccaatgatcaaagttggaggtatgggagatgtggttggttcgttacctccatctttgataaaacttggtcacgatgtaagggtaataattccaggatatggaaaattgtggagtcttttagaggtatcgaatgagccaatctttagagcaaatacaatgggcactgatttcgccgtatatgaagcaaaacatcccattcataattatgtgatttacctagtgggtcatcctacatttgactctgaccaaatatacggaggtgaaaatgaggactggcgctttaccttttttgctagtgccacagcagaatttgcctggaattgttggaaacctcaggttctccattgccatgattggcacactggaatgattcctgtgtggatgcatcaggaccccgaaattagtactgtattcacaattcacaatttaaaataccaaggcccttggagatggaaacttgaaaaaatgacttggtgtccttggtatatgcatggagaccacacaatggctgcggcaatgttgtatgcagatagggtaaatgctgtttctccaacttatgcagatgaaattaaaacccatgaatatggggaaagccttgaaggattacttaattacatttcaggtaaattaaggggaattcttaatggtatagatcttgatgaatggaatccagccaaagatccagttttacctgcaaaatttagtattaaaaatttagaaaataggctagaaaataaaaaaattctgcagagagaaatgggtctcgaagttaaccctaaaaaataccttttaggaatggtcagtaggttagttgatcagaaaggggttgacttacttctacaagtttcaagaagacttctagcatatacagattcgcaaatagttgttttagggactggagatagatatttagagtcaggattatggcaacttgcattagattacccaggaagattttctgtatttcttacctatgatgattctttatcaagacttatatatggtggctctgatgcatttttaatgccaagtagatttgaaccttgtggtattagtcaactgcttgctatgagatatggttcaattccaatagtaaggcgagtaggaggtttagttgacacagttttacctcatgatccagaaaaataat

SEQ ID NO: 238353 - DNA, 1492 bp, Unknown
  Bacterial polypeptide expressing nucleotide sequence isolated from the Sargasso Sea
gatgcgggtactgcagatttctagcgaggcaacaccttttgccaagaccggggggcttgccgatgtcgccggtgcgcttccagatgcgcttgagcgtgcgggctgtgactgcacgctcgttgtaccagcctatcgtgaggtttttgaaaaaaatctgccaatccagaaaacggatatgcagttttccgttcccgttgggcagcgaaatcttgaagctactatttattcatgttcccttccggatcaaaaacataatgtttttctcatagggaatacgcattgcttcgatcgagacaccctctatggtggcgcggaagactatgccgataatgctgaacgatttatcttcttttcaagagcagcgcttgaggtggctgctcgacagcctcatgcctttgatattattcattgccatgactggcagacgagtcttgtccccgcataccagaaactgctgtatcagtcgtggccaacgctgtcagaggctcgttccgttctaacaattcataatgtggccttccagggaatgttttggcattgggacatgcttctgaccggatttcactggaagtacttcaactggcggcagctcgagttttatggccaactcaatatgctgaaagcaggtattgtttttgcagatcaattgacaacagtaagtccaacctatgctcaggagatacaggctgcccctggcggttgtggacttgaaggagtgctcgcaggacgtgcgtctgatttaaccggcatagtcaatggaattgacgttgagacgtggaacccgagaacagatgagttgattcctcggcattacagtgatgatgacttcaagcaggggaagtatacggcgagagttgcacttgctgctcggcttggacatgccgctcctgatgatcgcccattggtggcatttgttggtcgccttgctgaacagaaaggtgtcagtcttgtactcgaccttcttcaccgtatggcaggatcagggaatgcgagatttgttgtattgggtgctggtgatccccaattggaagaagcactaaaagttgtcgcctcggagcatccagatgctattgatgtggtgatcggttttgatgaagtattcgcacatctgattcaggcagcagcggatattctcctcatgccaagccagtatgaaccctgtggtctagcacagctttatgcgtttcgttatggcacgattcccgtcgttcgagccactggtggtctcgtagacacagttgttgatgtcaacgatcagacacgtgctgatggcacggcaagcggttttgtctttcaggattttcaatcagcttctcttgaagaagctgttcagcgtgccctcgctgcccatgggaataaaacgctttggcaagaccttgtctatcgcgttatgcagcaagattggtcttgggaggtgagtgctcagcagtatcagaaagtctatgaacgagcgcttgcaaatgccccagccgatgttgtggatgtgcgttaa

SEQ ID NO: 238354 - DNA, 1177 bp, Unknown
  Bacterial polypeptide expressing nucleotide sequence isolated from the Sargasso Sea
atatatggaggcgaaaatgaggactggcgctttacattttttgctagtgctactgcagaattcgcctggaattgttggaaacctcaagttctccattgccatgattggcacactggaatgattcctgtgtggatgcatcaggatcccgaaattagtactgtcttcacaattcataatttaaaataccaaggcccttggaggtggaaacttgaaaaaatgacttggtgtccttggtatatgcatggagaccacacgatggctgcagcaatgttgtacgcagatagggtcaatgctgtttctccgacttatgcagatgagattaaaacccatgaatacggggaaagcctcgaaggattacttaattacatttcaagtaaattaaggggaattcttaatggcatagatcttgatgaatggaatccagccaaagatccagttttacctgcacaattcagtattaagaatttagaaaataggctagaaaataaaaagattctgcagagagaaatgggtctcgaagttaatcctaaaaaatatcttttaggtatggtcagtaggttagttgatcagaaaggggttgacttgcttttacaagtttcaagaagactattagcatatacagattctcaaattgctgttttagggactggagatagatatttagagtctggattatggcaactggcattagattacccaggaagattctcagtatttcttacctatgatgattctttatcaaggcttatctacggtggctctgatgcatttttaatgccaagtagatttgaaccttgtggaattagtcaactccttgctatgagatatggctctatccctatagtaaggcgagttggaggtttagttgatacagttttacctcatgacccagaaaataataatggtacgggattttgctttgatcgctttgaacctatagatttctatacttctttagtaaggtcctgggaagcatttaggcataaagatagttgggaattactgcaaaaaagagccatgagtcaagagtttagttggcaaagatcagctcttgaatacgaagttatgtataaagacgtttgcggaataaaagagccatcgccagatgttgctgaagttgaaaaattttcttacggacaatcagctgatccatctttaaaaaaaagtatgacttaat

SEQ ID NO: 238355 - DNA, 262 bp, Unknown
  Bacterial polypeptide expressing nucleotide sequence isolated from the Sargasso Sea
atgagtgctcccttgttggttttggcggctggtggaacaggaggccatatgtttccggcacaggcacttgctgaggaaatggtatcaatcggttggcgcataaagctgtccacggataagcgaggcgcacgttacgccaaaaattttccatcggaagttgaggtttcggttattaaatctgcaaccttttcaggaggctctttcttaggaaagttactagttccattgattatattttatggagtgttgcagtccttgcttt

SEQ ID NO: 238356 - DNA, 658 bp, Unknown
  Bacterial polypeptide expressing nucleotide sequence isolated from the Sargasso Sea
tatgtctaaaaaaaataatttattagttgcagctagtggaacaggaggccatatttttccagctttagcagtttctaaagaggtagaagatgaatggaatattcattggttgggtattcagcaaagacttgatgcgaattttattccccaaaaatataatttgaggagtttgaatataaagacaccaagaaaaaatatttttttgttttatcaatatataaaaattttaatgtcaactttccaaataattaggatcttaaaagaaaaaaaaattaacttggtttttacgactggaggttatatatctgcccctactattgttgcttcaaaacttctcaggatacctgtcattattcatgaatcaaatttaattccaggaatggtcacgaaatattttggttttttgtgtaactatgtttttctagggtttaagaaaacaaattcttatttaagaaattgtaaaactattttcactggtactcctttaagagatcaattttataaatcccatcccttgccagaatgggtcccaaaagggaaaggacctcttttgattgttatgggaggtagccaaggagcaaaagctataaatcaaattcttaacgaatctcttgaatttttaatgaaaaaacagtttcggatagttcatattattggc

SEQ ID NO: 238357 - DNA, 295 bp, Unknown
  Bacterial polypeptide expressing nucleotide sequence isolated from the Sargasso Sea
aatgagagttctaattttagccggcggaacaggaggtcatgtgtatccagctctatccgtcgccaaagagcttaaaagaaatgaattttcaatatcctggataggaaaaaaagattcactagaaagcaaactgtctaatgcagaaagttttaattttataagtcttgaaacaaagggctttaaagggaagaatattttcagaaagattatttctttaatctatcttgaaattaatcttgtaaagagcattttcatcattaaaaagataaaacctgattttgtattctcaacctgg

SEQ ID NO: 238358 - DNA, 811 bp, Unknown
  Bacterial polypeptide expressing nucleotide sequence isolated from the Sargasso Sea
catgactcggctcctgatcgccgccagcggaaccggtggtcatctgttcccggccctcgccgttgcagaagttgtcgaagcgagtggccccgtgcgctggttgggggtgccggaccggctggaaacaagcctggtgccggaacgcttcggtttgatcacagtgaaggcgagtggcctgcagggccgtggactcaaaaaactcgtgcagctgatccgcttgctgttggccagcgtcagcgtgcgccgggtgatccgacgtgaatcaattgatgcggtgttcaccacagggggctacatcgctgcccccgccatcctggcggcgcgctggtgcggcattcctgtggtgctgcacgagtcgaatgccatccccggccgcgtcacgcgcctgctgggccgcctctgcagtgcagtcgccattggtctacccgctgccgcccaacgcatccccggcagccagccgatcgtcaccggcaccccggtgcgtgccacttttctcacaccaaaaccgctccccggctgggtgccccggggcgacggaccccttctggtggtgatgggggggagtcagggcgccgttgggctgaaccgcatggtgcgcgcgatcctgcccaaccttctggatcaggggtgccgggtggtacatctcactggggggaacgatcctgagatcaaccaactgcaacacccgaatttggccgaacgccgcttcagcgatgacatccccgggttgttgcaacatgccgacctggccatcagccgagctggcgccggaagcctcagcgaactcgccgcctgcgggactcccagcgtg

SEQ ID NO: 238359 - DNA, 793 bp, Unknown
  Bacterial polypeptide expressing nucleotide sequence isolated from the Sargasso Sea
aatttgattaattttctatatatttttattcagtcaattcctcattacttaaaattaagacctgattttgttttaggctttggtggctattttactgtccccatcataattgcaggatggttaatgcggttaaaaatttttttacacgaaggaaatgcgattattggtaaggctaatagatttttgttaaactttacaaaagaactactaacaagttttgaaaatactttaattcctggcaagaaaatagatattaataataaaatggttggtcttcctataagaataaataaagtggaaaaagttttaaataatgattcgagtagtgattttgtaatatgcataataggcggtagccaaggagcacaaagtttatctattaatattgctgagtccattaagagtgttcaggataacagccaaaaaaggattattgtttttcatcagtgcagatcagaggatttagagaatttacaagcatattataagactcataatatcaataatgatgtaagagtattttttgatgaaattacacaagtactttcaaaatctaatttagtaatttcaagggcaggttcatcaacagttaatgaaatcatatattattgtattccttcaatactgataccttatccacatgcatcggataatcatcaatattacaatgcaaaaaacttgaatacatcagaatgcacaaaaattatttccaatgattctgtaaatatggaaaatatttttaattctattaatgaaataaaaaatgataatgaaaaagtaaatttaatcaaaa

SEQ ID NO: 238360 - DNA, 208 bp, Unknown
  Bacterial polypeptide expressing nucleotide sequence isolated from the Sargasso Sea
atgagtcgagcaaaaataatgattttggctggtggaacaggtggacatgttattccagggctcaccattgccaaggcactagaggaagctaaatgtgatattacatggattggtactatgggcggtattgaagagaaactcgttcctaaggctaatattaaaattgaatatataactgtaatgggtttgaggggcaagagcctcatga

SEQ ID NO: 238361 - DNA, 787 bp, Unknown
  Bacterial polypeptide expressing nucleotide sequence isolated from the Sargasso Sea
atgacccggcttctgatcgccgccagtggcaccggcggccatctctttccagccctggccgtcgctgaggcactgccggagggatggcgtgtgcgctggatgggtgttcccgatcgcctggaaacccaactggttcctgatcgctacgggttgatcaccgtgcgggcgggaggtcttcaggggcgtggcttccgtcgcctgatccagctgctgcgtctgctcggcgccggattcaccacctggcagctaatccggcgccatgacatccaactggtgttcaccactggtggctacatcgcagcaccggccatcatcggcgcgcgcctggccggccggcctgccgtcctgcatgagtccaacgccattcctggccgggtgactcgcctgctgggtcggttctgtcacacggtggcggtcggtctgcccgctgcagcggaaaggattcccggctgcaagcccttgatgaccggcacaccggtgcgaacggcctttcttcaaccgcagccagcacccgactggatccctgcgggagaaggccccctgctggtggtgatcgggggaagccagggggctgtcgggatgaaccggatggtgcgcgccgtcctgcctgaactgctcagacagggttgccgcgtggtgcatctcaccggcagaaacgatccggaggcggggtcccttcagcaccccatgctggtggaacgccctttcagcgacgagattccaggattgctgcaacaggccgatctggccatcagtcgtgctggagccggcagcatcagcgagctgg

SEQ ID NO: 238362 - DNA, 625 bp, Unknown
  Bacterial polypeptide expressing nucleotide sequence isolated from the Sargasso Sea
aatgattaaaatattattatctacaggtggtacgggggggcatatatttccgattttgagtctttataaggagttaaaaaaaaatgaaaatattaaggatgtaaaaattataactgataaaagagcaaaaaaatttatagattttgatgattttaaaattattaatgtagacagcccttttagaaaaaaaggagtaattcatttaataaaaacatttttttatatattttattcaacatttaggtgttttttaattataattttttttaaccctaaaattgtaattggatctggtggttatgtatcatttccagttttattagcatgcattttattgagaaaaaaatttattttgtatgaaactaatgcagttttaggcagagtaaacagattatttttaccatattgtttcaagttattatctggatatcctgatattcgaggtttacctcataaatatttaaagaaattttatcatgttggacaattagtaagagataaatttttgcaaatatctaatgaaatagttgacactaattcaagtaaaattaatgataaagttctgaatattttaatattaggtggtagccaaggtgcaaaagttttaggtgaaaagttacccaaa

SEQ ID NO: 238363 - DNA, 854 bp, Unknown
  Bacterial polypeptide expressing nucleotide sequence isolated from the Sargasso Sea
cttgaaatcttatataaagttacccttgatgttagcagtaggaacaatccaagctttaaaaatattattaaaaaataaaccaaatattgtcttatctatgggaggctatataagctttccttgtgcaatagcatcttacatattaagaataccgataattacacatgagcaaaatataatatttggattaactaataatattttaagatttatatctaaaaaaattattcttgggtttccaatgaaggtaaaaaataaaaagtacatatatcttggtaatccatcaagatatgaaaaaataaatataaaaaaaaataaggcaataaaaggtaaaataaatattttagttgtaggtggtagcttaggtgcaaaaatatttaacgatatagtgccaaaggcaatatatattctaaaacaaaatctagactatgaaataaatgtaatgcaccaaacaggaaaaacatatgaagttgccaactctcaatataaaaaatttcaaattaatatagatttaaaagaatttattgatcccatgattgatgcatataaatggtgcgatattataatatgcaggggtggggcattaacaattacagaaataatgaatctaggtattccttcaataataataccttacccatatgctgtagatgatcatcaaatgaaaaatagtagatatctagaagaaaatgatgctgctatagttattaatcagaaattttttacagatgtacatttagctaatacactagagtcttttattaataatagtgaattagaagaaaaactttcaaaaaatatatctaaacttaacaaaagtgatgcaacaaaaaaaatatgcgaagctattatta

SEQ ID NO: 238364 - DNA, 685 bp, Unknown
  Bacterial polypeptide expressing nucleotide sequence isolated from the Sargasso Sea
gttcatctagttgcttgtggtacttggccaacaactgttcctggaaacataaagtatgaacatgttggcaacccagtcaggaaagaaattttaggtcgctctggttcaccctatatccctcctggtaatcaccctatgtctattttaataataggcggttctcaaggcgctaaggttttgtcaaatattgttccaaaggctataagtaatttgccggatgagctattaaaatatattcgtgtttttcaacaagcgcgtgaagaagattgtcagcgcgttaagtcatattatgttgataaagggatcgcatgtgaagttttgcccttcttcgataatatagccaaacatcttagcgaagcgcagcttattatttctagatcgggggcttcttccgttgctgatattggcgtggttgggcgtccctcaattcttgtgccgcttggctctgccattagagatgagcagactttaaacgccggtcctttaaaaaaagtgcgagctgctacggtaatcgctgagcagaatttaacagtccaaaggcttaataaagctatactgaaaattctttcatcgcctgaaaatgcaagtaagatggctgctaatgcgcacaaaacagttgtattggacgccactaagaaattggctgaccgtgttgaagaaatatcgggatacagcattagatgaa

SEQ ID NO: 238365 - DNA, 496 bp, Unknown
  Bacterial polypeptide expressing nucleotide sequence isolated from the Sargasso Sea
atgtcctccctaacccgcttcaatcccaaaaccggcatggtcgatttctggcacgaattccgcaagcccaacccgctgcgcattccgatgctactggcgtccactgtaccccttctggtgatcttctattggctggccggtgagacgcattaccgagcgccggaacgtccgacgataacctacatcaccactttcgatcccgaacgcagcgacgcggaaatcatggcctcgaatgaagccaatcaggaggtgaaggaccttcgcgaagccgccgaggaagacctcgccgagcgcaagcgcgagatctacaaatcgctgggacgcgggatcggcatggatgtcgacaagatcgaagccgaggcggatgcgcgccgcgcggccgaagaagccgcagaggccgagcgccgcgcgcaagtctttgaccaaagcgaagacgcggctggcgaagcgggcggcgaagacggcgcggctcccgccgaagggcctcaaccatagg

SEQ ID NO: 238366 - DNA, 617 bp, Unknown
  Bacterial polypeptide expressing nucleotide sequence isolated from the Sargasso Sea
gcgaatcaaaaatataaaaaactctgttcactctggaaatccaataagagatgaatttttccgatcatcagacttagacagtgaacatgtaaatatttatataactggaggtagtcaaggcgctgattacattaatgaaaatcttccaaaggccttatcaaaattgactaatataaatgttaaacatcagtgcggtaaaaacaatattataaaagttcgagaactttataagaaatatggagttaaagcagagattttcgatttttatgaaaatcctgctgagcaaatactttggtcggattttgtaatatcaagggctggtgctttaagtctatcagaaatatcctcattacaaagaggcgcattgatgattcctctgcctacagcaatagataatcatcagtttgagaatgcaaaatcaattgttgaacttgggatgggagaaattcatctacaaaatgactcgattgaaaaattaatatgcaagattgagaacattattttaaatcaaagttatgtaaattggagaaaacaaaggaataaagatcataaatatgctgcgaaagttattactgaaaatatctatagatttttaaaaagaaatgaaaaagtttgaa

SEQ ID NO: 238367 - DNA, 825 bp, Unknown
  Bacterial polypeptide expressing nucleotide sequence isolated from the Sargasso Sea
attatttcctacttccttttttattattaaaaattttatttttaacagtaaaatctttttttctattaaaaaaaaataatatttcaattttgatttccacaggtggttatatgtcattaccaatatgtttagcggcaaaaatactaggtactaaaatttttttaattgaaccaaatatggttcttggaagagcaaataaattttttttaaatttttcaaaaaaattaatatgttattcaaaaaacataattaatttaccatctggaattgatcacaaattaactacaattaatccactaataagaaaagaatattatgaaccaaacgcgtatcaaaaaaatgataatttatttacaatcataattataggaggcagtcagggtgcaaaaatttttgatgagcttttaaataaatcttttatatatatagcaaaaaaagtttctttaaaaattattcatcaaacaagtaaaaaaaatataaaatttttagaaaatttttattctcaaaataatattgaaagtaaagtttttagttttgattacaatcttaaggaggttttgaaacatggagatttatgcataacaagagcaggtgcatctagtttagccgaactatcctttatgaatataccatttgtagcaataccacttccatcatcaaaagataatcatcagtatgaaaatgcaaaatactataaagaacaggattgctgctggataattgatcaaaaagattttgatgataaaaaatttggaaaatttttgttagaattgataaataaaagtgaagattacattagaaaaaaaaataattacagaaattaaa

SEQ ID NO: 238368 - DNA, 754 bp, Unknown
  Bacterial polypeptide expressing nucleotide sequence isolated from the Sargasso Sea
atagctgaaaagtttgggaaagaaaatgtaatttttattgcctctaacagggaaatagagagaaaaatttacaaaaattcaggtttcaaagttagtcatttaaatatttcagggttcagagggaaaaacctttttgaaaaaatactatggccttttaatcttacgagttgtgtattgatttcaatttttctgttaattaaatatagaccccagaatgttctactaatgggtaattatatttctgtaattggtttaatagcatcaatttttctgttaaaagatatttacattcatgagcagaatgcaattttaggttcagccaataaatttagtttaatatttgcaaaaaaattattcacaacatttcctctaaacgaaaaaaaagaacataattttggccaaccagttagatctgcgttcaactcactaagctatgctactcattctgaaaaagaacatattcttgttctaggaggcagtcaaggagcccttttttttaacaagcaaattagtgaaatattaggtgatttaaatttaaatgaaaaaatattatttcaaactggtgagcatgatgtaaaaacatctacagaaaaaattgaatatataaagttcattgaaaatatgccagaagttatggctaaatcaaaatttataatttgcagagctggcgcatcaactgttgccgaagtgcaaagcattggtttgcccgcagtatttattccattgcctaactcaatagatgaccatcaaatga

SEQ ID NO: 238369 - DNA, 617 bp, Unknown
  Bacterial polypeptide expressing nucleotide sequence isolated from the Sargasso Sea
taaaataaatattacaggaaaccctattcgaaatggaattgaaaaaggattaaaaaaaacagggtatgatctttttcaattaaataataaaatgccaactgtgtttctttttggcggtagccaaggatctgttccccttaataatgctatacgttcaatattaaatctttttgaagaaaatggtattcaacttttatggcaaacaggtgaaaaaaattatgaaagtttaaaaagtcttgagactgataaaataaaagttaaaccatatgtcaaagaaatggatttagcatatgcaatctgtgatcttgttatttcaagagcaggtgcattgactttgtctgagttattggtctgcggtatgcctagcatcctcctcccccttcctaccgctaccgcggaccatcagactaaaaatgctgcaacaatggtagaatcaggtgctgcgattatgataaaacaaaatgagttagataatgatattcttggaaatacaattattgaacttattaatgacaaaaataaattaaaaaacatgagtgtaaacgcacttaggatagcaaaaccaggtgctacaaaggatattgtaaaaaatatattagaggtagctaaagtttaat

SEQ ID NO: 238370 - DNA, 862 bp, Unknown
  Bacterial polypeptide expressing nucleotide sequence isolated from the Sargasso Sea
atgaaaattctgataatcgccggtggaacaggtggtcatgtgtatccagccttaagtattgccaacgaatttcaagatgacggaaatacaatctactggataggaaagaaaaatagtttggaagagaacattgccttaagcgaagatttctcattttatccaattaatgctcgaggttttcttggcaaaaatttttttgcaaaaataagatctattttcttcatttttgcggccctaatcagaagttttttcttaattagcagaattaaccctgacattatcataacaacaggaggttatctcactcttgctcctggtttgataggttcttttttctgtccattatttattcatgagcagaatagcgccccaggactaactaatagaatattacacaaaagatctaaaattacctttgaagcttttccagacacatttaaaaatctaacaaataaggtaaagtgcgttgggaacccaattcgtgaggatatagtaaatatatctcctataaataaatctaatgaaacaaaatttaatattttaattctaggaggcagccaaggttcaaaacaaatcaatgatatcttgataaatattttattgactaaaaaggtaccttctcattggtcttttattcatcaggtgggaaagctaacttcaaaagaattgaaggatgcttatactgaatctggtaatgaatttgttattaaggaatttatagaaaatatggctgaagcctatcaattctgcgatatagttatttctcgctctggtgcaatgaccgtaagtgaaatttgcacagttcagaaaccttccatacttttacctttaccttgtcttcagaaaatcatcaatacataaa

SEQ ID NO: 238371 - DNA, 857 bp, Unknown
  Bacterial polypeptide expressing nucleotide sequence isolated from the Sargasso Sea
tttttttttaattatatactcactagtaaaatcatttctatacttaatgaaaaaaaaaatacattatctaattagtactggtggatatatgtctataccactttgtatatctgcaaaaattttaggtataaatatttatttgtttgaaccaaataaggttttaggcaaatcaaataaattaatacttaggttttgtaaaaaaattatatgcaactatgaaaatattattaatttcccatctaaatttgatgataaaatttttcttattaaacctatcctaaaaaaagaaatttttttaataaataaaaataaaaaaaccccaaataatggttttaatattttagttttaggaggaagccagggtgcaaatttttttgatcaatttgttgaaaatttaatattaaatatatctaaaaaatttaaaattactgtatatcaacaagtaaataattctaatatattagataaactaaaaaaaaagtatttagataacaatattcagagtaatattttcacttttgataatgacattttaaattcgatgagtaaatgcaatattgcaataacaagatgtggcgcatcaacaattgctgaattggtatatttaaatataccttttattggaataccttttccttttgctaaagataatcatcaattttataatgctaaattttatgaggaaaaagattgctgttggttatataatcaaaaagatatcagcttagataaaatgttagatttatttaacagcattatagaaaatccgaaaatatattcaaaaaaatatgaaaatctaagtaaaatttcatatgaatatgattggaataatgtaaacaaaaaattagtagatttac

SEQ ID NO: 238372 - DNA, 838 bp, Unknown
  Bacterial polypeptide expressing nucleotide sequence isolated from the Sargasso Sea
atggataacaaaaatcgtattattattgctgcaggtggaactggtggacatgtactcccatctattggtttagcgaattatttaatgaaagattatgatatagaaatttttacagatgaaagaggtataaaatatttaaataatcataaaaatataaaaataaaaaaaattaattcaagtagggtttttggtaaaaatataatttattttataataggaatagtaaaagtttttctgtcaattattttctcaataatacttttaataaaacgcaaaccaaaattaattattggtatgggaggttattcatctttcccagtatgtttgtcaggatttattttaaaaattccaatatttatttatgaaaacaatttagttataggaagagccaataaaattcttttacctttttcaaaaaaaatattggtctccacaaatagtattcaaggtattgataataaatataagaataaaatatgtcatatcgggtttttattaagagataatattctaggtgttaaaaatacaaacttagaagttactaagaacaatctatcaattttagtaataggcggaagtcaatctgcaaaagtttttggtgaacaaatcccagaagtaatgaaagaatgtaataagaaaggaataaaatttaatgtatatcaacaatgtttagagtctcaaaaaaaagatattcaaaatatttatggcaaacttgatattaaatttgaattatttactttttgtgatgatttattaaagtattatcaaaaaagtgatatggcaattacaagatgtggagcatcttctattgctgaactggtaaatcttagaattccct

SEQ ID NO: 238373 - DNA, 370 bp, Unknown
  Bacterial polypeptide expressing nucleotide sequence isolated from the Sargasso Sea
gatggtaaaaactagaaagaaaaaaccagtcgtagttttagctgctggtggcactgggggtcatgtttatccagctgaatcacttgcgaggcaccttgaagagggcgggtgggaaatttttttgatttcggataaaaaaggagctgatttaagtgcatctgaatgttggctaaaggttattgaaataactgtagagcctttatccggaaaaacaggattaggtaagatagtcgctcttttatctcttcttaaaggaatatttcaagtaagaagagttttaaaaaaattgcaccccaaagcagtgattggatttggtggatatgcgtcgtttccaaccatggttgctgcagttattggaaaatataagact

SEQ ID NO: 238374 - DNA, 658 bp, Unknown
  Bacterial polypeptide expressing nucleotide sequence isolated from the Sargasso Sea
atgaatattttgataattgccggtggaacaggtggtcatgtgtatccagccttaagtattgccaacgaatttcaaggtgaagaaaatactatctactggataggaaagaaaaatagtttggaagagaatatagctttaagtgaagatttctcattttatccaattaatgctcgaggtttccttggcaaaaatttttttgcaaaaataatttctatttcctttgtttttgtggccctaatcagaagttttttcataatcagaaacattaaaccagacattatcataacaacaggaggttatctctctcttgctcctggtttgataggttctttgttctgtccattatttattcatgagcagaatagtgtcccaggacttactaatagaatattacacaaaagatctaaaatttccttcgaagcttttccacacacatttaataatctgacaaataaggtaaagtgcgttggaaacccaattcgtgaggatatagtaaacatatctcctctagataaatctaatgaaacaaaatttaatattttaattttaggaggcagccaaggttcaaaacaaatcaatgatatcttcctaaatattttattgactaaaaaggctccttctcattggtcttttgttcatcagggtaggaaaagttaac

SEQ ID NO: 238375 - DNA, 880 bp, Unknown
  Bacterial polypeptide expressing nucleotide sequence isolated from the Sargasso Sea
gcgaatgtgggtggtgcagtaaattcccttggcattgctgtcccaaagtccatgagtggaagatgtgacaagcttgggcggattaaccgacttacccgggccggggtcggaaacccagtccgggtggaaaagagcgtggtcaaggccttgaactggatcagtgccaatcaaaatgcggatggatcttgggggaagaccgcgaaaggggctatgaccgggtttgcccttctatgctatcttggacactgtgacttgactgattctcctgaatacggtgagaatgtggcaaagggtatcaaatatctagttgagcttggagatgaaaaggatggctggctttttgtcactcataacaaacacggagccgcatacgcccaaggcatagcaacctatgccatggccgaagcgtatggaatgaccgaaaaagattttattctcccggttttgcagaaagccattcatcgcattgtcgcaggacagaaacaagatggcggatgggtgtacatggagtcccgaccaggtccgaatggcttgaaattcgatgacttcgggaagaatgaaaaaaggtcaagtgatacgtccgtaagcggttggcaatttcaggctctcaaggctgcctacaataccggtgcggtcttccccggtttggaaccggctttggagggtgcggttaagaatttttaccgtgtgtattcagcgaaaaacggggggttcggttatcagaccgcgacccaagcatccaacctgaagcacaagctgacgggcgtaggttctcttggacttcagtcttggtcgaaggggcatccttccgatgagcagaagaaggaaacgttgaataatgcgatgaagcacatcctcaggaacaacccggcgatggctt

SEQ ID NO: 238376 - DNA, 289 bp, Unknown
  Bacterial polypeptide expressing nucleotide sequence isolated from the Sargasso Sea
acggtaagtgaagttgcagctgccggacgcgcggcgattttcgtaccgctaccttttgcggtagacgatcaccaaacaaaaaatgcgcagtcgttagttaagcaaaatgcggcactgatgattgctcaatctgtattaaaagaaaatttagggcaggcggtgcgtcagtggttacaacaccctgaaggctgctttaagatgggtgctgttgcgaaaacatgtgcaagcactcatgccacggaaaatgtagtaagccacgttaaaagcgtggtaggagtaggggactaat

SEQ ID NO: 238377 - DNA, 709 bp, Unknown
  Bacterial polypeptide expressing nucleotide sequence isolated from the Sargasso Sea
ggaagaagtaataaattttttttgaaatattgtaaaaaaattttttgttattctaatgaaataattaattttccagaaaaatatttaaaaaaagttgttataattgataacttgataaggaaagaattttattctattgaaaaaaacaagaaaactgaattaaaagatgaaattaaaattttaattattggaggtagccagggcgcaaaattatttgatactgaattaagaaatgcacttttaaatatatcagcaaaatataagttaaatgtttatcatcaaattaattctacgcaaaatttagatttagagaatttttataaacaaaataatatagttcataatttatttaactttgaagaggatattttaaaactaattagcgatatagatttatgcataactagagctggagcttcaactttatcggaattattttatttaaacataccttttttagctattccttatttattagccgttgatgatcatcaatttcaaaatgcgcttttttacaaaaaaaaaaattgttgttggattttaaaagaagatgaaatcaaacacaatgtattatcggattttttaattaatataatacaaaataaaaatgattatattttaaaaaaagagaatatgaaaaaatttagttaccaaaatagctggaataagataaacgaaaagcttgtaggaataattaatgaaaattgaa

SEQ ID NO: 238378 - DNA, 593 bp, Unknown
  Bacterial polypeptide expressing nucleotide sequence isolated from the Sargasso Sea
taaaactatttttttagttgctggtggcactgttggacacttatttcctgcaatagccgtttcaaaatattttgaaaaatcgcaattacattttttagttgataagcgaacagaaaaaattttgttaaataataaccttagatatcatctcatttcatctagtaaattagaaaaaaatatatttaaagtaattatttcgctttttaaaattttttacggttttatttattccctttatttaattgtaaaatttaaacctgcattagtagttggttttggtggttacacttctataccaacactacttgcagccaaagttttaaataaaaaaatattaatacatgaacaaaattctgtaatgggaaaaactaacagacttctctcaaaaatttctaataaaacagctattacatataaaaatactgtttttgctgatacatctgctattttttcaggaataccgatcagagagttaaaagtaaaaaaaaaatttaataaaaataaaaaaaaaaaaattctaataattggtggtagtcaaggagctaaggtttttagtgaaataatagaaaatattgttttacgattagacaaaa

SEQ ID NO: 238379 - DNA, 954 bp, Unknown
  Bacterial polypeptide expressing nucleotide sequence isolated from the Sargasso Sea
tattattaagtccattaaaaatgtaggatatcctggtattgatattattgaaagtagaagacctaaattaagtaaaaatggaaaagaaataaatgcagaaggcatgtatgttcttccaggttttattgatatgcatggacatattggtgggggttcacaaggtgctgaccctgattacgtttttaaattatggttagcacatgggataacaacagttagagaacctggaggacgaggaattgattatagtatagatttaaaaaataagagtaataataatgagataatagcacctagattaattatatattcaagttttggatctgggtttaaaaaagaaattagttcccctgaagaggcaagagaatgggttagatataatgcaaaaaaaggagctgatggaattaagttttttggttcaagtcccagtattatggaggcagctcttgatgaaaataatcaattaggacttggatctgcaatgcatcatgctcaattaaatgttgcaagatggaatgtcctaaattctgccagagcaggacttacgtcgatggaacattggtatggtttgcctgaagcactttttgatgataggaccgttcaggactatccatcaaactataattattcaaatgaacaacataggtttgaagaggcaggtaaattatggaggcaagcagcagaaccatattcagagcattggaattacgtaatgaatgagttaattgagctagactttactttagatccaacttttaatatatatgaggctagtagagatctccatagagctagaagagcggaatggcatgaggaatatactctacccagtctatgggaattttatcaaccaagtaaaatttctcacggatcatactggcatttctgggggactgagcaggaagtagaatggaaacagaactacaatctatggatgacctttattaatgaata

SEQ ID NO: 238380 - DNA, 1025 bp, Unknown
  Bacterial polypeptide expressing nucleotide sequence isolated from the Sargasso Sea
tattgctacactggctaaatcacccctcgcgaccctcaaatacttctttaccctgctggtctgcgcgctggcgctggcggcgggctggtggctgtggaactactacatgcaggggccctggacccgggatggcaaggtgcgggccgagctggtcagcatcacccccgaggtgtcgggcaagatcatcaagatagcggtgaaggacaaccagctggtcaaggcgggggaggagatctttactctggatcccgagccctaccggattgcgctggacaacgccctaggcggcgctggccaaggccaaatcggatctcgacaaggcggagcacgaggcgagccggcgcagcggcctgtcgcgcagcgtcatctccgccgaggcggtggacgaggcccgcctcaatgcccaggcgatgaaggcggcctaccaggtggcccaggccaatctggagcaggccagatggtcgctggccaagacccgggttcatgccgcgagcgatggttacatcaccaacctgcagacccgggtcggcaactatgccagcgccggcgtgccgctggtggcactggtggacatccactctttctacgtgcagggctacttcgaggagaccaagctcaggcacatagcgccgggcaaaccggccgaggtggtactctacagcggggagcagcggctgcgcggcgaggtggagagcatagggcgcgccatccacgatcagagcgtggagggggccgacaacctgctgctggacgtcaaacccaatgtgccctgggtgcggctggcccagcgggtgccggtgcggatcaagctgctggaggtgccgcccgggctgacgctgattgcaggcactacctgcaccatcaccataggggagtaaggtggccgcctcgctctggcgccagaccccctggggcaaggccaatggcggccagtggcgctacgccctgcgtaacagcctggcgatgtgcctgtcgctctggctggccttcgtgctggagctggactccccctactgggcgatgac

SEQ ID NO: 238381 - DNA, 742 bp, Unknown
  Bacterial polypeptide expressing nucleotide sequence isolated from the Sargasso Sea
atgccccggcttctgatcgcagccagtggcactggcggccatctgtttccggccttggcggttgctgatcgtttgcctccagactggagagtgcgctggctgggggttcccgatcgcctcgagcgccaattggtcccaggtcgctatcccttgttcactgtccgtgccgggggcttgcagggtcgtgggctgggcaagctcaagcaactggttcagctgctctggagtgcctggccagtctcgcgtctgattcgcaaagaggagtgcgtggcggtcttcaccactggcggctacatcgcagcccccgcaatcctggcggcgcgcctttgccgccggccggtggtgttgcacgaatccaacgccatcccaggtcaggtgactcgcttgtttggtcgcttctgcacgcgagtggccctggggctaccccaggcggcggattatttgagtggttgccgcccagaggtgactggcactcctgtgcgtgaggaatttctcaagccagcggcctgtcccgattgggtgccgccaggctctggtccactgttgttggtgattggcggtagccaaggagcagttggtttgaaccgaatggttcgtggagcagctccagccttgcttgggttgggttgccgcatcgtgcatctcaccggcagcgtcgacccagaccaaggtcagctcaagcatcccgattacatcgagcgccccttcagtgatgagattcctgctctgcttcagcacgctg

SEQ ID NO: 238382 - DNA, 1078 bp, Unknown
  Bacterial polypeptide expressing nucleotide sequence isolated from the Sargasso Sea
tatgaaaaatatacttatagtaacaggtggttctggtggccacgtagtaccatctacctctttgtttgaacatttgaaaaacaaattttctgtaaaaatggtatctgatttgagaggaagtaaatatataaatactgaaaaatttaaatatgaattaatagatgtacctaatttatttttaaaaccttatttacttccaataaatatttttaaatattttctaaacatttttcaatctattagatttttaaaaaataataagacaaatattgtgattagtactggtgggtacatgacatttccattttgtttagctgcatttatattacaaaaaaaagttttcttgtttgagcctaatagtgttttaggtagatctaaccgctttgctttgaaattttcaacaaaaataatttgttacgatgaaaatttaagaaacttcccaataaaatacaattctaaaaaagttatagtcaaacctattttaaaaaaagaaatatataacttagaaaaaaatataattaatttaaaaaaggaaataaaaaaaattcttatcatcggcggcagtcagggtgcatcgttttttgacgaaaatattactgaattaattatcgaaatttcaaaaaaacgaaatttagaagttatacaacaaatatcaaatattaataatttatcttcaataaaaaataaatatgacaaatcaaatataaactacaaatttattgaatttaccaatgatagtcatgaactctacaatggtatagatctagcaattaccagaggaggcgcaagcacattaagtgaactttcattcttaaacataccgtttatttcaatacctctcccatatgcaagagataatcaccaattctataattcagaattttactataaaaaaaattgttgttggttaataaaacaaaaggaattcgaatttaaaaaattttcaaagatgatatttgaaatatttaacgattataaaaattacaacgaaaaatttaaaaatcttgaggaaattactaaaaaaaatacttggaataatataaacaataagattatagaaattatagatgaaaattaa

SEQ ID NO: 238383 - DNA, 1036 bp, Unknown
  Bacterial polypeptide expressing nucleotide sequence isolated from the Sargasso Sea
tatgtctaaaaaaaataatttattagttgcagctagtggaacaggaggccatatttttccagctttagcagtttctaaagaggtggaagatgagtggaatattcattggttgggtattcagcaaagacttgatgcgcatttgattccccaaaaatataatttgaagactttgaatttaaagacaccaagaaaaaatatttttttgttttatcaatatataaaaattttaatgtcaactttccaaataattaggatcttaaaagaaaaaaaaattaacttggtttttacgactggaggttatatatctgcccctactattgttgcttcaaaacttctaaagatacctatcattattcatgaatcaaatgtagttccaggaatggtcacgaaatattttggttttttatgtaactatgttcttttaggatttaaagaaacaaattcttatttaaaaaattgtaaaactattttcactggaacacctttaagagagcaattctataaatttaattttttgccagaatgggttccaaaaggaaatggacctcttttgattgttatgggaggtagtcaaggagcaaaagctataaatcaaattctttatgaatctctagagtttttaataaaaaaacaatttcggatagttcatattgttggcgaatctaatctaaaaccttttcatgtaaaaaactccaaaaattatattcaaaagaaatttactaatgaaatagcagctttaattcaaaactgtgatcttgtaatatcgagatctggtgcaggaacaatcaatgaattaatggaggctgaaaaaccttcaattttaattccatatccatattctaaaaataatcatcaggagaaaaatgccatgattcttgctgcaagtggaggctcagttttaatcaatcagaataatatgtctaaagaagtttttgaagaaactctagaaagaatttttaaaataaaatcaaaaaagggaaaaaaacattatgaaatattagatctcatgaagaagaataggaaaataataataaaa

SEQ ID NO: 238384 - DNA, 1054 bp, Unknown
  Bacterial polypeptide expressing nucleotide sequence isolated from the Sargasso Sea
atgaagtttttgattgttgctgcaaaaactggtggacatatttatcctgccaaggttataagtcaagaactcatagagaggggccatgagattcttttattaggcattggaaatcaaattgaagaaaatgcctttaaggatctaaattcaaaaatctataaattgaagatagaaggatttcgaggccaaaccaatttaaaaaagctaaaagttcttggacaggttgttataaacgtttttaaagttttgggaataataaaaaaagaaaatatagatgtaatgattggtttcggaggctttattaccttacctgcagggatagcatcatggttaagaaagaagccaatatttatacatgaacaaaatgcagtcataggttctgctaataagatattgtcaaaaatttcaaaaaagacttttattggcttcccattagaaaattcgaataaaaaaattaaaacaatattgactggaaatccaattagaaaaattaatttaaaaaactttgatagcattcatgaaaatgataataagataaaaatttatgttacaggagggagtcaaggatcacaatttattaacgaaaccattcctaaagcgcttttaaaactgtcaagcaatttaaaaataaagcatcagtgtggcaaaaatcacttcaatttagtagatagactttacagatctgcagattttgagtttgaagtaaaagaattttatgaaaatccgtttaaagaaatattatggtctgattttgtcatatctagagcaggcgcattaacgttatctgaaataatttcgttaaaaagaggagctttgatcattccgctttcttcgtcaattgataaccatcaagctttaaatgcagaaagtattcaaagaatgaatttaggtattacgcattatcaggaagagagccttgaaaaattagttactcgattgaagagtattgttgataataaaacatatatgtcatggaaaaaattaggtttagatattcatataaatgcatctaaaatgattttagatattattgaggattatgaatttaagtgaa

SEQ ID NO: 238385 - DNA, 1030 bp, Unknown
  Bacterial polypeptide expressing nucleotide sequence isolated from the Sargasso Sea
atgaaaaatatacttatagtaacaggtggttctggtggtcacgtagtaccatctacctctttatttgaacatttaaaaaacaaattttctgtaaaaatagtatctgatttgagaggaagtaaatatataaatactaaagaatttaaatatgaattaatagatgtacctaatttatttttaaaaccttatttacttccaataaatatttttaaatattttctaaacatttttcaatctattagatttttaaaaaataataagacaaatattgtaattagtactggtgggtacatgacatttccattttgcttagctgcatttatattacaaaaaaaagttctcttgtttgagcctaatagtgttttaggtagatctaaccgctttgctttgaaattttcaacaaaaataatttgttacgatgaaaatttaagaaacttcccaataaaatataattctaaaaaagttatagtcaaacccattttaaaaaaagaattatataacttagaaaaaaatataattaatttaaaaaaggaaataaaaaaaattcttatcatcggtggcagtcagggggcctcgttttttgatgaaaatattactgaattaattatcgaaatttcaaaaaaacgaaatttcgaagttatacaacaaatatcaaatattaataatttatcttcaataaaaaataaatatgacaaatcaaatataaactacaaatttattgaatttaccaatgatagtcatgaactctacaatggtatagatttagcaattaccagaggaggcgcaagcacattaagtgaactttcattcttaaacataccatttatttctatacctctcccatctgcaagagataaccaccaattctataattcagaattttattataaaaaaaattgttgttggttaataaagcaaaaagaattcgaatttaaaaaattttcaaagatgatatttgaaatatttaacgattataaaaattataacgaaaaatttaaaaatcttgaggaaattactaaaaaaaatactg

SEQ ID NO: 238386 - DNA, 491 bp, Unknown
  Bacterial polypeptide expressing nucleotide sequence isolated from the Sargasso Sea
aatgaatgccaaaaaaaaagtaattttctcagctggtggtacaggaggccatgtataccctgcattagcaatagcaaaaaatttaattttagaaaattatgatgtattgtggataggaactaccagagggttagaaaagaaaataattgaagctgaatctatcaacataaaatatattaattttcagggtataagaaataaaggatttatcacaatcttaaaatcgccttttctcctccttagggcttgctaccaggtatataaaatatataagttttataagccagatttgacaatttgttttggaggatatgtcacagttccatgtgggttaatttcttttctcaagaaaataccactatttattcatgaacaaaatagtgtgttggggctatcaaataaaatactatctttgttttcacaaaaaaccttgatgggttatcgaaaaccaggtagcaaatacttatattctggtaatccaatgagagaaa

SEQ ID NO: 238387 - DNA, 1597 bp, Unknown
  Bacterial polypeptide expressing nucleotide sequence isolated from the Sargasso Sea
tctggagttacctgaacagtataaaaatgcattaaaagtacaacaagcctttaacaaacagcaaagcctagagcaaaaagccaaagccagcttattcccggagcgggtatttcaggaatttgaaggcaaagccagcagctggtggcaatttgaccctcgggtcgatcacctgattgccttactgaaaaagcataaacgcagcaagtttttactgatttgtgctcatgccgatacagctattgcactggaagaagcggttcgggtgcgtgaagggatccgggcttcggtattccatgaaggcatgagtattatcgagcgggacatggctgcggcctattttgcccaggaagataacagcgcccaaatgctgatttgttcagaaattggcagcgaaggtcgcaacttccaattcgctcatcatctggtgttgtttgatttacctctgaacccggacttattggaacagcgtataggccgtctggatcgcataggtcaaacccaggatattcagttacatattccttattttaatgaccatcctcaacaggtactgctggattggtatcaacagggtttagaggctttaagccaaacctgccaaaccgggcgagctgtctttgaacaggtgtcgactgaattgttcgaattgctggcagcgaacgccatagacaaggacgcagttcagacgctgatcgctaaaagtgccgagctgaaccagcaactgaaacaaaaactggaacaaggccgcgataaactgttagaaatcaacagttctggtcggggtaaagccagtgaattggcggaagccatcgcagttttggatgatgaaacccgactgccgatgtttatgttaagggcatgggatgttttgggtgtgaatcaggacgaccgtggtgaaaacagcatggtgctgaccatgtcggagcatttacacagtcactatcctatgctggacgatgacggtatcagtgtcacctttgatcgggctactgctttggctcaggaagatatccagttcttaagctgggatcaccctatggtacaaggcactctggatattctgaccaatgagcaaatgggcaatagttctgtggcattgttgccgaacaaagccctgcctgccggcacatattttgttgaatttatatttattgtcgaagccagcgcaccaaaagagctgcaactgggccgttatttacctgtaacacctgtgcgtttgttactggaaaaaaatgggaaaaatctggctgcaaacgttggctttgagcaatttaataagcaattaaaacctgtaggcagacaacctgccgccaagatggtgaaagccttacaaagcctgattcatccattgataggtaaggcacaggaattggccgcagtgcgtttaaccgaagtgcagcagcaagcacagcaattgatgcaacaaaagctcaatgcacaaattgaacgcctccaggcattgcggaaattgaatccgtcggtacggccggaagaaattgcacatttacaacaacagcaacaagaattaacagattacattagtaaagcacggttaaaatttgatgcattgcgggtcgttgttgtcagccatgactaa

SEQ ID NO: 238388 - DNA, 1087 bp, Unknown
  Bacterial polypeptide expressing nucleotide sequence isolated from the Sargasso Sea
gatacttattacaggaggaggcacaggagggcatttattccctgctctcgctattggtgaagaaattcaacgcagagacccagatgtaaaaatacactatgtaggctctgtatttggacttgaagcaaaagtatttcctgttaaggatgtctggcacacattattacctatccgtggtttacagcgtggattaagcatcacaagcattgctagaaatcttttgttaccctttagaattattcgctctttaattaaaaccaacaaactcttaaatgaatttattcctgaagttatcattggtacagggggctacgcgtctgcactaccactttatgtagcatcaaaaaaggaaaaaacactacccattattctccaagaacaaaactcatttccgggaataactactagattatttgcggataaagcaaaaaaaatatgtgtggcatttaatgaatcagaaaatgattttaactctaaaacaatcctaaccggtaatccaattagaaaaggaattgaggatggaaatcggattaaaggtttaaaacaattcaattttaaagataataaaaaaacaatatttttatttgggggaagtcaaggttcctcatatctaaataaaatgatgagtcaggtcgtctctaatattgcgagcgcaggcatccaagtaatatggcaaactggtgatttagaattcagtctatataaaaagatgaactcaaatagcatacgagttattccatttgttaataatatggatgatgcgtatgcaattgcagatcttcttatatgtcggagtggtgccctaaccttagcagaaattactgtatgcggaaaaccatctatattaattccttatccatacgctgctggcgatcatcaaacgaaaaatgcacagtcacttgtcaatgctggtgctgcgcgaattctatttgaaaaatcactcaaatcaaaagagcttctgtatacagttatgaatttgattcataataaaaaagaacttcttaaaatgtcactggcttcaaaaaaattaggaaaaccaaatgctacaaatgaaatcgttaataatatatttaaggttttaaattga

SEQ ID NO: 238389 - DNA, 337 bp, Unknown
  Bacterial polypeptide expressing nucleotide sequence isolated from the Sargasso Sea
gcttatacctggggctgatttagtgatttgccgcgctggtgctttaaccgtctctgaagtggcttgtgccggtgtagcggcggtttttgtgcctttgccatctgctattgacgatcatcagacggccaacgccagctggttagtgcaaaaacaaggggcggtattactgccacaaagcgaattcagtaaaggtgctttgttgcctttgctccagtcctggttgcaggacaaaagtgcactgcgtcatttggcaaataatgcccgcagaacagcaatagatgatgccgcagaacacgttgtaagagtctgtggtgaagtgataggtaagactaaatga

SEQ ID NO: 238390 - DNA, 1102 bp, Unknown
  Bacterial polypeptide expressing nucleotide sequence isolated from the Sargasso Sea
tatggatgaggagatacgcataatgattgctggaggaggaactggcggacatctataccctgcattagcaattggtgaagagattatgcaacgtacctcaaatgtaaaagtgcattatattggttcagagtttggattagaagcaaatatatttccacgcaagggtctatctcatacgctcattccaattagtggatttcaaagatcattatcaattaaaagtattttaaaaaatttatctttgatatttcgtataccgctatccatcagaaaaattcaatctttatttgatcgaatggatccaaaagtaattgttggaacgggtggatatgcaagtgcaatacccgtaaaagttggattagatagaaatataccaactatgatacaagagcaaaattcctatcctggcttaactactagattgtttgcgaataaagcaactgcagtatttgctggttctaaagattcagagtcttatataaatagtaaaataaatgttacaggaaacccaattcgaaatggaattgaaaaaggattaaaaaaaatagggtatgatctttttcagctagataataaaatgccaacagtctttctttttggtggcagtcaaggatctgttccccttaataatgctatacgttcaatattaaatatttttgaaaaaaatggtattcaacttttatggcaaacaggtgaaaaaaattatgaaagtttaaaaaatcttgagtctgacaaaataaaagttaaaccatatatcaaagaaatggatttagcatatgcaatatgtgatcttgttatttcaagagcaggtgcattgactttgtctgagttattggtctgcggtatgcctagcatcctcctcccccttcctaccgctaccgcggaccatcagactaaaaatgctgcaacaatggtagaatcaggtgctgcaattatgataaaacaaaatgagttagataatgatattcttcgaaatacaattattgaacttattaatgacaaaaataaattaaaaaacatgagtgctaacgcacttaggatagcaaaaccaggcgctacaaaggatattgtaaaaaatatattagaggtagctaaagtttaa

SEQ ID NO: 238391 - DNA, 297 bp, Unknown
  Bacterial polypeptide expressing nucleotide sequence isolated from the Sargasso Sea
aatgaatattcttataatcgccggtggaacaggtggtcatgtgtatccagccttaagtattgctaacgaatttcaaaatgatggaaatactattttttggataggaaagagagatagtttggaggaaaatatagccataagagaagatttttcattttatccaattaatgctcgaggttttcttggcaaaaacctttttgcaaaaataagttctattttctttctttttgcggccctaatcagaagttttttcataattagtaacattaaacctgacatcatcatatcaacaggagc

SEQ ID NO: 238392 - DNA, 1093 bp, Unknown
  Bacterial polypeptide expressing nucleotide sequence isolated from the Sargasso Sea
atgtctaaaaaaaataatttattagttgcagctagtggaacaggaggccatatttttccagctttagcagtttctaaagaggtggaagatgagtggaatattcattggttgggtattcagcaaagacttgatgcgaatttgattccccaaaaatataatttgaagactttgaatttaaagacaccaagaaaaaatatttttttgttttatcaatatataaaaattttaatgtcaactttccaaataattaggatcttaaaagaaaaaaaaattaacttggtttttacgactggaggttatatatctgcccctactattgttgcttcaaaactactcaggatacctgtcattattcatgaatcaaatttaattccaggaatggtcacgaaatattttggttttttgtgtaactatgtttttctaggatttaagaaaacaaattcttatttaagaaattgtaaaactattttcactgggactcctttaagagatcaattctataaatcccatcccttgccagaatgggttccaaaaggaaaaggacctcttttgattgttatgggaggtagccaaggagcaaaagctataaatcaaattcttaacaaatctcttgaatttttaatgaaaaaacagtttcggatagttcatattattggcgaatgtaatcaacaatccttcaatgtaaaaaattccaataattatgttcaaaagaaatttactaatgaaatcgcagctttaattcagaactgtgatcttgtaatatcgagatctggtgcaggaacaataaatgaactcatagaaactgaaaaaccttcaatattaattccatttccttattctaaaaataatcaccaagagaaaaatgcaatgattcttgctgaaagtggaggatcagttttaatgaatcaaagtaaaatttctaaagaagtttttgaagaaactatagaaagaatttttaagagaaaatcaaaaaacggaaaatattactatgaaattttagatattatgaagcagaatatggaaaataataataaaatcaaatctaaaattgagattagaaaattttttaattattttttaaaggaattttgaa

SEQ ID NO: 238393 - DNA, 289 bp, Unknown
  Bacterial polypeptide expressing nucleotide sequence isolated from the Sargasso Sea
gatgtcgggacgcgccctcattgcagcggggggcaccggtgggcacgtctatcctgctctggcggtggccgggctcttgatcgagcagggctggtcggtcgactgggtcggtacagagcgtggtatcgagcagcgcttggtgccggctgcgggattgcccctgcaccacctcagcgtgtctggattgcgcggcaaaaattgggtggcgcgagtgcagggcgcggtgcgactgatcgcggcgctgtggcagtccctctcactcatgtggcgcgtgaagcctgacgtagtg

SEQ ID NO: 238394 - DNA, 1066 bp, Unknown
  Bacterial polypeptide expressing nucleotide sequence isolated from the Sargasso Sea
atgaatattctgataatagccggtggaacaggtggtcatgtgtatccagccttaagtattgccaaagaatttcaagataatagaaatactatcttttggataggaaagagagatagtttggaagaaaaaatagccttaagagaagatttctcattttatccaattaatgctcgaggttttcttggcaaaaatttttttgcaaaaataagttctattttctttcttttttcggccctaatcagaagttttttcttaattaataacattaaacctgacattatcatatcaacaggaggttatctctctgttgctcctggtttgatcggttctatgttcagtccattatttattcatgagcagaatagtgtcccaggactagctaatagaatattacacaaaagatctaaaattacttttgaagcctttccagacacatttaataatctaacaaataaagtaaagtgcgttggtaacccaattcgtgaggatatagtaaatatacctcctataaaaaaaactaataaaacaaaatttaatattttaattttaggaggcagtcaaggttcaaaacaaatcaatgacatcttgataaagattttattgactaaaaaggtaccttctcattggtcttttattcatcaggcgggaaggttaaactcaagaggattgcaggatgcttacactgaatctggtaatgaatttgttattaaggagtttttagaaaatatagctgaagcctatcaattctgcgatatagttatttctcgctctggtgctatgaccgttagtgaaatttgctctgttcaaaaaccttcgatacttttacctctaccttggtcttcagaaaatcatcaatacactaatgccaaatatctgaaaaatagaggtgcagctgagattatcaattctgatgtctccaattctattcaattactagagctattaattaatttggaaagcgaccataatagattaaattcaatggcatattctgcttctaaagtttttcctcagtttgcctccaagaatatttataaatctattaatgaatacctcacaatataaa

SEQ ID NO: 238395 - DNA, 1183 bp, Unknown
  Bacterial polypeptide expressing nucleotide sequence isolated from the Sargasso Sea
atctatcctgcattgactttggctcatcagtttaagaaagatggcaacaaagtcgttattgtcggcacaggaaatgatactgagaagatgatttttgccaaagaagaatttgaggttaggtatttcaaatcaaaacttcaaaactatcctacatataaaaaaattctttttctttttaaagtaaataatgatcttcaggaatttgtaagagatataaaacctgacctgatacttgggatgggggggtatgcttcagcacaggtttgtatttcgggtgggagagaatcatgcatcataattcatgagcagaatgcaattgctgggagagttaataggcttcttctttttttaaatgctagagcagcaatagagggcttgccaggagcattcaattggtttgagaagctatacatgtattttttcggctcacacacatatttgggcaatcctattagagaaaagatagctcatgatgcttggctacatcgtaaaaccaatggccgctatcttgactcaaaagcaaagaattatccggaagagttgagaattttagtaatgggtggcagtcaaggagcaagatcaataaacaagattgctcctgaagcattatcagatgcaaatgagaaaatcgacataaaggttttacatgtaactggcgaggatgattaccaaaatgttaaggattcatattcaagactaaatatcgaagcaaaagttaaaaagtattatccagaaatagaaaatgcatacgcttcagcagatttatttataggaagatctggtgcgatgacggtatcagagctcagtactttagggttgccgtcaatcctaattccttacccttatgctacggataatcatcaattatttaatgcactctttcttgaggcgaagggaggcgcaatcattataaataatgatgatcttacaaaggagttattggcagaaaaagttatcacattaggtcgtgatcataaaagcttgagtcaaatggcagaatcagcaaatgaaagaaggctcagtttctccagcgagcttataacaaaatattgttatgcaacaatcttcttcgaaaaacaattaaagtcatatggtttttggcactcatggttttaccctcttgtaagagttaaagagcgcatagagcgtgcaaaagagcactcgaatcttgatgagttgtaat

SEQ ID NO: 238396 - DNA, 277 bp, Unknown
  Bacterial polypeptide expressing nucleotide sequence isolated from the Sargasso Sea
gatgcagactactgacaaacagcaaaaaacagcgctgattatggctggcggcactggtggccatattttcccggctaaagctgtggctgaattgttaaaacaacaaggttggagcattcattggctgggcacagcggatcggatggaagctactttagtaccgcagtttggtttcccgtttcacagcattgctgtagccggtttacggggtaaaggtttaaaaagcttagtgaaagcgccgctgatgttattgcgctccatcagtcaggggccccgt

SEQ ID NO: 238397 - DNA, 318 bp, Unknown
  Bacterial polypeptide expressing nucleotide sequence isolated from the Sargasso Sea
gatggaaagcaaactgtttttcctggctgccgggggtacaggcggacacgtatttccggctgaagctctggcccatgaactgattgcacgtgggcacaaggtacactttgttacagacagccgtgccgagcgtttcgccgggacctttccggccgaaaaaatccatgtcgtgccgtctgccacgatcggatcgaagaacccgatttccgtcattcgcgccggcttcactttgttcaagggatcgcgggttgccagagcgcttttcgcgcagtaccggccggcagccgtgatcggcttcggcggctatccgacggtgcc

SEQ ID NO: 238398 - DNA, 269 bp, Unknown
  Bacterial polypeptide expressing nucleotide sequence isolated from the Sargasso Sea
aatgaaaatatttatttcagcaggaggaacaggcggacatgtttttcctgctgtagagtttatcaaacttgccatgaccaatggtcatacagtttattggtttgggactaagcgcggaattgaaagaaaaaatttgcctgcaaactgtcacttatttgagataaatgcggttggctatagagggaaaagatttttacagaaaatattttctatttttcgattagtacaaactttttttaaagttgctattaaatttataaaatataatc

SEQ ID NO: 238399 - DNA, 593 bp, Unknown
  Bacterial polypeptide expressing nucleotide sequence isolated from the Sargasso Sea
gatgatcatggcgggaggcacgggcgggcacgtgtatcccgcattaagtgtggctgagcatcttcgtgatcagggtattgagatagtctggttgggcacgcgcaaagggcttgaagcccgtgtggttcccgctgcgggctttcaggtggaatggcttgagatcaagggtcttatgggcacctcgtggatacgaaaagcggtgatgccctggatgctgttgagagcggtcgcccaggcgctcaggatcatccgccgccgaatgccggatgcggtgctggggatgggtggctttgcaacaggcccgggagggcttgcggcctggttgctgcgccgaccccttgtgattcacgaagccaacgcagtgtgtggtgttacaaatcgtctattggcacccttatcaaaacgaatcctgacaggtttcgagaacgtccgacatttgggcgaaaaggctcgatggacaggaaatccagttcgactagagatcactcagcgagtatcgactccgatggggactgataaagcacagccgttccggttgctggtgctcggaggcagtcagggtgctcgatccatcaatatattgatgcctttgg

SEQ ID NO: 238400 - DNA, 502 bp, Unknown
  Bacterial polypeptide expressing nucleotide sequence isolated from the Sargasso Sea
atgaatcaaagcgttgatattgtttttacaggcggcggaacggcgggtcatgtattacctaatgtaaggttaataaatgacttaaaaaaagaagggttttcatgcgcgtatattggctctagaactggacctgaatttaaacttacttccaatcttgatcttcctttcaaatccatatcatgcggtaaattgaggcgttattttagttttcagaatttcttagatttatttaaaattataataggtattatccaggctattgttattttatttcgaattaaaccaaaaattattttttcgaagggtggatttgtgtcttttccagttgtttttgctgcctggctcaatcggattccggttattttacacgagtctgatctgacacctggcttagccaatcgtttatcgttaccgttttgcaccgaggtttgtacttcctttgctggcacggcgtcttttttaaagacgtctaaaacgatccattttacagggctacccataa

SEQ ID NO: 238401 - DNA, 800 bp, Unknown
  Bacterial polypeptide expressing nucleotide sequence isolated from the Sargasso Sea
aatgaatagtgtttcaaaaaaaaaattaatttcaatagttgctggtggaactggaggtcacattttccctgctatatcactcataaagtttttaaaagataaatataatatacttataataacggataatagaggtagtgtgtattttacaaattttaaaaaaaaaaattatctaagttataattttaaattagttgctatcaattctcagagcccatttaaatatggattaattaataaggtaatttttatttttttatctgtattaactgctttaaaaatattaaatctttttttaaaacataagccaattttattaattggctttggtggttattccacatttataccgtgtctaatgtcaaaaataatgggaattaaattttttattcatgaacaaaatgcaatgatgggaagagctaacaaattcttagagttttttgcaacaatatcttttttaggatttaaaaacaccaaaccaaaaataaatattaagaaaagaattttttgtggaacacctctacgagaagagttttataagataaataaatacaaaagtgattacaactatataaaacaaaactttaatatattaatttttggtggcagcttgggatcagattatttttcaactcaaataccaaatttgatttgttcattgaataaaagcattagccagaagctaaacattactcatcaagttattaatgaaaaaattttgccagtccaaaccatttataagaaaaataaaatttcagctaatgttaaaagtttttttccagatatgataaaatatttta

SEQ ID NO: 238402 - DNA, 697 bp, Unknown
  Bacterial polypeptide expressing nucleotide sequence isolated from the Sargasso Sea
atgaataaacttgatcccagaaatacgatattaatcgctgctggcggaacgggtggacatattttcccatcgttatcaataataaatgaaattagagtgggtaatttcatagttattacagatcaaagaggcaaaacttatttcaacagttttttaaataaaaaggtaattaattttaaaatttctattcacaatgtttccagtccaagtaataaggtaatgtttgataaaatcaaatcatcttatcagtttttaatttctatcttaaaatcaataattttgatgattaaaaacaaaccaaacattgttattggttttggtggatatccctcagtagctcctgtattagctgctaaattgttaaaaataccctcaatcattcatgaacaaaatgcaactttaggaagggctaataaatttcttggaaatgtagcaaactttttggctttatcatttattgaaacaaaaaatatatatagagttaaaaattcaatttttactggtaacccagttagacaagaatttaataatattggaaaattaaaatatccatgtcctacaaaagaaaataaaattaatatcttgataataggtggcagtcttggcgctagttttttttctaaacatcttactactataatatgttctcttccaatagagctaagaaaaaatttaaaaatagtgcagctaagttaaa

SEQ ID NO: 238403 - DNA, 646 bp, Unknown
  Bacterial polypeptide expressing nucleotide sequence isolated from the Sargasso Sea
cattgcgtctgggccgggggcattgcgggcaaagggccggtggcgcgcgtccgaagtgctggggcaatcgcttttgggacgctgcaggcccgtaaacttttaaaaaatctcaagccatccgttgtggtcggcttcggcggttacgcatccgttccgacgatgttggcagccacatactcgacagtgtcaactgccatccatgagcaaaacgccgttttagggcgggccaaccggctttttgcttttaaagttcagaaaattgcaacctcctatgaaaaggtgagccacattccagagaccgcagtgacgcgcgcggtttataccggcatgcctgtccgggccgcggttaaggatcttcacggaacaccatatccagctttgtcggagaaaacggattttaacattctcgttttcggcggatcgcaaggagcatctgttttcagtcgggttgttccacaggctattgaaaagctagaaggagcgtaccgcaagaggttgagcattgttcagcaatgtcggccagaggattataacgcactccgggcagactatgaccggctcggagtccgtgctgagatcgcaccattttttcaagatatacctcataagatcgcagaatcgcatctcgtgatcagccgctcaggcg

SEQ ID NO: 238404 - DNA, 308 bp, Unknown
  Bacterial polypeptide expressing nucleotide sequence isolated from the Sargasso Sea
ctgtagagccggtgcgcttacggtaagtgaagttgcagctgccggacgcgcggcgattttcgtaccgctaccttttgcggtagatgatcaccaaacaaaaaatgcgcagtcgttagttaagcaaaatgcggcactgatgattgctcaatctgtattaaaagaaaatttagggcaggcggtgcgtcagtggttacaacaccctgaaggctgcttaaagatgggtgctgttgcgaaaacatgtgcaagcactcatgccacggaaaatgtagtaagccacgttaaaagcgtggtaggagtaggggactaat

SEQ ID NO: 238405 - DNA, 191 bp, Unknown
  Bacterial polypeptide expressing nucleotide sequence isolated from the Sargasso Sea
  misc_feature (86)..(86): n is a, c, g, or t
gatgagtaaaaaaataatttttgcagcaggaggaacaggaggtcacatatttccagcaattaatttaatgaagcatttttttgaanaaggctatgaagtgatattagtaacggacaaaagaggaaaaaattttataaatgattattcaaaatccaaatgttatgtgctagcagcagacacaccaacaaata

SEQ ID NO: 238406 - DNA, 400 bp, Unknown
  Bacterial polypeptide expressing nucleotide sequence isolated from the Sargasso Sea
tatgagcgttcagaaaaccgctttgatcatggccggcggtacgggcggccacattttccccggcctggccgtggccgaagagttgcgcacgcgtggctggcgcgtgcactggctgggcgcgcccggcagcatggagtcacgcatcgtgccgcagcacggctttgcgctggaactcatcgatttctctggcgtgcgcggcaaggggctcgtcacgctggccctgctgccgctgcgcctgttgcgtgcgttctggcaggcgctgcaggtcgtgcgccgtgtgaagcccgatgtggtggtgggcctgggcggctacatcacctttccgggcgggatgatgggcgtgctcgcgggcaagcctctggtgctgcacgagcagaactccgtggcgggcatggccaac

SEQ ID NO: 238407 - DNA, 139 bp, Unknown
  Bacterial polypeptide expressing nucleotide sequence isolated from the Sargasso Sea
gatgcagactactggtaaacagcaaaaaacagcgctgattatggcaggtggcactggtggccatattttccctgcgaaagctgtagctgaactattaaagcaacaaggctggactattcatttggctgggtacagctga

SEQ ID NO: 238408 - DNA, 868 bp, Unknown
  Bacterial polypeptide expressing nucleotide sequence isolated from the Sargasso Sea
gtgcaaaaaacaaaagaaaaatttaaaattgttttaacaggaggagggactgcagggcatgttatgccacatattgctttgcttcctacttttattaagaaaaattggatagttctttatatcgggggagcaggacttgaaaaagaaatgattgagaatattggactttcttataagcaaattgctacaggtaaacttagaaggtatttttcttggcaaaacttatttgatttttttaaagtttttttaggctttttccaaagtctttaccatctttatatttttaaaccaaatgttgttttttcaaagggaggttttgttagtgttcctgtttgttttgctgcaagagtgcttaagattccagttgttactcatgaatctgatttaactccaggtcttgcaaataagatgattgcaaaagtagcttcagctgttttgtacgctttttcagatacaaaaaaatatttaaattcaaaaataaaaagtttttgggttggtattccagtaaggagtgaccttttaagtggagataaagaaaaggggctcaaactttgtcgttttaaagaagatgacaaaaaaccagttcttctcattttaggcggaagtttaggtgctaaaattatcaataatacggtgtatagttgccttgatgaacttttaaattcttataaggtgattcatattaccggaagatctaagtcaaaaaatatacataaaaaaggttataaatcttttgagtttttaaatgatgaatttaaagatgtactagcatgtagtcagctcgttgtttctagagcaggtgctaattcactttttgaactacttgcagctcaaaagccaatgcttctgataccattaagtaaagggt

SEQ ID NO: 238409 - DNA, 519 bp, Unknown
  Bacterial polypeptide expressing nucleotide sequence isolated from the Sargasso Sea
tatgaaaaaaaaaataatcttttctgcaggaggaaccggaggtcatatatttccagctattcacttaatgaatcatttttacgaaaaaggatatgaggttttattagtaacagatattagagggaaaaaatttatagaaaatatttcaaaatttaaatcatatgaaataaaaactgacactcctactaataaaacaatcttaaaaaaaattttttctttttttgtaattttgttatcaatatttaaatcaattattattataaaaaaagaaaaacctgatttagtatttgggattggagggtatgtatcttttcctatttcttttgcttcaaaaatttttcgtctgcccctcgtaatttatgaaagcaatactgtgttaggaagaactaacaaatttttattatcattttcaaataaaatatttttagcacgtgaacttgttattaattttaataaaaaatatcataataaaactcatatagttggagctgttttaaataaaaaaataattaattattg

SEQ ID NO: 238410 - DNA, 880 bp, Unknown
  Bacterial polypeptide expressing nucleotide sequence isolated from the Sargasso Sea
aatgagtaaaaaaataatttttacagcgggaggaacaggagggcatatattgcctgcaattaatttaatgaaacatttgtctgaaaaaaaatatgaagtagtattagtaactgatctaagaggaaataattttataagtaattactctgaatttagatcatacgtttttaaagcagaaacccctactaataaaaactttattaaaaagcttatatctttttttacaatttttaattcaatattaaaatcgatttttattttaagaaaagaaaaacccgatcttataattggttttggaggttatgtatcatttccaatttcatttgcttcaaaattttttaatttacccttatttatttatgaaagtaatttaactttagggagagcaaataagtatttgttaccttttgccaaaaaagtaattttatctaagttaataaaaaaaaattttccaaaaaaatttgaaaataaaatttgtgaatcaggtccaattttaagtaaaaatattattaaccaaaaagactttaagaaaaataatataaaagaaaattttgtaattttagttctaggaggaagtcagggtgctgaaatttttggcagagttgttccgtacgttattgaaatgattaaaaaagagggatttaatattgaaattaaacagcaatgtatcagcagtcagacaaaatctttagttgaatattatcaaaaaaattacattaaaaattatatttttgaatttgacaaagatatctctaaacatattttgtcatctgatttagtaataacaaggtccggggcaactacaacagcagaattagttcatatgcaaacaccatttattgcaataccacttccaaactctatagataatcaccaatat

SEQ ID NO: 238411 - DNA, 661 bp, Unknown
  Bacterial polypeptide expressing nucleotide sequence isolated from the Sargasso Sea
catgggtgataaaaatattcttattatggcaggcggaactggcggacatgtgtacccagctttagctatagcggaaaatttgcaaattaaaggatataaattattttggttgggcactatctatggtttagaaaaaaacattgttccaaaatatggatacacactattaaatattagtattatgagtgttaggggcaaaggttttttacgtttactagccatgcccattcttatcacagttgcagtgtttcagtcactaataattatgataaaaattcgcccagttattgtaataggcatggggggttttgttagcggcccaggaggaattgcagcatggttaatgcgtattccacttttgattcatgagcaaaatgccatagcagggttaactaataaaatgttagctccgttcgctgtttcaattatgacggcctttcctaaggtttttgaaaaatcgaaaaaaatctcggtaactggtaatccagtacgtgaggagattaaaaatataactaagcctgaaaaacgttacatcaaccgtaaatctaatttactaagaatacttgttttaggagggagtttgggcgctgaaaaacttaacaaaataataccagagactctacaaaatttaattggcaattattcagtacaagtcaaacat

SEQ ID NO: 238412 - DNA, 533 bp, Unknown
  Bacterial polypeptide expressing nucleotide sequence isolated from the Sargasso Sea
catgaataaaaagattgttttttcagcgggtggtacaggcggtcatatttttccaacgataaatcttatgaaattttttcataataataattatgaagttttgttgataacagatagcagaggaaaaagtttaattaataaatatttaaaatttaactcatatacaataaattcaggaacttttagcaataaaaatatttttttaaaatttttatctttttttttaatattattttctattataaaatcaatttttattttagtaaaagaaaagccaaatctagtttttggactagggggttatgtgtcttttccaatttcttttgcatctaagtttctaaatattccgttagtaatttacgaaaataatttgatactaggaagagctaacaaatatttgctaccactttcaaaaaaaattcttttgggaacagcaaaacctattaattttcctaaaaaatatgaaaataaaattagtctagttggtaatattttaaaagaagaaatcatgaattacaaattattaaaaaaaa

SEQ ID NO: 238413 - DNA, 856 bp, Unknown
  Bacterial polypeptide expressing nucleotide sequence isolated from the Sargasso Sea
aatgtataataacaaaagaaaaattgttactatcattgctggaggtacaggtggacacatatttccagcaatatcatgttttcattttttaaaaaacaaattccagatttgtataataacagactcacgtggtagcaaatattttgaacaaattaaaaataataaaataaataaatttgatttaattattattaattcgataagcccttataaaaagggattaattcaaaaatttaaatttgttttatatactcttttttccattttaaaatctttatttattttttttaaaattaaaccgaatctgttgattggttttgggggttatactacagtgttcccatgtgtcataggaaaaatgattggtataaagtttattatacatgaacaaaatgctattatgggaagagcaaataaatttttagagaagtttgctaaccttacaatggtttcttttgaaaatactattcctaaaaaatattctagaagaaggattttttgcggcacacccgtcagaaatgaattttttataaacaaaaataataaattaacaaaagaaaaaaataaaaaatatttcaatatattaatttttggaggaagcctaggttctaattttttttctgaaaaactccctgaggcattttgtaaaattgacaaaaatatattaaataaattgcaaataacacaccaaattataaatccaaaaattaatgaggtaaaacaaagatacttgtctcataacatctctgcttcagtaaataaattttttaaaaatatacatcaatattataaaaatgctgatttaataatttgtagagcaggtggatcaacattagcagaaatacttgtttctaaa

SEQ ID NO: 238414 - DNA, 557 bp, Unknown
  Bacterial polypeptide expressing nucleotide sequence isolated from the Sargasso Sea
aacaccggttaatatgttggttgtgggagggtcgttaggggctcaggtactaaaccaaacacttccaagtgcatttaaagcgcttaacaaaaccagtgcaataaatgtatggcaccagacaggtaaaggacatttaaacagcgttgagcaagcatacaaaacgcacatgtttgaaagcgataatgtaaaagttgcggaatttattgatgacatggatgcagcgtatgcttgggctgatattgttatctgccgagctggtgcgctaacggtaagtgaaattgcagctgcgggaaaaatggctgtatttgtgccgtttcctcatgcagttgacgaccatcaaacggctaacgcccaatatttggttgaggcagatggagcgttactcatgcagcaaagtgcatttaatgagcaatcgattgttgtgctattaaccccttacttagtaaaccctagtttaattaataaaatggctaataacgcaaaaaaacaagccattttagatgccacagcaagcgtagccgcgcactgtgagcaagtatcaaataagagagcgtaag

SEQ ID NO: 238415 - DNA, 210 bp, Unknown
  Bacterial polypeptide expressing nucleotide sequence isolated from the Sargasso Sea
gatgagtactagaccaatcatgattatggccgggggcacaggtggtcatgtatttcctggattggcagtggcaaaggagatatgcaaccgttcaggttcagtagtatggatgggtacgcgcaagggtcttgagggacggttagtaccagaggcaggcattgaggttgagtggatatcggtatctggacttcgaggtcggggggtttttgc

SEQ ID NO: 238416 - DNA, 853 bp, Unknown
  Bacterial polypeptide expressing nucleotide sequence isolated from the Sargasso Sea
aaaaaaaattaatattatactttctactggaggatcaggaggacatgtttttcctgcaattgctatttcagatgaaatgaagaaacttaaaattgaacattcaattttaactgataaaagatgtgaaaaatttttcagtaaaagaaatattccctataaagtaattcattcctcaagtgtacagattaatcctctatctttttttattggtgtattaaaaatttttgcaggattgattcaatcattaatatatattaaaaaattaaaacctttgttattaattggttttggaggttattctagtgtgcccacaataatagctgcaaaactcctcagaatttcaaccagtcttcacgaacagaatgctgttatggggaaggcaaatagatttttatcaaactttactgaatttgatatgttaagttataaaaaaactaaattttcaaatgtaaacaaatcaatatacactggcatgcctgtaaggaatatattggtaaataaaaatagtactaataatagtaatagtattaaagttcttgttttaggaggaagtcaaggtgcaagaattttttctaaaataattcctcaaataattgatgcattagataataagtttaaaaaaaaaattattttagtacaacagtcaagaactgaagatattaaaagtttaaaagatttatatttaaaaatgggaattaaatttaaactgaagactttttttgaaaatatttttgaggaaatgcttgattcaaaatttataatatcaagatgtggttcatcaacattagctgaaattgaactcgtatcaagattttcaatactttttccacttccaggatcaaaagataatcat

SEQ ID NO: 238417 - DNA, 499 bp, Unknown
  Bacterial polypeptide expressing nucleotide sequence isolated from the Sargasso Sea
atgaaagctctaatcttagctggaggaacaggaggacatgtatatccagccttatcagttgctaaagaacttagaagaaatcaattctcaatttcttggataggaaaaaaagggtcacttgaaaataagttttctaaagatgaaacttttgattttatttgcctagatactaaggcttttaaagggaaaaatatttatggaaaggttgttgctttactgtatcttgcgattaattttgttaaatgttttttaattattagaaagataaagcctgatatagttttttctactggaggttatgtttctttagcaccagcacttgccacttttatattatctattccacttttcatacatgaacaaaatagcatacctggactagtaaataagattctaaatagaatttctaagttaacttttgaagcctttccaggttccttcgctgaatcttctaagattcatactgtaggaaaccctgttagatctgaaattattaaaa

SEQ ID NO: 238418 - DNA, 262 bp, Unknown
  Bacterial polypeptide expressing nucleotide sequence isolated from the Sargasso Sea
tatgaagaaaaaaataatttttacagcaggaggcacgggaggtcatatttttcccgctataaatttaatgaaacatatatttgaaaaggactatgatgttttgttagtgacagataacagaggtaataaatttattgaaaattttaaagaatttaagtcatacattttaaaatctggcacaccaactaataaaaatattataaaaaagtttatttcattttttattattttctattcattgattcaatcaattataattata

SEQ ID NO: 238419 - DNA, 658 bp, Unknown
  Bacterial polypeptide expressing nucleotide sequence isolated from the Sargasso Sea
tatgaaatttttactagtagctgcaaaaactggaggtcatgtttttcccgcatcagtaattggtaaagagttaacaaaaaacgatcatgaagttatttttgttggcacaggttctgaaattgaaaaaaatgcataccataacctagattctgaaatctatgaattatcaatgaatggtttccgaggcgttaatttaattacgaaattacaagtcctatttcaaacctttatcaatgtttttaaagtaattcaaattattaataaagaaaaaataaatgcaatgattggatttggtggttttattactgtgccagttggagttgcatgttggataaaaagaaaaccaatttttatacatgagcaaaatgctttgatgggatctgccaataaattgttatcaaaaatatctaaaattaattttcttgggttccctattaatggatttaataattctatttattcaggcaaccctataagggaatcatttattaataatagcgaaaatactattgatgataaaaacaagataagaatttatataacaggtggcagccaaggagcacaatatataaataagcatttaccaaggatttttaaggatttttcaaataatataaaaataattcatcaatgtggaaaaataattttcaagaagtaa

SEQ ID NO: 238420 - DNA, 370 bp, Unknown
  Bacterial polypeptide expressing nucleotide sequence isolated from the Sargasso Sea
atgaccaggaaaaagatcattctagtggctggaggaaccggtggccatatctttcctgctattagtttggcaggtaaacttcagaaaatgagtcatgaaattcttattattactgactttagaggcaagaaatttgagatagaaaaagatggttggtcagtaaaatacattaatatagaaaacccaaaccagaataagttatttgggaaaataaaggcggccgtaagtttaattagaagtactgttgcatcctggaaaataatttcaaactttggcgcggatgtagttgttggttttggaggctatccatctcttccacctgtgatagccgcaaattggatgtgtgtgccatcaatcctacacgaaaaaa

SEQ ID NO: 238421 - DNA, 703 bp, Unknown
  Bacterial polypeptide expressing nucleotide sequence isolated from the Sargasso Sea
aatgattttggctggtggaacaggtggacatgttattccagggctcaccattgcaaaggcactggaggatgctaaatgtgatattacatggatcggtactaagggcggtattgaagaaaaactcgttcgtaaggctaatattaaaattgaatatataactgtaatgggtttaaggggcaagagcctcatgaacgtcctaattgcagtgaagcagttaattcgatctatttttcaatcaattaatcttctaatgaaatatcgccctgatgtggttattggaatgggagggtatgttagtggacttggaggaatagttgcatttctattgagatatcctttagtaattcatgagcagaactcagtcccaggtacaacaaataaattcctcgcaaaaatagcatcatctgtattggaggcttttccgggcagcttcagaagtaatatgaatgcgaaaacgatagggaatccaattagagaagagatagctcttattgaggaccccaaaaaaagactccaagataggaattttccgattagaatccttgttctgggagggagtcaaggatcacttattttaaatcagtccgttccgaaagcaattaaggaagtagcatcatcaagcaaactagaagtctttcatcaggctggagagaaaactctgtctaatgcaaaaaaagcatatgaagatgttcctgtaggactt

SEQ ID NO: 238422 - DNA, 1066 bp, Unknown
  Bacterial polypeptide expressing nucleotide sequence isolated from the Sargasso Sea
atgaatattttatttattgccgggggaacaggagggcatgtctatcctgcgttaagtattgctcaagaattcaaaggaaaagacaacaatattgcatggattggaaaagccgatagtcttgaggaacgggtttgttcaaaagagggctttgtattttactctgttaaaggtacaggttttcttggaaaaggtgttctaggcaagatagtcgcgctttatttttttgttgctgctttactaaggagttttttcttgttaatcaaaataaagcctgacttaatcgtctctactggagggtacatttctcttgcacctagcttattaggttcattattttgccctctttttattcatgaacagaacagtgtcgccggactaacaaataaaattcttcacagattttccaaaataacatttgaagcatttccagatacttttttaaactttaaatccaaaacctcatttgtaggaaatccggtaagaaaagagatctttagtatctcaactaaaaagcaagaaaaaacatcaacctttaatatactcatattaggaggtagtcagggctctaagcagatcaatgacataattaaaatcattcttacaaatcatgatttaccttctagctggaatattgttcatcaagcaggaacgctggataacagtcgattaaaagaagtttatgaaaaatcaggagtgaattttgaaatcagggaatttattgaaaatatggcagaggtttatcagcagtctcaattgattatttcaagatcgggtgccatgacaataagtgaaatatgttcagcaggaaaaccgtcagtgcttctcccattgccttgggcttcagacaaccatcaatacatcaatgctaaatatctcaaggatcaaggggcagcagagattattgaatcggatatttctaattctgaaaaacttttcaagctattaattgaacttgaaaaggacgataataaacgagagtcaatggggcataatgccactttggtttttcctcctaatacttctgagagtatttataaggctatcaatgaatcactcaaaatataaa

SEQ ID NO: 238423 - DNA, 1051 bp, Unknown
  Bacterial polypeptide expressing nucleotide sequence isolated from the Sargasso Sea
atgaaaattttaattgtagccgcaaaaacaggaggccatgtttttccagcatcatcaatcgcaaaagaattaattcttaataatcatgagattgtttttcttggaattggttccgaaattgagaagaatgcatacaaggatatatcttctaagacatataatctttcaattcagggttatagaaatgaaaatgtaataacaagattaaaagttttgctgcaagtatttataaatattttcaaagttattaggattgtttccagagaaaaaatagacggaatgattggttttggaggttttataacagtaccagctggtattggatgttggttgaaaagaaagcccatcttcttgcatgagcaaaatgctatattagggtcagcaaatagactgatatccaaattttctaaaataaattttctgggattccctatcaaaaatatcaagagatcaattgtatctggaaatcctattagaagatcttttgcaaataatcacaattataaaaataatgatgattttatcaatatctatatcacaggaggtagccaaggagcagaatatattaataatgaaattccaaagatattcgaaaattttcctcatgcaataaagatcaaacaccaatgcggaaagcataatagacaaaaagtaagaaatttatatgaacaccataatgttaatgctgaggtttcagaattttataaaaatcctgcggaacaaataatatggtctgattttgttatttctagaggaggagcattgagtttatctgaaattacttcattaaaaagaggcgtttttataatcccgcttcctacatcaattgataatcatcaaatagaaaatgcaaaaattattgaaaatatgaatatgggtatattgcataaccaaaatgactcaccaagaattcttttacaagaaataaagagaatcattgaaaataaaacttttcttaaatggaaaaatactactaatcaaagtcataataagtctagagaaatcatcactagcaatatagaaaaatattttaataatgaagctgtttaaa

SEQ ID NO: 238424 - DNA, 1048 bp, Unknown
  Bacterial polypeptide expressing nucleotide sequence isolated from the Sargasso Sea
gatgaaatatttaattgtagccgccaagacaggcggtcatatttttcctgctaaagcaatagcagaagagctaattaataataataacgaaatcattttattgggaataggtaatgaaatagaaaataatgcatacaaagaattagattcaaagaagtattcaatattaattgatggttttcgaggacaaaaaatattaaaaaagtttaaagttcttattcaaacattaaaaggtgttcttaaagttttaaagattatcaaaaaagaaaatatagatgcaatgattggttttggaggttttatttgtataccagctggaattgcaatttggataagaagattgccaatattcattcatgaacaaaatgcaattatgggcactgctaacagatttttgtcaaagatagctaaaattaactttttaggatttccaataaagcaaattaaacgatcagttgtctctggtaatcctattaggaaatcatttataaatactgataatggccatgttgattatgatcaaaacgaaataagaatttatgtcactggcggaagtcaaggagctaattttattaaccaagagattccaatggttttaaaagagttatcattcaatttaaaaataaaacatcaatgtggagaaaattattttaatgaagtaaaaagtttgtatagtgcaggaaatgttcaagcagaggtatataaattttatgataatccttcgaaagagattttatggtcagattttgttatatctagagccggtgctttaagtttatcagagataatatctcttaaaagaggagctctaataataccattagcaacatccattgataatcatcaagttaaaaatgcaaaaattattacaaaaatgaatatgggtgttttgcacgaagagaaagatggcaaagagaaattaataaacaaattaaaagaagtgattgagaaaaaattatatttaaattggaaaaaataccatacaaatgatcatgtcaatgcgtctaaaattattctcaaacatttagaggattacttcaaaaaatga

SEQ ID NO: 238425 - DNA, 676 bp, Unknown
  Bacterial polypeptide expressing nucleotide sequence isolated from the Sargasso Sea
atgaaagttttaatattagctggtggaacaggaggtcatgtttatccagcattatctgttgccaaagaattcagcagaagcaaacattctatattctggataggcaaaaagttatcacttgaaagtgaactatctaaaaaagagagttttaactttacaagtcttgaaacaaaaggtttcaaagggaaaaatattattgggaagatcgtttctttgatttaccttgagattaatgttttaaaaagcatttttattattaaaaagataaagcctgatatggtcttttcaactggcgggcatgtcaccttagcaccagccctggcttcttatttattgtctattccacttttcatccatgaacaaaatagcgtacctggattggttaataagattcttaataggttatctaaattaacttttgaagccttccctggttcttttaataaatctccaaagattcatacggtaggtaatcctgtcagatcagagattattaagagcccaccacctaaaccaactatcaaggaacatttcaatattctcatcctgggtggtagtcaaggttctaggcaattaaacgaaatagttttaaaggcattcaaaaataagatgattccttctcactggcatatagttcatcaaattggtgatttagatagaagttcaatagttgagg

SEQ ID NO: 238426 - DNA, 1045 bp, Unknown
  Bacterial polypeptide expressing nucleotide sequence isolated from the Sargasso Sea
catgaaatttcttatagttgcagcaaaaacaggtggtcatatttttcctgcagtggcagttgcggatgaaattaagaaaaataactttgaattagttttcttgggaacaggatccagtattgaggaagatgcatatgataagttcagttctgttttttacaagctacaaatggaaggattcagaggcaaaagcttatcaaaaaaattaaaagttatttttcaagtaatttttaatatttttaaagttattaagattattaaaaaagaaaaaattaacgcgatgattggttttggaggttttataactgttccggttggaatcggatgctatcttttaaatattccaatatttattcacgagcaaaatgcagtcatgggatcagcaaataaaattctatcaaaaatatccaaaattaattttttaggaatgcgaatcaaaaatattaaaaactctgttcattctggaaatccaataagaactgaattttttcaatcatcagacttagataatgagtatgtgaatatttatataacaggaggtagtcaaggcgctgattacattaatgaaaatcttccaaaggccttatcaaaattgactaacataaatgttaaacatcagtgcggtaaaaacaatattataaaagttcgagagctttataagaaatatggactctcagcagagattcacgatttttataaaaatcctgctgagcaaatactttggtcggattttgtaatatcaagagcaggtgctttgagtttatcagaaatatcttcattgcaaagaggagcactgatgattcctctgcctacagcaatagacaatcatcagtttgagaatgcaaaatctattgttgatcttgggatgggagaaattcatctacaaaatgactcgattgaaagattaatatgcaagattgagaacattatttcaaatcaaagttatgtaaattggaaaaaacaaaggaataaagatcataaatatgctgcaaaagttattactgaaaatatctataagtttttaaatagaaatgaaaaagtttga

SEQ ID NO: 238427 - DNA, 1093 bp, Unknown
  Bacterial polypeptide expressing nucleotide sequence isolated from the Sargasso Sea
atgagtaataatttgatcatttctggtggaggaacaggtggacatatttatccagcaataagcatagcaaatcaactttcaaaaaaaatatcacactgtaatattttgtttgtaggtgcaaaaaataaaatggaaatgaaaaaagtacctcaaaatgggtacaaaataattggactttggatttctggatttcaaagaaaatttaatttgttctcaaacatatcattaccatttaaaatcatatttagtcttatacattcattattaatcattttaaaacataaaccaaaaatagttgttggaactggcggatatgcaagtggtcctgtaatgtatattgcttcaattttaggaataccagtctttatacaagaacaaaattcatatccaggattaaccaacagaatattatcaaaatatgctacaaaaatctttgtagcgtatgatggaatggacaaatattttaatagttcaaaaattattgtttcaggaaatcctattagaaaatcaattaagaatattagtgtaaagaataaaagtgattatttaagttctattgatttaaaatcagatcttcagactattctagttcttggaggaagtttaggtgcatatcaactaaatgaatttgttagtaagaatttagatttctttaaaaaaaataatttacaagtaatacttcaatgtggttcaagatactcagataaatacaaatttttaaataatactcaaatcaaagttttaccatttattgaagaaatggataaagctttttcggcagctgacataataatttcaagatcaggtgctagtattatttcagaactgtgcttcgtgggtaaacctgtaatttttattccatctccgaatgttgcagaagatcatcaaactaaaaatgccaaaaaattgtatgatttgggagctgcagaatatgtagaggaagatgaaattgactataaattgacatcaattattaataaaattttagtaagtgaaatttacagagactcactttctgcaaaaattagttctctatcaaaacctgatgcatccaaaataattgttaatgaaattaaaatgtatttgaaatgaa

SEQ ID NO: 238428 - DNA, 1060 bp, Unknown
  Bacterial polypeptide expressing nucleotide sequence isolated from the Sargasso Sea
aatgaaagcattgattctagctggaggcacaggaggtcatgtctatccagccttgtctgtagccaaagaattaaaaagaaacgaattttctatttcttggataggtaaaaaaaaatctttagaaagtaatctttcaaaaaaagagggttttaactttatcagccttaatgcaaaagggtttaaaggaaaaaatatttttgggaagattatttccctaatctacctcgatataaatgtcttcaagagcatattcattattaaaaaagtaaagcctgatattgtattttcaacaggtggttatgttagtttggcaccagctcttgcttcttatctattgtctattccactttttatacatgaacaaaatagcgtacccggtttggtaaataagatactaaatagactatcaaagaaaacttttgaagcttttcctggttcatttgataaatcctcaaagattcatactgtaggaaatcctgtcaggccagagataattaaaaatcctgaagacaaacctacaataaaagatcattttaatattctcatactaggtggtagccaaggctcagaacaacttaatgagataatcataaagtcatttaaaggcaagactgtctcttcaaactggcgaataattcatcaaattggtcattgcgatcaagctccaattatagagctttattcagcacaatcttttaaatacgaggtagttccttatattgagaatatagctaaggcttatcatgagtgtgatttagtcattggaagatcgggcgctatgactattagcgaaatttgtagttctgctaaaccttcgattttattacctttaccttgggcagcagacaatcatcaatactttaatgctaaatttttgcaagctaaaaaagcttcaatattattagagtcgtccttaaccagtgcagataaattatttacacttctaaatgatttagaaaaagatcataatgcgaggcatgcgatgagcttgaatgcatttagttcttttcaaatggcatcagatagcagaattgtagagataatcaatgaatccatctaa

SEQ ID NO: 238429 - DNA, 589 bp, Unknown
  Bacterial polypeptide expressing nucleotide sequence isolated from the Sargasso Sea
atgacaaaaaaacgcaacataaaattccttgtattagccggtggcacaggagggcatatatttccagctcaagcttttgctgaattttgcataaaaaacggtgattatattcactggattgggactaacagaggtctagaaaaacaaataactcaaaaatataatatagatttcacggaaattaaatttaatggcctccgtggaaaatcaatttttaaatttataaaattccctttttcattgttatataatttaattcttattaaaaaattatttaaaaaaattaagccagatatcactattagctttggaggatatagcactgtaccaggtggaattatctcctatttaacaaaaactcctttaatcttacacgagcaaaatgcaaaaatcggcagagctaataagtttttatcttattttgcaaaaattcactccagcgcatacgaaaatgtatttccagaaaaatttaaaaactcatctataactataggcaatccattaagaaatttattttataataatcaaattaaatttaataaaaaatctaatataaatattctcattcttggcggatctcatggagcta

SEQ ID NO: 238430 - DNA, 804 bp, Unknown
  Bacterial polypeptide expressing nucleotide sequence isolated from the Sargasso Sea
catgaagcgtgtaatgatagcggcaggtggtacgggcggacatatctttcctgcgttagtggttgctgagcagttggtggcgcaaggggtggaggtgcagtgggtcggctctcgccgtggcttagaggcccgattagtcgcgccacaataccccttaacgtatttgaaggtagaggcccttcgcgggaaagggcgttggcagcagttcaagcggttagtcggtttatgttgggcgaccttgaagatggtgagggtcattcggcgcacgcgacctgatgtggtgttaacgatgggtggttttgttagtgcgccggtaggcgtggcggcttggttaagtcgacgatgtttagtggtgcatgagcagaacgctgtccctggcatggtgaatcgctacttgtcacggttagcggcagtggtcatgcagggatacgcatccgctttttcgccgacaacgaaggtgaagacggtcggtaatccagtgcgtgcagcattgctgggcgcagcgttaccggcagcgcgctatggtcaacgtaatggcttgtttcgtgtactcgtgttgggcggttctcagggggcgcatgcaattaatactgcggtgatggattgggtggattactatgctttggcagatgaggtggaggtgtggcatcaggcaggacgatccgattgtgcgcggttaacgcgagagtatgatcgaatggatgtgacagtgcgtgtggatgcttttattgaggatatggtaagtgcttatacgtgggccgatttagtgatttgtcgtgctggcgcgatgacggtgacggaagt

SEQ ID NO: 238431 - DNA, 906 bp, Unknown
  Bacterial polypeptide expressing nucleotide sequence isolated from the Sargasso Sea
gtcgcgcatcatttaatggctcagggctggcaagttcgttggctgggcaccgccgatcgtatggaagcggacttagtgccgaagcatggcattgaaattgactttattcgcatctccggtttgcgtggcaaaggtgtcaacgctctgcttgccgcccccgtgcgtatttttaatgcctggcgtcaggcgcgcgccatcatgaagcagtttaagcctgatgtggtgctgggtatgggcggctacgtgtccggccctggcggtctggcagcctggtcattaggcattccggttgtactgcatgagcagaatggcattgcgggattaaccaacaagtggctggcgaaaattgccactacggtgatgcaggcttttcctggcgctttcccgaatgcggaagtggtgggtaacccggtacgcaccgacgttctggcgctgccgtcgcccgaagtacgtctggcagggcgtgaaggcccggttcgcgtgctggtcgtcggggggtctcagggtgcacgcgtattgaaccagacgatgccgcaggttgccgcagagcttggtgatgcggtgactatttggcatcagagcggcaaaggtgcgcagcaaaccgttgaacaggcatatgctgacgcgggacaaccgcagcacaaggtcactgagtttattgatgatatggcagccgcctacgcgtgggcggatgtcgtagtttgtcgctcaggtgcgctgacggtaagtgaaattgctgccgcaggtttgcctgcgctgtttgtgcctttccagcacaaagaccgacagcagtactggaatgcgctgccgctggagaaagcgggcgccgccaaaattcttgagcagccgcagtttactgtggatgccgtcgctaacacccttttccgggtggtcgcgagaaacctt

SEQ ID NO: 238432 - DNA, 658 bp, Unknown
  Bacterial polypeptide expressing nucleotide sequence isolated from the Sargasso Sea
atgtatcgggtttttgctggcgttaacccgccgccgcatcggcgcggagaccgtccaatgacaggtgatagccacatcatgctcgcggcagggggaaccggtggacacatatttcctgccattgcggtcgcggaagagatgttacatcgcggttaccgggtttctttgatcaccgattcccgtggggtgaatctgggcaagacactttccgaagttcaagtgcatcgaatcaacgcgtcgggtatccgtggaaacattctgcaaaaggtaagcggtgtgttgtctatcggtgtcggggtgctgcaggcgcgacggcttttttcacgtcatcggcctcaatgcgttatcgggtttggcggatatccttcggtaccgacgatgctggccgcaaacctgtccaaactgccagctattattcacgaacaaaatgccgtaattgggcgggcaaaccggctggtcgccaagcgcgtatcgaagattgcgacatcgttcaatgaaaccgctggtgttgatgctgaaactgcgtccaagattaaccagaccggaaacccggttcgggcagcattctcccaagcccggcaaacaccctatccgccgatcggaccgaatggagaagacgtaaaaatattggtgctgggcggcagtcagggcgccactg

SEQ ID NO: 238433 - DNA, 1105 bp, Unknown
  Bacterial polypeptide expressing nucleotide sequence isolated from the Sargasso Sea
tatgaccgcgtcgcaacgcacgctgatggtgatggcaggcggcaccgggggccatgtgttcccggggctcgcggtcgctcaccggatggaagcggcgggctggcgcgtcgtgtggctcggcaatccggccgggatggaagcgacgctcgtgccgaagcacggcattccgatggaatacgtgcggttcggcggactacgcggcaagggcctgaagaccaagctgacgctgccgttcaacctgctgcgcgcatgcgggcagagtctggccgcgctgcgccgcgtgcggcccgacgtcgtgctcgggatgggcggctacatcacgttcccggcgggcgtgatgaccgcgctgtcgggccgtccgctcgtgctgcatgaacagaattcgatcgcgggcctgacgaacaaggtgctcgcgaaattcgcgaaacgcgtgctcgtcgcgttccccggtgcgctgccgcacgcggaatggacgggtaacccgattcgcgcggaacttgccggcacggaagcgcccaaagcacgctatgcgtcgcgcagcggcccgctgaacgtgctggtcgtcggcggcagcctcggtgcggccgcgctgaacgaagtggtgccgcgcgcgctggcgatgctggcgccgggcgaacgcccgcgcatcgtgcaccaggccggcgcgaagcacatcgaagcattgaaggcgaattacgaagcggccggtttcgcggccggcgaagacgtgcggctcgtgccgttcatcgacgacatggcggccgcgtatgcggcggcggatctcgtgatctgccggtcgggcgcgatgacggtgtcggagatcgcggcggtgggcgtggcggcgctgttcgtgccgttcccgtacgcggtcgacgatcatcagacgagcaacgccgcgttcctcgccgatgcgggcgcggccgtgctggtgcaacaacgcgacctgtcggcggaactgctcgccgactggctgcgcggccagtcgcgggcatcgctcgcggacatggcggaacgttcgcgctcgctggcgaagcccgaggccaccgacgaagtcgcgcgcgtgtgcgcgaaggcggccggcgcgaacctggaagaactgcaatga

SEQ ID NO: 238434 - DNA, 1064 bp, Unknown
  Bacterial polypeptide expressing nucleotide sequence isolated from the Sargasso Sea
tatgagcgcggtgcgggtgatattggctgctggaggaactggtgggcacgtattcccagcgattggtttagcagaagcactttcgaagagagggcacagcgttctatgcctcacggatacaagggcgatagatttgcagccttccgttagatcatgggatgtaaaatgtattcccgctataagttttagcggcagcggtatccgccctaaaataagagctttctggacgctaattaagggaatttttttaagtcaatattttattaaaaaatttgatgcagaaattgtggttggatttggtggatatccaacagttgcgccgatcatagccgcttttataagtcggagcattgtcatacttcatgagcaaaatgctgtactgggccgtgcaaatagatggctttcgagtgtcgcccacattatcgccacttcttttgaactaaccagaggtctgaatgataagcattctaagacagtaatggttggtaaccctgtgcgaaacgaaatgaaaaaagcccggtcgtcatcctatccaattattaaagccgataacaaaatcaatattttagtgattggcggaagtgcaggcgcaaagattctttcagatactgtacccaaagcactcttattactgccaacttctctaaggaaaaatcttttgatcacacaacaatgtcgagaagaagacttatcgagagtagtggccatatataaaacagccaaacagaaatctgacataaaaacattttttgatgacatatctgagaaaataaaaaactcgcatctagtcatttcccggtctggtgcgtcaacggtagccgagttaagtgtcattggaaggcccgctatattaatcccttatcaattcgctattgataatcaccagaaaattaatgcagatgcgatggttaaatctggtggggcatggagttttgacgaaagtaatttacaaccaaaggctttagctaacttccttgaagagatcttgactgatcatgagaagcttcgatctgcagcccatgcttctcgtaactttggaactccaagtcttcggaggtccttgc

SEQ ID NO: 238435 - DNA, 1087 bp, Unknown
  Bacterial polypeptide expressing nucleotide sequence isolated from the Sargasso Sea
atgcaacataaaaatattctcattatggcaggtggaacaggaggtcatgtctatccagcattggctgttgccgaaaatttaagactaaaagggtttaaattattttggttaggtacaagtcatggtctagagaagaaaatcgttccaaactatggctacccgcttcataaaatcagtattgtctcaattcgaggtaaaggctttttacgtttattattagtgcccttttttcttataatttcattatttcaagcattgatcattatgattaaggttcgtccagtagttgttttgggtatggggggttttgcaagtggaccgggcgggattgctgcgtggataatgcgtatacctcttctaatacacgaacaaaatgcaatagcaggtctaaccaataaactactagcaccattcgcttcttcaattatgacatctttcccaagggtgtttaaaaaatcaaataaaattatcgtgacaggaaatcctacaagagaagatattaagaatatatcaaaacctgagcagcggtataagaatcgtgaatctaaattattaaaagtacttgtactcggcggaagtcaaggagcggaaaaacttaataaaataatacccgagacactacataatttcgatagaaaatatattataaaaataaaacatcaatgcggtgaaagaaatttatcaggcactcatgaaatatatgcaaaatacaatgttgccgcagaaatcattccctttatcgaagatatggttggtgcttatatgtgggctgatattgtaatttgtcgagccggtgcttcaactatttttgaattagcagcttgcggcattgcttccatactgattccttttccttttgcagtcgatgatcaccaagtaagaaatgctgagtatttggcaaataatgatgcagctatccttgtcgaagaaagcgaattaagtacaaaaaaactgaaacaaattttattagatttttttaatacaccagaattactaatagaaatggcaataaaggcaaggaaattatcaaaaccaaatgcgagtaataatgttgcaaaattatgtgtagagacgtcctatgcgtgaa

SEQ ID NO: 238436 - DNA, 1090 bp, Unknown
  Bacterial polypeptide expressing nucleotide sequence isolated from the Sargasso Sea
aatgaccgacgcgggtaaacgtattttagtcatggcaggcggcacgggcggacatgtgttcccggcactcgcggtggcaaaatatttagcgcagcaaggttggcaagtgcgttggttaggtacagccgaccgtatggaggcgcgcttagtgcctcagtatggcttcgatatcgattttatcgacatcaagggcgtgcgtggcaatggtttagtacgtaaattggcggcgccttttaaagtggtgcgatcgattctgcaagccaaggccgtgattgccgagttcaagcccgatgtggtgctgggcatgggcggattcgccagtggtccgggcggtgtggcggccaaattagcgggcgtgcccttagtgctgcatgagcaaaatgccattccgggaatgaccaacaagttgctctcgcgaattgcgaatcaagtactgtgcgcctttaaaaataccttcactcaggttaaggcaaaggtggtgggtaaccccatccgtcgcgagttaattgccttaggtgccgagcctaagcaagccgcggatgatgccttaaaagtcttggtggtaggcggcagcttaggcgccaaagtctttaacgacttaatgcctgaagtcgtggctgcgctcagtaaacagcagtcgattacggtttggcatcaagtgggtaaggataatctggcaggagtgaagtcggcttatcaacagcaaggacaagagggcggcgttaacgttgccgaatttattgatgatatggaagccgcctatcgctgggcagatgtggtattgtgccgcgctggcgcgctgacggtatccgagttagcggcggtgggacttccgagtattctggtgccttatccccatgcagtggatgatcaccaaacccgtaacgctcaagtattggttgaggctggcgccgctttcctattgccgcaggccatcttggacgtgaataagctggtgagtaaattacagttactcgccaatgacagagcagaattagcccaaatgggccaaagagcgagagatgttgccgtactggatgcaaccgaacaggtggcccaagtgtgtatcgctctcgccgagaaaggatag

SEQ ID NO: 238437 - DNA, 838 bp, Unknown
  Bacterial polypeptide expressing nucleotide sequence isolated from the Sargasso Sea
gcccgtggctttagtcaagcaactgaatccagaactggtgttaggttttggcggttatgccagtggtccaggtggtttagccgcttggttagcgggcaaacctttaatagtgcatgagcaaaatgcagtagcaggcaccaccaacagattattggctcgtatcgcgaaaaaagtgttagtggcttttccgcaggcctttgctgatcgcaaagacagattagtagtgggtaatccggtgcgtgcagaagtactggctgtatctggccaaaaacaactacaggcgccaacaccaagtttaaaagtgctggtggtcggtggcagtttaggcgcacaggtctttaatcagcacttaccggctttgtttgcgaaggcagcgcagtttggtcagttagaaatacgtcaccagacgggtaaagcaatggagactcaggtgcaacaggcctatgcggctttacctgaattaaaggccagtgccagtgcatttattgaagatatggctgcggcttacacctgggctgatttagtgatttgccgcgctggtgctttaacagtctctgaagtggcttgtgccggcgtagctgcagtttttgtgcctttgccgtcggctattgatgatcatcagacggcgaatgccagctggttagtacaaaaacaaggggcagtgttactgccacaaagcgaattcagtaaaggtgcgttgttgcctttactccagtcctggttgcaggacaaaagtgcactgcgtcatttggcaaataatgcccgcagaacagcaatagatgatgccgcagaacaagttgttagagtctgtggtgaagtgataggtaagactaaatga

SEQ ID NO: 238438 - DNA, 1090 bp, Unknown
  Bacterial polypeptide expressing nucleotide sequence isolated from the Sargasso Sea
atgaccgacgcgggtaaacgtattttagtcatggcaggcggcacgggcggacatgtgttcccggcgctcgcggtggcaaaatatttagcgcagcaaggttggcaagtgcgttggttaggaacagccgaccgtatggaggcgcgtttagtgcctcagtatggcttcgatatcgattttatcgatatcaagggcgtgcgtggcaatggtttagtgcgtaaattggcggcgccttttaaagtggtgcgctcgattctgcaagccaaggccgtgattgccgagttcaagcccgatgtggtgttgggcatgggcggatttgccagtggcccgggcggtgtggcggcgaaattagcgggcgtgcccttagtgctgcatgagcaaaatgccattccgggaatgaccaacaagttactctcgcgaattgcgaatcaagtactgtgcgcctttaaaaataccttcactcaggtgaaggccaaggtggtgggtaaccccattcgtcgcgagcttattgctttaggtgccgagcctaagcaagccgcggatgatgctttaaaagtcttagtggtgggcggcagtttaggcgccaaagtctttaacgacttaatgcctgaagtggttgccgcgctgagtaagcagcagtcgattacggtttggcatcaagtgggtaaggataatctgacgggcgttaagtcggcttatcaacagcaaggacaagagggcggcgttaacgttgccgaatttattgatgacatggaagccgcctatcgctgggcggatgtggtattgtgccgtgccggcgcgctgacggtatccgagttagcggcggtgggactaccgagtattctggtgccttatccccatgcagtggatgaccatcagacccgtaacgcccaagtattggttgaggctggcgccgctttcctattgccgcaggccatcttggacgtgaataaactggtgagtaaattacagttactcgccaatgacagagcagaattagcccaaatgggccaaagagcgagagatgttgccgtgttggatgcgaccgaacaggtggcccaagtctgtatcgctctcgccgagaaaggatagg

SEQ ID NO: 238439 - DNA, 1072 bp, Unknown
  Bacterial polypeptide expressing nucleotide sequence isolated from the Sargasso Sea
gttggtgatggcaggcggtaccgggggccatgtgttccccggcttggccgtggctgatcgcctcaaggcccagggctggaccattcactggctcggcaccgccgaccggatggaggccgagctggtgcccgcccatggttaccccatctccttcatcgatatccagggggtacgtggcaacggcatcaagcgtctgctggtcgcgccctatcgcatcgtcaaatccgtgctgcaggcgcgccgggtgctcaagaccattcgtcccgacgtggtgctcggcatgggcggctttgcctccggcccgggtggcgtggcggcgtggctgtccggtatcccgctgctgctgcacgagcagaatgctgcggccggcctgaccaacaagctgctggctcgcctcgccaagcgggtgctgatggcatttccgggcgcctttgcgccgagccgtcgcaccgccgtggtgggcaacccggtacgccccgaagtggtggcgctgccggatccccagttgcgcagcggtgccgagcccctgcggctgctgatcgtcggtggcagcctgggggcccgggtgctcaacgagcaggtgccgccagcggtggcggcggctggcgtgcccatcgaggtgcgtcaccagtgcggcaagggcaatcgggatgccgtggccgaagcctacgccaaagagggcgttgcggccgaagtgagcgaatttatcaaggacatggccggtgcctatgcctgggccgatctggtggtgtgccgggcgggggcgctgaccgtctccgaagtggctgccgccggggtcgccgccatttttgtaccgctgccccacgcggtggatgatcaccagactcgcaacgccctgaccctggtcgacggcggtgcggctgaattcctgccccaatccgagctgacgacggcctcgctggccgcgcgtctctcctggcttgccgggcgcagggaaaccctattgaacatggcccaggccgcccgtcgcgtggccattaccgatgccgccgagcgagttgccgacgagtgcaaacgcctggcgaccgggcagattgagagagaactatga

SEQ ID NO: 238440 - DNA, 916 bp, Unknown
  Bacterial polypeptide expressing nucleotide sequence isolated from the Sargasso Sea
ccgctgcacctgatcaatgtcagcggcctgcgtggcaagggcaagctgtccctgctcaaggcgccgttccagttgctgcgttcgctgctgcaggcgcgtcgtatcgtgcgtgaactgcagccggtgtgcgtgcttggcatgggcggatatgtcaccggtcccggcggtctggccgcgcgtatggccggcgtgccgctggtgattcacgagcagaacgccgtggccggtaccgccaatcgtctgctgtcgcgtatcgccacgcgcatttgcgaggccttcccgaacaccttcggtgcttccgacaagcgccgcaccaccggtaacccggtgcgtgaagagctgttcctggaaacgccgcgcgagccgctggccggacgcaaaccgaaattgctggtgctgggcggcagcctgggcgccgagccgctgaacaaattgctgccggccgcactggagaaaatccctgtcgatgtacgtccgcaggtgttccaccaggccggtaaacaacatgccgacatcactgcggagcgttatcgcgatgccgcggtcgaagccgaggtcgcgcccttcatcaaggacatggcacgcgcctacggctgggccgatctggtggtttgccgcgccggtgcgctgaccgtcagcgagctggccgcagcggggctaccgtcgtttctcgtgccactgccgcacgccatcgacgaccaccagagccgcaatgccgaatatctggcgaaggagggcgccgccgtccttctcccgcaacatgccactgacgcggccacgcttgccgcgcagctcaccgaggttctgatgcacctggaaaaactcaatgtcatgggcgccaccgcgcgtcgcctggccaagcccgatgccacccgcacggtggtcgatatctgccaggaggtgatgcgtggctaag

SEQ ID NO: 238441 - DNA, 1120 bp, Unknown
  Bacterial polypeptide expressing nucleotide sequence isolated from the Sargasso Sea
tatgacccccatgcagcaacgcacgctgatggtgatggccggtggcaccgggggacacgtgttcccggggctcgcggtcgcgcacctgatgcaggcatggggctggaaggtcgtatggctcggcaatcccgcgggcatggaagctacgctggtgccgaaacacggcattccgatggaatacgtgcgcttcggcggattgcgcggcaaggggctgaagaccaagctgatgctgccgctgaatctgctgcgcgcctgctcgcaaagcctgagtgtgttgcgtcgcgtgaagcccgacgtggtgctcggcatgggtggttacattacgttcccggcgggtttgatgaccgcgttgagcggccgtccgctggtactgcatgaacagaattcgattgcgggcctcgctaacaaggtgctcgcgaaagtcgccaaacgggtactggttgcattcccgaatgcactgccgcatggcgaatggaccggaaacccgattcgtgcggaacttgcgcgcgcgattgcacccaaagcacgctacgcagcacgcagcggtccgctgaatgtgctggtggtgggtggcagcctgggcgcggcggcgttgaacgaagtggtgccgcgcgcggttgcgctgctggcgccgaatgaacgcccgcgcatcgtgcatcaggcgggcgcgaagcacattgaagcgctgcgtgagcactacgcggcggcgggtctgcaagcgggcgcggatgtagaactcgtgcctttcatcgacgacatgacgagcgcgtacgcaaacgcggatctggtgatctgccggtcgggcgcgatgacggtgtcggagattgcggcggtcggggtggcggcgtttttcgtgccgttcccgtttgcagtagacgatcaccaaaccactaatgcagcgttcctcgccgacaacggcgcggcgctggtcgtgcagcaacgcgatctgtcggcgcagaaactcgccgactggttgcgcagccagacgcgagagacgctcgcggaaatggcggagcgttcgcgctcgctcgcgaaacccgacgccacggaacaggtcgcgaagatttgcgcgactgtggcgggttcgatttcgggcgcgagcccagaaggaaagcaatga

SEQ ID NO: 238442 - DNA, 1225 bp, Unknown
  Bacterial polypeptide expressing nucleotide sequence isolated from the Sargasso Sea
ggctccccgtacagctcaccttcctgttttgcgctgaacccctggctgctggatgcagcggatctgacggcggaagggttcatcagcagcgaggaccaggaaacgctccccggcgccgacgccgcctctgaaggcgttgacagggtggattttgcgctggccaaccaacgcagtcaggcgctggccacggccctgttgagccgctggcccagtcagaaccaggagcgccaggaagccttccgcgcctggtgcgaagtacaggcctggctggagaaccacgcccgttacagcgttctgcatgatcaacaccagggcgcctggtggagctggcccgcacccctggcgacacatcgggagggtgcgcttcaacgctggagcgacgaccacggcgaggcgttgctgcaggtgaagttggtccagtggcacctggaccgccagtggcaggccatccgcaggctggcaaaggagcgcggggtgctggtcttcggcgatctgcccttttatgtgagcgccgacagtgccgatgtctggagccaccgctccctgttcaccatcaaggagaacggcgaactcaccacccaaagcggtgttccccccgattacttctccgagacgggacagctgtggggatctccggtgtaccgctggggccgtcaccgactcacccgcttccgttggtggaggcatcgcatcgcccggcagcggcaattggcggatctgcttcggctcgaccacttccgcgccctcgccggctactgggccgtgccaggcggggacaccacagcgcagaacggcagctggcagccatcccccggtcggtccctgctgagcaagctgcagcaggatggtggcggtgccctgcccttgatcgctgaagacctgggggtgatcactcccgatgtggaagccctcagggatggcttccggctgccggggatgaaggtgctgcagttcgccttcgatggcctgcaggacaacccctatctgcctgaaaacgtggaaggcagccgctgggtggtgtacaccggcacccatgacaaccccaccaccctgggctggtggaacaagctcgatgatgcgagtaaggagcgcatcgccagtcgggtcaacgggcctgtcgaggctccggcctggcatctgttcgacatggcctttgccaccccagcggaactggtggtggctccgctgcaggatctgctgcatctggacgacagcgcccgcttca

SEQ ID NO: 238443 - DNA, 940 bp, Unknown
  Bacterial polypeptide expressing nucleotide sequence isolated from the Sargasso Sea
gtacctgaagctggctttgagataattggactctggatttctggtattcagcgaaagctgaccttagataacttatcattcccactcaaactcatagtaagcatcgcgaaatcttttgcactgatcaaagactttaagccacatgtggtggtaggagttggtgggtatgctagcggtccactcctttatgctgcaagcagaaaaggggtcccaacgctaattcaggagcagaactcttacgcaggcctaacaaacaagtggttgtctaaaaatgtgagtacaatttgtgttgcacacgatggcatggataagtactttcctcaagaaaaactggtggtgactggtaatcctgtcagaaagacaataaagctcaatccaaacagaataaatgagggttatcagcattttgagctagatgccaataagcctattattcttcttatcggcggttcactaggtgctcgttcactcaatgaagctgtacttgctaatcttgattttattaagcaaaacggaattcaacttatctggcaatgtggtggctactactacaaggagatgcaggagcgcaccggagatttgcctagatctatcgtattgagagattttgtgcgtcagatggattttgcttacgcaattgcagatgttgtgatctccagagctggagcactttcattggcggagctaatgctgaccggtaagcctgtggttttggtaccttctcctaatgtagctgaggaccatcaaacaataaatgcaaaggcactggttgagcatgatgcagccattatgattcaagactctgttgcttcggaagagctattcaaagctactttcgaccttgtcaaaagtcaggatagaagagatcaactagctcaaaatattcattctatggcacatgaaaatgcagctatggatatcgcaaatgaagtcatcaagc

SEQ ID NO: 238444 - DNA, 907 bp, Unknown
  Bacterial polypeptide expressing nucleotide sequence isolated from the Sargasso Sea
cttaatggacttgttaaaaagcattgcgaagaaaatattaaaccaatacaacaagaatattctgctcttcaaaacgaaaaagaagacagatggacatggcacccaaggcaaattgagcttatggaaggtgctaaggataaagctagagaattgggattatggaatttcttcttacctgatcctgacggtaatataggagatggactaacaaatcttgattacacttatgttgcaacagaaataggaaagtacccattagcgtctgagagtatgaattgcagtgcacccgatactggaaatatggaagttctagaaagagttggaacagaagaacaaaagaaacaatggttagagcctcttttaaatggagaaatacgatctgcctacgcaatgactgaacctaatttagcttcttcagatgctaagaatattagcactagtgctgttttagatggagatgaatgggttatcaatggagaaaaattctatatttcaggtgcaggggatcctagatgcaaaatcatgatcaccatggttaaaacaagccctgatgcccatccttcaaaacagcaatctcaaattctagttccaaaggacacacctggagtacaaattcttgaaggtatgcaagtttttggtcatgatcatgcacctcacggtcatatgcatattaaatttgataacgtaagagtacctaaagaaaacatattgttaggtgaaggtagaggatttgaaatttctcaagttagattaggaccgggaagaattcatcattgtatgagaaccattggaaaggctgaaattgcgcttgaactgatggttaaaagagctggtacccgagaagcttttggtaaacctatcgcaaagttaggagggaatttagaaatatttcccgagcgaggataga

SEQ ID NO: 238445 - DNA, 1261 bp, Unknown
  Bacterial polypeptide expressing nucleotide sequence isolated from the Sargasso Sea
atgaatttcgattacaccccgaaggttcaggcgctgcgcgagaaattgctcgccttcttcgacgagcacatctatccgaacgagcaggccttttacgccgagatcgcgcgtaatcgccagaacggcaacgcgtggctgccgaccgaactgatcgaacaactgaaacagaaggcacgcgacgccggcttgtggaacctgttcctgcctgaatcagtgcgcggggccggtctgacgaatctcgagtacgcgccgctgtgcgagatcatgggccgcgtgccctgggcgccggaagtgttcaactgcaacgcgcccgacaccggcaacatggaaacgatcgagcgctacggcagcgacgacaacaagcgcgagtggctcgaaccgctgttgcaagggcacatccgctcggcgtttctgatgaccgagccggaagtggcgtcgtcggacgcgaccaatatccagacaagcatcgtgcgcgatggcgacacctacgtgatcaacggccacaagtggtggtcgtccggtgctggggatccgcgctgcaaggtctacatcgtgatgggcaagaccgatcctgaggcgccgcgccactcgcagcagtcgatgatcctggtccccgccgatgccaccggcattaccgtgcaccgccctcttaccgtgttcggctacgacgacgcgccgcacggtcacatggaaatcacattgcagaacgtgcgcgtgccggccagcaacatgctgctcggcgaagggcgcggcttcgaaatcgctcaaggccgcctcggaccgggacgcatccaccattgcatgcgcctgatcggtctcgccgagcgcgcgctcgaactcatggcgaaacgttccatgcaacgcgtcgctttcggtaagccggttgccgcgcaaggtgtcacgcaggagcgtctggccgaagcgcgttgcatgatcgaacaggcgcgactgctgacgctaaaaaccgcgtacatgatggatacggtcggcaacaagggcgcgcgtggcgagatcgccatgatcaaggtggtcgcgccgaatatggcatgccaggtgatcgactgggcaattcaggcgcacggcggcggcggtgtcagcgacgattttccgctggcgtatgcgtatgcatccgcgcggacgttgcgcttcgccgatgggccagacgaagtgcaccgcaacgcgatcgcaaagctcgagttggcgcgctatatggatgtgggtgctgaggctcgcgtggagatgccggttactcgggtttgag

SEQ ID NO: 238446 - DNA, 2488 bp, Unknown
  Bacterial polypeptide expressing nucleotide sequence isolated from the Sargasso Sea
actgaactttgttggagcaggaaatacatttgcatacaatccagatactgatacgattgacatctcaatcgctggtggtggaggagcagcagcaggaagtggagaagatatcacactcggttcgccaacagacggatcatatagtcctggtgcattagatacaattaatagtacaacaaaagttgttgatagtattgatgacctaaatgaacttgcactgaatatgctgaaaggaactgcggtttctgaggttgacttctctgcagataagacaactggtggttcaccactcagcattactctcacaccaacatatgcgggaaatgcggatttgtttgatgttgactggggtgatggtggaaatgttgaactggacctgacactttcacaactcaatcacacatataatgaatcggcaggtggtttgttctcaatcactctgaatgcaaagaataatagtgggagtggtgcaggaagtgagtttgcagtcgcgaagaacgattatattgcggtttatacgccagacccagaggtgagatttaatctctatcgtaatgcaagtggtggttcacttctgagtggtaatgatttgtatgtagttgaaggtcaatcattatatctcaagaataccacaaccaatacatctggttttgatgttgattattcagtaacttggggagacggaaatactgattcggttgctgatgatgcttctgctggtggtgttgatggatcaagactcgaacatacctgggctgatggaacaagtagtggaacaggacttgatacactaacagtttcattagattctcataatggttctgatccaagtgtcattccaactacaaaagaaatcgcactaaaggtttatgatgattctcctgcacaaccagatggattgtctacaaaatctctgaccgatattccaagcacaggagactcaccaagacttgcaagtggcgcaacagataatactggagcatcactattgtcggatggagatgttgttgaccgtgtcgtgagtggaacggtggattcctcaatgactgattcatttgcatatggtgcagatactggatcactcactgcaaacgtaagcggatctgcagatggttctgttacctttacttttgcaggtgatgagtctggaacatatgatagtctgattattacagaagagagtgattatcagctgctagattctactggatctccgaccacattccaatccagtatttactatcctggattgtataaaggatttaaggcaagaatctcaaaaccagttgctgatcttgcagttggtgcaaatagtttccaacttcagcacagcacaacaggaaatacaaatactgtctcattcataaaggatgatcttacatcagatccaaccacagatgtatcttctgcaacggtctctgagaatgtcagtggtgtttatcgttatatctctggtgttccttattataactctggatcaccaagtttgacactatctggtgtagcgattgaggacttggttggtcagtgttataccaatcaaaatgatattgtagaagtcaatgatggagtttcggttacagattatagttactctgacattgatggatctacgacaatgttgacaggtggagttccaaatgcaaatgttggaactgcttcgccatatacaatcggcgacttagtagttccaatcacaacaccaaatgtaagaactgagagtcaaattcgagttcgtgcaaagaatgtgaatggtgttggaaactatagtagtgagattccaaccaagattcaggttcatacatcagaacaatatggtattagtgaaattgcaattcctgttgaggacgctcttggtaatggaacacatacggatgatggaattcgtatttttgatttcagtggggatgtagatgacactcctgcatttaataatgcaataaatttctatactaatgacccttataccgaacttcttgatccaggaattgagggaactcaagaggcaatgattcgtgatggtcaaattcaacacgatacttcagattactctacaggttatcttcctgctggtggtcctgatcggagtggtgatacaggaactcaatactttacgtttgcattccgtcgtcaggtcgttgcaaactttgacatcaatattgagagttctggtgtcgctggtctctggatcgcactgccaggaactgcaatcgatacaactagtggtttgaatggttggttgagatctgattcagcatactctggtgctggagttccgggaacagagactggtggtaatggtagcaatggttgtgcatttaacaactccgatttaattctaccaaatacatcattaagtggtggttatacaatgactctaggtgaagagaatatgagtaacgctacgggcaatgttgttcttgttcgtatcgcattaacatccggacaatctatttcatcacttagcataacggaggcatcactataa

SEQ ID NO: 238447 - DNA, 1255 bp, Unknown
  Bacterial polypeptide expressing nucleotide sequence isolated from the Sargasso Sea
atgttacaaaacgaccctgaactttttgaactttccatgtctgagaaaactcagccattaatggatttagtaaaaaaacattgtgaagaaaatgtaaaaccaatccaacaagaatattctgctttgcagaatgaaaaagaagatagatggtcttggcatccaaggcagatcgaacttatggaaggagcaaaagaaaaagctagagagcttggactttggaattttttcttacctgacccagatggaaatattggtgatggactaactaatcttgactatacatatgtcgcaagtgagattggaaaatatccacttgcatctgaaagtatgaactgttccgcaccagacactggcaacatggaagttttagagagagttggcactgaagaacaaaagaagcaatggttagaacctcttctaaacggagaaataagatctgcttatgctatgacagaaccgaatctagcatcctctgatgcaaaaaatataagtacaagcgctgttcttgatggagatgaatgggttataaatggtgagaagttttatatctcaggtgctggagatccacgttgcaagataatgatagtaatggttaagacaagtccagatgcgcatccttcaaaacaacaatcacagattcttgtaccaaaagatactcctggcgtagaaatattagaaggtatgcaggtgtttggtcatgatcatgctccgcatggtcacatgcatatcaagtttaataatgtaagagtaccaaaagaaaatatactccttggtgaaggaagaggttttgagatatcacaagtaaggctaggccctggtcgtattcatcattgtatgagaacgattggtaaagcagagacagctcttgaattaatggtaaagagagccggaacaagagaggcgtttggtaaacctattgcaaaactaggtggtaacttagagataatttctagagcaagaatagagattaatgccatgagacttgcagtgcttcaggctgccaaggcaatggatgtccttggaaacaaagaagccagagtctacataagcgctattaaggctatggttccagagaaagcttgcaagataattgatcaagcaattcaaatgcatggtgctgctggaatttcacagtggactcctttggccggtctctatacggacattaggcacttaagatttgccgatggtcctgatgaagttcaccacatggtagttggtagagctgagatgcagaaatatgatctatggtaga

SEQ ID NO: 238448 - DNA, 1249 bp, Unknown
  Bacterial polypeptide expressing nucleotide sequence isolated from the Sargasso Sea
catgattcaaaataatccagagcttttcgaactctctatgtctgagaaaactcagccattgatggatttagttaaacatcattgcgaagaaaatattaagcctattcaagctgagtactctgcacttcaaaatgaaaaagaagacaggtggtcatggcatccaaggcaaatagagcttatggaaggtgccaaagataaggcaagagaattaggattatggaatttcttcctaccagacccagatggaaatattggagatggccttaccaatcttgattacacctatgttgcaacagaaatcggtaagtatcctctagcctctgaaagcatgaattgctctgcaccagatactggcaatatggaagtattggaaagagtaggtacagaagaacaaaaaaaacaatggttagaaccactgctaaatggagaaattcgttcagcatatgccatgactgagcctaatttggcctcttctgatgcaaaaaatattagtaccagtgctgtacttgatggagatgagtgggttatcaatggtgaaaagttttacatttcgggtgctggagatccgagatgcaaaatcatgattgttatggttaaaacaagtcctgatgcacatccatcaaaacaacaatctcaaatattagttcccaaagacactcctggtgtgcatatattagaaggaatgcaagtatttggtcacgaccatgcacctcatggtcacatgcacataaaatttgataacgtcagggtgccaaaagaaaatatcctccttggtgaaggcagaggttttgagatttcgcaagttagacttggacctggtcgtattcaccactgtatgagaacgattggtaaagctgaagttgcacttgaacttatggtgaaacgagcaggaacaagagaggctttcggtaaaccaatagctaaacttggcggcaatcttgaaatcatatcgagagcaagaattgaaataaatgctatgcgactggccgttcttcaagcagcaaaagctatggacgtacttggtaacaaagaagctagagtctatgtaagtgccatcaaagctatggttccagaaaaagcttgcaagattatagaccaagcaattcaaatgcatggtgcggcaggaatttcacaatggacccctttggcaggactttatactgacataaggcatttaagatttgctgacgggcccgatgaggttcatcacatggttgtaggtcgtgcagagatgcaaaaatacgatcta

SEQ ID NO: 238449 - DNA, 1255 bp, Unknown
  Bacterial polypeptide expressing nucleotide sequence isolated from the Sargasso Sea
catgttacaaaatgacccagaactttttgaactatccatgtccaaaaaaactcaaccgcttatggatttggtaaaaaagcattgcgaagaaaacgttaagcccatacaggctgaatactcagctttgcaaaatgagaaggaggataggtggtcctggcatcccaggcaaattgagcttatggaaggcgccaaagagaaagccaaagagctaggcttgtggaacttctttttacccgatccagatggaaatatcggagacggattaactaacctagattatacgtacgtagctactgagataggtaaatatcccttggcatcagaaagcatgaattgctccgctccagatactggaaatatggaggtacttgagagagttggcaccgaagaacaaaagaaacaatggctagaaccgttactcaatggagaaattagatcggcatatgcgatgacagaacctaatttagcctcttcagatgcaaagaatatcagtactagtgctgttcttgacggagatgagtgggtaattaatggtgaaaagttttatatttctggtgctggtgacccaagatgcaagattatgattgtgatggtcaaaacgagtcctgatgctcatccttcaaagcaacaatctcaaatattagttccaaaagacactcctggagttcacatacttgagggaatgcaagtctttggtcatgatcatgcaccccatggccatatgcacataaagtttgataatgtaagagttccgaaagaaaatatacttctgggagaaggtcgaggatttgaaatatcgcaagtaagacttggaccaggtcgaattcatcactgcatgagaactataggtaaagctgaagttgcacttgagttaatggtgaaaagagctggaaatagagaggcttttggaaaacctatagcaaaacttgggggaaatttagaaattatttctagagcgcgaatagaaataaacgcaatgagattagctgttcttcaagctgctaaagctatggatgttctaggaaataaagaggcgagagtatacgttagtgctataaaagccatggtacctgagaaggcttgtaaaattattgatcaagccattcagatgcatggtgctgctggcatatctcaatggacacctcttgcaggactttataccgatataaggcatttgagatttgccgatggtcctgatgaggttcatcacatggttgtcggaagagctgaaatgcaaaaatatgatctatggtag

SEQ ID NO: 238450 - DNA, 1252 bp, Unknown
  Bacterial polypeptide expressing nucleotide sequence isolated from the Sargasso Sea
catgagcacaaacccagagttattcgaactttcgatgtctgacaaaacccagccattaatggatttggtaaagaagcattgcgaagaaaatataaagccaattcaacaagaatattctgctcttcaaaacgaaaaagaagataggtggacttggcatccaagacaaattgagctgatggaaggcgcaaaagaaaaagctagagaattaggactatggaatttctttttaccagaccctgatggaaatataggagatggacttacaaaccttgactacacttacgttgcaacagaaataggaaaataccctctcgcgtccgaaagcatgaattgcagtgctcctgacacgggcaacatggaagtgcttgaaagagtaggaactgaagagcaaaagaaacaatggttagaaccacttttaaatggggaaattagatctgcttatgcaatgacagaaccaaatttagcttcttctgatgcaaaaaatataagcactagtgctgtattggatggagacgaatgggttatcaatggagaaaagttctacatatccggtgcaggagatccaagatgtaaaattatgattgtgatggttaaaaccagccctgatgcccatccttcaaaacaacaatcacaaattttagttccgaaggacactccgggtgtacaaatactagagggtatgcaagttttcggacatgatcacgctcctcatggtcatatgcatatcaaatttgataatgtgagagtaccaaaagaaaacatattgcttggagaaggaagaggttttgagatctcacaagtaaggttaggtcctggaagaattcaccattgcatgaggacaataggaaaggcggaagtcgctcttgaacttatggttaaaagggctggtaccagagaagcctttggcaaaccaattgctaagttaggtggaaatctagagattatctctcgagctagaattgaaattaacgcaatgcgcttggctgtattacaagctgcaaaagccatggatgtccttggcaataaagaagctagagtatatgttagtgcaatcaaagcaatggttcctgaaaaagcctgtaagataattgatcaagccatacaaatgcatggtgctgcaggaatatctcagtggactcctttagcaggcctatatacagacatcaggcatttaagatttgctgatggccctgatgaagtgcatcacatggttgttggaagagctgaactgcaaaaatacgatctttggtaa

SEQ ID NO: 238451 - DNA, 1246 bp, Unknown
  Bacterial polypeptide expressing nucleotide sequence isolated from the Sargasso Sea
cactaacccagaacttttcgaactttcgatgtcaaaaaaaacccaacccttaatggacttggttaaaaagcattgcgaagaaaatatcaaaccaatacaacaagaatattctgctcttcaaaacgaaaaagaagacagatggacatggcatccaaggcaaattgagcttatggaaggtgctaaggataaagctagagaattgggattatggaatttcttcctacctgatcctgatggcaatataggagatggacttacaaatcttgattacacatatgttgcaacagaaataggaaagtaccctttagcgtccgagagtatgaattgtagtgctcccgatactggaaatatggaagtacttgaaagagtaggaactgaagaacaaaagaaacagtggttagaacctcttttgaatggagaaatacgatctgcttatgcaatgactgaacctaatttagcttcttcagatgcaaagaatataagcaccagtgctgttttagatggagatgaatgggttatcaatggagaaaaattctatatttcaggtgcaggggatcctagatgcaaaatcatgatcaccatggttaaaacaagccctgatgctcatccttcaaaacaacaatctcaaattctagttccgaaggacacacctggagtgcaaattcttgaaggcatgcaagtttttggtcatgatcatgcgcctcatggtcatatgcatattaaatttgataacgttagagtgcccaaagaaaacatactgctaggtgaaggcagaggatttgaaatttctcaagtcaggttaggaccgggaagaattcatcattgcatgagaaccataggaaaggctgaaattgcgcttgagctaatggttaaaagagctggtactcgagaagcttttggtaaacctattgcgaagttaggagggaatctagaaataatttcccgagcgaggatagagatagatgcaatgcgtttagcagtattacaagcagctaaagctatggatgttcttggaaataaagaagcaagagtttacgtaagtgccattaaagcaatggttcctgaaaaagcttgcaagatcattgatcaagccattcagatgcatggtgcagctggaatctctcaatggactcctctagctggtctatacactgatataaggcatttaagatttgctgatggaccagatgaagtgcatcacatggttgttggaagagctgagcttcaaaaatacgatctttggtaa

SEQ ID NO: 238452 - DNA, 352 bp, Unknown
  Bacterial polypeptide expressing nucleotide sequence isolated from the Sargasso Sea
atttataatataggatggttagagcctcttcttgatagaatagctcgtgacccaacgacagtagtttgtcctgtaatcgatgtgattgacgacacaactttagaatatcattggcacgactcgtcaggtgtgaatgttggtggctttgactggaatcttcaatttaattggcatgcagtaccagaacgagaaaggaaaaagcactcatcaacagccgagccagtggcatcccctacaatggccggtggattattttctatcaacaagaagtttttcgagcagttgggaaactatgaccctggatttgatatttggggtggtgaaaacctggagctgtcttttaaggtatgat

SEQ ID NO: 238453 - DNA, 703 bp, Unknown
  Bacterial polypeptide expressing nucleotide sequence isolated from the Sargasso Sea
agacagaaaaaattatcagaaattaaaaatgattttatcaataatatatctcatgaatttaaaacaccaatagcaactataaatcttgcacttgattcaatttctagtaatgaaaaaaataatataactgaaaaaacaaattcatatctaggaatgattagagaagagaattctcgaatgctttctcaggttgaaaatattttaagaatatctcagcttgaaaaaagttctaaccctcttaaaatggatagtattgatcttcatgaagtcattgaggatgctacagaacatgtaaaacttttgatagggagtaaaaaaggaaagattaatttaaaattaaatgcaataaatagatatatcaatggaaataagaatcatcttgaaaatattataatcaatattcttgataatgcaattaagtactcgaaaaattcgccggtaattaattttacatcaaatactgtagaagataaaattcagttatgtattgaagataaaggtataggtatggacaaatcaactcaaaaaatgatttttgaaaagttttttagagagcaaaatggtgatattcataatataaaaggtcatggacttggactatcatacgttaaaaaaatagttgactttcacaatggtattattaaagtagatagtgaaaaaggcgttggaacaaaattctctatagaattcaaaaatatttaat

SEQ ID NO: 238454 - DNA, 1549 bp, Unknown
  Bacterial polypeptide expressing nucleotide sequence isolated from the Sargasso Sea
atgtccatatctttaattgggataattttccttcaaggttactggatatattcttcttgggaaaacaaagaggaagaattctccctttctgttaatacatccttaagagaagtttcattagaggttaaaaatagagagttaaatgattatgttaatgcataccaaatgttaatagactctataggtgcaccaaatgaatcaaattttactgatgtctttctttttctagatgaagatcaatctacaaatttatctacattttttgcttatgggattcttgaagaagactataatattagtattcctgataatcttgtgagtaatccagacaataatcaaaacgttaaagattataaagctgttaaaacaacaatcttaaataaaaatatttttgatagaagagaaaatacattaaactcttcaatttctaaaattaaaagtgttcaagacatagatgtctttaaatttgaaaaatataaatctgcatttgaggagtatgcatcatctcttccaattcataaaagaactacttctagagaaatccaagtattattagaacaaagctttcaggaaagagatattaccactccatatgaatttggtatttatagcaatgggttatcaacaaagattaaatcaaataactatcttgaagttcaatcaggaccaaaatatacaatacctttttttgatgatcagttaagtaatgttaaatatgatcttgttgtctcatttccagaaaaaagagaatatgttttatcaggtataataggaattgcatcattatcattcttattaacactaattattataattttatctactggtgcgttatatcaaatactaagacagaaaaaattatcagaaattaaaaatgattttatcaataatatatctcatgaatttaaaacaccaatagcaactataaatcttgcacttgattcaatttctagtaatgaaaaaaataatataactgaaaaaacaaattcatatctaggaatgattagagaagagaactctagaatgctttctcaggttgaaaatatcttaagaatctctcagcttgaaaaaagttcgaaccctctaaaaatggatattattgatcttcatgaagtaattgaggatgctacagaacacgtaaaacttttaataggtagcaaaaaagggaagattaatttaaaattagatgcaataaatagatatatcaatggaaataaaaatcatcttgaaaatattatcatcaacatccttgataatgctattaagtattcaaaaaattcgccggtaattaattttacatcaaatactgtagaagataaaattcagttatgtattgaagataaaggtataggtatggacaaatcaactcaaaaaatgatttttgaaaagttttttagagaacaaaatggtgatattcacaatataaaaggtcatggacttggactatcatacgttaaaaaaatagttgacttccacaatggtattattaaagttgatagtgaaaaaggagtaggaacaaaattttctatagagttcaaaaatatttaag

SEQ ID NO: 238455 - DNA, 863 bp, Unknown
  Bacterial polypeptide expressing nucleotide sequence isolated from the Sargasso Sea
ttttgacgatcagctaagtagtgttaaatatgatcttgttgtctcatttccagaaaaaagagaatatgttttatcagggataataggtattgcatcattatcattcttgttaacactagttattattattttatccacgggtgctttgtatcaaatactaagacagaaaaaattatcagaaattaaaaatgattttatcaataatatatctcatgaatttaaaacaccaatagcaactataaatcttgcacttgattcaatttctagtaatgaaaaaaataatataactgaaaaaacaaattcatatctaggaatgattagagaagagaattctcgaatgctttctcaggttgaaaatattttaagaatatctcagcttgaaaaaagttctaaccctcttaaaatggacagtattgatcttcatgaagtaattgaggatgctacagaacatgtgaaacttttaataggaagtaaaaaaggaaagattaatttaaaattaaatgcaataaatagatatatcaatggaaacaaaaatcatcttgaaaatattataatcaatattcttgataatgcaattaagtactccaaaaattcgccggtaattaattttacatcaaatactgtagaagataagattcaattatgcattgaagataaaggcataggcatggacaaatcaactcaaaaaatgatttttgaaaagttttttagagagcaaaatggtgatattcataatataaaaggtcatggacttggactttcgtacgttaaaaaaatagttgatttccacaatggtattattaaagtcgatagtaaaaaaggcgttggaacaaaattctctatagaatttaaaaacatttaat

SEQ ID NO: 238456 - DNA, 784 bp, Unknown
  Bacterial polypeptide expressing nucleotide sequence isolated from the Sargasso Sea
ctggctgccggtggcgctggatcagcatccggagctgctgaccgccaatggccgcccccgtcgcgagcggatttatcaccacttttcccggcagatcagccaatgccttacaggagagacctcatgagcttctatcaagtgctgcaacaagccaccgccccggcccgggagcatctgttcaacgcccccatcatagaggcgtgccgcaagggggagatctcccgcgacatctacctgcgcttcctctcccaggcttactatcacgtgcgccacacggtaccgctcttgatggccaccggcggcaagctgggccaggagtatgagtgggtacgcggcgccatcgccgagtacatcgacgaggagtacggccatcaggagtggatcctgagcgacatccgcgcctgcggcggcgatgccgaggcggtgcgccacggccagcccgagctgcccatcgagctgatggtggcctttctctatgaccaggtacagcgcggcaaccccatggggttctttgggatggtccaggtgctggaaggcaccagcgtcgccatcgccctgaccgtggccgatcagctcaaggcgggtctaggcctgccccctcaggccatgagctacctgagctcccacggcgcgctggatcaggagcacctcaagttcttcgagtccctgatgaaccgggtagaagccccggccgatcaggcagccatcattcactcggccaaggtggtctaccgcctctacgccgacatgctctatcaactgacggaaaaccagacatcatgaa

SEQ ID NO: 238457 - DNA, 556 bp, Unknown
  Bacterial polypeptide expressing nucleotide sequence isolated from the Sargasso Sea
tgctgtagagggcgcattcgctgagacagttctgtttccaggcgatccattacgtgcaaaatatattgctgaaacattcttagaaaatgttgagcaagtgactgacgttcgaaacatgctaggttttaccggtacttacaaaggtaaacgtatttctgttatgggttcaggcatgggtattccttcatgctcaatctatgcaactgaattaattaaagactacggcgttaagaacctgatccgcgtgggtacttgtggcgcgatcagcacagacgttaaagtgcgcgacgtgatcatcggcatgggtgcttgtaccgattctcaagtaaaccgtttacgtttcaaaggccaagatttcgctgctatcgcgaactacgagctgatgaatgccgtgatcgaatctgccaaagtgaaaggcactaagatccgtgttggtaacgttttctctgccgatctgttctacactcctgatccacaaatgtttgacgtgatggaaaaaatgggcgtgttaggcgtagagatggaagccgctggtttatacggtgtttgcccatga

SEQ ID NO: 238458 - DNA, 666 bp, Unknown
  Bacterial polypeptide expressing nucleotide sequence isolated from the Sargasso Sea
tatgaccgcacacattaatgcacaacctactgattttgctgaaactgtaattatgcctggcgatccgctgcgggcgaaatatattgccgaaacctaccttaccgatgccgtagaagtcaccaacgttcgcaatatgctgggttacacaggttattaccaagggcagcgtatttcagtgatggggcacggtatggggatttcctcaatggtgctctatggccatgagttgattaatttttttggtgtgaagtgcatcattcgtatcggcagtttaggcgcaacccaaaaacacgtgcacatgcgggatgtgattttagcgcaggcggcgggcaccgactcacccacgaatgccaagcgtagcagtggctatcatatggcaacctcggccaccttttccttactgcacaaagcctatacccaagccaatgaaaaaggcattagcgtgaaagttggcaacgtatttagtggcgatctttattatgatcccgacgaagatatgatcccagcattggagcgttttggggtattgggtatcgatatggaagtcgcaggtctttatggcttagcgcatcaacagggcattgaatcattggccattctcacggtatccgatcattgcctaacgggtgaggaaaccaccgccgaagaacgccagttatccttcaa

SEQ ID NO: 238459 - DNA, 499 bp, Unknown
  Bacterial polypeptide expressing nucleotide sequence isolated from the Sargasso Sea
atggctaccaaacatatgaatgctgcgcccggagacttcgccggtaccgtcctgatgccgggcgatccactgcgcgccgaatacattgctgaaaactttctcgatggccctcgccgggtgaccgacattcgcaacatgtggggtttcacgggtgagtacaaaggaatccctgtttcggtcatggcgcacgggatgggtataccgtcagtctcgatctatgtgaccgagctcatcaccgaatacgacgtcaaacgcgtcatccgggtcggtagctgtggtacgacgcatccggatgtgaaacttcgcgatgtgttgatcgcacagggcgcgtcgacggattccggtgtcaaccggatgcgttttggcggctacgattttgcagcgctagcaagtttttctctcgtccggcatgccgtggatgcagccgaggcattggatgtccgctatcacgtgggcaatattttctcggcggatctcttctatacgccggacacggcca

SEQ ID NO: 238460 - DNA, 337 bp, Unknown
  Bacterial polypeptide expressing nucleotide sequence isolated from the Sargasso Sea
catggcaactcctcatattcatgcgcctgaaggcgcttttgcagaaaccgtgttaatgcctggcgacccattgcgcgctaaacatattgccgacacctttttacaggacgtggtgtgtgtcaacacagtgcgtaatatgtttggttataccggtacttatcagggtaaaaaagtcagcgtgttaggctcgggcatgggcattccttctatgtctatttatgccactgagctggtgaagttttatggcgtaaaaaatattatccgtatcggttcctgtggtggtttaccgctggatgttaaagtacgcgacgtggtcatcgctatgggcgccagtaca

SEQ ID NO: 238461 - DNA, 703 bp, Unknown
  Bacterial polypeptide expressing nucleotide sequence isolated from the Sargasso Sea
atgaccgctcatatcaatgccaacccggacgatttcgccgagaccgtcatcatgccgggggacccgctgcgggcccgctatatcgccgagacctttctgaccgatgcgcgcgaggtgaccaatgtgcgcaatatgctgggctacaccggctactacaacggccagcgtatctcggtgatgggccacggcatggggatcccctccatggtgctctatgcccacgagctggtgaacgacttcggggtcaagcggatcatccgcatcggcagtctgggggcaacccagcgccacgtgcagatgcgtgacgtgattctggcgcaggcggcgggcaccgattccccgaccaacgccaagcgcagtgccggttaccagatggccacctcggccgacttcgccctgctgcacaaggcgtttaccaaggcgcaggagagggcgattccggtcaaggtgggcaatatcttcaccggcgacctctattacgatccggacgaaaacctgattccggcgctggagaagttcggcgtgctcggcatcgacatggaggtggccggtctctacgggctggcccatcagcaggggattgaggcgctcgccatcctgactgtctccgaccactgcctgaccggtgaagagactactgccgaagagcggcaactctccttcaaccagatgatcgagctggcgctgcacaccgcgctgtaag

SEQ ID NO: 238462 - DNA, 649 bp, Unknown
  Bacterial polypeptide expressing nucleotide sequence isolated from the Sargasso Sea
aatgccaggcgatccgctacgtgcgcaatatattgctgaaaactttttagatgatgcggtacaagtaactggtgtacgcaacatgtttggctttacaggtacttacaaaggtaagccagtaagcattatgggttcaggcatgggtattccatcaatgtctatttatgcacgtgagctgattgttagctttggcgtaaaaaacattatacgcattggtacatgtggcggtattggtaccgacattaaaatccgtgacgtaatttttgcacaaggtgcaagcacagattcaaacgtaaaccgcgcacgtgttcgtggttacgacttttctgcaattgcagacttcgacctacttttaaacggcgttaacgcagcaaaagagctaggtattaaagcaaaagtaggtaacgtattcacaaccgacactttctaccaagcagacgacactttctataaagatttagataagttaggcgttcttgcagtagatatggaaacagccggtttatacggcgttgcagctgagtacggcgcaaacgcaatggcattatttaccgtaagcgaccacgtgatcactggcgaagcaacacctgctgacgaacgtcaaagcacgtttaacgaaatggttaaaattgcattagagtctatctaa

SEQ ID NO: 238463 - DNA, 706 bp, Unknown
  Bacterial polypeptide expressing nucleotide sequence isolated from the Sargasso Sea
tatgacggctcatattaatgcacaacccactgattttgctgaaactgttattatgccaggcgatccactgcgggcgaaatatatcgctgaaacctatcttaccgatgccgtagaagtgactaacgttcgcaatatgctgggttacacaggctattatcaaggacaacgcatttcggtgatgggccatggtatgggtatttcatctatggtgctctatggccatgagttgattaattttttcggcgttaaacgtattattcgtatcggcagtttaggggcgacccaacagcatgtcgaaatgcgcgatgtgattttagctcaagccgctggcacagattccccaacgaatgctaaacgcagcagtggctaccaaatggcgacctcagccactttttccttactgcacaaagcctataccaaagccaatgaaaaaggtattagcgtgaaagttggcaacgtatttagtggcgatctttactatgatcccgacgaagatatgatcccggcgcttgagcgtttcggggtgttaggtattgatatggaagtggcaggactttatggcttggcacatcaacagggaattgaatccttagccattctgaccgtgtcggaccactgtttaactggtgaagaaaccacggcgcaagagcgtcaattatcctttaataatatgatcgagctcgccttagaaaccgcgcttaattag

SEQ ID NO: 238464 - DNA, 706 bp, Unknown
  Bacterial polypeptide expressing nucleotide sequence isolated from the Sargasso Sea
atgaccgcgcacattaatgctcaacctactgattttgctgaaactgtaattatgcctggcgatccgctgcgggcaaaatatattgccgaaacctatcttaccgatgccgtagaagtcaccaacgttcgcaatatgctggggtacacaggttattaccaagggcagcgtatttctgtgatggggcacggtatgggaatttcctcaatggtgctctatggccatgagttgattaatttttttggtgtgaagcgcatcattcgtatcggcagtttaggcgcaacccaaaaacacgtgcacatgcgggatgtgattttagcgcaggcggcgggcaccgactcacccacgaatgccaagcgtagcagtggctatcatatggcaacctcggctaccttttccttactgcacaaagcctatacccaagccaatgaaaaaggcattagcgtgaaagttggcaacgtatttagtggcgatctttattatgatcccgacgaagatatgatcccagcattggagcgttttggggtattgggtatcgatatggaagtcgcgggtctttatggcttagcgcatcaacagggcattgaatcattggccattctcacggtgtccgatcactgcctaacgggtgaggaaaccaccgccgaagaacgccagttatccttcaataatatgatcgaactcgcgctcgcgactgcgctgaattagg

SEQ ID NO: 238465 - DNA, 712 bp, Unknown
  Bacterial polypeptide expressing nucleotide sequence isolated from the Sargasso Sea
atggcaacaccacacattaatgctgtagagggcgcattcgctgagacagttctgtttccaggcgatccattacgtgcaaaatatattgctgaaacattcttagaaaatgttgagcaagtgactgacgttcgaaacatgctaggttttaccggtacttacaaaggtaaacgtatttctgttatgggttcaggcatgggtattccttcatgctcaatctatgcaactgaattaattaaagactacggcgttaagaacctgatccgcgtgggtacttgtggcgcgatcagcacagacgttaaagtgcgcgacgtgatcatcggcatgggtgcttgtaccgattctcaagtaaaccgtttacgtttcaaaggccaagatttcgctgctatcgcgaactacgagctgatgaatgccgtgatcgaatctgccaaagtgaaaggcactaagatccgtgttggtaacgttttctctgccgatctgttctacactcctgatccacaaatgtttgacgtgatggaaaaaatgggcgtgttaggcgtagagatggaagccgctggtttatacggtgttgcccatgaattcggtgctcgtgcactgtgtgtggtaactgtatctgaccatatccgtactggcgaaaaaaccacttctgatgagcgtcaaaccacgttcaacgatatgatcttgatgacattagacgcagcaattacgctgtaat

SEQ ID NO: 238466 - DNA, 712 bp, Unknown
  Bacterial polypeptide expressing nucleotide sequence isolated from the Sargasso Sea
atggcaacaccacacattaatgctgtagagggcgcattcgctgagacggttctgtttccaggcgatccattacgtgcaaaatatattgctgaaacattcttagaaaatgttgagcaagtgactgacgttcgaaacatgctaggttttactggtacttacaaaggtaaacgtatttctgttatgggttcaggcatgggtattccttcatgctcaatctatgcaaccgaattaattaaagactacggcgttaagaacctgatccgcgtgggtacttgtggcgcgatcagcactgacgttaaagtgcgcgatgtgatcatcggcatgggtgcttgtaccgattcgcaagttaaccgtttacgtttcaaaggccaagatttcgcagctatcgcgaactacgagctgatgaatgccgtgatcgagtctgccaaagttaaaggtactaagatccgtgttggtaacgttttctctgccgatctgttctacactcctgatccacaaatgtttgacgtgatggaaaaaatgggcgtgttaggcgtagagatggaagccgctggtttatacggtgttgcccatgaattcggtgcccgtgcattgtgtgtggtaactgtatctgaccatatccgtactggcgaaaaaaccacttctgaagagcgtcaaaccacgttcaacgatatgatcgtgatgacattagacgctgcaattacgctgtaat

SEQ ID NO: 238467 - DNA, 721 bp, Unknown
  Bacterial polypeptide expressing nucleotide sequence isolated from the Sargasso Sea
gatggcaactccacatattaatgcagaaatgggtgatttcgctgacgtcgtattgatgccgggcgacccgctgcgtgcaaagcatattgctgaaactttcctcgaagatgttcgtgaagtgaacaacgttcgcggcatgttaggcttcaccggtacttacaaaggccgtaagatctccgtaatgggccacggtatgggtatcccgtcctgctccatctacaccaaagagctgatcaccgacttcggcgtgaagaaaatcattcgcgtaggctcctgcggcgctgtgcgtatggacgttaaactgcgtgacgtggttatcggtatgggcgcttgcaccgactccaaagttaaccgtatccgttttaaagatcatgactttgcagctatcgctgacttcgacatggtgcgtaacgcagttgatgcggcaaaagcgctgggtgtagacgctcgtgtgggcaacttgttctccgctgacctgttctactctccggacggtgaaatgttcgacgtgatggaaaaatacggcgtgctgggcgtggaaatggaagcggcgggtatctacggcgtggcggcggaattcggtgcgaaagcgctgaccatctgcaccgtatccgaccatatccgtacccacgagcagaccactgccgctgagcgtcagacgaccttcaacgacatgatcaaaatcgcactggaatccgttctgctgggcgataaagagtaa

SEQ ID NO: 238468 - DNA, 718 bp, Unknown
  Bacterial polypeptide expressing nucleotide sequence isolated from the Sargasso Sea
aatggcaactcctcatatcaatgcgaaagatggcgcctttgctgataccgtgctgatgccgggcgaccccctgcgcgccaagtacatcgccgagactttcctggagaacgtcgagcaggtgtgcgacgtgcgcaacatgttcggtttcaccggcacctacaagggccgtcgcatctccatcatgggtcacggcatgggcatcccatcctgctccatctatgcaaaagagctgatcaccgattacggcgtgaaaaccctgatccgcgtcggctcctgcggtgccgtgcgtgaagacgtgaaactgcgtgacgtggtgatcggcatgggtgcctgcaccgactccaaagtgaaccgtctgcgcttcaaggatcacgacttcgccgccatcgccgacttcgatctggttgccaatgccgtacaggccgccaagaacaaaggcgtcgccgtgcgcgtgggcaacatcttctccgccgacctgttctacaccccggacccctccatgttcgacgtcatggaaaagtacggcatcctgggtgtcgagatggaagccgccggtatctacggcgtggccgcagagtacggtgccaaggcactgaccatctgcaccgtctccgaccatatccgtaccggtgagcagaccacctccgaagagcgtcagctgaccttcaacgacatgatcgaaatcgcgctggattccgtcctgctgggcgacaactaa

SEQ ID NO: 238469 - DNA, 913 bp, Unknown
  Bacterial polypeptide expressing nucleotide sequence isolated from the Sargasso Sea
tatggaaaactttgattatattattttaggtgcaggatcggcaggctgtgtcttagctaacagattgagtgctaaccctaatcacaaggtattattaatcgaagcaggaagcaaagatactaatccatggatacatatcccaggtggatattttaagacaatgttaaaccctaaaacagattggtgttttcaaacagagagagagaaatattgtgataatagagaaatggtttatccaagaggtaaaacattgggtggaagttcctctatcaatggaatgctttatataagaggccagtctaatgattttaattactggagacaacttggtaatgttggttggtcttgggaagatgttcttccatattttaaaaaatctgaagatttccaatttggtgaaaatgaatttcatggatctggaggtcctttagctgttcaagaaataagaggtacatttaaagtttgtgatctttttatggatgcagcagaagagtttggccataaaagaactgatgattttaataatggagataacgagggcatgggttattttccttttacggttagaaatggactgagatgtagcacagcagttggatatctaaatcctgtaaaaaaaagaaagaatttaaaagttgttacaaatgctcatgttaagaatattgagttcgataataaaaaagcagacaaagtaaattactggattggcaacaatgtaatatctgtaaaagcaaataaagaagtgattttaagttctggaacaattggttctcctcatattcttcaagcctcaggtattggtccaggtgaattgttaaaaaaaaataacgtaaacgttgttaaagatcacccaggagtaggcatgaatttaactgatcatttaatgctcagaccagtttacaaagtcaaaaat

SEQ ID NO: 238470 - DNA, 844 bp, Unknown
  Bacterial polypeptide expressing nucleotide sequence isolated from the Sargasso Sea
tcgccctgtgtgactgcccctctggtcggcgcactgctctacataagcaccaccggcgacgcactgggtggcggccttaagctgtttgccctcgggttgggcatgggcgcgccgttggtattgttcgccatcggcggcggagcattgctacccaagtctggcacctggatggtcggtgtgcgcaaagctttcggcgtgatgctgctggctgtctctgtatggctgctagaacgcgtgctacccgctccagtgactttggccttgtggggccttttggcagttggcagcgcgatttggctcggtgccttggagttcaccctcaagtccggccggcaaaggctcgcccaactactcggtgtggcactactggtctacggtgtcagcgcctggctcggcgctttgcaaggtcaatccgatccgctgcgaccgctgggtcagctggacgccaaagccgtacttccgagcggcgctaacgccggctggcagaccgtggatacaccagctgctctggatgccgctctgctgtcagcaaaaaatgccgaccaaccactgctattggattggtacgccgactggtgcatcagttgcaaagtaattgaacgagaagtgctggcagcacccgccgtgcgtgagcaactgaccggttaccgactggtgcgcttcgacataacgcgtagcgatgccgagcaacgcgccctgctcgaccgctaccagctgttcggcccaccggcactgcagttattcgctcccaatggcgaagaatggcaagatctccgcactgttggcgaaaccgacgctgagagtttcgtcaaacgcctgcgccaagccaacggccgaatctaga

SEQ ID NO: 238471 - DNA, 328 bp, Unknown
  Bacterial polypeptide expressing nucleotide sequence isolated from the Sargasso Sea
aatgggcaaattttcggataagtatgatttaaataaagcaaaattgttaaaacagttaattgaaaaatcttataagaaaggaaacttcactttatcttcaggaaaaaaaagcagtcattacttgaactgtaaaccagtgtcattaaatggcgaaggcttaaacttaataagtgaattatttttagatttaaaggacttaaggtcaaaagctgtagcaggattgacattaggtgcagaccctttagtaagtggattaattgttaaagcagctttgaatggactagatcttgatggtttaataattaggaaagaaatcaaaaaatacggt

SEQ ID NO: 238472 - DNA, 115 bp, Unknown
  Bacterial polypeptide expressing nucleotide sequence isolated from the Sargasso Sea
atgtttagtaaaaaacaagaatttattgagttcacacttcatgagaaaatattaaagtttggaaggtttaccctaaagtcaggcaggataagcccttatttttttaatacgggtg

SEQ ID NO: 238473 - DNA, 283 bp, Unknown
  Bacterial polypeptide expressing nucleotide sequence isolated from the Sargasso Sea
atgccaccactgcccggatcgagcgacgaccggcgccgcatcctgctcgaacgactatccacccaggcctatcgccgcggccagttcacgctggcgtcaggccgtgaaagcgagcactacgtgaattgcaaacccgtgagcctcagtggttcaggcctcgcgttgatcagcgctgggatgttggagcatgtcgaatcagatgccatcgccgtagcagggttaacccttggcgccgaccccttggtgagtggagttgcggtgctcgctgcccaacaagatcggc

SEQ ID NO: 238474 - DNA, 460 bp, Unknown
  Bacterial polypeptide expressing nucleotide sequence isolated from the Sargasso Sea
tagtgagcattatgtaaactgtaaaccagtcactctttctggtgaaggtcttctgtatgctagttgttgtatgttggagtgtgtagaagaggacagtgtagcagtagcaggattaactctgggtgctgatccattggtatcaggtgttgctctggtgtctgctattgatgagataaaacttgatgccttgattgtaaggaaggaggcaaagggtcatggcacaggagcctggatagaaggaccagaactaccagcaggttctaaggtaactgtactagaggatgttattactacaggtggttctgctatcaaagcagcagaaaaattaagggatgctggatatatagttaatagagtagtagcaattgtcaatcgtcaggagggaactgaagcagatgatgctatggatgctgctaatctagatcttgttagtttatttgtgctagaggaactaatctaa

SEQ ID NO: 238475 - DNA, 532 bp, Unknown
  Bacterial polypeptide expressing nucleotide sequence isolated from the Sargasso Sea
aatgggtaatttttctgaaaagtatgacttaaataaagcaaaattgttaaaacagttaattgaaaaatcttataagagaggaaacttcactttatcttcaggaaaaaaaagcagtcattacttaaactgcaaaccggtttcattaaatggacaagggctaaacttaataagtgatttatttttagagttaaaagactcaaggtcgaaagctgtagcaggattgacgttaggcgcagatcctatagtaagtggattaattgtcaaagcagcttcacaaggcttaaatctaaatggtttaataattcgcaaagaaattaaaaaatacggcaccaaagctggaatagagggtcctttattacaagaaggcaccttggtaactgtcttggaggatgtggttacaactgctggttcagtaataaaagctataaataagcttcgagaaaatgattacgttgttgaggaagttttgtctatagtggataggcaagaaggaggacgtgaagcccttagcgctgaaaatgttaaattaaaa

SEQ ID NO: 238476 - DNA, 273 bp, Unknown
  Bacterial polypeptide expressing nucleotide sequence isolated from the Sargasso Sea
atcgaaaggaaattaaagaccacggcgaaggcggcagtcttattggcacattaaaatctaagaaagttttaataatcgatgatgttttgactgcaggcactgcaattaaaaatagtttaaaaataattaaaaaagaaaaagccgatctttctgctgttatggttgcattggatagagaagaaaaagatgaaaacaataatttttatcgagataatctaaataaagagggaataaaaatattttcaatagcaaaaatatcagaacttacttaat

SEQ ID NO: 238477 - DNA, 322 bp, Unknown
  Bacterial polypeptide expressing nucleotide sequence isolated from the Sargasso Sea
atgggcaaactttcggataagtatgatttaaaaaaagcaaaattgttaaaacagttaattgaaaaatcttacaagaaaggaaactttactttatcttcaggaaaaaaaagcagtcattacttgaactgtaaaccagtgtcattaaatggcgaaggcttaaacttaataagtgatttatttttagagttaaaggactcaaggtcaaaagccgtagcaggattgacattaggtgcagaccctttagtaagtggattaattgtcaaagcagctttgcatggcctagaccttgatggtttaataattcggaaagaaatcaaaaaat

SEQ ID NO: 238478 - DNA, 574 bp, Unknown
  Bacterial polypeptide expressing nucleotide sequence isolated from the Sargasso Sea
attgggagatttcacactaaaatctggaaaaaaaagtccctacttcttcaatgtcggtgctttttttgaacaaggttatatcgataaacttgctgatttatactctgaactcattttggaaagcagcatttcctttgatgtgatttttggtccagcctataagggcatccctttggctgcagccatttctgcctctttagcagtcaaaacaggcaaaccagtaccttttgccttcgatagaaaggaagagaaaaaacatggagagggggggcagatagtgggagaattaaagaacaaaaaaatattgattgttgatgatgtgcttacagccggaaccgcattaaagcaatcgatagaaataattataggtgctggaggaagtctttctgcctgtgtggttgcattggacagagaggagaagatagaaggacgaatagcaagagatcgactcttagaggaatataaaattaatattttgtccattgctcaaatttcgaatctagtagaatatttagaatcttctggaaacctagatgatgctgagatcataaaaaaccatatatctagatcttaa

SEQ ID NO: 238479 - DNA, 407 bp, Unknown
  Bacterial polypeptide expressing nucleotide sequence isolated from the Sargasso Sea
aatgggcaatttttctgaaaagtatgattcaaatagagcaaaattgttaaaacatttaattgaaaaatcatataagaaaggtaacttcactctatcttcaggtaaaaaaagtagtcattacttgaactgtaaaccagtatcattaaatggcgaaggcctgaacttaataagtgatttatttttagagttaaaagactcaagttcaaaagctgtagcaggattgacactaggtgcagatcctcttgtaagtggattaatcgttaaagcggcttcgcaaggcctagaccttaatggtttaataattcggaaagaaattaaaaaatacggcaccaaagctggaattgaagggcctatattagaagaaggaactatggtaactgtctttagaggatgtggttacaactgct

SEQ ID NO: 238480 - DNA, 562 bp, Unknown
  Bacterial polypeptide expressing nucleotide sequence isolated from the Sargasso Sea
aatgaacaatttctcgcagaagaataaactaaataaggagaatttgttaaaacttctaattgaaaaatcttataagaaaggaaattttactttggcatcaggtaaacaaagtgctcattatctaaattgtaaacctgtatctttaaatggcacagggttgcaattaattagtaatttgtttttagagttaatggacccaagttcaaaagctgtggctgggttgactttaggcgccgatcctttggttagtggtttaatcgtaacagcggcttctaaaggattattatttgatgctttaatcataaggaaagaaataaaagaatatggaacaaaggctggattagagggtcctattttaaaagaaggaactatagtaacggtcttagaagatgttgtcactactgctggatcagctattaaagcaattaataagttacgagaaaataatcttttagttgaagaagttttgtctattgttgacagaagagaaggaggatatgaggccttaaaagaacaaaatataaaattaaaaagcttattttcaatagaagactttctataa

SEQ ID NO: 238481 - DNA, 576 bp, Unknown
  Bacterial polypeptide expressing nucleotide sequence isolated from the Sargasso Sea
cccaaaaatcctttatttgggcaagtggatggaaatcaccaatatattgtgataatagaataatattatctcacccaaaaacaaggttatttataagaaatcagatttcaaatcaaattaataaattttatgatgaacctgagattattgcaggagttgcaacaggcgcaattggaattggtattttagttgctgatttacttaaattaccatttgtatatgttcgtcctaatgctaagaaacatggtagattgaatcaaattgagggcaccttcctaaaagggcaatccgtagttgttattgaggatttaatcagcactggaaacagcagcttaatggctgtagatgctctcagaaatgcagaactgaatataaacggtatgattagtatttttagttatggattcccaatttcatttgaaaattttaaaaataagaatgtaaaacttaattcgcttagctcatacgatattttaattgaacaggcatatgaatcaggatttataaatgtaaaagaacatgtaatactttcagaatggagaaagaatcctcaaaaatggaatcctcaaaattaaa

SEQ ID NO: 238482 - DNA, 511 bp, Unknown
  Bacterial polypeptide expressing nucleotide sequence isolated from the Sargasso Sea
aatgggcaaattttcggataagtatgatttaaataaagcaaaattgttaaaacagttaattgaaaaatcttacaagaaaggaaacttcactttatcatcaggaaaaaaaagcagtcattacttgaactgtaaaccagtttcattaaatggcgaaggcttaaacttaataagtgatttatttttagagttaaaggactcaaggtcaaaagctgtagcaggattgacattaggtgcagaccctatagtaagtggattaatcgtcaaagcagcttcgcaaggattaggacttaatggtttaataattcggaaagaaataaaacaatacggtactaaagctggaatagagggccctaaattagaagaaggaactttggtaactgttttagaggatgttgtaacaactgctggttcagtgataaaagcaataaaaaagttacgcgaaaataattatgttgttgaggaagttttgtctatagttgataggcaagaagggggattagaagcccttcaa

SEQ ID NO: 238483 - DNA, 643 bp, Unknown
  Bacterial polypeptide expressing nucleotide sequence isolated from the Sargasso Sea
gatggttaatgacgaatatatcgctaaagaaacctgtaaacttcttctacaaattaatgcaattaaattgaatccaaaaaatccatttacatgggcatctgggtggaaatcaccaatttattgtgataacagaattatattgtcctttcctgctgttagggaaaaaatctgttattttttatctcagcaaattaaaaaaagttatgaggattatgatgtcattgcaggtgttgctactggtgcaattggaataggtatgcttgttgctaaccagcttaataaaccttttgtttatataagggctgacagaaaaaaacatggcaggaaaaatagtattgaaggtttttatgaaaaaagtcaaaaagtagttgttattgaagatttaattagtactggaaatagtagtctagaagcttgtcaatctcttatttccgaaaatttaaaaattaaaggtctaataagtatatttaattacaactttgaaatttcaaaattgaattttgaatcaaaaaatatttcatattcctcattatgctcttacaattatctaattgattatgcagtaaaaaataattatgttagtgatgttgagctaactcagctaattaaatggcgaaacaatcctcaagaatggaataaataa

SEQ ID NO: 238484 - DNA, 670 bp, Unknown
  Bacterial polypeptide expressing nucleotide sequence isolated from the Sargasso Sea
tatgaagaagtatcaaaaggaatttgtagaatttttgattgacgaaagggccttacaattcggtcgatttgaacttaaaagcggaagaatatcaccttatttcttcaatacttccgctttcaattcggggaataccgtggaaaaactgagctatttttatgccgaagcgatccttcgacatctgcctcagtgtacgagtgttttcggcccggcttacaaaggcatcccactgtgcctgagcagtgcgatcgctttaacccatctgagcaaaaaggatatcggatatttttttgaccgcaaagagaaaaaggctcatggagaccagggtctgctggttggaaaaatccctcttaaaacagaagtcatcgcactcgtggatgatgtaatcaccgacggtcaaaccaagatcgaagccattgaaaacctgaaaaattggtttgggctcagtgtcagtgcagtttttgtcgcctttgaccgtttggaaaaaaatgatgaaggaatacaggccagtcaggcattttcagaaaaaaccgggattcctgtccatgcaatcatcaccatttatgatgtgttaagtttgctcaaagaggatagttttaaaaacacagaccaagtgcctgaatcatctgtggaagagatcgaatcgtatctcaaagtctacagtaattaa

SEQ ID NO: 238485 - DNA, 314 bp, Unknown
  Bacterial polypeptide expressing nucleotide sequence isolated from the Sargasso Sea
aatggttctagataaaaaagttgctgagcaaactataaattatctcacacaaattaatgcaattaaattaaataccaaaaatccattcacatggacaagcggtataaaatctccaatatactgtgacaatagattgctgctctcatatcctgagattagaaaatttattgcagaaaaaatgtctaaaattataaaaaataaatatggagaaaatatatcaattactggagttgctactggagctatagcaattggagcattgattgcagaaaggttaaatctttcatattcttatgtcagacagagccctaaaa

SEQ ID NO: 238486 - DNA, 267 bp, Unknown
  Bacterial polypeptide expressing nucleotide sequence isolated from the Sargasso Sea
aatggttctagataaaaaagttgctgagcaaactataaattatctcacacaaattaatgcaattaaattaaataccaaaaatccattcacatggacaagcggcataaaatctccaatatactgtgacaatagattactgctatcatatcctgagattagaaaatttattgcagaaaaaatgtctaaaattattaaaaatgaatatggagaaaatatatcaattaccggagttgctactggtgctatagcaattgggggcattgattg

SEQ ID NO: 238487 - DNA, 382 bp, Unknown
  Bacterial polypeptide expressing nucleotide sequence isolated from the Sargasso Sea
aatgggtaatttttctgaaaagtatgacttaaataaagcaaaattgttaaaacagttaattgaaaaatcctacaagagaggaaacttcactttatcttcaggaaaaaaaagcagtcattacttgaactgcaaaccagtatcattaaatggcgaaggcctaaacttaataagtgatttatttttagagttaaaagactcaaggtcaaaagctgtagcaggattgacattaggcgcagatcctatagtaagtggattaattgttaaagcagcttcgcaaggctcagacctaaatggtttaataattcgcaaagaaattaaaaaatacggcaccaaagctggaatagaggggcctatattagaagaaggcaccttggttactgtc

SEQ ID NO: 238488 - DNA, 837 bp, Unknown
  Bacterial polypeptide expressing nucleotide sequence isolated from the Sargasso Sea
aggctgtgacattttttaacggtgaatggttcgagggaagtcccgcggttataaaaccaaaggatcatgggttttggctagcctcaaacgtttttgacggagcacggtctatgctagggcgtctcccagacctggatctacattgccgccgcctgattcaatccgccagaattatggggatgtcaccaaatatttccgcgaaagaaatcgaagctctagctcgagaaggtgtaactaaattttcagaggatacagaattatatatttgtccgatgttttatccatccagcggattcattgttcctgaaccggaatcaaccgaatttctaattcatttctcagtttctccactgccacctccggacggtttttctgcttgctcgacccggttccgtcgaccatcacttgatacagcgccgacggaagccaaagcctcttgtttgtacccaaatgttgctcgcggtgtcagtgaggcgcggagcaaaggttttgacacagccgttgtccttgacccaaatggtaacgttgcagaattttcttatgctaacctttttattgccaaagatggagtagttcatactcctgcaataaatggaacttttttgaacggaataaccagacagagaataatcgcgttacttacaaacgctggatatcaagtggtggaaagggccatctcattcacagagttgttgggcgctgatgaaatatttggaactggaaactatgcaaaaatatccccttgcacccggctcgagaatcaaccaattaggtcaggcccaatatacagtcatgctcgtgaactttacctggagtttaccattgattgtggatagt

SEQ ID NO: 238489 - DNA, 400 bp, Unknown
  Bacterial polypeptide expressing nucleotide sequence isolated from the Sargasso Sea
atgataaagagtagaaatgaatttcttgcacttctaaaagaagaagcatataagaagggtgattttaaattatcatctggaagaaagagtgagcactatgttaactgtaagccagtaaccttacagggtgatgctcttatgtttatcagttggtgtatctttgagtgtcttgatgatgactgtgatgctgtaggaggacttactctgggtgctgacccattagtatcaggggtccctatggtagcagcaatagaagagagacctatggatggtctgatagttaggaaggaacctaaaggacatggtacaaaggcatggatagaaggtccagagttagcaccaggttctaaggtaactgtcttagaagatgttattactaccaggtggttctgctattaaa

SEQ ID NO: 238490 - DNA, 177 bp, Unknown
  Bacterial polypeptide expressing nucleotide sequence isolated from the Sargasso Sea
caaagggcgagctctctgccattcaggaagtggagcgtgactacggcgcccacatcatcgccatcattcagatgagtgacctgattgcctatctggaagagaagcaggccgagcagccggagctggcggcgcagcttgttgcgatgaaggcttaccgcgcccagtacggtatctgag

SEQ ID NO: 238491 - DNA, 166 bp, Unknown
  Bacterial polypeptide expressing nucleotide sequence isolated from the Sargasso Sea
tccatttacatgggcttctggatggaaatctcctatctattgcgataatagaacaattctgtcttatccaaaagttagagatttgatatgtgaatacttatcttctcaaattgaggagaatttttccaattttgatgtaattgccggagttgcaaatgaggaatag

SEQ ID NO: 238492 - DNA, 298 bp, Unknown
  Bacterial polypeptide expressing nucleotide sequence isolated from the Sargasso Sea
atgggcaaattttcggataagtatgatttaaataaagcaaaattgttaaaacagttaattgaaaaatcttacaagaaaggaaacttcactttatcttcaggaaaaaaaagcagtcattacttgaactgtaaaccagtatcattaaatggcgaaggcttaaacttaataagtgatttatttttagagttaaaggactcaagttcaaaagctgtagcaggattgacattaggcgcagatccaatagtaagtggattaattgtcaaagcagctttaatggccaaaatcttgatggtttaat

SEQ ID NO: 238493 - DNA, 559 bp, Unknown
  Bacterial polypeptide expressing nucleotide sequence isolated from the Sargasso Sea
gggtaatttttctgaaaagtatgacttaaataaagcaaaattgttaaaacatttaattgaaaaatcttataagagaggaaccttcaccttatcgtcaggaaaaaaaagcagtcattacttgaactgtaaaccagtgtcattaaatggcgaaggtctaaacttaataagtgatttgtttttagagttaaaagattccagatcaaaagctgtagcaggtttgacattaggcgcagatcctttagtaagtggattaattgttaaagcagctttgcaaggcttagacctcaatgctttaataattcgcaaagaaattaaaaaatacggcaccaaagctggaatagagggtcctaaattagaagaaggcaccttggtaactgtcttggaggatgtagttacaactgccggttcagttataaaagctataaaaaagttaagagaaaataattatgttgttgaggaagttttgtctatagttgataggcaggaagggggatgtgaagcccttaatgatgaaaatgttaaattaaagagtctttttacaataaaagactttctataa

SEQ ID NO: 238494 - DNA, 541 bp, Unknown
  Bacterial polypeptide expressing nucleotide sequence isolated from the Sargasso Sea
aatgaaggatgaattattaaaacttttaaaagaacatgcttacagaaagggggagtttaaactttcgtctggtaaaaaaagtgagcactatgtcaactgcaaaccagttactttaagtgctcaaggtataaatttagtaagcactttgttattagaatgtataagttctgatgtggttgctgtgggtggtcttacattgggtgctgatcctttagtaactggtgttgctatggcatccgatgagtgtttatgggctcctgatttgaatggattgatagttcgcaaagaacctaaaggttatggaactggtgcatggattgaaggccctttaccattagaaggagcaaaagtaacagtcttagaagatgtaatcaccacaggaggatctgcgattaaggcagcaaagaaattaagagatgcggggtatgtggttgatagggtagtatcaattgtagatcgtcaagaagatggagaagcagataagttaatgaagaatgctgatttagagttagtgagtctatataagttagaggaattgatc

SEQ ID NO: 238495 - DNA, 337 bp, Unknown
  Bacterial polypeptide expressing nucleotide sequence isolated from the Sargasso Sea
aatgggcaaattttcggataagtatgatttaaataaagcaaaattgttaaaacagttaattgaaaaatcttataagaaaggaaacttcactttatcttcagggaaaaaaagcagtcattacttgaactgtaaaccagtatcattaaatggtgaaggcttaaacttaataagtgatttatttttagagttaaaggactccaggtcaaaagctgtagcaggattgacattaggtgctgaccctttagtaagtggattaattgtcaaagcatctttgcatggactaaaccttagtggttttataattcggaaagaaatcaaaaatacggtaccaagctgg

SEQ ID NO: 238496 - DNA, 371 bp, Unknown
  Bacterial polypeptide expressing nucleotide sequence isolated from the Sargasso Sea
caaacctgtctgctttaacagaaaagaagaaaaagatcatggtgaaggagggtctctcataggagcaaaaccagaaggcaaagtattaatagttgatgatgtaatatcttcgggtttagcaataagagaagcacttgaaatccttaaaccttatgatgttgaaattgctggagtacttgtaaccctagatagacaagagaaaggtcagaaatcagatttaatggcttctgcagaattaaaatcagaaggtatagatgtatttgaaattatttcattagatggcctattggatgcgggcaatatcattagcgaagatgatattgttaggattaaagattacagagaacaatttagaggtaaagatgcctaaa

SEQ ID NO: 238497 - DNA, 362 bp, Unknown
  Bacterial polypeptide expressing nucleotide sequence isolated from the Sargasso Sea
aatgtttaaagattctggtgcattacttgaaggacattttgttttaacttctggaagacatagtccttcctattttcaatgcgcaaagttattgcaacatcctaaataccttgaatcactttcaagtgctattgctgagaattttaaaagtgaagagattgattttgttatttctcctgctgttggaggaattgttttgggcacagagattggtagaatattaaaaaaacgtactattttcgcagaacgacaaagtggtcaaatgacattacgaagaggctttgaaattcgttcgaatgaaaaagctttagttgtagaggatgtggttactactggaggctcagtgaaagaagtaatgaatt

SEQ ID NO: 238498 - DNA, 643 bp, Unknown
  Bacterial polypeptide expressing nucleotide sequence isolated from the Sargasso Sea
tatgattttggataaaaaagtagcagaacaaactgctaaatacttattgcaaattaatgcaattaaattaaatccaaaaaatccgtttttatgggctagtggattgaagtctccaatctattgtgataatagaatcatattgtcctatccaaaaattaggtattatataagtaattcattagctatgtgtataaaaaaattatatggagataatataacaattgcaggagttgcaacaggcgctatagcgattgcaactcttgtcgcagaaaatttaaattgtccttttgtatatgttcgtccagaacctaaaaaacatggaagaaaaaatcaagttgaaggtaagttaaatagaaatagtaaaattgttgttgttgaagatttaatttcaacaggaaaaagtagcttaaatgccgttaaggcattaagaattgaaaaaaaagatgtgttgggtatggttgctatttttagttatggatttgaaaaggcaaaaatagaatttaaaaatttaaatgttaatttgaacacactaagtgattatgaatttcttttgaaggaagcgataaatcaaaaaacaataaattccatttttttaaatgatttaaaaaaatggaggaagtcgcctgagaaatggacgaactaa

SEQ ID NO: 238499 - DNA, 379 bp, Unknown
  Bacterial polypeptide expressing nucleotide sequence isolated from the Sargasso Sea
atgccgctcacacctgaggagcagcgccagacactgctgcggcaactggctcgggatgcctatcgacggggacatttcaccctggcatcgggacgacagagcgagcactacgtgaattgcaaaccggtgagcctcagcggcagcggactcgctctcgtgagtgccgccatgcttccccacgtggaacccgaatcggttgcggtggccgggctcaccctgggtgctgacccgctggtcagcggagttgcgatgacggctgcaacagcaggacgttccctcgatgccctgatcgtgagaaagcaggccaaaggccatggaaccggcgcctggctggagggtcctctacccaaatccggagctctggttacggttctcgagg

SEQ ID NO: 238500 - DNA, 562 bp, Unknown
  Bacterial polypeptide expressing nucleotide sequence isolated from the Sargasso Sea
atgggcaaattttcggataagtatgatttaaataaagcaaaattgttaaaacagttaattgaaaaatcttacaaaaaaggaaacttcactttatcttcaggaaaaaaaagcagtcattacttgaactgtaaaccagtgtcattaaatggcgaaggcttaaacttaataagtgaattatttttagatttaaaggactcaaggtcaaaagctgtagcaggattgacattaggtgcagaccctatagtaagtggattaattgttaaagcagctttgaatggactagaccttgatggtttaataattaggaaagaaatcaaaaaatacggtaccaaagctggaatagagggccctatattagaagaaggaactttggtaactgtcttagaggatgtggttacaactgctggttcagtaataaaagctataaaaaaattacgagaaaacaattatgttgttgaggaagttttgtctatagttgataggcaagaagggggattagaagcacttgaagatgaaaatgttaaattaaagagtctttttacaataaaagactttttataat

SEQ ID NO: 238501 - DNA, 562 bp, Unknown
  Bacterial polypeptide expressing nucleotide sequence isolated from the Sargasso Sea
aatgagaaatttttctgaaaagtatgatctaaataagacaaaattgttaacacagttaattgaaaaatcttacaagaaaggaaacttcactttatcttcagggaaaaaaagcagtcattacttgaattgtaaaccggtatcattaaatggccaaggcttaaatttaataagtgatttgtttttagagttaaaggactcaaggtcacaaactgttgcaggcttgactttaggtgcagatcctcttgtaagcggattaatcgtcaaagcagcttcgcaaggcttaggacttaatggtttaataattcggaaagaaataaaacaatacggtaccaaagctggaatagagggccctatattagaggaaggaactttggtaactgttttagaggatgtcgtaacaactgctggttcagtgataaaagcaataaaaaagttacgcgaaaataattatattgttgaggaagttttgtctatagttgataggcaagaagggggattagaagcccttgaagatgaaaatgttaaattaaagagtctttttacaataaaagattttttataa

SEQ ID NO: 238502 - DNA, 640 bp, Unknown
  Bacterial polypeptide expressing nucleotide sequence isolated from the Sargasso Sea
atgattctagataaaaaagttgctgagcaaacaattaattatctcacacaaattaacgcaattaaattaaataccaaaaaaccttttacttggacaagtggtataagatctcctatttattgtgataacaggttattattatcatatccggaaataagaaaatttattgcagatagaatgtctgaaattatagccaacaaatacggacagaaaatttcaattaccggagtagccacaggtgccatcgcaattggtgcaatgattgctgaaaggttaaattctccatactcatacgtaaggcctgaaccaaagggacatggattaaaaaatcaaattgaaggttacattgaggaaggatctaagttagttgtgattgaagacttaattagcacaggtaaaagcagtttaaaagctataaaagctctgaggaataaaaatttaaatgtagttggtatgctttctgttttttcttacaactttgattttgcaaatgagagatttcaaaaagaaaatatttcaattaattcactggctgattataacactttagttgaaatgattattgctgaaggctctattacatatgctgagtctaacagactaatggaatggagaaaggatccacaaagctggagttaaa

SEQ ID NO: 238503 - DNA, 640 bp, Unknown
  Bacterial polypeptide expressing nucleotide sequence isolated from the Sargasso Sea
atgaatgacctcaaaaataattttattgaatttgctattaacgagcaaatacttagatttggtgactttgttctcaaatctgggagaaatagtccgtattattttaatacgggtctttgttgctcagggtctaaactcagatgcttagcagacttttatgcaaattacatacaactaagcgaattaaattttgattttatatttggtcctgcatataaaggaattactttagcctcctctatatctttgcaattgaatagtctgttttcagttgataaacccttttcttctaatcgcaaagaggaaaaaaaacatggtgactctggctcattgataggaagccccctttcaggaaagggacttatagttgacgatgttatttcctcaggttcatctatcgaagagtcaattaacattatcaaaaaaaacaatgcaaaacctatctcagtcctggtagcgcttgatagaatggagttaggaaaaaaaagaagagctgcctttgaactagaaagtgataataatataagcgtgcattccattataaatatagaggatgttgttgtttatctcaaaaaaaatgaaagcggtaataacaatattcagcgtatggaagaatatcttgatcaattcaaaaggtaat

SEQ ID NO: 238504 - DNA, 649 bp, Unknown
  Bacterial polypeptide expressing nucleotide sequence isolated from the Sargasso Sea
atgcctggcttaaaagagcatcagaaaatatttattgaattagctcttcaatcaaatgcattggagtttggaaaatttaaacttaaatctggaagagtcagtccgtattttttcaatgctgcgaaaatgcttaatggctgcaatctttatgaacttgctaaatgttatatagaggaaattaaagatattaatatggaatttgattgcctttacggccctgcatataagggaatctttttgggctcaattgttgcaacagtattgagtcaggggggaacttcatgctccctttccttcaatagaaaagaaatcaaagatcatggagagggtggtaatattattggacctgatccaactggaaatgtattgattatcgatgatgtcttatctgctggaactgctgcaagagagtctataaaaattttagacaattttaatgctacacctatgatttttcttgttggtcttgatagacaagaaaaaggagaaagtgatctatctgcaaaatcagagcttgaaaaagattttggtattaaggtctcatccatcataaatttagatgcacttatagaatactctcaaaataatcaaaactttaaaacttacatattagaacttgaagaatatagaaagagctggggtgcataat

SEQ ID NO: 238505 - DNA, 1063 bp, Unknown
  Bacterial polypeptide expressing nucleotide sequence isolated from the Sargasso Sea
atgaccgcacggaaactctttgacgaagcgtattatctggctcaaaacccagatattgcagccgctggaatcgacccatttcaacattacatgagtataggctggcgcgaaaacagagacccaaataaatttttctctagcggcttttatacaaattttaatgctgatttgagggaagatggaactataaacccacttaagcattatgtagaatttggtgttcaggaactccgcgaccctagtccattttttgacacaagttattatctcgaaaataatcttgatgttgcaaatggatcgactaatccgctagaacacttttggttattcggaaatactgaagcgagatcccctactgcaagttttgatatcaattactacttatcaaacaatcctgacgtggccgctgctgtaaatgctaacttcttctcggcattcgagcattttatagctttcggtcacaaagaacgtagagatccatctgaaaattttaacaccaacctgtatttggagttgtatccggacgtcggcgcctcttcattcacagcgtttgaacactatgaatattttggaagaaacgaaaaacgtcgctcagatgagaattacaccgtgccagaaggaaataccgcaacaattttaggcacgtcgtttgctgagacactgacgggcagcagcggtgacgacacaattcagggcgcgggtggcaatgacgttattagaggcaataatggaaacgatacactcacagccggctcaggcaatgaccagttatacggcgataatggaaacgatacacttacggccaacagtggaagcaacaaactgttcggtggcgctggcgatgatgtaattaccgctggcacagggactgacttaattaccgccggcgtcggagatgatacgattaacctcgcaaactccagtagcgacacgttaatatatagcgggcatacatcgaatttgaatggcagtgacaccattgcaacttttcaaactaacgatgttaataatttcaatgccgtcctgaacgcaggcactataagcaacctagcaagcgggagca

SEQ ID NO: 238506 - DNA, 1104 bp, Unknown
  Bacterial polypeptide expressing nucleotide sequence isolated from the Sargasso Sea
catgttcgcaggccagaaaacagtagccaatgtagcccctgaattagatggagtaagagatggaggaaaagcattagctgctccttcagctgttttacagatgagtgcctctggcacaacatccatggttattactccacctgaagtaggtgctaccgctaaattggttatcacaacaggtactgcgggcaccgcaatcaatgagggctcaattatcacattgtcgcctgaaaacgcttttggtgtaccttcttccatagcaacaaccgacattgttatgacatccagtgtcttaactaatgcatcaggtgctgctaacgttagagtacatcctaaaaacgtaactgttgagtttacaggagctaaactgaacaaccctctcgtacacttagaaatccctgacatggacccgaccgtaacaggtactggttctaacatgtttgcaggttctcaaggtattggagcaaactcaactattacaatcacaatcgctcagtcggctggtataaccaaccctactgaatccgattcaccaaccatagctgtaaccggaactggttacggtgctggtaccgcaactgctggtactacactcccacgaaaattaactactagtactacaagtacttctagaggcggatcagtgaccattactggttacggattcaaaaacggtacgaccgcaacagtcttcattgacgcagacggcggaaaagatttggactctggtgaagttcaattagctgaagctgtagtggcttctgacgatactttcgctgcaacgtttagtttgactgtgcctccgttctcagtagcctcttcctctgctatcaacgctgttgatggtaaaggtaactcttcaccaacatccgtatctgtaggcgtggctgataagataattattagtcctactacagccgctataggtgaaactgttcaaattacattgcaggacttcgtagcaagcaattatgttgcttccggagctaacggtcacgttaaattcggttctgtagctggtactgtaccatctactcaagtattgcaagttgcttcagacggttctctagtatttgatatccccaataccaaaccggcgcacga

SEQ ID NO: 238507 - DNA, 502 bp, Unknown
  Bacterial polypeptide expressing nucleotide sequence isolated from the Sargasso Sea
ttttttaattcaggtcatctgaatgatttagccgacttatatcataaagaaataattgattcaggtattcctttcgatattctttttggtccagcctataaaggaattcctctagtagcagctgtaacttctttagctggagctaaaggggaaaaatcttttcctatagcctttgacaggaaagaagaaaaagatcatggagaaggagggatcatagtaggagaaattgagaataaagatgtactgattattgatgatgtattaacagcaggaacggccctaaaaaactctattcatattattaattcttcgggaggaaaggtagtaggagcaattgtagccctagatagagaggaaaaaatagagaatgagactataaaggatagtttagaaaaagaactaaacattccaatactctctatagctcaaatgaacagtctcattaaatacatcaaggagagtaaagagtactctcatttgtctaaattctttcaagagtaat

SEQ ID NO: 238508 - DNA, 226 bp, Unknown
  Bacterial polypeptide expressing nucleotide sequence isolated from the Sargasso Sea
atgtccggccccgatcccctgctcgagctcctcgtcaggcgggcctaccgccgtggccagttcaccctggcctcagggcgtcgcagcgagcattacgtcaactgcaagcccgtcaccctcagcggccagggcgctctgctgctcgcaccacagcttctgcaacgggttgagcccgaagctgtcgcggtggctggcctcaccctcggcgctgatccgatggtgagct

SEQ ID NO: 238509 - DNA, 574 bp, Unknown
  Bacterial polypeptide expressing nucleotide sequence isolated from the Sargasso Sea
tatgaagaagtatcaaaaggaatttgcagaatttttgattgacgaacaggccttgcaatttggtcgattcgaactcaaaagcggaagaatttcaccgtatttcttcaatacttccgctttcaattcggggaataccgttgaaaaactggggtatttttatgccgaagcgatccttcgaaatctgcctcagtgtacgagtgttttcggcccggcttacaaaggcatcccgctctgcctgagcagtgcgatcgctttaacccatctgagtaaaaaggatatcggatatttttttgaccgcaaagagaaaaaggctcatggagaccagggtctgctggttggaaaaatccctcttgaaacagaagtcatcgcactcgtggatgatgtaatcaccgacggtcaaaccaagatcgaggctattgaaaaactgaataattggtttgggctcagggtcagcacagtttttgtcgcctttgaccgtttggaaaaaaatgatgaaggaatgcaggccagtcaggcattttcagaaaaactgggattcctgtacatgcaatcatcaccatttatgatgtattaa

SEQ ID NO: 238510 - DNA, 493 bp, Unknown
  Bacterial polypeptide expressing nucleotide sequence isolated from the Sargasso Sea
atggaaattcatagaaagacattactaaatcttataaaagaaagagcatacaagaaaggtaaatttaccttatcttctggtaaagaatcagaacattacattaactgtaaacctgttagtttatcttgtgagggaaatgcacttatatcccatttgatgtttgaacatatagaagataaatctgcagcagttggtggacttacattaggtgctgatccattagtttgtggtatcgcacagaaagcatattactcaaataaacatattgatgctctgatcgtaagaaagaatcccaaaggatatggaacaaaagaagttattgaaggtaacaagccacctaaaggatctatcgttacagtattggaagatgtaactacaacaggtagtagtgcaatcaaagcagtaaatgttttgcgtgatgcaggttacattgtgaatcgtgttgttgcaatcgttgatagaatagaggatcacatttgtatgggagaataac

SEQ ID NO: 238511 - DNA, 649 bp, Unknown
  Bacterial polypeptide expressing nucleotide sequence isolated from the Sargasso Sea
atgtctggcttaaaagattatcagaaaacttttattgaactcgcacttcaatcaaatgcattagagtttggaaaatttaaacttaaatctggaagaatcagtccatatttttttaatgctgcaaaaatgctcaatggctgcgatttacataagcttgctaattgttatataaatgcaattaaagattctaatgtagaatttgactgtctttatggtcctgcttacaagggaatttttttgggctcaattattgcaacagttttaagtcaaagaggtactccgtgccctctttcttttaatagaaaagaggtcaaagatcatggtgagggtggagatattattggtcctgatccagctggaaatgttttgattattgatgacgttttgtctgctggaactgccgcaagagaatctattaaaattttagaaaatttcaatgcgacaccaaagatttttcttattggtctggatagacaagagaaaggaaaagctgacctatcagcaaaatcagaacttgagaaagattttgatattcaagtcttatccataataaatttagatgctctcatagagtactctcaaaataatcaggattttaatacttacatatcagagcttgaaaaatatagaatgaattggggtgcataat

SEQ ID NO: 238512 - DNA, 445 bp, Unknown
  Bacterial polypeptide expressing nucleotide sequence isolated from the Sargasso Sea
tatgaagaagtatcaaaaggaatttgcagaatttttgattgacgaacaggccttgcaatttggtcgattcgaactcaaaagtggaagaatatcaccgtatttcttcaatacttccgctttcaattcggggaatactgtggaaaaactggggtatttttatgccgaagcgatccttcgacatctgcctcagtgcacgagtattttcggcccggcttacaaaggcatcccgctgtgtctgagcagtgcgatcgctttaacccatctgagcaaaaaggatatcggatatttttttgaccgcaaagagaaaaaggctcatggagaccagggtctgctggttggaaaaatccctcaagaatcagaagttatcgtactcgtggatgatgtaatcaccgacggtcaaaccaagatcgaggctattcaaaaactgaaaaattggtttgggctc

SEQ ID NO: 238513 - DNA, 361 bp, Unknown
  Bacterial polypeptide expressing nucleotide sequence isolated from the Sargasso Sea
tatggaaaactttgattatattattttaggtgcaggatcagcaggctgtgtcttagctaacagattgagtgttaaccctaatcacaaggtattattaatcgaagcaggaagcaaagatacaaatccatggatacatattccaggtggatattttaagacaatgttgaatcctaaaacagattggtgttttcaaacagagagagagaaatattgtgataatagagaaatggtttatccaagaggtaaaacattgggtggaagttcctctatcaatggaatgctttatataagaggccagtctaatgattttaattactggagacagcttggtaatgttggttggtcttgggaagatgttctt

SEQ ID NO: 238514 - DNA, 226 bp, Unknown
  Bacterial polypeptide expressing nucleotide sequence isolated from the Sargasso Sea
tatggaaaactttgattatataattttaggtgcaggatcggcaggctgtgtcttagctaatagattgagcgctaaccctaattacaaggtattattaatcgaagcaggaagcaaagatactaatccatggatacatattccaggtggatattttaagacaatgttgaaccctaaaactgattggtgttttcaaacagagagagagaaatattgtgataatagagaa

SEQ ID NO: 238515 - DNA, 355 bp, Unknown
  Bacterial polypeptide expressing nucleotide sequence isolated from the Sargasso Sea
tatgtttaataagaaacgcgatttcatagagtttacaattaataaaaaaattttaagatttggagatttcacgctcaaatcagggagaaaaagtccttattattttaataccggtttatgtcatgatggccagctattatctgacctctcctcatattatgccgattatataaaagataataatctcaattatgatttcatttttggaccagcttataaagggatcacactatgctcgtcaatttgccagagcttatattctaaatattcaatcatttcacaatatgcatttaacagaaaagaaacaaaaattcatggtgacaagggtaacttcgtaggctgcgctataaaagga

SEQ ID NO: 238516 - DNA, 640 bp, Unknown
  Bacterial polypeptide expressing nucleotide sequence isolated from the Sargasso Sea
atggttctagataaaaaagttgctgagcaaactataaattatctcacacaaattaatgcaattaaattaaataccaaaaatccattcacatggacaagcggtataaaatctccaatttactgtgacaatagattactgctctcatatcctgatattagaaattttattgcagaaaaaatgtctgaaattattaaaaataaatatggagaaaatatatcagttactggagttgctacaggtgccatagcaattggagcattgattgcagaaagattaaatcttccatattcttatgtcagaccagagcctaaaaatcatggattaaaaaatcagattgaaggatttattgccaaaggatctgaagttattgtgattgaagatttgataagtacaggaaaaagtagtctaaatgctataaacgctttaagagatgaaagttttaatatcagtggaatgctttctatattctcatataactttgattttgctaatcaaaggtttcaaaatgaaaatattccaattaactcattagcagattttaatactttagttgaaatgattttatctgaaggatctatatctaaagatgaggcaaccaggcttatggactggagaaaggatcctgaaaactgggtttaat

SEQ ID NO: 238517 - DNA, 418 bp, Unknown
  Bacterial polypeptide expressing nucleotide sequence isolated from the Sargasso Sea
atgaaggattatcaagagaaatttattagacttgctttaaatgctgaggcattaatttttggtgatttcactctcaaatcaggaagaaatagcccctacttcttcaatgcagcaaaaatgttaaataccaagtttctagctgacctttcggaatgctatacaaaaactcttcaagatttagatgtttctttcgatagtatttatggtcctgcatacaaaggtatctttatagcatcaattattggtgcgagtttaggaaaatctgatctagatattcctgtatcttttaatagaaaagaagagaaagatcatggtgagggtggtgatcttattggccagcttccttcaggtaacgtactcatcatagatgatgttatttctgcaggaacagcagctagagaatcaatgaaaaaataaa

SEQ ID NO: 238518 - DNA, 439 bp, Unknown
  Bacterial polypeptide expressing nucleotide sequence isolated from the Sargasso Sea
atgaaggattatcaagagaaatttattaggcttgctttaaatgctgaggcattaatttttggtgatttcactctcaaatcaggaagaaatagtccctacttcttcaatgcagcaaaaatgttaaatactaagtttctagctgatctttcagaatgctatacaaaaacgcttcaagatttagatgtttctttcgatagtatttacggtcctgcatacaaaggtatctttttagcatcaattattggtgcaagtttaggaaaatctgacctagatattcctgtatcttttaacagaaaagaagagaaggatcatggtgagggtggcgatcttattggccagcttccttcaggaaacgtactcatcatagatgatgttatttctgctggaacagcagctagagaatcaattgaaaaaataaaatctataggtgccaatccaa

SEQ ID NO: 238519 - DNA, 559 bp, Unknown
  Bacterial polypeptide expressing nucleotide sequence isolated from the Sargasso Sea
tatgcacccatttataaaaaaggctatcgaattagaagctcttaaactcggtgatttcactttaaagtcgggacttaaaagcaaatatttttttaatattgcgagcttttttaatggtcaagacatgcactttttggcaagccaatattttaaagttatccaaaaagcgaatttagaatttgatgctatgtatgggccggcatacaaaggcataccgttggcaacagcgataagtcagcttttctatgttgaggagcaaaaaaaaattgagcttatatttgataggaaagaaattaaagatcatggtgagggcggcaagctgataggagatatttccggaaagacaatattaataatagatgatgttttgactgccggcacggcaattaaagagactgttgaaataattcaagaaaataacgccaaaaccgttgcagcaatagtggcgctcgatagaatggagaaagatgcaaattcacttacatttaaagaaaaccttgaaaaaagcttatcaattccaatattaagtattgcaacttttgaagatttaaaagaataa

SEQ ID NO: 238520 - DNA, 628 bp, Unknown
  Bacterial polypeptide expressing nucleotide sequence isolated from the Sargasso Sea
caaaaatcattcttaaatttagcaatagaatcaaaatcacttcaatttggtgaatttactcttaaatctggaagagaaagcccctacttctttaatgcggccaatatgctaggcggatctaatttatacgaattagctaaatgttatgttgatgcaatcaatgataaggaattaaattttgattgtatttatggccctgcatataaaggtatatttcttggttcaattgttgcaaccttgtttagcgagaaaggtaaagagtacccattgtcttttaatagaaaggaagaaaaagatcatggcgagggtggaaatattattggcaaaaacccatatgggaacgtattgattattgatgatgttctgtcagctgggacggcaggcagagaatctattgaagctatattaaaactttcagcaactccctcctcttttatagttggtttggatagacaagagaggggtttatccgagatatcttctagtaaagaattagaaaaagactttaatataaaagttgaatctatagttaatttagactcattaatagattttgttaaagagaatgtagtgtatacggatcatcttgatagattaaatgagtatagaaaaagctggggagcgtaaa

SEQ ID NO: 238521 - DNA, 621 bp, Unknown
  Bacterial polypeptide expressing nucleotide sequence isolated from the Sargasso Sea
gatggtcaaagacgaatttatcgccaaggaaacctctaaacttctcttacaaattaatgcaattaaattgaatcccaaaaatccatttacatgggcttctggatggaaatctcctatctattgtgataatagaacagttctgtcttatccaaaagttagagatttgatatgtgaatacttatcttctcaaattgaggagaatttttccaattttgatgtaattgccggagttgcgactggtgcaattggcattggaatgttggtagctaacaagttaaaaaaacctttcatatatgtaagatcgggtagaaaaaaacatggtcgaaaaaatagtgtcgaaggttattttcaaaaaaatcaaaaagtgatagttattgaggatctgattagtactggaaaaagtagcttagaagcatgcgattcactaattgaagaaaacttaaatgttcaaggtttagtgagtatttttaattataattttgacatatcaaaagctaattttgaatctaaaagaataaattattattccctttgctcatataattttttaattgaatatgcagctcagcaaaattatatttcgagtaaggaaatagatgaattaaaaaaatggaggtctga

SEQ ID NO: 238522 - DNA, 580 bp, Unknown
  Bacterial polypeptide expressing nucleotide sequence isolated from the Sargasso Sea
tggtgagtttacactaaaatctggaagaataagtccttatttcttcaatgcagcaaatatgcttggtggatctaatttatatgaattagcaaaatgttatatggatgcaataaatgacaaaggattagagtttaattgtatttatggcccagcatataagggcatatttcttgggtctattgttgctactttatttagtgaaaatggtaaaaactatcctttatctttcaatagaaaagaagaaaaagatcatggcgaaggtgggaatataattggaagaaaacctaagggtaaagtattaattattgatgatgttttatctgctggtacagcaggacgagaatctattgaaactattttaaaactttctgcaactccttcttgttttatagttggtcttgatagacaagaaaaaggtttatctaatatgccttctagtaaagaattagaaaaagaatttaatatcagagttgaatctattgtgaatttagaatcattaatatcttatgttaaagataattcagaatatcaaaatcatcttgaggcattaaataattatagaaagaactggggagcataa

SEQ ID NO: 238523 - DNA, 508 bp, Unknown
  Bacterial polypeptide expressing nucleotide sequence isolated from the Sargasso Sea
atagaatatggccatttagaccaattagctcaggtcatggcagagaaaattaaggattctgatatctcatttgatgttatttttggtccagcatacaaaggaatatttctaggatcagtcttagcaacaaaactaaacaaacctgtctgctttaacagaaaagaagaaaaagatcatggtgaaggagggtctctcataggagcaaaaccagaaggcaaagtattaatagttgatgatgtaatatcttcgggtttagcaataagagaagcacttgaaatccttaaaccttatgatgttgaaattgctggagtacttgtaaccctagatagacaagagaaaggtcagaaatcagatttaatggcttctgcagaattaaaatcagaaggtatagatgtatttgaaattatttcattagatggcctattggatgcgggcaatatcattagcgaagatgatattgttaggattaaagattacagagaacaatttagaggtaaagatgcctaaa

SEQ ID NO: 238524 - DNA, 409 bp, Unknown
  Bacterial polypeptide expressing nucleotide sequence isolated from the Sargasso Sea
gatgctgaagcatgttgaggcggatgcaacggctgtggctggtctcactttgggcgccgacccactggtcagcggggtggccatggcagctgcgatcgcgaatcgatccctggatgctctgattgtccgcaaagcagccaaaggtcatggcacgggcgcctggctcgaaggaccacgtccagccaaaggcacgatcgtgaccgtgctggaggacgtggtaaccacgggagggtcctcgctgaaagcggtccatcaaatccaggaagcgggatatcgcgtccagcgggttgtcaccatcgtggatcgagaagaaggcggagcgtccgcgatgcaagaggaagggctggaactgatcagcctgttccgtctgtccgaggtggccgattacgccgaggccctgccgtcatga

SEQ ID NO: 238525 - DNA, 568 bp, Unknown
  Bacterial polypeptide expressing nucleotide sequence isolated from the Sargasso Sea
aatgaaaacgaacgaatccctcattgaaatgctgattaacaaacaagttctgaagttcggttcctttaaattgaactcaggaaggatcagtccttatttttttaatctgggtgcgatcgatgatggcacgagtttccatgaattaggtttagcctatgcccgcaaaatacatgacgaacagtttacttgcgatgttttgttcgggccagcctacaaaggcataccgatagcagtatcaactgcaattggcttaacggactttggtcgtaatatttctgtggcgtacaaccgaaaagaggccaaggatcatggggaggggggcaggcttataggtgctagattggaaggaaaggttattttgattgatgatgttttaacctcagggaaagcgataagagaatctgctgaactgatcctggaagcaggagcatcgatagaaggtgtggtgattgccttggaccgaaaagagagaactaaatctgaaaagtcagctgttatggagttaagggaagaacttgatgcgccagtgcatggtcttgcgtcgatagatgatgttataggctatctg

SEQ ID NO: 238526 - DNA, 469 bp, Unknown
  Bacterial polypeptide expressing nucleotide sequence isolated from the Sargasso Sea
tatgcacccatttataaaaaaggctatcgaattagaagctcttaaattcggtgatttcactttaaagtcgggacttgaaagcaaatatttttttaatattgcgagtttttttaatggtcaagacatgcactttttggctaaccaatattttaaagttatccaaaaagcgaatttagaatttgatgctatgtatggaccggcatacaaaggcatacctctggcaacagcgataagtcagcttttctatgttaaagagcagaaaaaaattgaacttatatttgatcggaaagaaattaaagatcatggtgagggtggcaagctgataggagatatttctggaaagaaaatattaataatagatgatgttttgactgccggcacggcaattaaagagactgttgaaataattcaacaaaacaacgccaaaaccgttgcagcaatagtggcgctcgatagaatggagaaggat

SEQ ID NO: 238527 - DNA, 640 bp, Unknown
  Bacterial polypeptide expressing nucleotide sequence isolated from the Sargasso Sea
gatgaacagccttaaaaaacaatttattgaattcacattaaatcatgaaatactacgttttggcacttttacattaaattctggtagacaaagtccatactttttcaatacaggtttatgcaataatggcaagttattaagctcgttggccaagttctattctaaatgtattattgaaaatgctatagaatacgattttattttcggaccagcatataaaggtattactctcgcttcatcaataagccatacattatattcagataactctgttagtaaaccattttgtcataaccgtaaagaagctaaaactcatggagaatcaggaatatttgttggttatcaaccaaaaggggcagctatgatagttgatgatgtaatatcatctggtaactctattactgaaagtattaagctgcttgaaactaataatgctcatccaacgtctgttgttgttgcttttgatcgtatggaagttgggtacaaaaaaagggcctctgttgagttatctgaaaattatgatgtatcagtatattcaataataactttggaggatatagtcagccatatcaaatcagatgcttctttaactaaatatatatcaaaaatggaagactatatgaatgaatataaacgttga

SEQ ID NO: 238528 - DNA, 621 bp, Unknown
  Bacterial polypeptide expressing nucleotide sequence isolated from the Sargasso Sea
cattcttaaaaatagcatcaaaatcaaaatcactcaaatttgagaaattacatttaaagtctgtcgtttcaagtccttatttttttaatgctgcaaatatgcttagctcatgcagtttgtatgaacttgcaaaatgttatgtagatgcaatcgaggataaaaatttaaattttgactgtatttatggtcctgcatacaaaggaatctttctaggatcaattgttgcaactctttttagcgaacagggaaataattacccacttgcgtttaaccgaaaagaagaaaaagaccacggcgaaggtggcaatattattggagctaaacccagtggaaatgtattaataatagatgatgtgttatctgcaggtactgctggcagagagtcaattgaaacaatattaaatttagatgcctctccagcatgttttatagtcggccttgatagacaagaaaaaggcaactcagagaagtcatctagctcagaactgagtactgaatttaatataaaagttgaatccattgtaaatcttgatactttgatcaactttgttgaaaacgatttagcgtattcagaattcttgccaaatttaaataaatatagagaagaatggggagcataaa

SEQ ID NO: 238529 - DNA, 526 bp, Unknown
  Bacterial polypeptide expressing nucleotide sequence isolated from the Sargasso Sea
atgaaacaagaacttataaaaattcttaaaagggattcatataggaatggtgattttacactttcttctggtaaaaagaccgagcattatattaattgcaaacccgtaattttgaatgcagcaggtcttaaactgatcagccattccatgttggaatatattgatcagaattctgttgcagttgctggtcttactctgggtgcagaccctcttgtttgtggggttgcattggcatcgctagaacacccctggtgcccaacacaggacgccttaatcgtccgtaaagaggcaaagggacacggcacaaatgcctgggtagagggtcctcttccagcagtaagatctgaaattactgtattagaggatgttgttacgaccggaggttcttctctcaaagcagtagagaaacttcgtgatatggggtataatgtcaatagaattatttctattgttgatagggaagaaggtggttgggagttgatgaaagagtctggaattgaattattttcattagtcactattaggg

SEQ ID NO: 238530 - DNA, 636 bp, Unknown
  Bacterial polypeptide expressing nucleotide sequence isolated from the Sargasso Sea
aaaactatcaaaaattatttttagacatcgctatagaatcacaatcacttcaatttggtgagtttacactaaaatctggaagaacaagtccttatttcttcaatgcagcaaatatgcttggtggatctaatttatatgaattagcaaaatgctatatggatgcaataaatgacaaaggattagagtttagttgtatttatggcccagcatataagggcatatttcttgggtctattgttgcgactttatttagtgaaaatggtaaaacctatcctttatctttcaatagaaaagaagaaaaagaccatggcgaaggtgggaatataattggaagaaagcctaagggtaaagtattaattattgacgatgttttatctgctggtacagcaggacgagaatctattgaaactattttaaaactttctgcaactccttcttgttttatagttggtcttgatagacaagaaaaaggtttatctaatatgccttctagtaaagaactagaaaaagaatttaatatcagagttgaatctatagtgaatttagaatcattaatatcttatgttaaagataattcagaatatcaaaatcatcttgaggcattaaataattatagaaagaactggggagcataaa

SEQ ID NO: 238531 - DNA, 528 bp, Unknown
  Bacterial polypeptide expressing nucleotide sequence isolated from the Sargasso Sea
caatgtttcttgcaaacggcaaacttaatactcttgctgaatgttatgtcaataagatcaaaaatgaaaacctaaaatttgatatgctttttggcccagcatataaaggcattttcttagcaacagcaataagcacaaaactaagccaatcaagaacagtaccagtatgttttaatagaaaagaggaaaaagaccatggtgagggtggctcttatattgggaaaaaaccctttggaaaagtattgatagttgatgatgtgctctcttctggcttagcaataggtgaatcaatagaatttcttaaaaactttgatgtagaaattataggtgcaatagttgggttaaaccgcttagagagggggcaaaaaacaagtcaagtggcatcggacgaattaaaaaacgaagggattaatatttatgcgttgatgaccatagacgaaattatgcttgatgaagacttaataacgcaatctcaaataaaggaaattaaagcctatagagatcagtactctggagaaaatgtttagt

SEQ ID NO: 238532 - DNA, 447 bp, Unknown
  Bacterial polypeptide expressing nucleotide sequence isolated from the Sargasso Sea
catgcccagtcctccggcccccgcggaagacccgaccaggctcctgctgaagcgccttgccatggaggcttaccgacgggggacgttcaagctggcttcaggccgccagagcgagcattacgtcaactgcaagccggtgagtctcagcggtcggggcctggctctgatcagcacagccatgctggctcatgtggaggaggacgccgccgccgtcgccggtctcacccttggggctgacccgctcgtgagcggggtggcgatggcggcggccctgtccggcaggcctctcgatgctctgatcgtgcgcaaacaggcgaagggccatggaactgccgcctggctggagggtcctctgccggcgcaaggatcgatcgtgaccgttctcgaagacgttgtgaccacaggaggttctgccctcaaagccgtgcagcagctgcaggacgccgg

SEQ ID NO: 238533 - DNA, 640 bp, Unknown
  Bacterial polypeptide expressing nucleotide sequence isolated from the Sargasso Sea
atgaaggattatcaagagaaatttattagacttgctttaaatgctgaggcattaatttttggtgatttcactctcaaatcaggaagaaatagcccctacttcttcaatgcagcaaaaatgttaaataccaagtttctagctgacctttcggaatgctatacaaaaactcttcaagatttagatgtttctttcgatagtatttatggtcctgcatacaaaggtatctttatagcatcaattattggtgcaagtttaggaaaatctgatctagatattcctgtatcttttaatagaaaagaagagaaagatcatggtgagggtggtgatcttattggccagcttccttcaggtaacgtactcatcatagatgatgttatttctgcaggaacagcagctagagaatcaattgaaaaaataaagtctatgggtgccaatccaaaaattatgctagtaggtctagatcgacaagaaaaaggttcatcaaacatctctgcaaaagctgagctagagaatgatttcggacttattgtttcgtcaatagtaaacctagatcttttaataagctttgtaagcgatgatccaaacttcaatgaattcaaaagtgatcttgaagaatatagaaataattggggtgcctaat

SEQ ID NO: 238534 - DNA, 565 bp, Unknown
  Bacterial polypeptide expressing nucleotide sequence isolated from the Sargasso Sea
aaatcaggaagaaagagtccatatttttttaatgctgcaaacatgttaaatggctcaaacctctatgagctagcaaaatgttataccgatgcaattgaagaaactaatttagaatttgattctatttttggtcccgcctacaaaggaattttccttggctcaatagttgcaacacttttaagtgagcagggaaaaaactttccattatgttttaatagaaaggaggaaaaagaccatggtgaaggaggaagcataattggcgataagccatctggtgacgtgctaattattgatgacgttttatctgctggtaccgctgggagggaatctatagagcttattaaagaagtatcagcaaatccaaaagcttttatagtgggcttagatagacaggagaaaggtaatactgatagttcagcaagccaagagttatgcgatgaatataatattgaatttatttcaattattaatcttgataccttaatagaatttgttaaaagcgatacgcaatttaataattatcttgatgaactgaatgaatatagagaagtttggggtgcgtaaa

SEQ ID NO: 238535 - DNA, 434 bp, Unknown
  Bacterial polypeptide expressing nucleotide sequence isolated from the Sargasso Sea
aatgaattataaaaacctatttataaagcattgtattgagaaagaagcactaaagtttgggcaatttaacttaaaatcgggaagagttagtccatttttttttaacagtggagtcttcaccgatagcaaatcagtaaatttaatatctgatatttttattaatgtaatcgaggaaaataaaattgattttaaaaatattttcgggcctgcttataaagggattccgctagcggtatcccttacacataaaatttttgaaaaaaataaaatggttgtaggatttgtctttaataggaaggatgaaaaaacccatggtgagggtggtaatttagttggtgacttccttccaggaaatacaatagtggttgatgatgttatcactgcaggtactgcaataaaaaattcactatctttaattatgcaaattgagaata

SEQ ID NO: 238536 - DNA, 637 bp, Unknown
  Bacterial polypeptide expressing nucleotide sequence isolated from the Sargasso Sea
aaagattatcaaaaattatttttaaaattagctttagattcgcaagcgctacaattcggtgattttacacttaaatcaggtcgtaagagcccatattttttcaatgcagcaaacatgcttaaggggtcaaatttatatcaacttgcacattgttatgttgaggctataaatgatcatgatgttgattttgattgtatttatggtcctgcatataaaggtatttttcttggttcaatagttgcgacagttcttagtgcgcagggaaaaaattatccaatttcttttaatagaaaagaagagaaagatcatggtgaaggtggaaatattataggtgccaatccaaaaggaaaaacattaataatagacgatgttttatctgctggaacagctggtagagaatcaataaatttaattacaaagcaaaatgcaacacctgtaagctttattgtaggattggataggcaagaaaagggtaaatcccaacaatgtgcaagtaaagagttaaaggatgaatttaatctaagtgttatatcaattattgatcttgataccttaataacttatgttggaaatgagtctcaatttaacggttacctcagcgggctaaatcaatacagagatacttggggggcttgaa

SEQ ID NO: 238537 - DNA, 595 bp, Unknown
  Bacterial polypeptide expressing nucleotide sequence isolated from the Sargasso Sea
ttaaaagcagaggcccttctgctaggcgattttactttgaagtccggaaggaagagtccttatttctttaatattagctcttttttcgaattaggcttgattaatgaactgtctagtttatatacaaatttaattgaagaagaaaacatcgaatttgatgtaatttttggtcctgcttataaaggcataccgcttgcagcggcagttgcaaccatcatgagtgaacgaacttctaatccaatttcaataagctttgatagaaaggaagagaaaatacatggagaaggcggaaaattaattggtagcgtagaaaataaaaaggttttaattttagatgatgttctaactgcggggactgcattaaatcaatccatagatttagttagagaaatgggaggcgaggtggtgtcttcggtcattgcgttagatagagaagagcttgtggatggcgttcctgccagagatttaattgctgagaagaccaattctaaattattatcaatagcaaccatttctcaactggtaaatttttttaacctaaccaacaaaattgaagaagctcaaataattaaaaaccatttatcgaagagataat

SEQ ID NO: 238538 - DNA, 583 bp, Unknown
  Bacterial polypeptide expressing nucleotide sequence isolated from the Sargasso Sea
atgaatccattgaatccttcatcagatggaataaaagaaaatcttttaactttattagctcaaaaagcttataggtttggcgatttctctttggcttccggaaaaaaaagttctcattacgtcaattgcaagccagtctctctctcaggtccaggtctcttgtcgataagttcattattcctaaaacaaattaatgaaagtgatagtggcgtagctggcttaactttaggtgctgacccacttgttagtggcgttgtaattttggcagctcaatcaggtattgatttaaacggtttaatagttaggaaggaagcgaaaggtcatgggactggagagtggttagaaggacctttacctccaaagggttctgtgattactgtcttagaggatgttgttacgactggtggctcatctttaaaagctgttgaacaacttagaaatcaagggtatttagttaaacaagtactagcaatagttgacagagaagaaggaggcctagatgcaatgtctaaagctgatttagagttaaatagtcttttctttttaaaagagattgttgaaagagctaatagtttgcaatgaa

SEQ ID NO: 238539 - DNA, 532 bp, Unknown
  Bacterial polypeptide expressing nucleotide sequence isolated from the Sargasso Sea
tctgaaccgtctggccaccctggcctaccgacgcggagacttcaccctggcctcaggccgcaagagcgagcactacgtgaactgcaaacccgtgagcctgagcggttccggcctggcgctgatcagccgggcgatgctcacccaagtggaggccgatgcgcgggccgtggctggtctcaccctcggagcagacccactggtgagcggtgttgcaatggccgccgccgatcaaggtcgtgagcttgatgcgctgatcgtgcgcaaggaagccaaaggccacggtaccggggcctggttggagggtccgctacccgcccccggggccctgatcaccgtgctggaagacgttgtgaccacaggaggttcctccctcaaggcagtgcggcagctgcgcgacgccggttacgaggtgaaccgggttgtcaccatcgtcgacagggaagaaggcggtgacgccgccatggcggcagacaatcttgaactgatcagcctttacaagctttctgaaatcgccgccttcgtaccggcatga

SEQ ID NO: 238540 - DNA, 499 bp, Unknown
  Bacterial polypeptide expressing nucleotide sequence isolated from the Sargasso Sea
ttctttgccgaagccattcgatattctaatattaaatttgatatgttatatgggcctgcttataaaggtatacctttagcatctgctatatcgattactttccacgaaatatttaactgtaattatccgttttgttttaatcgtaaagaaataaaggatcatggtgagggcggcataacatttggggctaaaattaaaaatagaattatgattattgatgatgttatctctgcaggaacttcaattaaagattcggttgatataatagaatccgaaggaggtacggttgcaggagcaattgttgcggtgaatagacaagaacgaggcgagggcgaattatctgcaattcaagaagcacaaaataggtacggaattaaaatcatgagcatagtgaatttagatgatattatttcttatataagtgaaagtaataaatttaaaaagcacctaggagcgattaaggcgtatcgaaaaaaatatggtgaaatttctacatgac

SEQ ID NO: 238541 - DNA, 583 bp, Unknown
  Bacterial polypeptide expressing nucleotide sequence isolated from the Sargasso Sea
atgacctcagcgttccgcttcgacgacgacgcccgacgcagtctgttggagcgactggcacgggtggcataccgccatggtcaattcacgctggcctcaggacgggagagcgagcactacgtgaattgcaaaccggtgagcttgagcggatccggtctggctctgatcagcagcgccatgctcgatcacgtcgaggctcaggcggttgctgtggcaggactgaccctcggtgccgacccgcttgtcagcggtgtcgcgatggcagcagccctggcgaatcgatcactggatgccttgatcgtgcggaaacaggccaagggtcatggcaccggcgcctggctcgagggtcctttgccacagaagggtgctctgatcacagtgctggaggacgtggtcaccaccggtggctcgtccctgaaagctgtgcatcaattgcaagaagccggctatctggtcaacagagtgatcacgatcgtggaccgcgaagagggaggaaccgaagccatggcagcggcaggcctggacctggtgagcctgttccgtctgacggaggtttccaactgcgcccgggagctcagctgat

SEQ ID NO: 238542 - DNA, 646 bp, Unknown
  Bacterial polypeptide expressing nucleotide sequence isolated from the Sargasso Sea
atggaaaactacaaacagaactttatacagatgtctatcgatataggcgctctcaaatttggtgaatttgaactcaaatccggaagggtcagcccctatttttttaatatgggccttttctcaagcggtcgatctatgaaaaatattggtgatttttatgctgctgcattagaggagagcaatcttgaatacgatatgctttttggtcctgcatacaagggggttccgctcgtatcggtcttaagctcaagtcttttcgtcaatcatgagaaagatgtttcattcgtgtataaccgcaaagagaagaaagagcatggtgaaggaggtcaaatagttggtccgtccttagcaggcaaaatcgtcattgttgacgatgtgatcacagcaggtactgcaatcaaagaggcttcaaaaatgatcattgaggctggcgctgaaatctcaggaattctgattgctcttgatagacaagaaaaaggagcgggcgactcgtcagcggttcaagaagtttctcaagagcttggggtgccggtaatatcgattgccaatctggatcagattcttacttacgtgaaaaatagccccagtgaatttggggactatgtgaacagaatagagggttacagagaaaaatacggcgcttgat

SEQ ID NO: 238543 - DNA, 595 bp, Unknown
  Bacterial polypeptide expressing nucleotide sequence isolated from the Sargasso Sea
ctaaagtcagatgcactcttgttaggtgatttcattctaaagtctggaaaaaaaagtccatatttctttaatgttggttctttttttaatcaaggcttcttagctgagttatcaaatctatataccgaagaaatcatttctagcaaattagagttcgacgtaatttttggtcctgcatataaaggcatacctctggctgcagccatatcagcttctttaagtactaagatttctaaaccaattccctttgctttcaacagaaaagaagcgaaagttcacggagaaggcggcagtatagtaggggagttaaaagataagaaagttttagtggttgatgatgtgctaactgcgggcactgctcttaaacagtcactagaaataatttctcaagaaggtgggagtgcaataggttgtttagttgcattagatagagaagaaatcctagatgatttattggcaagagataaaatatttcaagattttaatatctctgtagcttctattgccaaaatttcacaacttatagaatttttagaagactgtgaacgtcaagatgaagctaaaattataaaaaactatcttttaggtacttaaa

SEQ ID NO: 238544 - DNA, 586 bp, Unknown
  Bacterial polypeptide expressing nucleotide sequence isolated from the Sargasso Sea
catgatctcagcgttccgctacgacaacgacgccaggcgcaccctgttgaagcgtctggcgggggaggcctaccgtcgtggtcagttcacgctggcctccggacgggagagcgagcactacgtgaattgcaaaccggtcagcttgagcggatccggtctggctctgatcagcagcgccatgctcgaccatctcgacgccgaggccgttgccgtcgcaggactgaccctgggggctgatcccctggtcagtggagtggcgatggcggcggcgctggtcgagcgccccctggacgccttgattgtgcggaaacaggccaaggggcatggcaccggcgcctggctggaagggccattgccaccgcagggcgcgttgatcaccgtgctggaggacgtggtcaccaccggcggctcatcgttgaaagccgttcatcaactgcgggaggccggctacgtggtcaaacgggtcatcacgatcgtggaccgtgaggagggaggagccacagccatggctgctgcggacctggaattggtgagcctgttccgcctgtcggaggtgtccagcgccgccgaggagctcagccgatga

SEQ ID NO: 238545 - DNA, 462 bp, Unknown
  Bacterial polypeptide expressing nucleotide sequence isolated from the Sargasso Sea
gatgaacagccttaaaaaacaatttattgaattcacattaaatcatgaaatactacgttttggcacttttacattaaattctggtagacaaagtccatactttttcaatacaggtttatgtaataatggcaagttattaagctcgttggccaagttctattctaaatgtattattgaaaatactatagaatacgattttattttcggaccagcatacaaagggattactctggcttcatcaataagccatacattatattcagataactctgttagcaaaccattttgttataaccgtaaagaagctaaaactcatggagaatcaggaatatttgttggttatcaaccaaagggggcagctattatagttgatgatgtaatatcatctggtaactctattactgagagtattaagctgcttgaaactaataatgctcatccaacgtctgttgttgttgcttt

SEQ ID NO: 238546 - DNA, 631 bp, Unknown
  Bacterial polypeptide expressing nucleotide sequence isolated from the Sargasso Sea
tatgaaagaaagagaaaaccaatttttcaaacttgcactagagtcagatgctttgcttataggtgacttcactttgaagtctggaagaaagagtccttatttttttaacatcagcgctttatttgaatctggcttcattaatgagctatctactttatacgccgatttaattgaagaagaaaacatcaagtttgatgtaatttttggccctgcttacaagggaataccgcttgcagcagctgttgcaactattctaagtaacagatcttcacattcagtcgctataagttttgacaggaaagaagaaaaaactcatggagaaggtggaaaaataataggtaatgttaaagacaagaaggttcttattctagacgatgttttaactgcaggcaccgctttaaatcaaagcatagatctcattagacaaacgggaggcgaggttgtttcatctgtggttgcattagacagagaggaatatgtagaaggtgcactggcaagagacttaatagaagataagactagctctaaattattgtctatagcccgaatctctcaaatattagattttttaaaacaaacaaagaaatccgaagaggctcatttaatagaagactatttatcaagacaataa

SEQ ID NO: 238547 - DNA, 559 bp, Unknown
  Bacterial polypeptide expressing nucleotide sequence isolated from the Sargasso Sea
atgcacccatttataaaaaaggctatcgaattagaagctcttaaattcggtgatttcactctaaagtcgggacttaaaagcaaatatttttttaatattgcgagtttttttaatggtcaagacatgcactttttggctagccaatattttaaagttatccaaaaagcgaatttagaatttgatgctatgtatggaccggcatacaaaggcatacctttggcaacagcgataagtcagcttttctatgttgaggagcagaaaaaaattgaacttatatttgatcggaaagaaattaaagatcatggtgagggtggcaagctgataggagatattgctggaaagaaaatattaataatagatgatgttttgactgccggcacggcaattaaagagactgttgaaataattcaacaaaataacgccaaaaccgttgcagcaatagtggcgctcgatagaatggagatagatgcaaattctcttacatttaaagaaaaccttgaaaaaagcttatcaattccaatattaagtattgcaaccttcgaagatttaaaagaataaa

SEQ ID NO: 238548 - DNA, 640 bp, Unknown
  Bacterial polypeptide expressing nucleotide sequence isolated from the Sargasso Sea
tatggtatttgacaaaattattgcaaaaaaaactattaattatcttctacaaattaatgcaataaaattaaatacaaaaacccccttcacctgggctagtgggattaaatctccaatctactgtgataatcgactgattctttcaaatattgaaattagagattacatcgctaatcaaatggctaatataatttcaaagtctttttcaggtaattatatagtagctggagttgcaacaggtgcaattgcaattggagctctagttgctgaaagattaaaaaaaccatatatatatgttagaccaaatcctaaaggtcatggtttgaaaaatcagattgaaggttctttaccaattggatccaatgttattgtaattgaggatttgattagcacaggtatgagtagtttaaatgctgttaatgctataaagggtgaaagttctagtgtaaatgcaatgttgtctattttctcctatagttttgactttgcaaatgatagattcaaatctgaaaaaattaatttaatatctctagccgattataatattctagttgagattgtgaaagaacagaaaattattagtcatgatgaaattgaaaaactgcaaagatggagagaagatcctgaagattggatgtaa

SEQ ID NO: 238549 - DNA, 392 bp, Unknown
  Bacterial polypeptide expressing nucleotide sequence isolated from the Sargasso Sea
tatgaaacagtttcaaatagactttattgagtttgcattgtcgcgtcaggtactgaagtttggcagttttacgctgaagtccggccgtaccagcccgtacttttttaacgcaggtttatttaatacaggcggcgatttagctcgtttaggccggttttatgctgcggctttagaagacgccggcgtagagtttgacctgctgtttggtcctgcctacaagggtattcctatagcaactacgacggctgtggctttgtttgatcagtacggtaaagatgtgccttattgcttcaaccgcaaagaagccaaaacccatggtgaaggtggcaacttagtcggctcgcctttacagggcaaagtgatgctggtggatgatgtgatcacggccggta

SEQ ID NO: 238550 - DNA, 643 bp, Unknown
  Bacterial polypeptide expressing nucleotide sequence isolated from the Sargasso Sea
atgcaaaactacaaaaaacaatttgcagaattcctagtgagatcagacgcacttcagtttggggagttcacacttaagagtgggagagtctcgccctatttttttaactcctcaaaatttaactctggacctgtgatcgagcagctaggaaaattctatgctttagcgattgagcagtatgcaccttcctgtaatatggttttcggacctgcttacaaggggattcccttgtgtgtaaccgttgcaacagcactttcaaaaaaaatgaatagaaacattggttatttctttaatcgaaaagaaattaaaactcatggtgatcagggagcccttgttggtcagttcccacaatctggtgatatggcaataatagttgatgacgtattcactgatggaaataccaaaatagaatccatagacttggtttggaatctctgcaagattaaattttctggagtaatggtagctttggacaggatggaaattagttctcgcggtggggacgcaattgcagaatttaacgataaaacaggacttccagtctggtcaataatcaacatccgggaggtatgcctttatctaaaaaacaggactgtaaatggcaatgttattctaagtgaggccatataccatgaaatagaaa

SEQ ID NO: 238551 - DNA, 646 bp, Unknown
  Bacterial polypeptide expressing nucleotide sequence isolated from the Sargasso Sea
atggaaaactaccaacagaactttatacaattggcgattcaaattggcgctctcaaatttggagagtttgagcttaaatctggaagagtcagcccatatttttttaatatgggtcttttctcaacaggcaaagccttaaaaaatatcggtgacttttatgctgctgccctagaggggagtaatattgactatgacatgctttttggtcctgcttataaagggattcctcttgtatcagtcttaagttcgagtctctttgtcaaccatgaagagaatgttccctttgtctacaaccgaaaagagaaaaaagatcacggggagggcggacagatagttggtccctcattgtctggcaaagtggtcatcgttgatgatgtaatcactgctggaacagcaatcaaagaggcttcaaagatgatcactcaagcgggtgccgaaatctcaggaatacttatagcgcttgatagacaagaaaaaggtgggggagatttatcagcggttgaagaggtttcaacagagcttggtgtgccggtgatttccattgtaaaactggatcagattctcacatttgtaaaaaatagccccagtgaacttgaggcttatgttgaaaaaatagagacctatagagaaaaatacggcgcttgat

SEQ ID NO: 238552 - DNA, 470 bp, Unknown
  Bacterial polypeptide expressing nucleotide sequence isolated from the Sargasso Sea
tgctggtgtagagtttgacctgctgtttgcccctgcctacaaaggtatacctatagcaactactactgctgtggctttgtttgatcagtacggtaaagacgtgccttattgctttaaccgcaaagaagcgaaaacccatggggaaggcggcaacttagtcggttcgcctttacagggcaaagtgatgctggtggatgatgtgatcacggccggtactgcgattcgtgaatcgatgcagcttattcaggcgcagggcgccagtttaagtggtgtgttgattgcgctcgatcgtcaggaaaaaggccagggcgaactttcagctattcaggaagtcgaacgcgactttggtactcaagtagtttctatcatttgtttaaacgacttaatcaactacctgcaaggcaaaccagagctggcccagtatttagaagctgtgtctgcgtatcgtgcccagtacggtgtgagctaag

SEQ ID NO: 238553 - DNA, 664 bp, Unknown
  Bacterial polypeptide expressing nucleotide sequence isolated from the Sargasso Sea
atggcggcggattggcgccacgacttcatcgccttctgcctcgagtgcgaggtgctgcgcttcggcgagttcacgctcaagagcggccgccagagcccgtacttcttcaacgcgggcctcttcaacaccggcctgcggctcgccaagctcggctcttactatgcaaaggcgatcgtggagtcaaagctcgagtgggacgtgctgctcggcccagcgtacaagggcatcccgctcgccgcagccacatccatgtgcctcgcgacggagcatgacatcgacgccaagtactgcttcaaccgcaaggaggcaaaggaccacggcgaaggaggcatcatcgtcggctctcctctcgcaggccgtgccctcgtcattgacgacgtgatcacggccggcacagcagcgcgcgagtcggccgcgctagtcgcggcgcagggagccgagctcgccggtctggtggtcgcgctcgaccgcgaggagtgcggcgccggcacgacgctgactgccatcggccaggtcgaggccgatctcaaggtgcccgtcgtgtccatcctgacgctaaccgacctcattggcttcctcgaggcaaagggccgcagcgaggacgcggcgcgcttgacagcccacaaggcacagttcggcgcgggccaggccggtgccgcatgag

SEQ ID NO: 238554 - DNA, 568 bp, Unknown
  Bacterial polypeptide expressing nucleotide sequence isolated from the Sargasso Sea
gtccgggcggatcagcccctatttcttcaacgccgggaggttctccacaggcggcgcactggcgcgtttaggacgctgttatgccgccgccttgcaagcctcgggtcttcacgtcgatatgctttttggccccgcgtacaaaggcattcctttggtgtccaccaccgccatggcgctgtcagagcaacatggtatggatctgccttttgccttcaaccgcaaggaagctaagacccacggtgagggcgggaatattgtcggcgcgccgctcgccggcgatgtggtggtcattgatgatgtgatgactgcggggacggctattcgcgagtccatggccatactcaatgagtcggatgctcagggtgcgggcgtggtgattggcctcgatcgctgcgagcggggtgacggtgagcgctcggccgtgcagcaggttgagcaaaattgggggctcacggtggtgagcgtggtctccctgcacgacattatcacgtgggtagaaagtaaccccactatggcgcaacaccgtgaggccttggagcggtatcgtgagcgttacggtgtggcgtaa

SEQ ID NO: 238555 - DNA, 208 bp, Unknown
  Bacterial polypeptide expressing nucleotide sequence isolated from the Sargasso Sea
tatgcaaacctatcagaaagagtttatcgaatttgctatccagcagggtgtactacgttttggtgagttcactcttaaatccggacgcatcagtccttacttctttaatgccggtttgtttaacacgggttctgctcttgctcgcctgggtcgtttttatgcggcagcgttagaagactccggtattgagtacgacgttgtctttggc

SEQ ID NO: 238556 - DNA, 643 bp, Unknown
  Bacterial polypeptide expressing nucleotide sequence isolated from the Sargasso Sea
atgcagccgtatcagcgcgactttatccgttttgccatcgatcgcggggtactgcgtttcggtgaattcaccctgaaatcggggcgtaccagcccgtatttcttcaatgccggcctgttcaacaccggttccgccctggctgaactgggccgttgctacgccgccgccatcgtcgacagcaaaatccccttcgatgtgctgttcggcccggcctacaagggtatccctttggcggcgactaccgccgtggcccttgccgaccagcatcagctggacgtgccatggtgcttcaaccgcaaggaagccaaggaccacggcgaaggtggcagcctggtcggcgcgccgctggccggtgacgtgctgatcattgacgacgtgattactgccggtaccgccattcgtgaggtcatgcagatcatcaacgcccagcaggccaaggccgctggtgtactgatcgcgctgaaccgtgaagagcgcggcaatggcgaactgtcggcgatccaggaagtggaacgcgacttcggtatcccggtggtcagcattgtttcgctgacccaggtgctggagttcctggctgacgatccacagttgaagcagcacctgccggctgtcgaggcctatcgggcgcagtacgggatctgat

SEQ ID NO: 238557 - DNA, 574 bp, Unknown
  Bacterial polypeptide expressing nucleotide sequence isolated from the Sargasso Sea
caagcttggagattttaccttgaaatctggaagacaaagcccttacttctttaatgctgcatcttttatagaatatggccatttagaccaattagctgaggttatggcagaaaaaattaaggattctgatatctcatttgatattatttttggtccagcatataaaggaatatttctaggatcagtcttagcaacaaaactaaacaaacctgtttgcttcaacagaaaagaagaaaaagatcatggcgaaggaggttctctcataggagcaaaaccagaaggcagggtattaatagttgatgatgtaatatcttcgggtttagcaataagagaagcacttgagattcttaaaccttatgatgtcgaaattgccggagtgcttgtaactctagataggcaagagaaaggtcagaaatcagatttaatggcttctgcagaattaaaatcagaaggtatagatgtatttgaaattatttcattagatggtctattggatgcgggcaatatcattagcgaagatgatattgctaggattaaagattacagagaacaatttagaggtaaagatgcctaa

SEQ ID NO: 238558 - DNA, 591 bp, Unknown
  Bacterial polypeptide expressing nucleotide sequence isolated from the Sargasso Sea
tatgcataattaccagtctaaatttatagattttgttattgaccacaagatactaaggtttggagaattcaaacttaagtcgggtaggattagcccttatttctttaatgcagggttatttaattccggcaaaaagttgaattttcttgctgaatcctatgcttctgcaatagttgagtcgaaactttcttttgatgtcttgtttggtcctgcttacaaaggcattcctttagtttcagccactgcgattgtgctatctagagaatataatttagagaaaccctacgttttcaaccgaaaagaagaaaaacagcacggcgagaaagggctgctagtaggttccaatcttgaaggcagtgcattgattatagatgatgtcattacggcaggaaccgcaattagggaagttgttgaaataattaggagtacaaatgctcggatatctggggtagccgtagctttggatagacaagaaagagggttgggggagttatcggcgattcaagaaattgaggaaaagttgaatatctctgtaattagcattgttagtcttaaagacataatttcgtaccttgaattgtccgaggacag

SEQ ID NO: 238559 - DNA, 658 bp, Unknown
  Bacterial polypeptide expressing nucleotide sequence isolated from the Sargasso Sea
atgaggagcgaatccatgaaaccgtatcagcgccagttatttgagtttgcgctaacaaagcaggtactaaagtttggcgaatttacgctgaaatccgggcgcaagagcccctatttcttcaacgccggcctgtttaataccgggcgcgatctggcactgttaggccgtttctacgccgaagcgctggtcgattccggaattgatttcgatctgctgtttgggccggcttataaagggattcctatcgcgacgactaccgcggttgcgctggcggagcaccatgacctggatttgccttactgctttaaccgcaaagaagcaaaaacccacggtgaagggggcaacctggtcggcagtcccctgcagggacgcgtcatgctggttgacgatgtgattaccgcaggcaccgcgattcgcgagtcgatggaaattatccaggcgcacggcgcggaactggccggcgtgctgatctctctggaccgtcaggaacgcggtcgcggcgaaatctcggcgattcaggaggtcgagcgtgactacggctgcaaagtgatttctatcgttactctgaaagacctgattgcctatctggaagagaagccggagatggctgagcatctggcgacggtacgtgcttaccgcgaagagtttggcgtataag

SEQ ID NO: 238560 - DNA, 604 bp, Unknown
  Bacterial polypeptide expressing nucleotide sequence isolated from the Sargasso Sea
atagaatctcaagcactacaatttggagaatttacactcaaatcaggtcgacaaagcccgtatttttttaatgctgcaaatatgcttaaaggctctaatttattccagttagcacaatgttatgtcgatacaataattgataacaatattgagtttgattgcatatatggtccagcctataagggtatttttcttggttctattgttgctacagttttaagtaaacagggcaaaaattatcctgttagcttcaatagaaaagaattgaaagatcatggagaaggtggaaatattattggtgcggatccaactgggaacgttttaattattgatgatgttttatcggctggaactgctggaagagaatcaattaattcaataattaatcacaatgcgactccttccagttttattgttggtcttgatagacaagagaaaggagtttctaatgaatcagccagtaaagaattagagagtgaattcaatctgaatgtcacatcaattgttaatcttgactctctaattggatatgtcaaaaatgaatctgagcttacagaacatcttgaaggcttaaatatctatagaaacacttggggggcataaa

SEQ ID NO: 238561 - DNA, 557 bp, Unknown
  Bacterial polypeptide expressing nucleotide sequence isolated from the Sargasso Sea
gtacagttcagggctgcgatcgccgatttattgtgataaccgggtgttaatcgcctaccctgaggcgcgcgaacaggtggtggaggccttttccaggcaggtttcatccgaggctgaggtgattgtgggtacggcaacggcgggcataccgcatgcggcgtggttggctcatgcgctgaatttgccgatggcctacgtgaggagtaaggccaagcagcacggtcagggtaatcaaattgaaggtcggttgagttcggggcaacggattgttttgattgaagatttgatttccacggggggcagtgcgttaacggcggtaatggcattgcgtcaggcgggggcggcgatattgggctgccattcaattttttcttatgggttaccggcggcggttgccgggtttgctgaggcggaggtggcggtgagcagcttggtcgacttgccggtgttgttggaggtggcgacatcgcaggagatgatcagcccggagcaacaggccgcggtgttacgctgggcagcggccccgggtgcttggcagccgggtgctctaccgtaaa

SEQ ID NO: 238562 - DNA, 574 bp, Unknown
  Bacterial polypeptide expressing nucleotide sequence isolated from the Sargasso Sea
cagcttggagattttaccttgaaatctggaagacaaagcccttacttctttaatgctgcatcttttatagaatatggccatttagaccaattagctgaggttatggcagaaaaaattaaggattctgatatctcatttgatattatttttggtccagcatataaaggaatatttctaggatcagtcttagcaacaaaactaaacaaacctgtttgcttcaacagaaaagaagaaaaagatcatggcgaaggaggttctctcataggagcaaaaccagaaggcagggtattaatagttgatgatgtaatatcttcgggtttagcaataagagaagcacttgagattcttaaaccttatgatgtcgaaattgccggagtgcttgtaactctagataggcaagagaaaggtcagaaatcagatttaatggcttctgcagaattaaaatcagaaggtatagatgtatttgaaattatttcattagatggtctattggatgcgggcaatatcattagcgaagatgatattgctaggattaaagattacagagaacaatttagaggtaaagatgcctaaa

SEQ ID NO: 238563 - DNA, 643 bp, Unknown
  Bacterial polypeptide expressing nucleotide sequence isolated from the Sargasso Sea
aaagcagacttcctaggttttgctatcgaatcaggagcccttaaattcggtgaattcaccttaaaatctggcagggttagcccttatttcttcaacacaggggctttctcttctggagcggcgttatctaaactagctcgagcctactccatgtgcattaacgagaaaagcccagagtttgacatgctttttggtccggcctataagggaatccccctcgtcagtgctatatcggtttgctattcagacctctacaaccgcgatattgggttttgcttcaatcgaaaggaagaaaaaaagcatggggaaaaaggcacgatagttggtcaagagctaaaaggcaatgtgctgattattgacgacgtcatctcagctgggacctctgtacgagaatcggtcaaaattatagagggtgaaagtgcttgcccagcagccgtagtaatcactcttgaccggcaggagagaggtttaggtccaaaaaccgcagtggaagaaactgagcattccttaaaccttagagtggaaagtattgttagttttaaagatatagtgcactatcttgaaaggatcggaaacttttcatctgaaattgaagctctccaagagtaccagatagcgtatggaaataaagtaagtgaataat

SEQ ID NO: 238564 - DNA, 613 bp, Unknown
  Bacterial polypeptide expressing nucleotide sequence isolated from the Sargasso Sea
atgagccaaaacagcgagttgcgccaatccttcatccgctttgcggtggaagccggcgtgctgtcgttcggggaattcgtgaccaaggcggggcggacgtcgccctatttcttcaacgccggcaagttcgcagacggcgccctgctgggccaagtcgcgcaattctatgcgaaaaccctgctggactcgggtgtcgagttcgacatgctgttcgggccggcctacaagggcatcacgctggcatcggccaccgccgtggcgctcgcaggcctgggccgcaatgtgggctttgcgtacaaccgcaaggaagccaaggaccacggcgaaggcggcagcctggtcggcgcgaagctgcagggccgggtggtgatcgtcgatgacgtgatctctgccggcacctcggtgcgcgagtccgtcgagctgattcgcgccgccggcgcgaccccggctgccgtgctgatcctgatggatcggatggagcgcagcggcaacgccgtggatatcggcgagcgctctgcggtgcaggatgtgcaggcgcagtacggcatgccggtggtgtcgattgcgaatctggatgacctgcttgggtatctggataacgcgggcgacccgg

SEQ ID NO: 238565 - DNA, 646 bp, Unknown
  Bacterial polypeptide expressing nucleotide sequence isolated from the Sargasso Sea
atgaaagagacaaaaacaaactttctaagactggccatagactcaaatgtacttcaatttggcgatttcacattaaagtctggaagaaaaagtccttattttttcaatgcgggtttattcaatacaggtaaagcaatagcacaactcggtcgccattatgctgataccatcgtatcatcaaatatagaatttgatatgctctttgggccagcatacaagggaatcactttggcatcggcaacagcatcagcgctttcagataaatacgatatagataaaccttttgcgttcaacagaaaagaatcgaaggctcacggcgaaggtggttgtgtggtaggcgccaatttaaaaggtaaagtactgataattgacgatgtaataactgcaggcacagcagttagagaggcttacgacctgattatttctgaaggtgcgtcagtagcaggcttggttatctcaatggacagacaagaaagaggtaaatcaaaaatctcagctaccagtgaactcgaacaagagttaaattctcctgttatgtctattgccagtcttgaggatctaatttttttcattaaagaagatgagaatcttaaatcacatttacccaacctgattgagtatcactctaaatacagttcactctgat

SEQ ID NO: 238566 - DNA, 646 bp, Unknown
  Bacterial polypeptide expressing nucleotide sequence isolated from the Sargasso Sea
aatggaaaactacaaacagaactttatacaactggcgattcaaattggcgctctcaaatttggagagtttgagcttaaatctggaagagtcagtccatatttttttaatatgggtcttttctcaacaggcaaagccttaaaaaatatcggtgacttttatgctgctgccctagaggggagcaatatcgaatacgacatgctttttggtcctgcttataaagggattcctcttgtatcagtcttaagttcgagtctctttgtcaaccatgaaaagaatgttccctttgtctacaaccgaaaagagaaaaaagatcacggggagggcggacagatagttggcccgtcattgtctggcaaagtggtcatcgttgatgatgtaatcactgctgggaccgccatcaaagaggcttcaaagatgatcactcaggcgagtgctgaaatctcaggaatactcatagcgcttgatagacaagaaaaaggtgggggagatttatcagcggttgaagaggtttctaaagagcttggtgtgccggtgatttcaattgtcaacttggatcagattctcacatttgtaaaaaatagctccagtgaacttgaggcttttgttgaaaaaatagaggcctatagagaaaaatacggcgcttga

SEQ ID NO: 238567 - DNA, 640 bp, Unknown
  Bacterial polypeptide expressing nucleotide sequence isolated from the Sargasso Sea
atgaagtcttatcaggaaaaatttatttcgattgctatccaagaacaagctctgcaatttggtgatttcactctcaaatcaggacgtcagagcccatatttcttcaatgctgcaaatatgcttgctgccaaaagtatatttgaggttgcccagtgttatcttgagtgcattgatgataatggtctatcttttgactgtatgtttggtcctgcctataaaggaatttttcttggttcggctatcgcaactttaatgggccaatctgaaagtacaataagtcttgcctttaatcggaaagaggtgaaagatcatggtgagggaggcaatatcattggacaaattgaaggtgatgttttaattattgatgatgtgctatctgcgggcacagcagtaaaagaagcaatcaatactgtaaagcaatcagggactcgaccagctaaatatgtattggttggcttagatcgtcaagagaaaggtcaaggcgaattatctgccaaaactgaacttgaatctcagttcgatattagagtactctcaattatcagccttgatacactaattgattatattgattctgatcgaactttggatgcttctctttcagcaatgagagactatcgacaagtctggggagcttaat

SEQ ID NO: 238568 - DNA, 643 bp, Unknown
  Bacterial polypeptide expressing nucleotide sequence isolated from the Sargasso Sea
catgaaagcgtttcagcgtgattttattgagtttgccattgaacgtggcgtactgaaatttggcgaattcactttaaagtcaggccgcgttagcccgtactttttcaatgcaggcttgtttaatcgcggtggcgatttggctaagttggggcgtttttacgctgatgcgttaatggacgcaggcgttgcgttcgatgtactttttggtccagcctataagggcattcctattgcgacaacaacagccgttgcattggccgatagccacaagcttgatgtcccttattgcttcaaccgtaaagaagcgaaaacccacggtgaaggcggcaatctagttggcagcccactagaaggtaaggttatgctggtggatgacgtgatcactgcgggtacggctattcgcgaatcgatgaccttaatcgagcaacagcaggctagcttgtctggcgtgctgattgcgctagacagacaagagcgcggtaatggcgaactgtcagctattcaagaggtcgagcgcgattttggcactcaggttatctctattgtatcgcttgccgatgtcgtggcttatctgaccgagaaaggcgggtttgatagcgaaatcagcgccattaacacctatcgtgaaaattatggcatctga

SEQ ID NO: 238569 - DNA, 646 bp, Unknown
  Bacterial polypeptide expressing nucleotide sequence isolated from the Sargasso Sea
tatgaaacagtttcaaaaagactttattgaatttgccttgtcgcgtcaggtactgaagtttggcagttttacactgaaatccggccgtaccagcccgtacttttttaacgcagggttatttaatacaggcggcgatttagcccgtttaggccggttttatgcggcggccttagaagacgccggcgtagagtttgacctgttgtttggccctgcctacaaaggtattcctattgcgactaccacagctgtggcgttgtttgatcagtacggtaaagatgtgccttattgctttaaccgtaaagaagcgaaaacccatggtgaaggcggcaacttagtgggttcgcctttacagggcaaagtgatgctggtggatgatgtgatcacggccggtactgcaattcgtgaatcgatgcagttgattcaggcacagggcgccagtttaagtggtgtgctgattgcactggaccgtcaggaaaaaggtcagggcgaactttcagctattcaggaagtcgaacgcgactttggcactcaagtggtttctatcatttgtttaaacgacttaatcaactacctgcaaggcaaaccagagctggcccagtatttagaagctgtgtctgcttatcgtgcccaatatggtgtgagttag

SEQ ID NO: 238570 - DNA, 646 bp, Unknown
  Bacterial polypeptide expressing nucleotide sequence isolated from the Sargasso Sea
atggaaaactacaaacagaactttatacaattggcgattcaaattggcgctctcaaatttggagagtttgagcttaaatctggaagagtcagcccatatttttttaatatgggtcttttctcaacaggcaaagccttaaaaaatatcggtgacttttatgctgctgccctagaggggagtaatattgactacgacatgctttttggtcctgcttataaagggattcctcttgtatcagtcttaagttcgagtctctttgtcaaccatgaaaagaatgttccctttgtctacaaccgaaaagagaaaaaagatcacggggagggcggacagatagttggcccctcattgtctggcaaagtggtcatcgttgatgatgtaatcactgctgggaccgccatcaaagaggcttcaaagatgatcactcaagcgggtgctgaaatctcaggaatacttatagcgcttgatagacaagaaaaaggtgggggagatttatcagcggttcaagaggtttcaacggagcttgatgtgccggtgatttccattgtcaacctggatcagattctcacatttgtaaaaaatagtcccagtgaacttgaggcttatattgaaaaaatagagatctatagagaaaaatacggcgcttgat

SEQ ID NO: 238571 - DNA, 646 bp, Unknown
  Bacterial polypeptide expressing nucleotide sequence isolated from the Sargasso Sea
atgtctcaattaaaagattatcaaattaactttattaatgaagccatgcgtgtaggcgcattagaatttggaaccttcaccctaaaatctggcagacaaagtccatatttttttaacgcatcaaaattactttttgatgcagatataaacatcatcatcgaaggatttgctcataagtttttagaatttggttcggacatcaaccaattgtttgggcctgcctacaaaggcactatttttggaagcatgttgggcatgcatctcaaaaaaaccaatccttcattatcactttgttttaatagaaaagaagttaaagatcatggtgaaggtgggatgtttattggtcaaagtccctctgggaatgttgtggtagttgacgatgtactttcagcaggaactgccgccaaggaatccatcgatttaattttagaaaatgatgcgacaccgtctggtatcttggttggcttaaatagacaggaaaaaggtacatcagctcaatctgcaagctttgagctagaacaaacctacaaccttaaagtcctctctgtaattagtcttgatgatttaataaggtttcttaaaaaaagtgatcaagcagaatttattgatagcatggaaagctatcgagacgagtggggagcgtaga

SEQ ID NO: 238572 - DNA, 700 bp, Unknown
  Bacterial polypeptide expressing nucleotide sequence isolated from the Sargasso Sea
ttcatacctatggcaagattggtcagttcaggcaatgcaggagggtcttggagaatcattcgtaggtacttccaactgctcaatcgcgatgaaaagagatattgaggcgattggaacaaatgcgcacgaattgcctatggtttacagtgcattggccaagagtgatgaagagttagcgaaggctccatacaaggtattagaagattggcgtgaagagcatgatgggaatttaagaattattttgccagacacttatgggacggagggttttttgaaaaatgccccagactggctctctagttggaccggaatgcggatagacagtggcgatccgagacttggggcaagaactgctatcaaatggtggcagtcaatgggagaagatccaaaagaaaaactactcattttttcagatggcctggacgttaatcagattttggatttgcataaggagttttctaaagaagtaaatgtatcctttgggtggggtacaaatttgactaatgactttcgtaatctagtgacttgtggccgactggatgcattctctttagtatgtaaagcagcatcagtaaatgggcgccccactgtaaaactttctgataacccaaataaagctactgggcctctaaccgagattgagcgatacaagcgcgtttttcaggttggcgcccaggaagcactacgaatcgatatttag

SEQ ID NO: 238573 - DNA, 829 bp, Unknown
  Bacterial polypeptide expressing nucleotide sequence isolated from the Sargasso Sea
gacaaggtgccgctggcccggctcattgacgaaggcgagctgcgcgagcagttggatcatatccgttccctgagcctgagccgtggcgaaagcacatggctgcgcggcaacacgttttacggcaaacgccagatgttccgcccggattttatggagtggttcgaaaatctgcgcctgccgccttatcatctggagcgtaaaggcgatcaatacgagctgacctttgaagggtcatggcccgaggtgatgctttgggaaatcccggcgcttgcggtgctgatggagctgcgctcgcgcgcggtgctgaatgacatgggccggtttgaattgcaggtgctctatgcccgcgccatgacgaaagtctgggaaaagatcgagcaattgcgccagattgacgggttggggattgcggatttcggcacgcgtcgccgtcatagcttcctgtggcaggattggtgcgtgcaggcgatgatggaagggcttggcagctcctttaccggcacgtccaactgtctcattgcgatgcggcgcgaggtggaggccatcggcaccaacgcgcatgaattgccgatggtttattccgcgctggccaaagatgacaaggcgctggcgcaagcgccttatgatgttctctcggactggcacgaggaacacgatggcaacctgcgtatcattctgcctgacacttatggcaccgaagggttccttcagaatgcgccggattggctggcgggttggaccggcattcggatcgacagcggtgatccggccacagcggcagagatcgcaatccgctggtggcaggaccgcggcgaagacccaactgaaa

SEQ ID NO: 238574 - DNA, 220 bp, Unknown
  Bacterial polypeptide expressing nucleotide sequence isolated from the Sargasso Sea
catgatcatcaccagcctgctcgacaccgacctgtacaagttcaccatgatgcaggtggtgctgcaccagtttccgggcgcgcaggtcgaatacaagttcaagtgccgcaaccccggcgtgcagctgggcgcgtttgccaacgagatccgcgacgagatccgctcgctgtgcagcctgcagttccaggacgccgaactgccctacctgcggtcgctgcgg

SEQ ID NO: 238575 - DNA, 1294 bp, Unknown
  Bacterial polypeptide expressing nucleotide sequence isolated from the Sargasso Sea
aatggttgatatcgctaggcgcgtttggaaccataagtggaaaattgatccaatcgtaaggtcactactggatacagatttctataagctcttgatgtgtcaatcaatttttcgaaataagcctgatacttctgtaacatttagtctgataaacagaagtaaaaacatcaagttagcggaactcatcgatgagggagagctaagggagcagctggatcatatccgtagtctttctttatcaagaggggaaagtacttggcttcgtggtaatacattttacggaaaacggcagatgttccgttctgacttcatggaatggtttgaaaaattaaaattacctccctatcacctagaaaaaaaagcaggccaatacgagcttacatttgagggttcatggcctgaagttatgctttgggaagttcccgctctttcagttttaatggagttgagaggccgtgctgttttaaataaaatggcaaagtttgaattagaagttttgtacgctcgtgccatgactaagctttgggaaaaaatagaaaatttgcgtaatattaaagatcttaaaatagcggatttcggaacgcgtagaagacattccttcctttggcaagattgggcagttcaggcaatgctagaggggctagaggataagtttataggtacttcaaactgtttgattgccatgagacgcgatatagaagcaataggaacgaatgcccatgagcttccgatgatatattctgctctagctgaaaatgatgaagaacttgctaatgcgccatatcaagtgttggcggattggcatgaggaacatgacggaaatttacgtattattttacctgatacatatggcactgaggcttttttaaatagagctcctgattggttgaaacagtggacgggtattagaattgatagtggtgatcctgttgatggtgctgaggcggctatcgcttggtggcaaaacaagggagaaaaccctaaagataagttggttattttttcagatggtttggatacaccgacaataagcgatctacatgaaaagtttaatgggcgcgtaaaagtatcgtttggctggggaacaaacttaacgaatgattttcggggtttagtttcagacggatcgctagatgctttttcacttgtttgcaaaccaatcaaagctaataaccgatctacggtaaaactttcagataatttaaataaagctttgggtgcttctgaagaaattaatcgctacaagcgtgtgtttggcgtcaacgatcaaaaatcttttgatatttttgtatag

SEQ ID NO: 238576 - DNA, 783 bp, Unknown
  Bacterial polypeptide expressing nucleotide sequence isolated from the Sargasso Sea
cctgctggatactgatttctacaagctcaccatgatgcaggcggtgctgcatcactatccgaacgcggaggtggagtgggcattccgcagccgctccggtgaggacctgacgccctacctcgacgagatccgccagcagatcgaggcgcttgccgagctgcagatgacaaccgaggagctggcctacctcgagcgcatcccctacatgcagcccgacttcatccgcttcctcggtttgttccgtttcgatctgcgttatctgcaggtgagcatcgaggacggcgagctggtgatgcacctgcgcggcccctggctccatgtgatcctgttcgaagtgccgctgctggccatcgtcagcgaggtgcgcaaccgcgcgcgctacccggcggtgacgctggcccaggcgcgcgaccggctggatgagaagctgcactggctacgcagccaggccagcagcgacgaactggccagcttcaccctggcggatttcggcacacgccgtcgtttctcctttgccgtgcaggcgatggtggtggaccgactgcaatgcgattttcccggccggttcgccggcaccagcaatgtgcatctggcacgcacgcggaatgtgaagccgatgggcaccatggcccatgagtggatcatggcgcaccagcaactcgggccacggctgatcgacagccaggttgcggcgctggactgctgggttcgcgaatatcgtggggcattgggcatcgcgctcaccgactgcatcaccatggatgctttcctgcgcgatttcga

SEQ ID NO: 238577 - DNA, 763 bp, Unknown
  Bacterial polypeptide expressing nucleotide sequence isolated from the Sargasso Sea
ccgtctcgtcgagaagatgaaactgctgggcgcgcgcccggaattcgccgactgcaagatcgccgactacggcacacgccgccgcttctcgaaacaatggcacgaggaagtgatcctcacgctgaaagacggtctgggtgagcagttcgccggcaccagcaacgtcttctatgcaatgaagcacagcctcacgccgctcggcacgatggcgcatgaatacctgcaggcgtgccaggcgctcggtccgcggctgcgcgattcgcagatctacggcttcgagatgtgggcgaaggaatatcgcggcgacctgggtatcgccctgtcggacgtgtacggcatggaggcgttcctgcgcgacttcgacatgtacttctgcaagctgttcgacggcgcgcgccacgattccggcgacccgttcgactggggcgagcgcctgctcaaacactacgaggcgaaccgctgcgacccgcgcaccaagatcctggtgttttccgacgcactcgacattccgaaggtgctgcaactgtacgagcgtttccgtggccgctgcaaactggccttcggcgtaggaaccaatctgaccaacgatctcggctataacccgttgcagatcgtcatcaagatggttcgctgcaatggccagccggtcgccaagctgtcggattcgccgggcaagaacatgtgtgaggacaaggcttatctggcgtatctgcgccaggtgttcggcattgcgcaacccgaggaagatggcgctgcgaagtaa

SEQ ID NO: 238578 - DNA, 655 bp, Unknown
  Bacterial polypeptide expressing nucleotide sequence isolated from the Sargasso Sea
catgcctatcatccagtccctgctcgacaccgacctgtacaagttcaccatgatgcaggcggtgctccaccagcatcccggcgcccaggtgcagtaccggttcaagtgccgtacccccggcatcgacctggcccgttacatcgaccagatcgacgaagaaatcgaccacctgtgcaccctgcgcttcagtgacgcagagctggactacatgcggggcctgcgtttcgtaaagccggacttcgccgatttcctcggcctgttccatctcgaccgcaagtacatccagctgcgcgcgtcgaaggcggtgcctggcgagatcgagctggacatcaccgggccgtggctgcacaccatcctgttcgaagtgccgctgctggcgatcatcaacgaggtctggttccgcaacaccaccacggccgacttcgccgagggcgagcgccggctgcaggccaaggccgcgctgctgcgtgatacccccggcttcgaacaatgccgcattgccgactacggcagccgccgccgctactcgcgtgactggcacgcacgtttgttgccgttgctgcgcgatgccctcggcccgcagctggtcgggaccagcaacgtgcacttcgccaggctgtacggcatgaccccgcacggcaccatggcccatgag

SEQ ID NO: 238579 - DNA, 742 bp, Unknown
  Bacterial polypeptide expressing nucleotide sequence isolated from the Sargasso Sea
gagaagctcgactggctcaaggccgaagcctcgccgagcgaactggccggtttccagctggctgatttcggcacccgcaggcgcttctcctaccgcgtgcaggagcaggcggtacacatcctcaagcgcgatttccccggtcgcttcgtcggcaccagcaatgtgcacctggcccgcgagttcgacctcaagcccattggcaccatggcccacgaatggctgatggcgcaccagcagctcggcccacgcctgatcgacagccagattgccgcgctcgactgctgggtgcgcgaataccgcggtttgctaggcatcgccctgaccgactgcatcaccatggatgccttcctcgccgatttcgacctgtacttcgccaagctcttcgacggcctgcgccatgactccggcgacccactggtgtgggcggaaaaagccatcgcccactacgagaaactcggcatcgatccgatgagcaagaccctggtgttctccgacgggctcgatctgcccaagtcgctgcggctctaccgtgcactttccgggcgaatccacgtaagcttcggggtcggaaccaacctgacctgcgacatccccggcgtcgagccgatgaacatcgtgatcaagatgatcgcctgcaacggtcaaccggtagcgaagatttccgatacgcccggcaagacccaatgccgcgacgagaacttcgtccattacctgaaacacgtctttcgcgtgacccactgag

SEQ ID NO: 238580 - DNA, 763 bp, Unknown
  Bacterial polypeptide expressing nucleotide sequence isolated from the Sargasso Sea
atgagcgagagtgtgtttgccgatcgcatcgtgcagaacctgctcgacaccgacttctacaagctgaccatgatgcaggcggtgctgcacaactacccgaacgtggaagttgaatgggagtttcgttgccgtaacagtgaagacctgcgcccttacctggcggagattcgttaccagatcgagcgcctcgccgagctgagcctgagccccgatcaattgggtttcctggaacgcatcagttttatgaaaccggattttctgcgcttcctcgggctgtttcgcttcaacctgcggtatgtgcaaaccggcatcgagaacggcgagttgtttatccgcctgcgcggaccgtggctgcatgtgatcctgtttgaagtgccaatgctggccatcgtcagcgaggtgcgtaaccgctaccgctaccagaccgtgatccttgaacaggcccgcgagcagctgtatcgcaagttcgactggttgaccgccaacgccagcagcgatgagctgtcggagctgcaagtggcggacttcggcacgcgccggcgtttttcctaccgggtgcaggaggaagtggtcagcgtgctcaagcacgatttccctgggcgctttgtcggcaccagcaacgtgcacctggcgcgcgaattcgatatgaagccgctgggcaccatggcccatgagtggatcatggcccaccagcaactcggcccgcgcctgatcgacagccagatcgccgcccttgattgctgggtgcgcgagtaccgtggcc

SEQ ID NO: 238581 - DNA, 1051 bp, Unknown
  Bacterial polypeptide expressing nucleotide sequence isolated from the Sargasso Sea
atggcccccgtcatcaccagcctgctcgacaccgacctctacaagttcaccatgtggcaggcgctgctgcaccggcatccacagacgcagagcgaataccgcttcgtctgccgcaaccagcccatctacccgctggccgagctgttgcccgaggtgaacgccgcgctggaccacctgtgcaccctgcgcttcagcgaagacgagctggcctacctgggcggcctgcggttcatcaagagcgacttcatcgactttctgcgcatcttccagttccagcgtaacttcatccacgcctgggccgagggtgaccagttgcacatcgtggcgcagggcccgcaggtgcatgtgatgggctttgagatctttgtgctggccatcgtgaacgagctgtacttccgccgcttcgatgctactgccgctctggccagcggctgcgagcggctggcggccaaggtgcagcagctgcaggacctggcgcagcaagccacactgcgccaccccttcgagctgttcgactttggcctgcgccgccgctacagcggtgcctggcagcgcgaggtggtcaagacctttgcagaacaagcaccgcagtggttcaagggcaccagcaacgtgctgctggcgcgcgacctgggcctggtgcccatcggcaccatggcgcacgaatacctgcaaagctaccaggcactgggcgtgcgcctgcgcgactttcaaaaggcggcgctcgaagactgggtgcaagagtaccggggcgacctgggcattgcgctgaccgacaccgtgggcatggacgccttcctggccgactttgacttgtacttcgccaagctgttcgacggcctgcggcacgactcgggcgacccggtggcctggggcgagaaggcgctggcgcactacgccaagctgcgcatcgacgcgcacaccaagcggctggtgtttctcgacggcctcacactgaccaaggcgctggcgctgtaccgccactttggcgaccgcacgcagctgggctttggcatcggcactcacctcaccaatgacatgggggatgccc

SEQ ID NO: 238582 - DNA, 1180 bp, Unknown
  Bacterial polypeptide expressing nucleotide sequence isolated from the Sargasso Sea
atgccacccatactcaacagcctgctcgatacagatgcttacaagctgcacatgcagcaggcggtgttccatcgttatccggatgccgaggtggtggccgagttccacagccgcaacgaagaggatctgctgcccatgatgggccagatcgaggagcagctgcacctcgccggttcgctgcggctgaccaggcccgagctcaacttcctggccgagcgccccttctttaccgccgattacctcgaccacctgcgccgcaagccgctggatgcctccctgctcaaggtgttcgagcaggacggtcgcatcaacgtgcgggtcgagggcccctggcaggacgtgatcctgtgggagatcccggtgctcgccatcatcagcgagatgcgcaaccgcttccgctacccccagttcggcgtcactcaggcgctggagcggctcgatcagaagatcgacaagctggagcgggaactgagccgggaggagatgagcgagttcaacctcatcgacttcggcacccggcgccgtttctccctcgcggtgcaggatgcggtggtgggtcgcctcaaggagcggctgccggcgtttcgcggcaccagcaactacctgctggcccagaaatatggcctgccggcggtgggcactcaggcccacgagtggttccaggcccaccagcagctcggcttcccgctcgagcacagccagcgggccgccctcaccagctggctggatgagttcaccaatcacctcggcatcgcgctcaccgactgcatcaccatggatgccttcctgcgcgacttcgacttcgagctggccagccgctatcaggggctgcgccacgactccggcgatcccgtggtgtggggtgagaaggccatcagccactatcagcggctcggcatcgaccccaccgagaagacgctggtgttctccgatggcctcaacctcgacaaggcggtcgagttgttccgtcacttccgcggccgcatcaacaccagcttcggcatcggcaccaagctcacctgcgatctacccggcgtcagcccgatgaacatcgtcttcaagctgatggagtgcaacggcggcccagtcgccaagatctccgacagccccggcaagaccctgtgccgggatgcggacttcatccgcaacctcaagcaggcgttccatgtcggggtctgac

SEQ ID NO: 238583 - DNA, 257 bp, Unknown
  Bacterial polypeptide expressing nucleotide sequence isolated from the Sargasso Sea
aatgtgtggaatagtaggaatttcggctgaatcaaatgtagcttctgaaatttatgattctcttctaatgcttcagcatagaggacaggatgctgcaggtatctctgtatgtgatcaaaaagataaactatctactagaaagtctatgggatatgttcgtgacgtttttcaacaaagacatatggaaaaacttattggtaattatggaataggccatgttcgttatcctactgcaggtggaaatggaaaagagtttg

SEQ ID NO: 238584 - DNA, 727 bp, Unknown
  Bacterial polypeptide expressing nucleotide sequence isolated from the Sargasso Sea
atgtgtggaatagtaggtatttctgcagaaactaatgtagccgcagaaatatacgactcattgctaatgctacagcatagaggtcaagatgcagcaggcatgtctgtttgcgatcaggatgataagttaacttcaagaaagtcaatgggttatgttcgtgatgtgtttcaacaaatgcatatggataagctaattggtaattatggaattggacatgttaggtatccaactgccggaggaaatggtaaagaatttgctcaaccaatgtatgttaattcaccatacggtattagtttgacccataatggaaacctcacaaattctaaacagttatctaatgaattatttcatgctgaaatgagacaccttttgactgattctgattcagaagtcctcttaaatatttttgctcatgagcttggaaaacaaagggaaatatatcccacagctgaacatatttttaaagctgtggcaaaaacacacataagatgcgatggagcttatgctgttcttgccctaataacaggtcatggaattttggcatttcgtgatgaaaatggaataagacctctttccataggtacaagaaaaggcaaatcaagagtcgaatatattattgcctccgaggactcattatttataccactaggttttaaaaaattgagagatatagagcctggcgaagccgtttttattaataaggagggtaattttttttcacaacaat

SEQ ID NO: 238585 - DNA, 230 bp, Unknown
  Bacterial polypeptide expressing nucleotide sequence isolated from the Sargasso Sea
catgtatgacaaactaaatgaagagtgtggtgtttttggaatttttaaccataaagattctgcagtactaactcaattaggcttgcactctttacagcacagaggtcaagaaggtgctggaattgtttcatgtgatagagaaaaatttacttgcattcgcaaaacaggtctcgtgggtgataattttaataatttagatattattgatcaattgaaaggtaaatatgcta

SEQ ID NO: 238586 - DNA, 934 bp, Unknown
  Bacterial polypeptide expressing nucleotide sequence isolated from the Sargasso Sea
tatattgaggaatattcagcctttttttgctgacactaatgcaggtgggataggagtagctcataatggaaatctcacaaattcaatatctttaaggaataaattagttgaggaaggtgctatattttacactacatcagatactgaaacgattgttcaactaattgctaaatcaaaaagaccaaagacaattgacaaagtaatcgatgcaatttttcagattcaaggtggctatgctttggttatgctgacacaaaactctctaattggagtaagagacccttatggtattagacctttggttattggtaaacttggtaacagttatgttttagcatcagaaacctgtgcatttgatattattggagcaaaatttttaagagaagttgaaaacggtgagatcgttttaattgaaaataatgaattaaaaagtattaagcccttccctgctaaaaaagttagaccttgtgtatttgaatatatttatttttcaagaccagacagtttaataggtggtaagacagcatatgagcatagaaaaaatattggtaaagaacttgcaaaagaaaatgatactgatgcagatatagtagttccagttccagattctggaaatgctgctgccatgggttttgcacaagaattaaaaatgaattttgaacatggattaattcgaaatcattatgtaggaagaacttttattgaaccaagtcaaaaaataagaagcttaggtgtaaaattaaaacttaatgccaatcaaacaacaattaaaaataaaaaaataattctaattgatgactcacttgtaagaggcactacatcttacaaaatagttaaaatgctttatgatgctggtgcaaaagaagttcatgttaaagattgcgtgtccagaaataagatatccagatttctatggagtagatacacctactaa

SEQ ID NO: 238587 - DNA, 255 bp, Unknown
  Bacterial polypeptide expressing nucleotide sequence isolated from the Sargasso Sea
gatgcaaaagataaagtacaagaattataaccctaaacttaaagaagagtgtggtgttttcggaataagcaatacaccagatgcgtcaactttaactgctttaggtttgcatgcactgcaacatagggggcaagaaggatgtggaattgtatcatttgacggaaataaatatcactctgaaaaaagatttggattagtaggagataatttcaataaagaaaaggtattaaaaaatttacctggaaattatgccat

SEQ ID NO: 238588 - DNA, 772 bp, Unknown
  Bacterial polypeptide expressing nucleotide sequence isolated from the Sargasso Sea
ttttatccaagatgataaaattgaaagtattaaaccattcccagaacaaaaagttagaccttgtgtatttgaatatatatatttttctagaccagacagtattttgaatggaaaaactgcttatgaatatagaaaaaatctaggagaagagcttgctaaagaagataacattgaaggtgatataattgttcctgttccagattctggtaatgctgcagccctaggttatagccaacaaacaaaaaaaaattttgaattagggttaattagaaatcattatgtaggaagaacttttatagaaccttctcaaaaaattagaagtcttggagtaaaacttaaattaaatccaaacgaatcttcaataaaaaataagaaaattatactagttgatgattctttagtcagaggaactacaagttttaaaattgtaaaaatgttatatgattcaggagctaaagaagttcatgtaagaatagcaagtccagaaataagatatccagatttttatggagttgacactcctacaaaaaaggaacttttagctgcaaataaaaacaatgatgaaatttgtaaatacataggagcaaaaagtttaaaatttttatcaatagatggtctttatagagcaattggatttgagagcagaaataaaaattaccctcagttaactgatcattattttacaggagactatccagttaaaccaatggatgatttgggtgatgataaaattacacaactttctttattaagtactggttcaaataattag

SEQ ID NO: 238589 - DNA, 806 bp, Unknown
  Bacterial polypeptide expressing nucleotide sequence isolated from the Sargasso Sea
atttttaagagaagtagaaaatggagaaattgtagttataaaaaatgataatattgaaagtataaaaccttttcctaaaaaaaaatcaagaccatgtgtttttgaatatatttatttttcaagacctgacagtattttaaatggaaaaactacttatgagtttagaaaaaaatttggagaacaattggctatagaagataatattaaagctgatcttgtagtgccagtcccagactcaggaaacgctgctgcgttaggttatagtcagaaaaccaaaattaattttgatttgggtttaataagaaaccattatgttggtagaacttttattgaaccagcacaaaaaataaggagtttgggtgtaaaattaaaattaaatgctaataaaagttcaataaaaaataaaaaaataattttaattgatgactcgctcgttagaggaacaacgtctcataaaatagtcaagatgctttacgatgcgggagctaaagaaatccatgtgagaattgcaagtccagaaataaaatttccagatttttatggagttgatatgccaacaaaagaagagcttttagcggcaaacaaatctatagatgaaattcgtgaatatattggggcaaatactttaaagtttttatcaataaatggtttatataaagcgatgggttatgaaaaaagaaataatacctatcctcaattaactgatcactattttacaggtgattatccagttgaaattatagatgaattgggagaaaataaaataactcaactatcattgttaagcactggatcgaatagttaat

SEQ ID NO: 238590 - DNA, 298 bp, Unknown
  Bacterial polypeptide expressing nucleotide sequence isolated from the Sargasso Sea
ttgaaaaaatttaattctgataaattaagagaagagtgtggtatttttggaatatcaaatcacagcgacgcatctgcactgactgcacttggactacatgctcttcagcaccgcggtcaagagggatgtggaattgtctcatttgatggcaaaaattatcactctgaaaaaagacaaggcttagtcggagaccattttacagacccaaatacaataaaaaaattaccaggtaattttgcgattggtcataatcgatattcaactactggggaaacttctctaagaaacattcagccat

SEQ ID NO: 238591 - DNA, 873 bp, Unknown
  Bacterial polypeptide expressing nucleotide sequence isolated from the Sargasso Sea
tatgagatacatcaaaggagctttttctctccttatgatgactaaagatgagcttataggcgtaagagatcctttgggtattagacctttatgcttaggaaagaaaaatgattcttgggttttatcttccgaatcttcagctttgtcacatataggagcagagtttgtaagagaaattgataatggtgaaactatagttataaataaaaatggaattgaatcttccaaatatagctcaagttcaaaagaccacaaaatgtgtatttttgaacaaatttatttttcaagacctgattcagtaattgatggacaactaacatatgaatctagaatgaagatgggtatgagtttagctaaagagcatgctgtggacgctgatatagtagttggtgttccggattcagctatacctgcagcaataggatattcaaatgaaagtaaaattccttatacagagggattaattagaaatagatatgttggtagaacttttatttcaccaaatcaaaaattaagagaccttggagttaaaactaagtttaatgttcttaatgaaattgtaagagataaaaaaattatattgattgatgattctattgttagaggaactactacttccagggtaatagagatgattaaagaagctggtgctaaagaagttcatatgagagtttcatcacctcctataacttctccttgtttctttggtgttgatatggctactacttcggagttgatagctaatcaatataatattgaagagatcaggaagattattggagcggactctttaggatttttaagtatagatgctttacaaaaatcagttaattctaaaaaaaacaattattgtagggcttgttttactgggga

SEQ ID NO: 238592 - DNA, 613 bp, Unknown
  Bacterial polypeptide expressing nucleotide sequence isolated from the Sargasso Sea
gaggatacttttgatgctgatttagttgtgccggtgccagactctggaaatgctgcagcactaggttatgctcaagaaaaaaaagtaaaatttgatttaggtcttattaggaaccactatgtcggacgaacttttattgagccctctcagcaaattagaagccttggagtaaaattgaaattaaatgctaacttatcagtaattaaaaataaaaaaataatattaatcgatgactcgctggttagaggtacaacctcttataaaatagttaagatgttatatgatgctggagctaaagaagtgcatgttagaattgctagtcctgaaatcaaatatcctgatttttatggtgtagatacccctacaaagaaagaacttttggctgctaacaaaactgtagatgaaataaaagaatttataagtgcacaaagtttgaaatttttgagtttagatgggctgtataaagccatgggatttgaaaagagaaatgataactatcctcaattaacagatcattattttactggtgattatccagtaaaaataattgatgaattaggtggggataaagttactcaattatcactcttaagtactggttcaaataactgat

SEQ ID NO: 238593 - DNA, 589 bp, Unknown
  Bacterial polypeptide expressing nucleotide sequence isolated from the Sargasso Sea
tgctgatttagtaattcctgttccagattctggtgtacctgctgcccttggttactcagaagcttctaaaatcccttttaaccttggaattattagaaaccactatgtaggaagaacttttattgaacccactcaaaccattagacaattaggaataaaattaaaacataatgctaataactcaataattaaaaataaaaaaattgttttaatcgacgactcaattgtgagaggcaccactgctataaaaattgttgaaatgatgaggaatgctggagcttcagaagtacatatgagaatttcaagtcctcccataaaatttcctgattattatggcatagatactccaagtaagagtgaattaatagcctcaaaaaattctaatgcggaaattaaaaaaatgttgaaacttgacagtctgcactttctttctttagatggactatacaattctatgggacataaaaaaagagatataaataatcctcagtataccgatcattgttttacaggagattatcccaccaagttggcagatagagatgagggggccttaaaaaatcagttatcattattaaaggataattaa

SEQ ID NO: 238594 - DNA, 242 bp, Unknown
  Bacterial polypeptide expressing nucleotide sequence isolated from the Sargasso Sea
attgaagaactttgatcctaaattaaaagaagaatgtggtgtgtttggtattagtaatgcgaaggatgctgctgcattaactgcccttggtcttcatgctctacaacacagaggacaagaaggatgtggaatagtttcatttgatggaaaaaaatattattcagaaaaaagatttgggttagttggtgacaactttaataaagaaaaagttcttaataatctaaaagggtggttttgcaatt

SEQ ID NO: 238595 - DNA, 656 bp, Unknown
  Bacterial polypeptide expressing nucleotide sequence isolated from the Sargasso Sea
agcctacgaatatagaaaaaactttggagcacaacttgctaatgaggacaatataaatgctgatttagttgtgcctgtaccagactctggaaatgcagcggcattaggctacgctgaaaaaaaaggcttaaaatttgacttaggtttaataagaaatcattatgttggtagaacgtttatcgagccatctcaacaaattagaagtctaggtgttaaattaaaattaaatccaaatatttcagtgataaaagacaaacgaattattttagttgatgactcacttgttagagggactacgtcatcaaaaattgtgaagatgctgtacgattctggagcaaaagcagtgcacgtaagaatagctagcccagaaataaaatttcccgacttttatggtgttgatacaccaacaaaaaaagagcttttagctgctaataaatctacaaatgaaatatgtgaattcataaaggcaaaatcgttaaaattcttaagtttaaatggtttatatttaggaatgggctttgataaaagaaatgataattatccacaattaactgaccaccactttactggtgaatatccagtgaaaataatcgatgagcttggtgaggataaagtaactcaactttcattactaagtacggcttcaaataattaaa

SEQ ID NO: 238596 - DNA, 721 bp, Unknown
  Bacterial polypeptide expressing nucleotide sequence isolated from the Sargasso Sea
ccaccgccccttcggcaatccctcgccgcgcccgtgcatcttcgagcacgtctatttctcgcgccccgactcggtcatggacggcctctcggtctaccaggtccgcaagcagatcggcgtcgaactggccaaggaatcattcgccgacgccgacgtggtgatcccggtgcccgacagcggcgtccctgccgcgatcggctatgcgcaggaatcgggcatcccgttcgagctgggcatcatccgctcgcactacgtgggccgcaccttcatccagcccggtgacgccgcccgccatgccgacgtgaagcgcaaacacaacgccaaccgcgccgtcgtcgaaggcaagcgcatcatcctcatcgacgattcgatcgtgcgcggcacgacctcgaagaagatcgtcgagatgatgcgcgatgccggcgctgccgaagtgcacatgcgcatcgccagcccgccgaccgagcactcgtgcttctacggcgtcgatacgcccgagcgctctaaactgctcgccgcgacgatggacaccgaggcgatggccgatttcatcaaggccgacagcctggccttcgtctcgatcgacggcctctaccgcgccgtcggcgaatcggagcgcaagaagagctgcccgcagttctgcgacgcctgcttctcgggcgaatacccgaccaagctgaccgacttctcggaccgcttcccggaactcgatgcagcgtga

SEQ ID NO: 238597 - DNA, 931 bp, Unknown
  Bacterial polypeptide expressing nucleotide sequence isolated from the Sargasso Sea
tactcgcttgtaatgttggctcaaaatacattaataggagtaagagatccacatgaaataagacagctggtaataggtaaattaaaaaattcatttgtgctagcttctgaaacatgttcattagatatcataggtgcaaaatttgtaagagaagttgagaatggtgaagtagtttatattgagaataatgaattaaaaagtgtaaaaccatttcccgaaagaaaagccagaccatgtgtctttgaatatatttatttctcaagaccagatagtttacttaatggaaaaacagcatatgaatatagaaaaaatttaggtacagaacttgccaaggaaacacacgagaaagctgatgttgtggtacctgtaccagattctggaaatgcagcagcaattggttatagtaaacatgtggggatagattttgatttaggtcttataagaaatcattatgtgggtagaacttttattgaacctagccagcaaatcagaagtttaggcgttaaattaaaacttaatgctaatcaatcatctataaaaggtaaaaaaattattctaattgatgactctcttgtgagaggaacaacatgctataaaattgttagaatgctatatgacgcaggagccaaggaagtacatgtaagaattgcttctcctgagataaaatacccagatttttatggtgttgatactcctacaaaaaaagaactattagctgctaataaaacaatcgatcaaatatgtgagtatataagtgcaaaatcacttaaatttttgtcagttaatggaatgtataaggctatcggttttgataaaagaaatgatgcctatccgcaattaactgatcattattttacaggagattatccaataaaacctattgataaacttggagataagaaaattactcaattatcattattaagtgtaa

SEQ ID NO: 238598 - DNA, 859 bp, Unknown
  Bacterial polypeptide expressing nucleotide sequence isolated from the Sargasso Sea
atgtttgatagtccaaaagaagaatgcggagttgttggcattacaacagcaacagatgcatcaagattagcattttttgctctttatgctttgcaacacagagggcaagaaagcgcaggattagcaacatacaacggtaaaataaatataaaaaccggaatgggtttgatttctcaagcacttaatgagccagacatagaattgcttgaaggatcttattcaattggccatacaagatactctacatcaggatcaactaaaattgaaaatgcacaaccaataaaatgcttagtagaaacagatgaaattgcactttcacataacggtaatgtgattaatgcaaaaagtatcagagaagaactacgtgaatgggggtgcgagttcaaatcatctagtgattctgaggttatccttcaattacttgcaaatgctcctggtaaagattgggcagaaaaaattaattatatgatgaatagattgcaaggagcatattccttaactgttcttacaaaagatggaataattggaatcagagatccgctaggtgtaagaccattatgtttaggtaaaattgaagacggatatatattagcttctgaatcatgcgcaatagatcatattggaggtgaatttataagagaaatagatcctggtgaggctatatttataacaaaagataaaatcaaaactatattcaaaaaagaaactcctaaattagcaaactgtgtttttgaaaatatatattttgctagacctgatagcattctagatgaacaattagtttacataactagaaaacaaatgggtgcacaattagcaattgaacatcctgttgaagctgatatagtaataggagtcc

SEQ ID NO: 238599 - DNA, 916 bp, Unknown
  Bacterial polypeptide expressing nucleotide sequence isolated from the Sargasso Sea
tgctcaacccatgtatgttaactctccatttggtataagtatctctcataatggtaacttgactaatcatgaagagttaaaggaagtattagtccataaagatctgagacatttaaatacagattctgatagtgaagtcttgctcaatgtctttgctcatgaacttcaaaagcaaggttctgttaagcctggtgctaaggaaattttcgcggcagttagagctttgcacaaaagagtttgtggagcttattctgttgtaataatgataaatggggttggcatagtagggtttagggacccttttggtattaggccgcttatcgttgggtctaaagacagcgatttgattggtaaggattatatgattgcttcagagagcacggttcttgactctttaggttttgagacgcttgatgatgtgaaagccggttcagcagttttcatcagtcctgaaggtattattgaaacagagtcatgcatcaataatcctgttccaacgccatgtatatttgaatatgtgtatcttgccagaccagatgcaaagatagataaaatatctgttcataagtctcgcctcagaatgggagaatttttagctaagaagataatagaagaaaagccaaaccacgatatcgatgttgttattccaatacctgacagcagcacaacttcagcacttcaacttgcaactactttaggtgttaagtacagggaaggttttgtaaagaatcgatatataggaagaacttttataatgccatttcaagaaaagagagaaaaatcagttcgacaaaagttaaatcctattgatttagagttcaaagacaaggttgttttgttagtagatgattcaatcgtaagaggtacgactagcaggcagattatagaaatggcaagagcgtctggagccaagaag

SEQ ID NO: 238600 - DNA, 733 bp, Unknown
  Bacterial polypeptide expressing nucleotide sequence isolated from the Sargasso Sea
ccattaaaaaaaattaggccgtgtgtttttgaatatatctatttttcaagaccagatagtcttctaaatggaaaatgtgcatatgagtatagaaaaaattttggtgtagagcttgcaaaagaaacgagtattgatgctgatttagtagttcctgttccagactcagggaatgctgcagctataggttatagccaacatgaaaaaattaattttgacctcggtttaataagaaatcattatgttggaaggacttttattgaaccagctcaaaagataagaagccttggggtcagattaaaattaaatgcaaataaatcaacaatcaaaaacaaaaaaattgtcttggttgatgactctttagttaggggtacgacctcacataaaatagtaaaaatgttatatgacttcggtgcaaaagaagttcatgttagaattgcgtcacccgaaattagatttccagacttttacggtgttgatacacccacaaaaaaagagcttttagcagctaataaaactaatgaagagatttgcaaatatatagatgcaaaatctcttgaattcttaagtgttgacggtttgtatagagcaatgggttatgaaaaaagaaattcaacgtacccacaattaactgatcattattttacaggtgattaccctgtaaaattaattgatgacctaggtgataataaagtgacacagttgtctttattgagtacaaagtctaataattgag

SEQ ID NO: 238601 - DNA, 641 bp, Unknown
  Bacterial polypeptide expressing nucleotide sequence isolated from the Sargasso Sea
tgacgttgttatgcctatcccggattctggtcggacatctgcgatgtcacttgcagaaagtctgggcgtgccctatcgggaaggttttattaagaatcgttatataggtcgtactttcatcatgccggggcaggctgttcggaagaaaagtgtcaggcaaaagctgagtccggtatcattagagtttaaagacaaggtggtctgccttgttgatgactcaatcgtccggggaactacgtgttcgcagatcattgagatggcacgtgatgcaggtgcgcagaaggtgtatttctgttccgcagctccagctgtacgttttccaaatgtttacggaatagatatgccgacctctgaggagcttgtagctttcaatcgtacggacgaggaagtcgctgaagtcattaatgcagactggcttgtgtaccaagatctcgacgacttggtagagtgttcgcaggctgggaatcgagaaatcgaaacctttgaatgttcagtttttgatggtaagtatgtaacaggtgatatcgatgcagcctatatggagagagtggccgctagccggaacgatacttctcgattcggctccgattcaactgctcgcactgatgcgtctcttatcaatgtgcataatgacgtatgaa

SEQ ID NO: 238602 - DNA, 274 bp, Unknown
  Bacterial polypeptide expressing nucleotide sequence isolated from the Sargasso Sea
atgcctcttagggaagcatgtggtgttttaggtattgcaagtaaatctgagatattaaatctgcttcaagtgggattgagagcattacaacatagaggacaggaatctgctggcctaacaatttttgatgaagaacacaaaacccagaaagggatgggacttgtgagtgaagttttggatgattttggtgaagaattcaaaaaaggtactgtaggaattggccatgttcgatattctactgccggtggttcttctatgaaaaatgcgcaaccaa

SEQ ID NO: 238603 - DNA, 933 bp, Unknown
  Bacterial polypeptide expressing nucleotide sequence isolated from the Sargasso Sea
gctagttgaagatggagcaattttttatacaacctccgactctgaaacaattgtacaactcatagcaagatcaaaaaaagaaaaaaatattgataaaattatagaggctatctcacaaatccaaggtggatacgctttggtcatgcttactaaaaacattttaattggtgcaagagatatttatggcatcagacctttggttataggtaaaataaataaatcctttgtcctagcttctgaaacatgtgcgctagatattattggtgctgaatttattagagaagttgaaaatggtgaaattgtttacattgaagataatgaattacatagtctaaaaccatttggaaatcatactccaaggccttgtgtttttgagtatatttatttttcacgaccagatagtattttgagaggaaagactgcttatgagtatagaaaaaatttaggaagagagttagcaaaagaagacaatgtagatgcagaattagttgtacccgttccagactcaggaaatgcagcagcaattggatacagtcaacaaaaaaaaattgattttgatttgggtttaataagaaaccattatgttggtagaacctttattgagccaggtcaacaaattagaagtctaggagtaaaattaaagttaaatgctaacaaaagttcaatcgaaaataagaaaataatcctagtagatgactcgttagttcgaggaacaacatcccataagattgtaaaaatgctctatgatgctggagccaaagaagttcatttaagaatagcctgccctgaaataaaatttccagatttttatggagttgatatgcctactaaaaaagaattattagctgcaaacaagagtgttgaagaaatatgtgattatgtaaaagctaaaagtttaaaatttctgtcattggaagggctttatatagctct

SEQ ID NO: 238604 - DNA, 739 bp, Unknown
  Bacterial polypeptide expressing nucleotide sequence isolated from the Sargasso Sea
taataagaaattaattggagtaagggatccttatggtatacgccctcttgttcttggcgatttaaatggagcacccgtactgacctcagaaacttgtgcactagatattattggggccaaatatgttagagatgttgagcatggtgaaataattattatatctgaagatggcatggaaagtataaagccatttcctaaagttcaagaaagaccatgtatttttgagagaatatatttttcaagacctgatagtattgtggggggcaaaactgtttacacttatagaaaaaatctagggcaagaacttgcaaaagaaactaatattgatgctgatgtcatcataccagttcctgactctggtgtgccagcagcacttggatattcgcaggagtctaaaattccatttgaattaggtattataagaaatcactacgtaggccgcacatttattgagccatcacaatctattaggcaatttggtgttaaattaaaacataatgcaaactcatcttatataaaaaataagaaagttattttgatagacgattctatagtaagaggaacaaccgcaaaaaaaattataaagatggtttatgatgctggcgccaaagaagtacatcttggaattgcttgtcctcctattaaacatccagatttctatggaattgatacaccagattacaatgagctaatagcctcaaaatcctcattagaagaaatcaataatatcattggttag

SEQ ID NO: 238605 - DNA, 850 bp, Unknown
  Bacterial polypeptide expressing nucleotide sequence isolated from the Sargasso Sea
acgactggaaataatactttaagaaatattcagcctttttttgctgatacaaatgctggaggaattggagttgcccataatggaaatttaacaaactcaatttcattaagaaataaactcgttgaagaaggtgctattttttatactacatctgacacagaaactattgttcaactaattgcaaaatctaagagaccaaaaacaatagacaaagttgtcgatgctatttttcaaattcagggaggatatgcattggtgatgcttactcaaaattctttaattggagtaagggatccttacggaataagacctttggtaattggtaaattaggaaatagttatgtactagcctcagaaacttgtgcgttagatataattggcgccaaatttttaagagaagtagaaaatggagaaattgtgttaatagaaaataataaattgatcagtattaaaccctttccaccaaaaaaagtgcgcccttgtgtttttgaatatatttacttttcaagaccagatagtctactagataacaaaactgcttatgaacatagaaaaaatttgggaaaagaactagcaaaagagaataatattaatgctgatattgtagtaccggtacctgactctggaaatgcagctgcgcttggtttttctcaggaacttaagataaattttgaacatggtttaataagaaatcattatgttggtcggacctttatcgaaccaagccaaaaaataagaagtttaggagtaaagttaaagttgaatgcaaatgaaacaacaataaaaaataaaaagattattcttattgatgactctcttgtcagagggactacatcacataaaattgtta

SEQ ID NO: 238606 - DNA, 523 bp, Unknown
  Bacterial polypeptide expressing nucleotide sequence isolated from the Sargasso Sea
ttcgatttaggtttaataagaaatcattatgttggaagaacttttattgagccatcgcaaaaaattagaagcttaggagttaagcttaaactaaatgctaatttatctgtaattaaaaataaaaaaattatattagtggatgactccttggtaagaggcacaacttcatcaaaaatagtaaagatgctgtatgatgcaggggcaaaagaaattcatgtaagaattgcaagtcctgaaataaaatttcctgatttttatggggtcgacaccccaacaaaaaaagaattattagcagcgaataattctgtagataagatttgtgaattaataggtgcaaaatccttaaagtttttgagtattgacggtctatataaagctatgggatttgacaaaagaaataatatatatcctcaattaacagaccatcattttactggtgactatcctgttaaagtaattgatgaactcggtgaggataaagttactcaattatcattattaagtactgcatcaaataactaat

SEQ ID NO: 238607 - DNA, 664 bp, Unknown
  Bacterial polypeptide expressing nucleotide sequence isolated from the Sargasso Sea
gctttagtaataatgacaaacaaaaaattaatcggggtaagagaccctctaggtataaggcctttaatactaggaaaaataaagaattcatatgtaatcgcttcagagtcttgtgctttagacattgtgggtgcaaaatttgttagagaaatagaaaatggagaaatagtagtaatagaaaatgataagttgagcagtcttaaaccttttcctaaaaaaaaagctagaccatgtgtttttgaatatatttatttttctagacctgacagtatcctcaatggaaaatgtgcttacgaatatagaaaaaaattaggttttgagctcgctaaagaatctgatgatgtaggagatattgtggttccagtacctgactcaggagttccggctgcgataggatatgctcaattaaaaaaaacaaagtttgaacttggattaattcgaaatcattatgttggaagaacgtttattgaacccgcacaaagtatcagaagtttaggtgtgaagttaaaattaagtgcaaatatgtcatcaataaaaaataagtctattattctaattgatgactctttagtaaggggaactacttgttataaaattgtaaaaatgctttacgactcgggtgcaaaggaagtacatgtaagaattgcttctccagaaaaaaagt

SEQ ID NO: 238608 - DNA, 172 bp, Unknown
  Bacterial polypeptide expressing nucleotide sequence isolated from the Sargasso Sea
aatgaaagcattgaaaacgaatagaaaatcaccttttattaaagatgataaattacatgaagaatgtggagtttttggtgtatacaaccatgaagattcagctgcactaactgccttagggcttcatgctttacagcatcgcggtcaagaagctgcaggaatagtaactttt

SEQ ID NO: 238609 - DNA, 940 bp, Unknown
  Bacterial polypeptide expressing nucleotide sequence isolated from the Sargasso Sea
tcttatgcattgggcacaatagatacagtacaacagggtggtaaaatattaagaaatgttcaacctttttttgcagatactaatgccggtggcattggtgtctctcataacggtaattttactaacgcaattaccctgagaaaaaagctagttgaagaaggtgcaattttttatacaacctctgactctgaaacaattgtacaactcatagcaagatcaaaaaaagaaaaaaatattgataaaattatagaggctatctcacaaatccaaggtggatatgctttggtgatgcttactaaaaatattttaattggcgcaagagatatttatggcatcagacctttggttataggtaaaataaatgaatcctttgtcctagcatctgaaacatgtgctctagatattattggtgccgaatttgtaagagaagttgagaatggtgaaattgtttacattgaagataatgaattaaatagtctaaaaccatttggaaatcatactcctagaccttgtgtgtttgagtatatttatttctcacgaccagacagtattttgagagggaagactgcttatgagtatagaaaaaatttaggaagagagttagcaaaacaagaccatgtagatgcagaattagttgtacctgtaccagactcaggaaatgcagcagcaattggatacagtcaacaaaaaaaaattaattttgatttgggtttaataagaaaccattatgttggtagaacctttattgagccaggtcaacaaattagaagtttaggagtaaaattaaagttgaatgctaataaaagttcaattgaaaataagaaaataatcttagtagatgactcgttagttcgtggaacaacttcccataagattgtaaagatgctttatgatgctgggagcaaagaagttcatttaagaatagcctgccctgaaataa

SEQ ID NO: 238610 - DNA, 177 bp, Unknown
  Bacterial polypeptide expressing nucleotide sequence isolated from the Sargasso Sea
catgaagaaactaaagagaaaattaaaaatatataaccctaaattaaaagaggagtgtggtgtttttggaataagcaacacaaaagacgcttccacattgactgcacttggtttgcatgcattacaacatagagggcaagagggttgtggaatagtttcatttgatggtaacaatat

SEQ ID NO: 238611 - DNA, 684 bp, Unknown
  Bacterial polypeptide expressing nucleotide sequence isolated from the Sargasso Sea
ctcccttgtggccttatcgcgagatatgctgattggaatgcgagaccctttcggtgtgagaccattagttttagggcagcttgatggtgcctggcttttagcttctgaatcagtagcattcgacataataggggcaaatttagtaagagagcttgaaccaggagaaatggtagtaattaaagataatggtctagaaagttttcatccattcacaacacaaaaacagcgtttttgtatctttgaatttgtttatttttctcgtcctgacagcgaggtagaagggtcaagtgtatacaatgtaagaaagcgtatcggtcaagagcttgccaaagaagcgcctattgaggcagatattgttgttcctgttccagattcaggtgtaccagcagcaataggatacgctgaagaagcctttattccatttgagcttggtataataagaaatcactacgttggcaggacatttattgagccctcagatcaaattcgacatctaggtgttaagctaaaacacaacgcaaattcaggaacacttaaaggtaaaagggtaattttagttgacgatagtattgttcgcggaactacctcaaccaaaattgtagaaatggtaagaagtgcgggtgccgccgaggttcatatgcgaatagcgagtccccctactacccactcatgcttttatggagt

SEQ ID NO: 238612 - DNA, 460 bp, Unknown
  Bacterial polypeptide expressing nucleotide sequence isolated from the Sargasso Sea
atgtgcggcatcttcggaatttttggtcatcccaaagcctcagaactgacctttctcgggctccacgctttacagcatcgtggccaggaaagcgctggcatcagtgtttccgacggagagaccatccataccagacgcggacagggtttggtcagtgaagtcttttccggtgatgaatacctggaattcaaagggaatcaggccatcggacatgtccgttacacaacagccggagacagtggacttctaaacgcccagcctttggtgttccgttataccggcggtcaggttggggtcgcgcacaacgggaacctggttaacgccaaacggctccgtgatcagttggaacgccagggttcgatttttcagaccaacagcgataccgaagtggtctcccacctgatcgcgcgtgccgggcctccgatcgatcatgcatttcaggatgccctgagagtgatcg

SEQ ID NO: 238613 - DNA, 715 bp, Unknown
  Bacterial polypeptide expressing nucleotide sequence isolated from the Sargasso Sea
tttgctctgtgattctgttaataacatttttaataaggttaaaggtgcttactcagttacatcaattataataggtaaaggtctagttgtttttagagatccaaatggcatacgccccctagttaagggtgaaaggtcaaacggtaatggaggtagagattatatttttgcttcggaaaacactatgttttatgcacttgggtacgaaccaaaaggtaccgttttaccgggtgagctaatttatgttgatgaatctggaaaagtttttagtaaacgattagtaaaaaaagagtttaatccatgtatttttgagtatgtctattttgcacgccctgatgctagattaaatgatgtaagcgtataccgttctcgcttaagaatgggtcaaaacttagctgactcttggaagaaaaaacatcctgataaaattcctgatattgtaattcctgccccaagtacagcaaatacagctgccctatcttttgccaatgctttagatgttcgatattccgagggtttgtataaaaatacttttattggtagaacatttattatgccaggtcaagcgcaacgaaaaaaatctgtgaaatataaattggtaccacaagagcttgaaatacgagataaaaaggtaatgattctagatgatagtattgtacgcggaaatacaagtcgcgagattgtcagaatgttaaaagactttggtgcaaaagaa

SEQ ID NO: 238614 - DNA, 499 bp, Unknown
  Bacterial polypeptide expressing nucleotide sequence isolated from the Sargasso Sea
gatgtgcggcgtagttggaatagtaagtcaaacagaggtttctcctctaatttatgatgcattaaccatactgcaacatagaggacaggatgcagctggtatagccacatcaactaacaatagattctttattcgtaaacaacttggtctagttcgggatgtcatcagaaaccaacacatactgaccctaagagggcagatgggtataggccatgtcaggtatccaaccgcaggtagtgaggatagagagcttgcgcagccaatgtatgttaactctccctttgggatcagtatttctcataatggtaaccttacaaatattgaggaattgagagagactttagtgaacaaagacctaaggcatttaaatactgattctgatagtgaagttttattaaatgtatttgctcatgaattacagaaacaaggttcagtaaaaccaggatcaagagagatatttgctgcagttagatctttgcataaaagagtaagaggcgct

SEQ ID NO: 238615 - DNA, 604 bp, Unknown
  Bacterial polypeptide expressing nucleotide sequence isolated from the Sargasso Sea
caatcagatatggttattccagtgccagatagtggtgtgccagcggccattggctttgctgaacaatcagagattcctttcgagacagggattataaggaatcactatgttggcagaacttttattgaaccgcagcagtcaataagagcgttctcagttaagcttaaacataatgctaataagattttggttgatggaaagaaggttatattggtagatgactccttggttagaggtactacttctataaaaattgtcagaatgatgagagaggctggagctaaagaggtgcacatgcgtatagccgcgccaccaattaaatatccagactattatggaattgatactccagtaaaagaaaatttattggcagctaaccacagtcttaatgaaattaaagattttttagatgtggatagcatagcctatttatcaattgatggcctataccgtgctatgggacacaaagacggcagagatcccaaaaacccaggttataccgatcattgttttaccggtgattaccctactacacttatggaccaaagcggagaagaaaacattcgacaactatcgctgctttttgagattgaaaaagattagg

SEQ ID NO: 238616 - DNA, 339 bp, Unknown
  Bacterial polypeptide expressing nucleotide sequence isolated from the Sargasso Sea
aatggctcgattaaatgaagaatgcggtatttttggaatttctaataacaaagatgcagcatcactcactgcgctaggcttacatgctttacaacacagagggcaagaaggatgtggtatcgttacacttgatggaaaaaaattttactctgaaagaaggcttggtttagttggtgataattttactaaaggaaatattttaaaaaaattaccaggtaattatgcaattggccacaatcggtactcaactactggaaacaatttaataaaaaatatccaacctttttttgctgatcttcatgatggtggaattagtattgcccataatggaaatttgag

SEQ ID NO: 238617 - DNA, 287 bp, Unknown
  Bacterial polypeptide expressing nucleotide sequence isolated from the Sargasso Sea
agttgctttaggcttacatgctttacagcatagaggacaggaaggatgtggaatagtttcttttgatggtaaaaattatcactctgaaaaaagattcggccttgtaggtgataattttaataaagaaaaagttctaaataaattactgggtaactacgcaataggtcataatagatatagcacaactggaggtacaactttaagaaatgttcaacctttttttgcagatacaaacgctggaggaatagttgttgcacacaatggaaatctaaccaatgctgtaacct

SEQ ID NO: 238618 - DNA, 763 bp, Unknown
  Bacterial polypeptide expressing nucleotide sequence isolated from the Sargasso Sea
gatggaacaaagtttatatactgaaagacatccaggattagtaagtgataactttacaaaaacgtctgtaataaatcgattagtaggtaatagcgctgttggacataacagatattcaacaacaggcgctaccattcaaagaaatattcaacctttttttgctgatttatggggtggaggatttgcaatagctcataatggaaatattacaaacgcactatcgcttagagacgagctcataagaaaagggtctatcttccaatcaacctctgacacagaaacaattttacaattggtagctagatctgatgcagatagaacattggatcgcttagttgatgcgttgatgcaaatttcaggagcatgggcattagtagttttaactaacaaaaaattaattggcgctagagacccttttggaataagacccctcgtcttaggagaattagacggagcaaaaatattagcttcagaaacatgtgcacttgatattattggtgcaaaatttatgagagaaattgaacctggtgaaataattgtaattacagaagatggcgaggagagtattaaaccttttccaaacgcaagattgcgtccttgcatatttgaatacatatatttttctagacccgattccatgctagatggaaaatctgtttatgaatgtagaaaatcatttggaaaaaatctagctaaggaatgtccagctaacgccgatattgttgttccagttcctgactcaggcgttccagcagctttagga

SEQ ID NO: 238619 - DNA, 568 bp, Unknown
  Bacterial polypeptide expressing nucleotide sequence isolated from the Sargasso Sea
aggtgtaccagactcagcgattgccgctgctataggatatgctgaagaatcgaatatcccatatggtgaaggcttaatgaagaatcgatatgtaggaagaacttttatacaacccgaacaatctctaagagaaagaaacgtacagcttaaatttaatccattgaaagagatgattgatggaaaaagagtagttgttgttgatgattcaatagtacgtggtacgactactccaagagtcataaatatgttacgaaatgctggggcaaaagaagtgcatatgcgcattacttcgccacctattaaacatccatgtttttatggagttgatatggctagtaaatcagaattaattgcaaattataaatctcttgaagaaattgaaaatcatataggagcagattcgttagggtatctttctatagaaagcacgatgcaagccactaaacaaaatcaagatactctttgtacagcctgttttacaggtaattacccgactagcgttccattgcaattccataaaatgcaaatggagacacagacaactgatagacatggaatgaaattttaa

SEQ ID NO: 238620 - DNA, 917 bp, Unknown
  Bacterial polypeptide expressing nucleotide sequence isolated from the Sargasso Sea
tatgtgcggaatagttggaatcgtttcttcaaatgatgtaaatcaacaaatttacgatagtcttttgcttttgcagcatagaggtcaagactcaacaggcatagcaacaatggaaaatactgtttttcatatacataaggttcaaggtcaggttaatactgcttatagaacaagagatatgaggaatttaattggcaaaattggattgggtcatgttaggtatgcaacaaagggttcagcagaaagtgtagaagaagcacagcctttttatgttaatgctccttatggaattgttttgatacataatggaaatttgactaacaccagagatttagaaaaacagttatttaatgttgacaagcggcatacaaattcttcaagtgatactgaaatgttgttaaatgtatttgcgacagaattacaagaacaaattaataatcaagaattagaacctgatattatttttaatgcggttaaatctttacataaaagaattcaggggtcatatgcttcaattgcgttaatttcaggacatggtttattagcatttagagatccttttggtattaggcctttagtcatagggaaaagatattcattaaccacaaaaaaagaagaatggatggttgcaagcgaatctttagtacttgaaaataatgattatgaagtagtgagagatgtagatccaggagaagctgtttttataaatctcgatggggagtttttctctaagcaatgttctgaaaatccaatgttatttccctgtgcttttgaatatgtttacttagctaggccagattcaattatgaatggaatttcagtctataaagctcgtttaaagatgggagattacctagcagaaacaataaaagaaacaatcaattctgggagatatgatgtagttatgcctattcttg

SEQ ID NO: 238621 - DNA, 136 bp, Unknown
  Bacterial polypeptide expressing nucleotide sequence isolated from the Sargasso Sea
ttgaaaaaatttaaactagataaattaagagaagagtgtggtgtatttggtgtttctaaccacgaggactcttctgctttggttgcgttagggctgcatgctttacaacatcgtggtcaagagggatgggaatagt

SEQ ID NO: 238622 - DNA, 770 bp, Unknown
  Bacterial polypeptide expressing nucleotide sequence isolated from the Sargasso Sea
aatggttaaagaaaactgtggtgtagttgggatttacagtgaaggcgatgtcaatgttatcccgatggtaatcgatgcattacgtgcattacaacaccgtggtcaagaagcttggggattggctatcccaaataaggctccattaaaacgattaggacttgtttctgcatcttctggtgaattcaaaaaaatatctgaagaatatgcttctcactctgcaattggacatgttaggtattccactgttggaaaaagtgatcttgaaagtgcacaaccacttaaagtaaaagatctttgtgttgcacataatggaacaatttctaatgtcgaagaactttcaaatctcgttggtggatgtacctttactccacaaaatgctagtgacacacttgtagccgcacaaagattggtatcgctaattactgaaaatggaaaacttggaaatgcattatctattttaaaaaatgaaatggttggttcattttgtttcacatttctttctgatgatgacgctgtatttgcagcaagagatcctaaaggattccgtcctatggttttaggtcataaggaagagggcaatgtacacattgttacttctgaatcatctgcaatttctgcaattggtgcaaaactagtacgtgatgtcgttccaggcgaattaattaaaattagtaaagatggtggttttgaaactgaaatgttttctgatgatacaaatcgtgcacactgttcattcgaatttacatattttgctcaaccttctagtaaga

SEQ ID NO: 238623 - DNA, 238 bp, Unknown
  Bacterial polypeptide expressing nucleotide sequence isolated from the Sargasso Sea
tatgtgtggcatttatggttgtgcttctccaaatgataaatcctttttagacattattgagggtcttattcgtcttcaacatagaggccaagatagttttggtattgcaaatcaacataaatattacaagaaaatgggattagtaaaacaaataaatcacgatgaagtaaagaatataaatggtaactatttaattggtcatgttagatatcgaacttcgggatatcaatcaatagat

SEQ ID NO: 238624 - DNA, 556 bp, Unknown
  Bacterial polypeptide expressing nucleotide sequence isolated from the Sargasso Sea
ttgaaaaaatataatgaagacaaattaagggaagcttgcggtatatttggaatatcaaaacacaaagatgcttctgctgtagtagctttaggattgcatgctctccaacacaggggtcaagaaggttgcggtatagtatcatttgatggaaaaaattttcactcagaaaaaagacaaggtttggttggtgaccacttcacaaaaagtgaagtaattaaaaaaatacctggagaagcggctattggtcataatcgatattctacgacaggagaaacatctttaagaaatattcaacctttttttgctgatttacacggcggtggtataagtattgctcataatggaaatttaactaatgctctaacattaagagataatctagtcaaaaatggtgcgatattcaggacaactagtgatactgaaacaatagtgcaacttatagcaaaatcaaaaagagagaaaattattgataagttgatagatgcattatttcagatccagggaggttactcattagttttaatgacaaataaaaagcttataggagttagagacc

SEQ ID NO: 238625 - DNA, 615 bp, Unknown
  Bacterial polypeptide expressing nucleotide sequence isolated from the Sargasso Sea
aagaaactaatgtagatgcagatttggtagttcctgtaccagactctggaaatgcagcagcaattggatatagtcaatacgtagaaaaagaatttgaacttggtttaattagaaatcattatgttggaagaacctttattgagccttctcaaaaaataaggagtttaggtgttaaacttaaattaaatgcaaacaaatcatcaataaaaaataaaagaatcattttagttgatgattcacttgttagaggaacaacttcacataagatagtacaaatgctatatgatgctggagcaaaagaagtacatgttagaattgcttctcctgaaattaaatttccagatttttatggtgtggatactccaacaaaaaaagaacttttggcttcaaataaaaccaatgatgaaatttgtaaatatattaacgccaagtccttaaaatttttatcaatagatggcatgtataaagctatgggttttgataaaagaaataatatttacccacaattaactgatcattattttacaggagattaccctgttaaaccaattgacaatttaggtgatgacaaaattactcaattatctttattaagtactgcatcaaatagctaag

SEQ ID NO: 238626 - DNA, 988 bp, Unknown
  Bacterial polypeptide expressing nucleotide sequence isolated from the Sargasso Sea
acaaatgggctgacgttacgacatgagttaaaaaaagaaggagcgatcttccaatccacgtcagatacagaaactattcttcaactagtagcacggtcgaaaaaaggtaatacaatttcaagatttatcgatgcactttctcggatcgagggtgcctacgctttggtcgcattaactaacaaaaaattaattggagtaagagatccactagggataaggccattggttcttggtcaattagacggaaactatatactgacttcagaaacgtgcgctttagatattatcggtgcaaagtttattagagaggtagaaaatggtgagatagtggtaataactgacaatactatcgagagtatcaaaccctttccacaagtcaaaccaaggccatgcattttcgagtatatctatttctcaagacctgacagtatcgtaggaggattaagtgtataccaatgtcgaaaagcctttggtaaggaactggccaaagagtcttttgtacaggctgatatggttattcccgttccagacagtggggtgcctgctgcaataggctatgcagaacagtccgagatcccttttgaaaccggtattattagaaaccactatgttggtcgaacatttatcgaaccccagcagtctataagagcattctctgtcaagctaaagcataacgctaataagattttagttgatgggaaaaaggtaatattagttgatgactcactggttagaggtactacatctataaaaattgttagaatgatgcgggatgcaggagcccgcgaggtacatatgcgcatagctgcaccgcctataaagtatccagattattacgggattgatacgcctgtaaaagaaaatttactagcagcaaataacgagctcaatgaaataaaggatatgttagacgttgatagtatagcgtacttatcgattgatgggctataccgtgcaatgggtcataaagaaggaagagacccaaaag

SEQ ID NO: 238627 - DNA, 496 bp, Unknown
  Bacterial polypeptide expressing nucleotide sequence isolated from the Sargasso Sea
aacatttattatgccctatcaagaagaaagaaaaaaatctgtaagaagaaaattaaatattttagatttggaatttcaaggaaaaaatgttttgcttgtagatgattcaattgttagaggtacaacaagtaaaaaaataattgaaatggcaagagcatcaggagcaaaaaaggtttactttgcttctgcagccccaccaattaagtatcaaaatttatatggtatcgatatgccatcaacatcagaattaatagcatcaaataaaactaatgatgaagttgcaaaagagattgatgcagactggttaatttatcaaactcttgatgatttaattgatactgttcaagtaggaaatccagaaataaatgaatttgagacttctatatttactggtaaatatataacgcctttaattgaaaattacctcgaagatttagagaattcaagaaaagatgaattaaagatgcaaagagaaaaatctaaggccaacggctaa

SEQ ID NO: 238628 - DNA, 837 bp, Unknown
  Bacterial polypeptide expressing nucleotide sequence isolated from the Sargasso Sea
aaacatgtgctttagatattattggtgcaaaatttttaagagaagttgaaaatggtgaaatagttgtaatagagaataatgaactccaaagtattaaacccttcccttctaaaaaatcaagaccgtgtgtatttgaatatatttatttttcaagacctgacagtattttaaatggaaaaacaacatacgaatttaggaaaaaatttggtgaacatttggcattagaagacaatgtgaatgctgatctagttgtaccagtgccagactcgggaaatgctgcagctttaggttatagtcaaaaaagaaaaataaattttgatttaggtttaataagaaaccattatgtaggtcgaactttcatagaacctgcacaaaaaattagaagtttaggtgtaaaacttaaattaaatgcaaacaaaagctcaatagaaaataaaaaaataattttaattgatgattcattggttagaggaaccacatcctacaaaattgttaaaatgttatatgacgcaggcgcaaaagaaatacacgttcgaatagctagtcccgaaatcaaatatccagacttttatggtgttgatatgcccacaaaagatgagcttcttgcggcaaataagtctgtcaatgaaatttgcaattatattggagctaaatctttaaaatttttatctattaatggattatataaagctatgggatatgaaaaaagaaataatacttatcctcaactaactgatcattatttcactggtgattatcctgttgaaattattgatgaactaggagagaataaaatcactcaattatcattattgagcacaggatcaaataattagt

SEQ ID NO: 238629 - DNA, 838 bp, Unknown
  Bacterial polypeptide expressing nucleotide sequence isolated from the Sargasso Sea
gctgtatgccagttctgaagatcagttaaattcaagaaaatccatgggttatgttcgtgatgtttttcaacaaaggcacatggaaaagcttgtaggtaactatggtattggtcatgttagatatcctactgcaggtggtgctggtaaagagtttgctcaaccaatgtatgttaactctccgtacggtatcagtttagctcacaatggaaatctaactaattcaaaacaactggctactcagctttttcatgctgagatgagacatcttcaaactgatagcgattctgaagttcttctaaatatatttgcacatgagttaggaaaacaaagagagatttatccatccgcagaacatattttcaaagctgttgctaaaacacatataagatgtgatggagcttatgcagttctagctctaatatctggctatgggatgttagcctttcgtgataataatggaataagaccactttcaattggggttagaaaaggcaaaataagaaatgattatataatttcttctgaagatgcattatttactccgcttggttatgaaaagcttagagatgtagatcctggagaagcagtatttattgataaacatggcgagttattttcacagcaatgttcagataatcctcaaaaaagaccatgtatttttgagtatgtttatttttcaagaccagattctaaaatagatgaaatatctgtatataaagcaagaatgagaatgggtacaaaacttgctggccaaattaaaaagactaggcctgaccatgatattgacgttgtaattccaatacctgatagttctgtaactgctgctcatcaattagct

SEQ ID NO: 238630 - DNA, 127 bp, Unknown
  Bacterial polypeptide expressing nucleotide sequence isolated from the Sargasso Sea
gatgtctaaattaaaagaagaatgtggagtttttggaatatttaataataaagatgctgcagctcttacggctttaggattacattctttgcaacatagaggtcaggaaggttgtggaatagttaca

SEQ ID NO: 238631 - DNA, 762 bp, Unknown
  Bacterial polypeptide expressing nucleotide sequence isolated from the Sargasso Sea
ctattcacttgttattcttacaaacaagaaacttattggtgtaagagatccttatggaataagacctttagttctcggtgacctcaatggggctcccgttctagcttcagagtcatgtgctcttgatattattggtgcaaaatttgtcagagaaattgaaaatggagaaataataataatttcagaaaaagggatggaaagcatcagacctttcccaaaagttgctgaaagaccttgtatctttgagaggatctatttttctcgtcctgacagtatgctgggaggaaacacagtttatacttatagaaaaaatcttggaatagaattagcaaaagaacattatgttgatgcagatacagttgtacctgttcctgattcaggagttccagctgctcttggctatgcacagcagtccaacacgccatttgaactaggtataattagaaatcactatgttggaagaacttttatcgagccatctcaaagtattagacaatttggcgttaagcttaaacataacgctaatgtatcttacattaaaaataaaaaaattattttaatcgatgactctattgtaagaggaacaacagctaaaaaaataattaaaatgatttatgatgcaggtgcgaaagaagtacatttaggtatagcatgccctcctattaagcatcctgatttttatggtatagatactccagactataatgaacttattgcatcaaaaaatagtattgaagagattagtaagactattggatctaa

SEQ ID NO: 238632 - DNA, 277 bp, Unknown
  Bacterial polypeptide expressing nucleotide sequence isolated from the Sargasso Sea
atgtgcggaataatagggatttctgcagaaaataatgtagctgaggagatttacgagtctctacttatgttgcaacacagaggtcaagatgctgctggtatggttgtctgcgaacccagcggtaaactcaatagccggaagtcaaaaggctatgtcagagatgtatttcagcagaatcacatgagcaatcttcaaggaaatcttggaatagggcacgtaagatatccaactgctggaggaataggcaaggagtttgctcagccgaatgtatgttaat

SEQ ID NO: 238633 - DNA, 124 bp, Unknown
  Bacterial polypeptide expressing nucleotide sequence isolated from the Sargasso Sea
ttgaggaactttgatcctaaattaaaagaagaatgcggggtatttggcattgggaatgctaaagacgcttcagctttaacagctcttggacttcatgctcttcaacatagagggcaagaaggat

SEQ ID NO: 238634 - DNA, 376 bp, Unknown
  Bacterial polypeptide expressing nucleotide sequence isolated from the Sargasso Sea
atgtataatcctaaattaaaagaggaatgtgctgtctttggtataagcaatacaccagaagcatcaactttaactgctttaggacttcatgcgttacaacatagagggcaagagggttgtggaattgtatcatttgatggagaaaaatatcactctgaaaaaagatttggtttagttggtgacaattttaatgacgaaaaagtcttaaaaaatttaccaggaaattatgcgataggtcataacagatattctacaactggcggaaccgctttaagaaacgtacaaccattctttgctgatactaattcaggaggaattggagttgcgcataatggaaatctaacgaatgcgataacacttagaaataaaatggtta

SEQ ID NO: 238635 - DNA, 202 bp, Unknown
  Bacterial polypeptide expressing nucleotide sequence isolated from the Sargasso Sea
atgatcaaattgaatacttctgaagacaaacttcatgaagagtgtggtgtatttggaatttttggaagtcccgatgcatcaacattaactacacttggacttcatgcccttcaacacagaggacaagaaggagcaggcattgtgacatttgatggaagcggctttcatggtgttagaagaactggactggtaggggataatt

SEQ ID NO: 238636 - DNA, 737 bp, Unknown
  Bacterial polypeptide expressing nucleotide sequence isolated from the Sargasso Sea
tacgccatgcgttttcgagcatgtgtactttgccaggcccgactcagtaatcgatggaatttcagtgcatcaggcaagattgaggatgggggaggctctggctagtaggatcgagtcattagttccagaccatcggatagatgctgttattcctgtgccggacagtggaaggattgccgctctgggattatcaagcgcacttggagtgccttacagggaggggtttgtcaagaatcgatacataggtaggacgttcatcatgccggggcagaaaattcgtaaggactccgtcaggaagaaactgaatacgatatccgaggaattcagtggcaagactgtgttgatcgttgatgatagcatagtcaggggaaatacttccaggaggatagtccagatggctagggaagcgggggcatctagagtcttgtttgcttcctcttccccaccgattgtacatcctaatgtgtatgggatagatatgcccgctagggaggagtatgtggcttatggtaggaccaacgatgaaatctgcgaggctatcggagccgattggctgatctaccaagatctgggtgacttggtcgatgcctgcactggagcaagcggcagccaaatcgcagagttcgattgctcatgcttcaacgggatttacgtcacaggggggattactgaggagtacctgagtaggattagtagaacccgctccgactcaggcaaagagcaggcttcagtctgac

SEQ ID NO: 238637 - DNA, 913 bp, Unknown
  Bacterial polypeptide expressing nucleotide sequence isolated from the Sargasso Sea
aaacaatttgacaaagtaattgatgcaatttttcaaattcaaggtggctatgcattagtgatgttaacacaaaactctctaattggagttagggatccttatggaattagaccactagtaattggtaagcttggcaatagttatgtcttagcctctgaaacttgtgcatttgacattattggtgcaaaatttgtaagagaagttgaaaatggtgagatagttttaatagaaaataatgagctgaaaagtattaagcccttccccgctaaaaaagttagaccttgtgtatttgaatatatttatttttcaagaccagacagtttaataggtggaaaaacagcttatgagcatagaaaaaatattggtagagagctagcaaaagaaaacgatgctgatgccgatatagtggttccagtcccagactctggaaatgctgctgctatgggttttgctcaagaattaaaaatgaactttgaacatggattaattagaaatcattatgttggaagaaccttcattgaaccaagccagaaaattagaagcttaggtgttaaattaaaattaaatgctaatcaaacaacaataaaaaataaaaaaattattctaattgatgactctcttgttcgaggaacaacatcttataaaattgttaaaatgctttacgaggctggtgcaaaagaagttcatgttaaaattgcgtgccctgaaataagatacccagatttctacggtgtagatacacctacaaaaaaagaattgttagcagcaaataaaacaaatgatgaaatttgtgaatatattggagctaaaactttgagatttttatcaattgaaggattgtataaagctattggttttgaaaaaagaaacgaaacatatccacaattaacagatcattattttcacgggtgaa

SEQ ID NO: 238638 - DNA, 724 bp, Unknown
  Bacterial polypeptide expressing nucleotide sequence isolated from the Sargasso Sea
aaatcaaagagaacaaaaacaattgataaagtaattgatgcaatttttcaaattcaaggtggctatgcattggtaatgttaactcaaaactctttaattggagttagagatccttatggaattagaccattagtaattggtaagcttggcaatagttatgtcttagcatctgaaacttgtgcctttgatataattggtgcaaagtttgtaagagaagttgaaaatggcgagatagttttaattgaaaacaatgaactgaaaagtattaagcccttccctgctaaaaaagttaggccttgtgtttttgagtatatttatttttcaagaccagacagtctaataggaggaaagaccgcatatgaacatagaaaaaacattggtagagaacttgcaaaagaaaatgatactgatgccgatatagtggttccagtcccagactctggaaatgctgctgctatgggttttgctcaagaattaaaaatgaactttgaacatggattaattagaaatcattatgttggaagaactttcatagagccaagccaaaaaattaggagcttaggtgtcaaattaaaattaaatgctaatcaaacaacaattaaaaataaaaagataattctaattgatgactcacttgttcggggaacaacgtcatacaaaattgttaaaatgctttatgatgctggtgcgaaagaagttcatgttaaaattgcatgcccctgaa

SEQ ID NO: 238639 - DNA, 275 bp, Unknown
  Bacterial polypeptide expressing nucleotide sequence isolated from the Sargasso Sea
attgaaaaaatttaattcagataaacttaaagaggagtgcgggatatttggaatatctaatcacgaagatgcatctactttagttgctttaggtctccatgccttacaacacagaggtcaggaaggttgtggaatagtctcatttgatggaattaattaccactctgaaaaaagacaaggtctagttggagatcactttactaattctgatactttaaaaaaactcccaggatcttttgctataggtcacaataggtactcaaccacaggtgaaa

SEQ ID NO: 238640 - DNA, 211 bp, Unknown
  Bacterial polypeptide expressing nucleotide sequence isolated from the Sargasso Sea
ttgagagaggagtgtggagtttttggtatttctaatcacgaggactcgtccactttagtagctttaggattgcatgcattacaacatcgtggtcaggagggctgtggaatagtttcttatgatggaaagaattatcactcagaaaaaagacagggtttagtaggcgatcattttactaaaagcaatgttattaagaagcttcctggaaaat

SEQ ID NO: 238641 - DNA, 819 bp, Unknown
  Bacterial polypeptide expressing nucleotide sequence isolated from the Sargasso Sea
catgttcgttactcaacaactgggagaatctaaagcagagaatcttcaacctttatttgcaaatttagctttaggtgggtttgcatgtgcacataatggaaatcttacaaacactatgtctttaaaaaaaaaattagttgatacagggtcaatttttcaaacaacctcagatactgaattaattttgcaattagtagctagatctaaaaaaagaaagttaatggataagttaatagatacactatatcaaataaaaggtgcttactcattaattattctaacaaacaaaaaactcattggaattaaagatccatttggtattcggccattagttttaggagataaaaatggctctcctgttttagcttcagagacatgtgctttagatataattggagccaaatatgtccgagatattgaaaatggagaaataattgttattactaaaaatggaatcgaaagtattaaaccatttaaaaaagtaaatgaaagaccttgtatttttgaaagaatctattttgcaagtccagacagcataattgatggcaaaactgtttatacatacagaaaatctcttggtgaacaactcgctattgaaaatgatatagatgctgatgtcgttgttcctgttccagactctggtgtttctgccgctataggttactcacaaaaatcaggaataccttttgaattaggtattataagaagccattatgtgggcagaacatttattgaaccaacacaaaacataaggcaattaggtgttaaattgaaacatagcgtaaacagatcatgtgttaaaaataaaaaagtaatttt

SEQ ID NO: 238642 - DNA, 547 bp, Unknown
  Bacterial polypeptide expressing nucleotide sequence isolated from the Sargasso Sea
atgggatatgctagtgaaactggactaccctacgaacttggcattattcgtaaccattatgttggccgtacatttattgaacctgcagatcacattcggcatttaggggtaaaactaaagcataacgctagccgggctgttataggaggcaaacgtgtcattttagttgatgacagtattgttcgcgggacgacatcagtaaaaataatagagatgatgcgaaatgcgggcgcaaaagaagttcacatgcgtattgctagtcccccgaccacccactcttgttattacggggtagatacaccagaaagagaagaacttttagctgcacaaaattctgtcgatcaaatgcgtaaatttatgggagcagatacactagcctttgtttcaattgagggtctatatcgggctatgggattaaatgaaagaaatcgggaaacaccacaatattgtgatgcatgtttcactggcgaatatccagttcgtttaatagaccgagatggaggtcaaactacaccccaactctcctttttatctaacctaagttagc

SEQ ID NO: 238643 - DNA, 202 bp, Unknown
  Bacterial polypeptide expressing nucleotide sequence isolated from the Sargasso Sea
attgaagaactttaatcctaaactcaaagaggaatgtggtgtattcgggataagtaacgcaaaagacgcctcggctttaacggctctaggacttcatgctctacaacatagaggacaagaaggctgtggtattgtctcgtttaatggaaaacaatatttttctgaaaaaagatttggtttagttggtgataattttaaataa

SEQ ID NO: 238644 - DNA, 575 bp, Unknown
  Bacterial polypeptide expressing nucleotide sequence isolated from the Sargasso Sea
aagacagcttgcaagagaacatcctgtaaaagcagattatgttgtaccagttcctgactcaggagttgcttcagctattggatactcagaggaaagcaagattcctttagaattaggtcttcttagaaatcattatgtaggaagaacctttattgagcctcaacaacatattagaaattttggtgtaaaactgaaacttaattctgtaaaagatgttttaaagaacaaaaaagtgatagtaattgatgattcaattgttcgtggaacaacctgtagaaaaataattaaaatgattaaagatgctggggcaaaagaggtacatgtaagaataagctcccctcctactaaagattcttgttattatggtattgatacaccagataaaactgagttaatagctaatgatttatcaacagagcagataagaagatatatacttgctgatactttaggctacttgacattagatgggttgagaaattctgtacaaaaaaattcatcttataatgttaaaaataatttctgtgtttcatgttttaacagcaggtacccaactgatattgaattattataat

SEQ ID NO: 238645 - DNA, 705 bp, Unknown
  Bacterial polypeptide expressing nucleotide sequence isolated from the Sargasso Sea
ttgaatacatttattttgcaagaccagatacaatcttgaatggtaagacggcatatgaacatagaaaaagtttaggaaaagagctggctaaagagaatgatattgatgcagacattattgtgcccgttccagatagtggaaatgcagcagctttgggatttgctcagtatttaggaaaaaattttgaacacggtttgattagaaatcattatgttggcagaacttttatcgaaccaagtcaaaaaataagaagtttgggagttaaattaaaactaaatgcaaaccaaacaactataaaaaataaaaaaattattttaattgatgactcacttgtcagaggaacaacatcacataaaatagtaaaaatactttatgatgccggtgcaaaggaagtacatgttaaaattgcttgccctgaaattagatacccggatttttatggagttgataccccaactcgaaaagaattattagctgctaataaatcaaacgatgaaatttgtgaatatataggagcaaaatctttaaaatttttatcaattaatggaatgtacagggctattggatttgataatcgaaatgaaaattatccccaattaactgatcattactttactggtgattatccagtaaaaccagtagatgaacttggggatagcaaaataactcaattatcattgttgagtaccggatcaaacaattaga

SEQ ID NO: 238646 - DNA, 686 bp, Unknown
  Bacterial polypeptide expressing nucleotide sequence isolated from the Sargasso Sea
aatgataaaatttgatgatagaataagagataaatgtggtgtctttggagtatttgggcatgaagatgcttcagcactgacagccttaggtttgcatgccttacaacacagagggcaagagagcgcaggcattgtatcttttgatggtaaaaattttaataatcaactcaatttagggttagttggagattactttacaaaggaaagggtaataaagaggctacctggctatgccgcacttggccatgtacgatattctacaacaggaaaaactttatttaaaaacattcaacctctttttgcagatttacaaggaggtggcttagcttgttcacataatggtaatttaaccaatggtatagaattaagaaaaagacttattagagaaggttcaatatttcagtctacatctgatactgaggcctttattcatttaatttctaaaagtaaagaaaaaactatagtaaaaaaaataatagatgctttacatgaaattaaaggcgcatatagttttggtttattaaccaataaaaaattaattggaataagagacccattgggtataagaccattagtattgggttctctaggtaaagctaaaattatttcatctgagacttgtgcactagatataattggagctaaatttgtaagagaaaataaaatgtggagaaataatagcaata

SEQ ID NO: 238647 - DNA, 805 bp, Unknown
  Bacterial polypeptide expressing nucleotide sequence isolated from the Sargasso Sea
gtttgttagagatgttgaaaatggtgaaattgtttatgtagaaaatgatgaattaaaaagtattaagccatttcctcaaaaaaaagtgagaccatgtgtatttgaatatatttatttttcaagaccagatagtattttaaatggcagaacagcgtacgaatatcgtaaaagatttggagctgaattagcaaaagaggataatttagatgctgatttggttgtgccagtaccagattctggtaatgcagctgcattaggttacgctgaggaaaaaaaaataaattttgatttaggtttaataagaaatcattatgttggtcgaacttttatagagccatcacaacagattagaagtttaggagttaaattaaaattaaatgcaaatgtttcagttataaaaaataaaaaaataattttagttgatgattctcttgtaagaggaacaacctcatcaaaaattgtaaaaatgttatatgataatggtgctaaagaaatacatgtgagaatagcaagtccagaaataaaatatccagatttttatggagttgatacgcctactaaaaaagaactattagcagcaaacaaatcagtggatgaaataaaagaatttataaaagcaaaatcacttaaatttttaactttagatggcttatatcgaggaatgggttttgataagagaaatgatgcttatccacaattaactgatcaccattttactggtgattatccagtaaaaataattgatgaacttggagaggataaagtcacacaattatcattgttaagtacaggatcgagtaattga

SEQ ID NO: 238648 - DNA, 388 bp, Unknown
  Bacterial polypeptide expressing nucleotide sequence isolated from the Sargasso Sea
atgcaggtaattggccacgtacgttatcctactgcaggcagttccagcgcgtcagaagcgcagcctttctatgttaactcgccatttgggatttcattagcccataacggtaacttaaccaacacggttgaattagctgaaggcctgatcaaaaaacgtcgccatgtgaacaccacatccgactcagaagtattattaaacctgctggccgatgagctgcaaaaaaccactagcttaatgctgacgcctgacgaagtgttcgacactatcgccaaagtgcacgagcaagcccgtggcgcctatgcggttgtggccatgattatcggccaaggtctggtggcatttcgcgatcctttcggtattcgtccactggtattaggtaagcacg

SEQ ID NO: 238649 - DNA, 625 bp, Unknown
  Bacterial polypeptide expressing nucleotide sequence isolated from the Sargasso Sea
ttttacagaaaggctctaggtgaacatttagctattgaaaataacgtaattgcagatgttgttgttccaattccagattctggtgtttcagcagctattggattttcacagaagtcaaaaatcccatttgaacttggtataatcagaagtcactatgttggccgtacatttattgaaccttctcaaaatattaggcagtttggagtaaaactcaaacacagtgttaacagatcgtgtatcaaaaataaaaaagttattttaattgacgactcaatagtaagaggaactaccgcaagcaaaattgtaaaaatggtctatgaagcaggagcaaaggaagttaatttaggaatttcatgtcctccaattttacatccagatttttatggtatagatacaccaaattatgatcagttaattgcctctaaatctaatttagaggaaataagaaaattagttggagctaagtcgttattttttttatctttggatggcacctataaagcaatgggatgtaaaaaaagaaactctaagataccgcagtttactgaccattgttttacaggtgaatatccaatagatgtaacagaaattttagaaattaacagacaaactaatgaaaaataac

SEQ ID NO: 238650 - DNA, 601 bp, Unknown
  Bacterial polypeptide expressing nucleotide sequence isolated from the Sargasso Sea
gatgtataatcctaagttgaaagaagaatgtgctgtctttgggataagcaatacaccagaagcatcaactttaaccgctttaggacttcatgcgttacaacatagaggtcaggaaggttgtggaattgtatcatttgatggtgaaaaatatcactccgaaaaaaggtttggtctagttggtgacaactttaatgatgaaaaagttttaaaaaacttgccaggaaattatgccataggtcacaatagatattctacaactggaggaactgctttgagaaatgtgcaaccattctttgctgatactaattcaggtggaattggagttgcacacaatggaaatctaacgaatgcaataacacttagaaataaaatggttgaagaaggctcaatcttttacacaacatcagatacagaaacgatagttaaacttatagccaaatcaaaaagaccaaagacaattgataaagttattgatgctctttttcaaattcaaggagggtatgcattggttatgatgacacaaaatacccttattggggtaagagatccttttggaattagacctctggttataggaaaattaaaaaactcttatgttttt

SEQ ID NO: 238651 - DNA, 784 bp, Unknown
  Bacterial polypeptide expressing nucleotide sequence isolated from the Sargasso Sea
aatgtgtgggatagctggaatattttcacacaagccagttgcgtcagaactttatgatagtataattaatttacaacacaggggacaagatgcggcaggaattatgacttatgataaacggatgcataaagaaaaaggtgttggtcttgctaaagaaatttttaattccgaaaatatggagttacttactggcaatataggtatttcgcataatcgctatccaacacatggcggatttagccatggagaagtgcaacccttttggacatctgttccctatgggattgctcttgcccataatggaaatttgactaactataacgaacttgcttcagaggtaaccaaaaccgaaacccgttatttgaatactaatagtgattctgaagtactattgcatttatttgcagatgcccttcataaggattcaccaccacaaacaagcaaagagttttttgagctactttgtgaatcagttagtaatatttttaataaagtaagaggtgcttactcagtgacctcaattataataggcaagggcttagttgtatttagagatcctcatggcattagaccgctggttaaaggagaaagatcaaatggtaatggaggaaaagactatatttttgcttctgaaaataccatgttctatgcaatgggatatgaaccccaaggaacagtactaccaggagagcttatttatgttgatgaaaatggagagatatttaaaaagcgacttataaaaaaagaatttaatccctgtatatttgaatatgtctatttgcta

SEQ ID NO: 238652 - DNA, 862 bp, Unknown
  Bacterial polypeptide expressing nucleotide sequence isolated from the Sargasso Sea
gatagtcttttgcttttgcagcatagaggtcaagactcaacaggtatagccacaatggaaaatactgttttccatatacataaggctaaaggtcaggttaatactgcttatagaacgagagatatgaggaatttaatcggcaaaattggattgggtcatgttagatatgcaacaaaaggatcagcagaaagtgtagaagaagcacagcctttttacgttaatgctccttatggaattgttttgatacataatggaaatttgacgaacactagagatttagaaaaacaattatttaatatcgataaacggcatacaaattcttcaagtgatactgaaatgttgttaaatgtatttgcgacagaattacaagaacaaattcataatcaagaattagaacctgatattatttttagtgcggtcaaatctttacataaaagaattcagggatcatatgcttcaattgcattaatttctggacatggtttattagcattcagagatccctttggtataaggcctttagtcataggaaaaagattttcattaacaacaaaaaaagaagagtggatggttgctagcgaatctctagtgctagagaataacgattatcaagtagtgagagatgtagatcctggagaagctgtttttataaatcttaatggtgagtttttttctaagcaatgttctgaaaatccaatgttatttccttgttcctttgaatatgtttatttagccaggccagattcaattatgaatggaatttcagtgtataaagctcgattaaagatgggagattatttggcagaaacaataaaacagacaattaattctggagatgttgatgtagttatgcctattcctg

SEQ ID NO: 238653 - DNA, 718 bp, Unknown
  Bacterial polypeptide expressing nucleotide sequence isolated from the Sargasso Sea
tacatctgatactgaaaccattgtgcaattaattgcaaaatcaaaaagatcaaaaattattgataaaataattgagtctctttttaaaattcaaggtgggtacgctctaacaatattaataaaaaataaattgattggtataagggatccttatggaattagaccattagtaattggtaaaataaataaatcttatgttctagcttcagaaacatgtgccctcgatataattggtgcaaaatttataagagcagttgaaaatggagaaattgttgtaataacagaagatggtttagaaagtataaaaccatttccaaaaatcaaagagagaccttgcatttttgagtatatctatttttctagaccagatagtacaattaataacgtaagtgtttatgagtatagaaaaaaatttggcgctgaattagcaaaagaaactcatattgaggctgatttaattgtgcctgtaccagattctggtgttccagcttctattggttatgcagaaaaaattaaaaaaaacattgagctaggaattattagaaatcattatgtgggaagaacttttatagaacccacacaacaaataagaagctttggtgtaaaactaaaacataatattaataaatctcttgttaaaaataaatctatcattttaatagatgattctttagttagaggaacaacttcagtaaaaattattaaaatgctttatgaa

SEQ ID NO: 238654 - DNA, 610 bp, Unknown
  Bacterial polypeptide expressing nucleotide sequence isolated from the Sargasso Sea
agataatattgaaggtgatataattgtgccagttccagactctggtaatgctgcagccctgggatatagccaacaaacaaaaaaaaattttgaattaggattaataagaaatcattatgtgggaagaacttttatagaaccttctcaaaagattagaagtcttggagtgaagcttaaattgaatccaaatgaaacctctataaaaaataaaagaatcatattagtagatgactctttggttaggggaactaccagctataaaatagtaaaaatgttatatgatgtaggtgctaaagaggttcatgtaagaatagcaagtccagaaataagatatcctgatttttatggtgttgacacacctacaaaaaaagaacttttagccgcaaacaaaagtaatgatgaaatttgtaaatatattggagcaaaaagtttaaagtttttgtcgatagaaggcctttataaagcaattggatttgagaatagaaataaaaattaccctcaattaactgatcattattttactggtgattatccagtgaaacctatagataatttaggagatgacaaaattactcaactttctttattaagcactggatcaaataattaa

SEQ ID NO: 238655 - DNA, 340 bp, Unknown
  Bacterial polypeptide expressing nucleotide sequence isolated from the Sargasso Sea
gatgaaactaaagaaaaagttcaagatatataatcctaagataaaagaagaatgtgcagtttttggtataagtaattctaatgacgcatctactttaactgctttgggtcttcacgctcttcaacataggggacaagagggttgtggaattgtttcatatgatggagaaaaatatcattcagaaaaaaggtttggtttagttggagacaactttaatgatgaaaaagttataaaaaaacttcctgggaaatacgcaataggtcataaccgctactcaacaactggaggaactgctttaagaaacgtgcaacctttttttgctgatactaatgcaggtggt

SEQ ID NO: 238656 - DNA, 784 bp, Unknown
  Bacterial polypeptide expressing nucleotide sequence isolated from the Sargasso Sea
aaattgccaggcaatcgtgcaatcggtcataatcgctactcaacagctggaaataatttaatcaaaaatgtacaacctttttttgcagatctacatactggaggtattagcattgctcacaatgggaacttgagtaacgcaaggcatatcagaagggggttagttaaaaatggttcaatttttcagactacatctgatacagaaacaatagttcaactaattgcaaaatcaaaaagaataaaagttgttgataaaataattgattctctttttaaaatacaaggtgggtacgcattagtaattttaacagaaaaaaaattaataggtattagagatcctttcggaattcgccccttagtaataggcaaaataaataaatcttacatcttagcgtctgaaacctgtgctctagatattattggagcaaaatttgttagagaagttgaaaatggtgaaatggttgttataactgatagtggattagaaagcataaaaccatttcctaaaataaaagagagaccatgtatttttgaatacatttatttctcaagaccagacagtattataaataatgttagtgtttatgagcataggaaaaaattaggagctgagttagcaaaagaaagtaaaacagaggccgatttaattatacctgttccagattctggagttccagcttcgatcggatatgcagaaaaaataaaaaaaaatgtggagttaggtattataagaaatcactatgttggtagaacttttatcgaaccaacacaacaaataagaagct

SEQ ID NO: 238657 - DNA, 373 bp, Unknown
  Bacterial polypeptide expressing nucleotide sequence isolated from the Sargasso Sea
catgtgcggcattatcggaatgttctgtgttgactcggtcaaccaacagatctacgacaatctgcttctgcttcagcaccgcggtcaggactcggcagggattgtcacgatggataatcacaccttccacgtgcacaaacaaaggggacgtgtgcgtgaagcctttcgcacaagagacatgcgaaagctgctgggcaatgccgggatcggtcacgttcgttatgccacccgtggagctgctgcgtcagaagaggaagttcagccgttctatgtgaatgccccctatggcatcactttcgttcacaacggcaatctcaccaacacccttcagcttgagcaggatctcttcaagattgatcgtcgtcacaccaat

SEQ ID NO: 238658 - DNA, 629 bp, Unknown
  Bacterial polypeptide expressing nucleotide sequence isolated from the Sargasso Sea
aaaagaattagctaaagaaaacaatatagatgcagacattattgtccctgttccagacagtggaaatgcggctgcattaggatttgcacaatatctaggaaaaaactttgaacatggtttaataagaaaccattatgttgggagaacatttattgagccgagtcaacaaattagaagtttgggtgttagattaaaactcaacgcaaaccgaacgactatcaaaaataaaaaaataattttaattgatgactctttagttagagggactacctctcttaaaatagtaaaaatgctttatgatggaggtgctagtgaggtacatgtaaaaattgcttgccctgaaataagatatccagatttttatggtgttgatacaccgacaagaaaagaacttttggctgcaaataaatctaatgatgaaatttgtgaacatattggagctaaatctctaaaatttttatcaatagatgggatgtatagagccattgggtttgaaaaaagaaacaatagctatcctcaattgacagatcattattttacaggagaatatcctgttaaaccaattgatgatttaggagataataagataactcaactatctttattaaacactgcatcaaataattaat

SEQ ID NO: 238659 - DNA, 144 bp, Unknown
  Bacterial polypeptide expressing nucleotide sequence isolated from the Sargasso Sea
aatgaactttaatccaaaattaaaagaggaatgtggagtattcggaattagcaataataaagatgcttcagctcttactgctctggggtctcatgctcttcaacatagagggcaagaaggatgtggtattgtaacttttgatgg

SEQ ID NO: 238660 - DNA, 889 bp, Unknown
  Bacterial polypeptide expressing nucleotide sequence isolated from the Sargasso Sea
tttaaataaaattattgatgctttaatgcaaattcaaggtggttatgctttatcaattattgctaacggtacattgattggcgcaagagatccattaggtattcgaccacttgttttaggtaaaattaaaaatacatttatccttgcctctgaaacttgtgctttagatattataggtgcaaaatttatccgtgaaattgaaaatggtgaagttgtagttattaaagataataaagttgaaagtagaagaccatttccaaaaaaacaaatcaaaccatgtgtatttgaatatatttatttttcacgaccagatagtattttaaaaaataaaaccgcctatgaatatagaaaaaatttaggcacgtacttagcaaaagaaactgatataaaacctgatgtaatcgtaccagttccagactctggtgttcctgctgcgcttggttttagtcaagagtctggtattccttttgaattaggattaatacgaaatcattatgtgggcaggacatttattgagccaactcagcaaattagaagtttaggcgtaaagttaaaactaaatcctaaccaaagttctattagaagaaagaaagttgttttaattgacgattcattagttcgaggaacaacatccactaagataataaaaatgctttatgattttggagcaaaagaagtccatatgcgtattgcttcacctgcaattaaatatccagatttttacggagtcgatactccaacccaagaagaattattggctgcaaataaaaatttagaggaaatgcgcaaatatattggagctaaatctttaaaatttttatcattagatggtctgtatcaagctcttggttatgaacatagagataatgataaccctcaattcactgat

SEQ ID NO: 238661 - DNA, 721 bp, Unknown
  Bacterial polypeptide expressing nucleotide sequence isolated from the Sargasso Sea
aaataagatggttgaagaaggctcaatattttatacgacctcagatacagagactattgtaaaacttatagcaaagtcgaaaagaccaaatacaattgataaagttattgatgctctatttcaaattcagggtggctatgcgttagtcatgatgacccaaaatacgcttattggtgtcagggacccttatggaataagacccttagtaattggtaaattaaaaaattcatatgtatttgcctcagagacatgtgcgcttgatataataggtgctaaatacataagagaagttgaaaatggagaaattgtttatgttgaaaatgacaatctaaaaagtattaaaccgtttccacaaaaaaaagttagaccgtgtgtttttgaatatatctatttctcaaggccagacagtattttgaatggtaaaacggcttatgaatatcgtaaaaatttcggtgctgagttagcaaaagaagataatttagatgctgacttagttgttcctgtgccagactcaggtaatgctgctgctctagggtatgctaaggaaaaaggaattggcttcgatcttggattaattagaaatcattatgttggaagaacctttatagagccctctcaacaaattagaagtttaggggttaaattaaaattgaatgcaaatatttctgtaataaaaaataaaaaaattatattagttgacgactcacttgttagagggaaa

SEQ ID NO: 238662 - DNA, 191 bp, Unknown
  Bacterial polypeptide expressing nucleotide sequence isolated from the Sargasso Sea
aatgttcctttgggatcaaactgacgataagttacgtgaagagtgcggtgtttttggtatttccggtcataaagaagcagcagccgtaacagcgctggggttgcacgctttgcagcatcggggacaggaagcagcgggaattgtcagctatgatggaaaacgttttcattcagagaggcgtatagggcttg

SEQ ID NO: 238663 - DNA, 736 bp, Unknown
  Bacterial polypeptide expressing nucleotide sequence isolated from the Sargasso Sea
ctggcgcgttccgactccctgatggatggtgtctcggtttacaaggctcggctgcgcatgggtgagaagctggcggacaagatcctgcgcgagcgtccagagcacgatatcgacgtggtcatcccgattcccgacaccagccgtaccgctgcgctggagctggccaatcgcctcggtgtgaagttccgcgaaggcttcgtcaagaaccgctacatcggtcgcaccttcatcatgcccggccaggctgcgcggaagaaatcggtacggcagaagctcaatgccatcgatctcgagtttcgtggcaagaacgtgatgctggtggatgactccatcgtgcgcggcaccacctgcaagcagatcattcagatggcgcgcgaggcaggggcgaagaacgtctacttctgttccgctgcgccggcggtccgctatccgaacgtgtatggcatcgacatgcccagtgcccacgagctgatcgcgcacaaccgcaccaccgaagaggtcgccgagctgatcggtgccgattggctgatctaccaggatctggaagacctcgtcgacgccgttggtggcggcaaagtcaagatcgacaactttgactgtgcagttttcgacggcaattacatcaccggtgatatcgacgaagcctatctgcacaagatcgagcaggcgcgcaatgatctgagcaaggtcaagacgaacgcggtcagcgccatcatcgatctctacaacaactgat

SEQ ID NO: 238664 - DNA, 149 bp, Unknown
  Bacterial polypeptide expressing nucleotide sequence isolated from the Sargasso Sea
attgagagaagagtgtggtgtttttggtgtatccgagcacaacgatgctacagcattggttgcattaggattacatgcattacaacacagaggccaggaaggttgcggtatagtttcttttgatggaaaaagttttcatttcagaaaaa

SEQ ID NO: 238665 - DNA, 715 bp, Unknown
  Bacterial polypeptide expressing nucleotide sequence isolated from the Sargasso Sea
atttgctcatgaacttggcaagcaaagagagatatatccatcagaaaaaaatatttttaaggcagtaactaaaactcatataagatgtgatggagcatatgcagttattgctcttataaatggatacggtctggttgcttttcgagacaataacggaataagacctctatctataggagtaagaaaaggaaaagaaagagaggaatacattgtttcttctgaagatgctctttttacacctcttggttttgaaaagcttagagatatagatcctggtgaagcaatatttattgataaaagtggaaaattattttctcaacaatgtgctgataatcctcagaaacgaccatgtatatttgaatatgtttatttttcaagaccagattcaaagattgatgaaatttcagtctataaagcaagaatgagaatgggaacaaagcttgctgggcaaatcaagaaaacaagacccgatcacgatattgatgttgtgataccaattccagatagctcagtaactgctgcacatcaattagcagttgacttgaatgtgccctatagagaaggctttgtaaagaatagatatattggaagaacttttattatgccttatcaagaagagaggaagaaatcggtaagaagaaagttaaatattcttgatctagaatttgaaggaaaaaacgtgttacttgttgatgactcaattgtgagaggaaca

SEQ ID NO: 238666 - DNA, 755 bp, Unknown
  Bacterial polypeptide expressing nucleotide sequence isolated from the Sargasso Sea
agttagagatccttatggaattagaccactggtaattggtaagcttggtaatagttatgttttagcatctgaaacttgtgcatttgacattattggtgctaaatttattagagaagttgaaaatggtgagatagttttaatcgaaaataatgagctgaaaagtattaagcccttccctgctaaaaaagttagaccttgtgtgtttgaatatatttatttttcaagaccagatagtctaataggaggaaaaacagcttatgagcatagaaaaaatattggtagagagctagcaaaagaaaatgatactgatgctgatatagtggttccagttccagattcaggaaacgctgcagctatgggttttgctcaagaattaaaaataaattttgaacatgggttaattagaaatcattatgttggaagaacttttatcgaacccagccaaaaaattagaagcttgggtgttaaattaaaattaaatgctaatcaaacaacaattaaaaataaaaaaataattctaattgatgactctcttgttcgaggaacaacatcctataaaattgttaaaatgctttacgaggctggtgcaaaagaagttcatgttaaaattgcgtgccctgaaataagatatccagatttctatggtgtagatacacctacaaaaaaagaattgttagcagcaaataaaacaaatgatgaaatttgtgaatatattggagctaaatcattaaaatttttatcaattgaaggattgt

SEQ ID NO: 238667 - DNA, 811 bp, Unknown
  Bacterial polypeptide expressing nucleotide sequence isolated from the Sargasso Sea
attgagtgcaaaatatgtaagagatgttgagcatggtgagataattattatatctgaagacggcatggaaagtataaagccgtttcctaaagttcaggaaaggccatgcatttttgagagaatatatttttcaagacctgacagtattgtagggggcaaaactgtttacacttatagaaaaaatctagggaaagagcttgcaaaagaaacaaatattaatgctgatgtaattattccagttcctgactctggtgtgccagcagcacttggttattcgcaggaatctaaaatcccatttgaattaggtattataagaaatcactatgtaggccgcacatttattgagccatcacaatctattagacaatttggtgttaaattaaaacataatgcaaactcttcttacatagaaaacaagaaagttattttgatagacgattctatagtaagaggaacaacagcaaaaaaaattataaagatggtttatgatgctggagctaaagaagtccaccttggaatagcatgccctccaattaaacatccagatttttatggaatcgatacaccagattacaatgagcttattgctgcaaaatcctcattagaggaaatcaataatgtcattggttctaaatcaatattctttctttctttagagggaacttataaagcgatgggttatgaaaaaagagacaatgaaacaccccaatttacagatcattgcttcacaggtgattatccaacgagtcttttagatagagaacagggaacagtatcaaaacaattttcacttttgtctgagaagaattaa

SEQ ID NO: 238668 - DNA, 858 bp, Unknown
  Bacterial polypeptide expressing nucleotide sequence isolated from the Sargasso Sea
tgatgatcaattaaactctagaaaatcaatgggatatgtccgagatgtttttcaacaaaggcatatggataagcttgtcggaaattatggaatagggcacgtaagatatccaacggctggtggtgctggtaaagaatttgcgcaacccatgtatgttaattcaccttatggcataagtcttgcgcataatgggaatctgactaattcgaagcagttaggaactcaattatttcatgcagaaatgagacatctcagaacagatagcgactccgaggttttattaaatatatttgctcatgaacttggtaaacaaagagagatatacccatcagaaaaaaatatttttaaggcagtaactaaaactcatataagatgtgatggagcatatgcagttattgctcttataaatggatatggtctggttgcttttcgagacaataacggaataagacctctatctataggagtaagaaaaggaaaagaaagagaggaatacattgtttcttctgaagatgctctttttacacctcttggttttgaaaagcttagagatatagatcctggtgaagcaatatttattgataaaagtggaaaattatcttctcaacaatgtgctgaaaatcctcagaagcgaccatgtatatttgaatatgtttatttttcaagaccagattcaaagattgatgaaatttcagtctataaagcaagaatgagaatgggaacaaagcttgctgggcaaatcaagaaaactagacccgctcacgatatcgatgttgtgataccaattccagatagctcagtaactgctgcacatcaattagccgttgacttgaatgtgccctatagagaaagctttgt

SEQ ID NO: 238669 - DNA, 496 bp, Unknown
  Bacterial polypeptide expressing nucleotide sequence isolated from the Sargasso Sea
ttatgttggaagaacatttattgagcccacacagaacataagaagtttaggtgttaaattaaaactaagcgccaatagatcttcaataaaaaacaaatctgtaattttaatagacgattccttagtaaggggaactacatgtcataaaatagttaaaatgctttatgattctggtgcaaagaaagttcatgtgagaattgcttcacccgaaataaaatttccagatttttatggcatagatatgccttcaaaaaaagaactgttggctgcaaacaaaaacataaatgagatgtgcaagtatgttggcgcgaactctctaaaatttttgagtatcgatgggctatataaagctatttgtggaaaccccagaaacaaactgtatccacaattcactgaccattattttacaggcgaatatccggtcaagcctgtagatcaaatggaaaataacaaaattgcccagctatctttgcttagcggaaaatccacaaattag

SEQ ID NO: 238670 - DNA, 660 bp, Unknown
  Bacterial polypeptide expressing nucleotide sequence isolated from the Sargasso Sea
atttcgcgcgtcccgacagttttctgttcggcgaacatgtttacaaagcacgaaaagaaatgggccgggccatggcacaggaaagcccagcagatgccgacctaattgttcccgttcccgactcaggggttgtctcggcaatgggatttgcagaagaaagtggtatcccatttgaaatgggattgattcgcaatcattatgtgggccggacttttatcgagcctcaatcccaaataagaaattttggggtgaagctcaaactaaatgctgtaaaaaatcttatttcgggtaaacggctcgcaatcattgatgattctattgtccgtggaactacttgtcgtaaaatagtaaaaatgcttctggaagcaggagcaaaggaagttcatcttagaatttctgcaccccctattttacattcctgtttttatggaatcgatactcctcataaagaggaactgattgctcacacccattcccttgaagcaacacgaaaatatctaggtgcagactccctacaatatttaagcatcaaaaaaatgttagaagtcttgcaaaatggtaagaataaattctgctctgcctgttttgatggaaactaccctgtacctataaccgaccacctttctaccacccaacagttgaacctattctcaaaataaa

SEQ ID NO: 238671 - DNA, 723 bp, Unknown
  Bacterial polypeptide expressing nucleotide sequence isolated from the Sargasso Sea
aagtaagaccatgtgtgtttgaatatatttatttttcaagaccagatagtattttaaatggcaaaacagcttatgaatatcgtaaaaaatttggagctgaattggcaaaagaggataatttagatgctgacttagttgtgcctgtaccagattctggaaatgctgcagcattaggttatgcagaagaaaaaaaaataaattttgatttaggtttaataagaaaccattatgttggtcgaacttttattgagccatcacaacaaattagaagtttaggtgttaagttaaaattaaatgcaaatgtttcggttataaaaaacaaaaaaatcattttggttgacgactctttagttagagggacaacttcatcaaagattgtaaaaatgttatacgataatggtgctaaagagattcatgttagaatagctagtccagaaataaaatatccagatttttatggtgttgatacgcctactaaaaaagaactattagcagcaaacaaatcagtagatgaaataaaagaatttataaaagcacaatcacttaaatttttaactttagatggcttatatcgaggaatgggttttgataaaagaaatgaagcgtatcctcagttaactgatcatcattttactggcgattatccagtaaaaataattgacgaacttggggaagataaagttacacaattatctttattaagcacaggatcaagtaattaat

SEQ ID NO: 238672 - DNA, 799 bp, Unknown
  Bacterial polypeptide expressing nucleotide sequence isolated from the Sargasso Sea
gcccaggatccaagaggtttccggccgctttccctgggacagttcgaaaatgcatgggtcgtcagttctgagacatgcgcgctcaacaccataggggcggattttgtttgtgaaatcaagcccggggaactgctcgtttttgatgaaaagggtttgcagatgcgttcctttacgggggtgcaaaccaggaaaatctgctcctttgagtacatctattttgcccgtcctgacagtgaagtcgacggaatcagcgttcattcagttcgaaaagaactgggacgtgagttatgccgggaggcccctgctgaagcggatctggtcattggtgttccggattcaggtttggccgcggcggttggctatgctgagcaatgcggacttccctatgagttggggatgatgaaaaacagatacgtcggcagaaccttcatccagcccaaccaggaacttcgccgccgaggggtgaagatgaaactgagtgtggtacgtaaagccgtggaaggcaaacgattggtgttggtggatgattccatcgttcgcggtatcaccagcggacgaatcgtttcgatgcttaaggacaatggcgcgactgaggtgcatatgcgcgtcacttcacctccgatcacgcatccctgtctctatggtatcgacacggccaggcacatggaattgatcgcggcagaaatgtctgttgatgaaatccgtgatgaaatcggtgcggattccctccattttctctctgaaaaagggatgattcaggcgaccggcagggaagatctttcagaagatcagggacatt

SEQ ID NO: 238673 - DNA, 427 bp, Unknown
  Bacterial polypeptide expressing nucleotide sequence isolated from the Sargasso Sea
ttgaaaaaatataactcagataaattaagagaagaatgtggaatttttggggtttcaaatcacgaagactcctctgcattagttgctttagggttgcatgctttgcagcatagagggcaagagggatgtgggatagtatcttttgatggaaaaaactaccactctgagaaaagacaaggattagttggtgatcattttacaaactcggaaattatcaaaaagctacctggacattttgcgattggtcataatcgatattctacaacaggggaaacctcattaagaaatattcaacctttttttgccgatttgcacatgggtggattaagtattgctcataatggtaacttaactaatgctttaatattaagaaactctttggttaaagacggagctattttcagaacaaccagtgatactgaaacta

SEQ ID NO: 238674 - DNA, 901 bp, Unknown
  Bacterial polypeptide expressing nucleotide sequence isolated from the Sargasso Sea
tatgtgtggaatagttggaattgtttcttcaaatgatgtaaatcaacaaatttacgatagtcttttgcttttgcagcatagaggtcaagactcaacaggaatagcaacaatggaaaatactgtttttcatatacataaggttaaaggtcaggttaatacagcttatagaactagagatatgaggaatttaattggcaaaattggattgggtcatgttaggtatgcaacaaaaggatcagcagaaagtgtagaagaagcacagcctttttatgttaatgctccttatggaattgttttgatacataatggaaatttgactaataccagagatttagaaaaacagttatttaatgtcgacaagcggcatacaaattcttcaagtgatactgaaatgttgttaaatgtatttgcgacagaattacaagaacaaattaataatcaagaattagaacctgatattatttttaatgctgtcaaatctttacataaaagaattcaagggtcatatgcttcaattgcgttaatttcaggacatggtttattagcatttagagatccttttggtattaggcctttagtcatagggaaaagactttcattaaccacaaaaaaagaagaatggatggttgcaagcgaatctttagtacttgagaataatgattatgaaatagtgagagatgtagatccaggagaagctgtttttataaatcttgatggggagtttttctctaagcaatgttctgaaaatccaatgttatttccctgtgcttttgaatatgtttatttagctaggccagattcaattatgaatggaatttcagtctataaagctcgtttaaaaatgggagattatttagcagaaacaataaaacaacaatcaattctggagatattgatgtag

SEQ ID NO: 238675 - DNA, 181 bp, Unknown
  Bacterial polypeptide expressing nucleotide sequence isolated from the Sargasso Sea
attgaagatatttaatccaaaactgaaagaagaatgtggagtatttggaataagcaatatatcagatgcttctactctcactgctttaggcttacatgccttacaacatagaggtcaagaaggatgtggtattgtttcttacgatgaaaaaattaccactctgaaaaaagatttgggttag

SEQ ID NO: 238676 - DNA, 367 bp, Unknown
  Bacterial polypeptide expressing nucleotide sequence isolated from the Sargasso Sea
atgtataaccctaaattaaaagaggagtgtgctgtctttggtataagtaatacaccagaagcatcaaccttaactgctttaggacttcatgcgttacaacacaggggccaggaaggctgtggaattgtatcatttgatggtaaaaaatatcactctgaaaaaagatttggtctagttggtgacaattttaatgatgagaaagttttaaaaaacttgccaggaaattacgctataggtcacaatagatattctacaactggaggaactgctttgagaaatgtgcaaccattctttgctgacactaattcgggtggaattggtgttgcacataatggaaatctaacgaatgccataacactaagaaata

SEQ ID NO: 238677 - DNA, 963 bp, Unknown
  Bacterial polypeptide expressing nucleotide sequence isolated from the Sargasso Sea
agtgactctctaataaatttgaatggtaatatgggcataggtcatgtccgctaccccactgctggttgtgatgatgtaagtgaggctcagccattttatactgccaacccaattaatataaccctagcacataatggtactcttacaaacagtgaaacaatcaaagaagaactaaccaaaacacatttttgtcagtttaacactagctcagactctgaggttttactaaagctttttgcctatgagctctataaaacaaattacagaaaggtctctaacgaccatgtttttagagcattaaaaaaggtttttaacaggtgctcaggtggttatgctgtcataatgctgatagcaggtgttggtatcgttgcctttagagaccctaaagggatcaggcctctggctattggatcaaataaaaactcttatatgatcgcatcagagagcagcgcccttacctctatggggtatagagctctagaagatgtgctccctgggcaggctgtcattataaatgaggatggtacagtaaataaaaaaaggctaataagaaaagctgtgcaccagccatgcatttttgagtatgtgtatttttcaaggccagactcaaccattgatgagatatctgtacacaaatcaagactaagaatgggcgacttcctcggtgataaaattttaagggaatataaaaatattgaggtagatgttgttatccctgtcccagatacaagtaggacatctgccatgcaggtcgctcacaagttaggtgtgaaatacagagaggggttcatgaaaaatagatacatcggaagaacttttatcatgcctggtcaaaacacgcgcaaaaaatctgtagcaaggaaactcaacccaatagagatagagtttaaagataaaaatgtactgcttgttgatgactctatcgtaagaggacatacatcaaaaaggatcattcaaatggta

SEQ ID NO: 238678 - DNA, 460 bp, Unknown
  Bacterial polypeptide expressing nucleotide sequence isolated from the Sargasso Sea
atgtgtggtatcataggtctcgtcgggcacccagatagtcaggtgggtaagactctctatgacggcttactagttttacaacatagagggcaagatgcagcaggcatcgtaactagcgattctaggaatatttcccatagaagagcaaatggtctagtccgagatgtattccgactccgtcacatccaggcattgcagggttccatgggtttaggccacgttcgatacccgactgcaggttcttcttctgctgcagaggctcaaccattctataccaactctccatttggagtaagtctagcacacaatggtaacttgaccaatccggaagaaataattgatacattactagaaagagatcatcgtcgaatcaataccagttcagattcggaagccctactgaatttattcgcagccgaaattcagcgttcaataaatgggcgtagaggtggattagacg

SEQ ID NO: 238679 - DNA, 910 bp, Unknown
  Bacterial polypeptide expressing nucleotide sequence isolated from the Sargasso Sea
gctggaatcgcaaccttggaacagcaaaaaactttctcttcataaagagcttggtgttgttactgaggttttcaaaacagacgagtctctaggtttggagggtaatgtgggaataggtcatgtacgttatccaaccgctggctgttctgatgtttcagaggcacaaccatttcactcttctaatcctgtgaatatttgccttgcacacaacggaacgctgactaacagtgatgagatgaaaaaatttcttctagaaacccacttctgtcaacttaatactcagtcagattctgaagttttattaaatctttttgcatatgaattgtctaaaataaactttgatgttttgcaaaattcgcatgtttttgaggccctaaaaagagtatatgaaaggtgtgagggtggctttgctgtaacaatgattgttgggggcgttggcttggttgcctttagagattcaaacggaattagaccgcttgttgtgggtaaaaaagatgaatcttttatggttgcttcagaaagctctgcgcttagcgctctagggtatgaattcgaacacgacattgatcctgggtcagccatcattatatctgaaagcggtgttatagaaaaaagcgtatgtgctgaatctatatcacactctccttgtctttttgaatttgtatacttttcacgccccgactctgttattgattctatatctgttcataagtctcgacttagaatgggagattttttgggagataaaattcttagggattattctcatctagaaatagacgcagtaatacccgttccagacacaagcagaacatctgcaatgcaggttgcatacaagcttggtgttaaatatagagaaggatttattaaaaacagatatataggtagaacgtttattatgccggggcaa

SEQ ID NO: 238680 - DNA, 380 bp, Unknown
  Bacterial polypeptide expressing nucleotide sequence isolated from the Sargasso Sea
aatggttaaagaaaactgtggtgtagttgggatttacagtgaaggggatgtcaatgttattccaatggtaattgatgcattacgtgcattacaacatcgtggtcaagaagcttggggattggcaattccaaacaaggctccattaaaacgattaggacttgtttctgcatcttctggcgaattcaaaaaaatatctgaagaatatgcttctcactctgcaattggacatgttaggtattccactgttggaaaaagtgatcttgaaagtgcacaaccacttaaagtaaaagatctttgtgttgcacataatggaaccatttctaatgttgaagaactttcaaatcttgtcggtggatgtacctttactccacaaaatgcta

SEQ ID NO: 238681 - DNA, 712 bp, Unknown
  Bacterial polypeptide expressing nucleotide sequence isolated from the Sargasso Sea
atgtgtttttgaatatatttattttgctagaccagatagcattttagatggcaaaacagcatatgagcatagaaaaaatttaggaaaagaacttgccaaagaaagtgatattaatgcagatatcattgtaccagttcctgacagtggtaatgcagctgctttgggattttctcagcacttaggcaaaaattttgaacatggtttaattaggaatcattatgttggaagaacttttatcgaaccaagtcaacggataagaagcctaggtgtaaaattaaaacttaatgcgaaccgttcgactattaaagataaaaaaataattttaatcgatgactctcttgtaagaggaactacatcacataaaatagttaaaatgctttatgactctggtgctaaagaagttcatgtcagaatagcttgtcctgaaattaaatacccagacttttatggagttgatacccctactcgaaaagaattattagctgcaaataaatcaaatgaagaaatttgcgaatatattggtgcaaaatctttaaaatttttatcaatagatggaatgtatcgagcaataggatttgataaacgaaataaaaattatcctcaattaactgatcattattttacgggtgattatccagttaaaccaattgatgaattaggagatagtaaaatcactcaattatctttacttaacactgcatcaaataattaa

SEQ ID NO: 238682 - DNA, 827 bp, Unknown
  Bacterial polypeptide expressing nucleotide sequence isolated from the Sargasso Sea
tttaacagctcttggtttgcatgcgttacaacatcttggtcaagaaggttgtggaattgtaagttatgatggcaactcctatcactcagaaagaaaatttggattagttggtgataattttacaaagaaacactcattagacaagttaaatggaaaaattgcgataggacacaatcgctattcaacaacgggtggtgaaacaataaggaatatacaacctttttatgctgatcttcatggtggagctattagtattgctcataatggtaatttaactaatgcactccttttaagagagcaaatggtacgagaaggtgcaatatttcaaacaacatcagataccgaaacaattgttcaacttgtagctcgttcaaaaaagaaagatattttaaataaaattattgatgctttaatgcaaattcaaggtggttatgctttatcaatcattgctaatggtacgttgattggtgcaagagatccattaggtattcgaccacttgttttaggtaaatttaaaaatgcatttatccttgcctccgaaacttgcgcgctagacattataggtgcaaaatttatccgtgaaattgaaaatggagaagttgtagttattaaagataataaagttgaaagtcgaagaccttttccaaaaaaacaaatcaaaccatgtgtatttgaatatatttatttttcccggccagatagtattttaaaaaacaaaactgcctatgaatatagaaaaaatttaggcacgtacttagcaaaagaaaccgaaataaaacctgatgtagtagtaccagttccagactctggtgttcctgctgcacttg

SEQ ID NO: 238683 - DNA, 202 bp, Unknown
  Bacterial polypeptide expressing nucleotide sequence isolated from the Sargasso Sea
ctggataaacttaatgaagaatgtggagtatttggtatttccaatcacgaagatgcctctgctttagtagctctaggacttcatgctctgcaacatagaggacaagagggttgtggtatagtttcatttgatggaacaaattatcactcagaaaagaggcaaggtcttgtaggtgatcactttacagatccagaaacttaaa

SEQ ID NO: 238684 - DNA, 728 bp, Unknown
  Bacterial polypeptide expressing nucleotide sequence isolated from the Sargasso Sea
catgggtcgtcagttcctgaaacattgcgcgctcaacaccataggggcggattttgtccgtgagatcaagcccggggaactgctcgtttttgatgaaaagggtttgcagatgcgttcctttacgggggtgcaaaccaggaaaatctgctcctttgagtacatctattttgcccgtcctgacagtgaagtcgacggaatcagcgttcattcggttcgaaaagaattgggacgggagttatgccgggaggcccctgctgaagcggatctagtcattggtgttccagattcaggtttggccgcggcggttggctatgctgagcaatgcggacttccctatgagttggggatgatgaaaaacagatacgtcggcagaaccttcatccagcccaaccaggaacttcgccgccgtggggtgaagatgaaactgagtgtagtgcgcaaagccgtggaaggcaaacgtgtggtgttggtagatgattcgatcgttcgcggtatcaccagtgggagaatcgtttcgatgcttaaggacaatggtgcgactgaggtgcatatgcgcgtcacttcgcctcctattacgcatccctgcctctatggaatcgacacggccaggcgcatggaattgatcgcggcagaaatgtctgttgatgaaatccgtgatgaaatcggtgcagattccctccattttctctctgaaaaagggatgattcaggcgaccggcagagaagatc

SEQ ID NO: 238685 - DNA, 793 bp, Unknown
  Bacterial polypeptide expressing nucleotide sequence isolated from the Sargasso Sea
gttgaaaatggagaaattgttattgttgaaaatgaaaaaatacaaagtattaaaccattcccaaagaagaaaagtagaccctgtgtatttgaatatatttattttgcaagaccagatagtattttaaatggcaaaagcgcatatgaatttagaaaaaatcttggatatgaattggcaaaagaaagtaaaaatattggggacataatagttccggtaccagactcaggagttcctgcagcaataggttttgcccagtttaagaaaatgaactttgaacttggattaatcagaaaccattacgttggtagaacttttatcgagccgacacaaagtataagaagcctgggtgttaaactcaaattaagtgctaatatgtcttctattaaaaataaatctgttatacttattgatgactcccttgttagaggaacaacttgttataaaattgtaaaaatgctttatgagtctggtgcaaaagaagttcatgtaagaattgcatgtccagaaataaaatttcctgatttttatggtattgatatgccttctaaaaaagagcttttggctgcaaataaaaatttaaatgaaatgaaaaactatattcaatcagactctttaaaatttttgagcatagatggtttatatagaggtatttgtggttcaaaaagaaataatgtttacccacagtttactgatcactatttcacaggtgagtatccaattaaaccagttgataaaatgaaagaaaacaatgttgctcaactatctctgcttagtggtaaatcaaataattaat

SEQ ID NO: 238686 - DNA, 182 bp, Unknown
  Bacterial polypeptide expressing nucleotide sequence isolated from the Sargasso Sea
gatgctaaagaaaaagtacaggaactatagtccaaaaattaaagaagaatgtggagtatttggtataagcaattatgttgatgcttcagcattaactgctcttggtcttcatgctcttcaacatagaggtcaggaaggttgtggaatagtttcgtatgatggaaaaaaatattattctgaaa

SEQ ID NO: 238687 - DNA, 776 bp, Unknown
  Bacterial polypeptide expressing nucleotide sequence isolated from the Sargasso Sea
aatgggagaaattattgtaattgaagatggcaacataaaaagcataaagccatttaccacaaaaaaacaaaggccttgtgtttttgaatatgtttatttttcaagacctgacagttttataaaaggcaaatgtgcatatgaatatagaaaaaattttggttatgaacttgcaaaagaaagtgatgatgctggggatattgtggtccctgttccagactctggcgtacctgctgcaattggatatagtcaatataaaaagaaaagttttgagttaggcttaataagaaaccattatgtaggaagaacttttattgaaccaaaacaaaatataagaagttttggggtaaaactaaaattaagttcaaataaatcatcaataaaaaataaatctatcatattaatcgatgactctattgtgagaggcactacgtgctctaaaatagttaaaatgctttatgatggtggagctaaagaagttcatgttagaatatcttcgccaccaataaaatttcctgatttctacggaatagatatgccatcaaaaaaagagttgcttgctgcaaacaaaaatttagaagagatgtgtaaacatattcaagcagactccctgaagtttttaagtatagaagggttatataaagcaatttttggacaaaaaaggaatgatacttatcctcaattaacagatcactattttacaggagaatatcctgttgaactagtcgatcaaaatgaaaatgataaagtaactcaattatccttgttaagtggtaaat

SEQ ID NO: 238688 - DNA, 143 bp, Unknown
  Bacterial polypeptide expressing nucleotide sequence isolated from the Sargasso Sea
attgaagagctttaattcaaaacttaaagaggagtgtggtgttttcggtattagcaacattgaggatgcctcagctttaacagcattaggtcttcatgcacttcaacacagaggtcaagagggttgtggaattgtaacatttg

SEQ ID NO: 238689 - DNA, 872 bp, Unknown
  Bacterial polypeptide expressing nucleotide sequence isolated from the Sargasso Sea
ttgcaaactaaaaaattcttatattttatcctctgaaagttgtgctctagatattattggagcaactttcgtgcgagaaattgaaaatggcgagattgtaatcattgaaaatcaagaattaaaatcgattaaaccttttccaaagcaaaaaccaaggccgtgcgttttcgaatatatttattttgcacgacctgacagtattattaataataaatgtgcgtatgaatataggaaaaaattaggaattcaattagcaaaagaaacagatgttcaagcagattttgttgtgccagttccggactcaggtgttcctgctgcgttaggatatgccgagcaatctaataaaaaatttgagtttggtttaataagaaatcattatgtaggaaggacttttattgaacctacaaataatataagaagtttgggtgttaaactgaagttaagttcaacaaaatcaatagtgaaaaataaatctattatattaatagatgactccttagtcagaggtacaacttgttacaagatagtgaaaatgctttatgaaagtggagctaaagaagtacatgttagaattgcttgtccacaaattaaatatccagatttttatggtgtagatatgccaacaaaagaagagctcttagccttcaataaaaatattcaagaaatgtgtgatcatataaaagctaaaagtttaaaatttttaagtttatcaggattatacactgctttaatagaagaaaaacggaactctaattacccgcaatttagtgatcattattttactggagaatatccaataaaacctcaagataatttaactggcattagattaaaacaattatcattgttaagtagcaaatctaacagctaat

SEQ ID NO: 238690 - DNA, 664 bp, Unknown
  Bacterial polypeptide expressing nucleotide sequence isolated from the Sargasso Sea
attgacggtcgcaatgtctacgattcccgcaaacgcatcggacaggaacttgcagacgagtccggcgtccccgcggatgttgtgatacccgtgccggattccggggtgccagcggcactcggctatgcggaacaggcgggtattccctacgagcttggcattatccgcaatcattacgtcggccggacgtttatcgaaccgaccgaccggatccgtcatctcggcgttaagctgaaacataacgcaaaccgagacgtcatcgacgggcgcagagtggtcctagtcgacgacagtatcgtgcgcgggactacatctgtgaagatcgtcgaaatgatgcgggccgcaggcgccaacgaggtgcatatgcggatcgccagcccgccaacgactcattcgtgtttttacggcgtcgatacgccgacgcgcgatcagctgctggcggcgcagaacgacgtggacgaaatggcgcggatcatcggcgtcgacagtcttgccttcctgacgatggacggactttaccgagcgatgggcctggaaagccgcgatgcgtctgcgccccagtactgcgatgcatgcttttcgggggaatatccgatcatacccaccgatcagtcgagcgatcagcccagcccgcaattgtcgttcctgacgcagctagcgtgac

SEQ ID NO: 238691 - DNA, 935 bp, Unknown
  Bacterial polypeptide expressing nucleotide sequence isolated from the Sargasso Sea
ttacgataatcaagacattccacgtgaagcctgtggagtggtcggtatatatgcccctaaagaagaggttgctagagctgtattttttggcctatatgcattacagcatagaggccaagaaagtgctgggattgcaactagtgacgggtctcagatatacacacacacagaaatggggcttgtgggtcaagggtttcaagaatatgacttatctagactaccggggcatatatcaataggccatactaggtactcaacaacggggtctagtaatatagaaaatgctcaaccaatcatttcaaaaggggttaatgttgaaatagcattggggcataacggtaatttaattaatgccgtagaccttaaaaaagaactgcttgattggaatgtaatgttttcttcttcagcagattcagaaattattgctcatattatttcaaatgctccagctaataattggtcagatagggctgcatatacaatgagaaagttacaaggggcctattctctggtaatgatgaccaaaaatgaactaattggaatgagagaccccttaggtgttaggccattgtgtataggaaagttaaatgaaggatggattttagcatcagaatcttgtgccttagatcatataggggcagatttagttagagagttaaaccccggcgaggcagtattaattgatcaaaatggaccaaaaacgatttatcaaaaagagagaagcgggaaaatagggcaatgtatatttgaacaaatatatttttcaagacctgacagtattttgagcgagaaacttgtgtacagtactagaatggcaatgggagcagagctttcgagagaatttcctgttgatgctgatgttgtgattggggttcctgattcggctacagcggcggcagttggctattctcaggagtcaggtattccctattcag

SEQ ID NO: 238692 - DNA, 216 bp, Unknown
  Bacterial polypeptide expressing nucleotide sequence isolated from the Sargasso Sea
gatgaaaaattggcaaaatttcctaaaaaaattcgaggtaaggcaatctcatgttcccagatttaatgaggagtgtggtgtttttggaataagtggaaccaaagatgctgctgccttaacagctcttggtttgcatgcgttgcaacatcgtggtcaagaaggttgtggaattgtaagctatgatggcaactcctatcactcagaaagaaaatttgg

SEQ ID NO: 238693 - DNA, 688 bp, Unknown
  Bacterial polypeptide expressing nucleotide sequence isolated from the Sargasso Sea
aatgtgtgggctagctggaatttattctaataaacccgttgccgctgaactatatgatagcttaatacatttacagcatcgcggtcaagatgctgcagggatcatcacatataaaaatcgaatgcataaatctaaaggctctggtttggttagagatatatttactgataaaaaaataaatagattaaaaggtaatattggaatagctcacaacagatatcctacacacggaggttttggtcacggtgaaatacagccgttttggacatctgttccatacggtattgcattggctcataatggaaatttgacaaactacaacgagctctcagaaacaataaccagtagtgagtccaggtatttaaatacacatagcgatacagaggcccttcttcatttatttgcagatctattacacaacaaacaacagccggctaacgatgagcagttttttaaaaatctttgcgatacagtaaaaactgtttttgaaaaagtagatggtgcgtactctgttgtggctttaataattgggaagggtttggttgcttttagagacccaaatggtattcgaccgcttgttaagggtgcaagaaaacataaagacgggaaaaaagattatatagttgcttcggaaaacacgatgttttatcccctaggatttgagcctgaaggaagtgttttgcctgga

SEQ ID NO: 238694 - DNA, 261 bp, Unknown
  Bacterial polypeptide expressing nucleotide sequence isolated from the Sargasso Sea
aatgccccttagggaagcatgtggtgttttagggattgcaagtaaatctgagatattaaatctgcttcaagttggattaagggcattacaacatagaggtcaagaatctgcgggcctgacaatttttgatgaagagcacaaaacccagaaagggatggggcttgtgagtgaagttttggatgattttggtgaagaattcaaaaaaggcactgtaggcattggccatgtccgatattctactgctggtggttcttctatgaa

SEQ ID NO: 238695 - DNA, 154 bp, Unknown
  Bacterial polypeptide expressing nucleotide sequence isolated from the Sargasso Sea
aatggatagattaagagaagagtgtggagtttttggtatttttaataataaagatgcagctgctcttacagctttgagtctacatgctttacaacatagaggtcaagagggatgtggcatcgtaacatttaatggaaaaaaatttttttgctga

SEQ ID NO: 238696 - DNA, 831 bp, Unknown
  Bacterial polypeptide expressing nucleotide sequence isolated from the Sargasso Sea
gtgcgcttgatataattggtgctaaattcattagagaggtagaaaatggagaaattgttttaatagagaatgatgagttaaaaagcattaagcctttcccaattaaaaaagtaagaccttgtgtctttgaatatatatattttgcaagaccagatagtattcttgatggtaaaacagcttatgaacatcgaaaaagctttggcgcagagcttgcaaaagagaatgatatagatgcagatattgttgttcctgtaccagactctggaaatgctgcagccttaggatttgcacagcatctcaaaatgaattttgaattaggattggttagaaatcactatgtaggtagaacgtttattgaaccaagtcaaaagatcagaagcttaggtgttaaattaaaattaaatgctaatcagtcagcaataaaaaataagaaaataattttaatagatgactctttagtcagaggaactacatcttataagatagtaaaaatgttgtatgacgctggtgcaaaagaggttcatgtgaaaatagcatgtcctgaaattagatatcctgatttctatggtgtagacactccaacaaaaaaagagttacttgcagcaaataaaactaataaagaaatttgtgattatattggagctaaatctttaaaatttttatctctagatggcatgtatagagctgtaggttttgatagaagaaatgaaagctacccgcaattaactgatcattattttactggagattatcctgttaaaccaatagatgagcttggtgataataagataactcaattatcattattaagtacagcttcaaataattaaa

SEQ ID NO: 238697 - DNA, 550 bp, Unknown
  Bacterial polypeptide expressing nucleotide sequence isolated from the Sargasso Sea
ataactgcactcggtcttcatgctgtacagcataggggtcaagagggttgtggtatagtgagctttgatggtaaaaattacttttcagaaaaaagatttggtttagttggggataattttaataaagaaaaagttttaaaaaaacttaaaggtaattatgcaattggacataatagatacagcacaacaggtgagaataccttaagaaatatacagcctttttttgctgatactaatgctggaggtattggggttgctcataatggtaatttaaccaactccatagcattaaggaataaattagttgaggatggggctattttttatactacttctgatacagaaactattgttcaattaatagcaaaatcaaaaagggaaaaaactatagataaaattgtagatgctatttttcaaattcaaggtggctattccttagttatgttaacgcaaaactctcttgttggtgttagggatccttttggaattagacctttggtaatcggaaaattaaataatagttatgttttagcctcagaaacatgtgcat

SEQ ID NO: 238698 - DNA, 634 bp, Unknown
  Bacterial polypeptide expressing nucleotide sequence isolated from the Sargasso Sea
atgtgcggcgtagttggaatagtaagtcaaacagaggtttctcctctaatttatgatgcattaaccatactgcaacatagaggacaggatgcagctggtatagccacatcaactaacaatagattctttattcgtaaacaacttggtctagttcgggatgtcatcagaaaccaacacatactgaccctaagagggcagatgggtataggccatgtcaggtatccaaccgcaggtagtgaggatagagagcttgcgcagccaatgtatgttaactctccctttgggatcagtatttctcataatggtaaccttacaaatattgaggaattgagagagactttagtgaacaaagacctaaggcatttaaatactgattctgatagtgaagttttattaaatgtatttgctcatgaattacagaaacaaggttcagtaaaaccaggatcaagagagatatttgctgcagttagatctttgcataaaagagtaagaggcgcttattcagtcgtaattatgatcaacggtattgggattgtaggatttagggatccatttggtataagacctctaattgttggttcaaaagagaatgacttaattggcaaggattacatgattgcatcggagagcaccg

SEQ ID NO: 238699 - DNA, 247 bp, Unknown
  Bacterial polypeptide expressing nucleotide sequence isolated from the Sargasso Sea
aatgaaaaaacatatcaagattctaaagaaaaaattaaagaactataatccaagattaaaggaagagtgcggagtttttggtattagcaatgcaaaagatgcttcagctctaactgcacttggactccatgctctacaacacagaggtcaagaaggctgtggtatagttacttttgatggggaaaaatattattctgagaaaagatttggcttagttggtgataatttcaataaagaaaaagtgctt

SEQ ID NO: 238700 - DNA, 865 bp, Unknown
  Bacterial polypeptide expressing nucleotide sequence isolated from the Sargasso Sea
aataaaaaattcatatgtgcttgcatctgaaacatgtgcattagatataattggagcaaagtttttaagagaagtagaaaatggagagattgtagttattgaaaataataaacttaaaagcttaaaaccatttccacaaaaaaaatcaagaccctgcatatttgagtatatttatttttcaaggccagacagtattttaaatggcaaaacaacttatgagtttagaaaaaaatttggtgaacagttggcaaatgaagataatattgaagcggatcttatagtgccagtaccagattcaggaaatgcagcggctttaggttatagtcaaaaaactaaaataaattttgatttaggtttaattagaaatcattacgttggtagaacttttattgaaccagcccaaaaaataagaagcctgggagtaaaattaaaattaaatgctaacaaaagttcaataaaagataaaaaaataattttaatagatgactcattagtgagaggaacaacctcacataaaatagttaaaatgctttacgatgcaggcgctaaagagatacatctaagaatagcaagtcctgaaattaaatatcctgatttttacggtgtagatatgcctacaagaaaggagcttcttgctgcaaataagtcagtaaaagaaatgtgtgaacatattggtgctgactctttaaaatttttatcgattgatggattgtataaagctatgggatttgaaaaaagaaataagacttaccctcaactaacagatcactactttacaggtgattatcctgttgaaattattgatgaattaggggacaataaaataacacaattgtcgctgttgagcacaggatcaaataattag

SEQ ID NO: 238701 - DNA, 646 bp, Unknown
  Bacterial polypeptide expressing nucleotide sequence isolated from the Sargasso Sea
tatagaaaaaactttggattacagttagcaaaagaggacgatatagatgcagatctagttgtacctgttccagactcaggtaacgcagctgcattaggatatgctgaagaaaaaagtctaaaatttgatttaggtttaattagaaaccattatgttggaaggacttttattgaaccatctcaacaaattagaagtttaggagttaagttaaaattaaatccgaatatttctgtgattaaagataaaagaataattctagttgatgactcacttgttagaggcactacatcatcaaaaatagtgaagatgttatatgacgctggagcaaaagaagttcatgtaagaatagcaagccccgaaattaaatttcctgatttttatggtgttgatacaccaacaaaaaaagaacttttagcagcaaataaatccacagctgaaatatgtgaatttattaaggcaaaatcactaaaattcttaagtttgaatggtttatatttaggaatgggatttgaaaaaagaaatgaaaattatcctcaattaactgatcaccacttcacaggtgaataccccgtgaagataattgatgagctaggtgaagataaagtaacccaactttccttattgagcactgcatcgaataattaat

SEQ ID NO: 238702 - DNA, 178 bp, Unknown
  Bacterial polypeptide expressing nucleotide sequence isolated from the Sargasso Sea
ttgaaaaaatttaaatcagataaattaagggaagagtgcggtgtttttggaatatcaaatcatcaagatgcttcggcaatggtagctctcggattacatgctttgcagcatagaggtcaagaaggttgtggaattgtatcgtatgacggaaaaaattatcattcggaaaaaagacaag

SEQ ID NO: 238703 - DNA, 198 bp, Unknown
  Bacterial polypeptide expressing nucleotide sequence isolated from the Sargasso Sea
attgaaaaaatttaaattagatagattaagagaagaatgtggggtatttggagtatcaaatcatgaagatgcatcaagattagttgcgttgggattacattcattacaacatcgaggacaagaaggttgcggaatagtttcttttgacggtaatagttttcactctgaaaaacgccaaggattagttggtgatcactt

SEQ ID NO: 238704 - DNA, 592 bp, Unknown
  Bacterial polypeptide expressing nucleotide sequence isolated from the Sargasso Sea
gatgctaaagaaaaaatttcagatatatgatccaaaattaaaagaggagtgtgctgtttttggaattagcgataattccgatgcatcaacacttacagctttaggattgcacgctcttcaacacaggggtcaggagggatgtggaatagtgtcttttgatggtaagaaatatcactcagaaaaaagatttggtttagttggagacaattttagtaaagaaaaagtaattaaaactttacctggaaaatttgctattggacataatagatattctacaacaggaggaacaacattaaggaatatacaacctttctttgcagatacaaatgcggggggaataggtgtttcgcataatggtaatctcacaaatgctattaaattaagaacaaaaatggtggaggaaggttcaattttttatactacatctgatacagaaacaatcgtcaaactaattgcaagatcaaaaagagcaaaaacagttgacagggtaattgatgcgctgtttcaaattcaaggaggatatgctttagttgttttaacacaaaacattttaataggagcaagagatccatttggaatcagacctttggtt

SEQ ID NO: 238705 - DNA, 627 bp, Unknown
  Bacterial polypeptide expressing nucleotide sequence isolated from the Sargasso Sea
tatgaagaaactaaagaaaaagttcaagatatatgatcctaaaataaaagaagaatgcgctgtattcggcattagtaattccaatgacgcctctacccttacagctttaggcctgcatgctcttcaacacagagggcaagaaggttgtggtattgtatcatttgatggtgagaagtatcattcagaaaaaagatttggattggttggtgataactttaatgatgaaaaagttttaaaaaagcttcctggtaaatatgctattggacataatagatattcaacaacggggggaactgctttaaggaatgttcaacctttttttgctgatacaaatgctggcggtattggagttgcacataatgggaatcttacaaatgcaataacattaagaaataaattagttcaagagggagctatattttatacaacatctgataccgaaacaattgtgcaattagttgcaaaatccaaaagagctaaaacaatagataaaataattgatgcaatatttcagatacaaggcggctatgcacttgtcatgatgacacaaaatactcttattggtgtaagagacccgtatggcatcagacctttagtaataggtaaattaaaaaactcttttgttct

SEQ ID NO: 238706 - DNA, 394 bp, Unknown
  Bacterial polypeptide expressing nucleotide sequence isolated from the Sargasso Sea
gatgaaactaaagaaaaagttcaagatatatgatcctaaaattaaagaggaatgtgctgtttttggtataagtaattctaatgatgcatctactctaactgctttaggtcttcatgctcttcaacatagaggacaagagggttgtggaattgtttcatacgatggtgaaaaatatcattctgaaaaaagatttggtttggtcggagataactttaatgatgaaaaagttattaaaaaacttcctggaaaacatgcaataggtcataatcgttactcaacaactggtggaactgctttaagaaatgttcagcctttttttgctgatacaaatgctggtggtataggagtagctcataatggcaacctcacaaatgctataactttaagaaataag

SEQ ID NO: 238707 - DNA, 739 bp, Unknown
  Bacterial polypeptide expressing nucleotide sequence isolated from the Sargasso Sea
gaaacaattgttcagttagtagcaaaatcaaaaagaaacacaacaattgacaaaataattgatgcattgtttcaaattcaaggagggtatgcattaataatgctcacccaaaacactttatttggagtaagagacccttttggaataagacctttggtaattggaaaattaaaaaattcctatgtttttgcatcagaaacttgtgcattagatattataggagcaaaatttgttagagatgtagaaaatggtgaagttgtttatatagaaaatgatgaattaaaaagcattaaacctttcccaattaaaaaaaccagaccttgtgtttttgaatatatttacttttcaaggccagacagtatccttaatggaaaatgtgcttatgaatatagaaaaaattttggtattgagcttgccaaagaaacaaatgtggaagcagatctagtagtccctgtcccagattctggaaatgctgctgcaattggatatagccaacatataggtaaaaaatttgaacttggaataatacgaaaccattatgttggaagaactttcattgagccagcacaaaaaataagaagtttaggagttaaattaaaattaaatgctaataaatcatcaattaaaaataaaaaaattattttagttgatgattcacttgttagaggaaccacttcacacaaaatagtgaaaatgctttatgatgctggagctaaagaagttcatgttagaattgctt

SEQ ID NO: 238708 - DNA, 838 bp, Unknown
  Bacterial polypeptide expressing nucleotide sequence isolated from the Sargasso Sea
ggaatagtaacatttgatggtgaaaagtattactcagaaaagagatttggcttagttggagataattttaacaaagaaaaaattcttaaaaatttaaaaggtaattatgcaataggtcataacagatatagtacaactggaagcaatactttaagaaatatccagcctttttttgctgatacaaatgcaggaggtataggtgtttcacataatgggaatttaactaattcaatatcattaagaaataaactggttgaggaaggtgctattttttatacaacatcagatactgaaacaattgttcaattaattgcaaaatctaaaagaataaaaacaattgataaaatagtagatgcaatttttcaaattcagggtggttatgcgctagttatgttgactcaaaactcattggttggcgtaagagatccttatggaataagaccattagtgattggtaaactaggaaataattatgtgttagcctctgaaacgtgtgctttagatattattggagcaaaatatttaagagatgttgagaacggtgaaattgttttaatagaaaataataaacttactagtatgaaaccttttccacttaagaaagtaagaccttgtgtttttgaatatatatatttttcaagaccagatagcattttagataataaaagtgcttacgaacatagaaaaaatatcggaaaggaacttgcaaaagaaaatgatatcgaggcagatatagttgtaccagtaccagactctggaaatgctgcagcccttggatttgcacagtatctcaaaattaattatgagcacggacttattaggaacccattatgtagga

SEQ ID NO: 238709 - DNA, 496 bp, Unknown
  Bacterial polypeptide expressing nucleotide sequence isolated from the Sargasso Sea
tatgttggaaggacttttattgaaccctctcaaaaaattagaagtttgggagttaagctaaaattgaatccaaatatctcagtaataaaaaataaaaggattattttggttgatgactcactagtaagaggtactacatcgtcaaaaatagtaaaaatgttatacgactctggagcaaaagaagttcacgttagaatagcaagtcccgaaattaagtttcccgatttttatggagttgatacaccaacaaaaaaagagcttttagcagctaacaaatctacagctgaaatatgtgaatttataaaggcaaaatcattaaaattcttaagtttaaatggtttatatttaggaatgggatttgaaaaaagaaatgaaaattaccctcaattaacagatcaccactttacaggtgaatatcccgtgaagataattgatgagcttggtgaagataaagtgacccaattgtcattattaagtactgcatcgaataattaaa

SEQ ID NO: 238710 - DNA, 161 bp, Unknown
  Bacterial polypeptide expressing nucleotide sequence isolated from the Sargasso Sea
attgaagatttataaccctaaattaaatgaagaatgtggagtatttggaattagcaatataaaagatgcatcagccttaactgctcttggattgcactctctccaacatagaggacaagaagggtgtggaatagtaacatttgatggagaaagatattatt

SEQ ID NO: 238711 - DNA, 124 bp, Unknown
  Bacterial polypeptide expressing nucleotide sequence isolated from the Sargasso Sea
ttgaaaaaatctaatttagataaacttaacgaagaatgtggtgtatttggaatttctaaccatgaggaggcctctgcactagtagctttagggcttcatgctctacaacatagagggcaagaag

SEQ ID NO: 238712 - DNA, 253 bp, Unknown
  Bacterial polypeptide expressing nucleotide sequence isolated from the Sargasso Sea
aatgtgtggaatagtagggatatattctgaaaatcatgtagcaagctcaatctatgattctttattaatgttgcaacatcgaggtcaagatgctgcaggaatgtcagtttgcgatgtaacaggaaaaattaatacccgaaaatctatgggatatgttcgagatacttttcatcaagggcatatgagtagactgttgggaaattatggtataggccatgttcgatacccaacagcaggaggaggcggcaaagag

SEQ ID NO: 238713 - DNA, 295 bp, Unknown
  Bacterial polypeptide expressing nucleotide sequence isolated from the Sargasso Sea
atgaaaaaacatatcaagattctaaagaaaaaattaaagaactataatccaagacttaaggaagaatgtggagtttttggtattagcaatgcaaaggatgcttcagctctaacagcacttggactacacgctctacaacacagaggtcaagaaggttgtggaatagttacttttgatggagaaaaatattattctgaaaaaagatttggtttggttggtgataatttcaataaagaaaaagtacttaataatcttaagggaaattatgcgattggccataacagatacagtacaa

SEQ ID NO: 238714 - DNA, 502 bp, Unknown
  Bacterial polypeptide expressing nucleotide sequence isolated from the Sargasso Sea
attagaaaccattatgttggaagaacatttatcgagccatcccaaagtattagacaatttggcgtaaaactaaaacataattctaatgtatcctacattaaaaataagaaaattattttaatcgatgattcaattgtgagaggaactacagctaaaaaaattattaaaatgatttacgatgcaggtgcgaaagaagtacatttgggtatagcatgtcctccgataacacatcctgatttttatggaattgatactcctgactataatgaacttatagcgtcaaaaaatagtattgaagaaattaacaatgctattggatctaaatcgttatttttcttatcactagaaggtacctatagatctatgggttatgagactagaaatcctgatcaacctcaatttactgatcattgttttacaggtgagtatcctacaagtttgattgatcgtgaaaaaggcaatatatctaaacagttctctcttttaacagaaaaaaactaaa

SEQ ID NO: 238715 - DNA, 136 bp, Unknown
  Bacterial polypeptide expressing nucleotide sequence isolated from the Sargasso Sea
atggccattgaatctccaaaggaagaatgcggggtttttgggatactaaatcctcaagaacaagttgcagaatctatttatttaggtctttttgctctacaacatagaggccaagaaagtgcaggtattctacctc

SEQ ID NO: 238716 - DNA, 529 bp, Unknown
  Bacterial polypeptide expressing nucleotide sequence isolated from the Sargasso Sea
atggataagcttaaagaagaatgtggagtttttggaatattcaatgctaatgaggcagcattacttacaactctgggccttcatgctttacaacatagaggaaaagaaggtgtagggattgttacttttgatggcacaaattttaatgcagtaagggaagaaggacttgtcggtaaaacttttaataagccagaaacgatagcaaagcttccaggaaaaaatgcagttggacatgtaagatattctactactggtgcttctgtttcaaaaaatattcaacccttatttgcagacttagctgctggcggtttcgcatgtgcacataatggaaatttagtaaatgcagaaaatataagaaatcagctaatcaaagatggggcaatctttcaatcaacatcagatacagaaactattttgcagcttgtagctagatcaagaaataaacttatcaaagataaattaattgatgcattgcatcaaattaaaggtgcatactcccttgttatacttactaataaaaagcttatcg

SEQ ID NO: 238717 - DNA, 478 bp, Unknown
  Bacterial polypeptide expressing nucleotide sequence isolated from the Sargasso Sea
aatgagtgaaataagagaagaatgcggtattttcggcatttataattcggatgatgcatctgcattaactgccttagggcttcacgcattacaacatagaggacaagagggttgtggaatagtctccttcgatggaaataatttccattctgaaaaaagacacggattagtaggtgataattttacaaataaagacgtattaaaaaaattacctggtaaattttcgattggccataatagatattctacaacaggagaaacttctttaagaaatatacaaccattttttgcagacctttatggtggaggaattagtgttgctcataatggaaacttaacgaatgcactgcagttaagagaaaatttagtaaaagatggagctatatttagaacaacttctgatacagaaacacttgtacagttggtggcgaagtctagtcggaaaaaaattatagataagattattgacgctatattt

SEQ ID NO: 238718 - DNA, 912 bp, Unknown
  Bacterial polypeptide expressing nucleotide sequence isolated from the Sargasso Sea
gtctgattccgaaatattactaaatatattcgctcatgaattgcaacttcacagcaaagatatttttactcctgacgatgtattttacgcagtagcaggggtacatagacgagttaaaggtgcctatgctgtcgtttctgttatatcagatagaggtatagttgcatttagagatccaatgggaattagaccactatgttatggaagtaaaaccgttaatggcaaaagagaaacaatgattgcttccgagtccgtagcattagattcagccggttttaagctagaaagagatattaaaccaggagagacaatatttgtagatattaatggtaaagtacattctaggttatgtactgataaaactggacatgcaccttgtattttcgaatttgtctattttgcaagaccagatactattattgatggtatatctgtatatgcagcaagaatgaagatgggtcagaaccttgcagataaaattataaaaaactggcatgaccatgacattgatgttgtgatgccaataccagatactagtcgaatatcagcattagaattatcaatttctctaaaagtcccctatagagaaggctttattaagaacagatatattggaagaacgtttattatgcccgagcaatctcaaagagcacaatctgtaaaacgtaaactaaatgcaatttcttctgaattcaacggaaaaaatgtactgttagttgacgattcgattgtaagaggaacaacatcaaaacagataattgacatggcaagagaagcaggtgctaagcaggtatatatggcgtctgccgcacctcctgttaagttcccaaatgtttatggtatagatatgccagctagtaatgaatttgctgctgatggaaggacagaagaagaaatagctaaattaatagg

SEQ ID NO: 238719 - DNA, 221 bp, Unknown
  Bacterial polypeptide expressing nucleotide sequence isolated from the Sargasso Sea
attgaagatatttgatccaaaattaaaagaagagtgtggagtatttggtatcagcaatgctaaagatgcttctgctttaactgctttaggtttacacgcattacaacatagaggtcaggaaggttgtggaatagttacttttgatggagaaaaatactattcagaaaaaagatttggattagttggagataatttcaacaaagaaaaggttctaaaaaatc

SEQ ID NO: 238720 - DNA, 652 bp, Unknown
  Bacterial polypeptide expressing nucleotide sequence isolated from the Sargasso Sea
atgaatatagaaaaaaaacttgggtatgaattagcaaaagagtctggtgatgcgggggaaattgttattcctgtccccgactcaggtgttcctgcagctatagggttttctcaatataaaaaaataaattttgaacttggacttattagaaatcattatgtaggcagaacttttattgagccttcgcaaaatattagaagcttaggtgtcaaactaaaacttagtgcgaacatgtcatcaataaaaaataaatcggtggttttaattgatgactctttagtaagaggaacaacttgtcacaaaattgttaaaatgctttataattctggtgcaaaagaagttcatgtaagaatagcatcaccggaaataaagttcccagacttttatgggattgatatgcctaccagaaaagaactattagcggctaataaaaatttaaaagagattagagattatattggtgcagactcaattaaatttttaactattgatggaatgtataatgccttatgtgatgctaatcgtaacaatgtttaccctcagtttacagatcattattttactggcgaatatccaattaaacctgtagatcaaataactgatgaaaaagtaactcaattatcatttttaagtggcaaatctaataactaat

SEQ ID NO: 238721 - DNA, 910 bp, Unknown
  Bacterial polypeptide expressing nucleotide sequence isolated from the Sargasso Sea
ggagttagagatccttatggaattagacctcttgttattggtaagcttggtaatagttatgtcttagcatcagaaacttgtgcatttgacattattggtgcaaaatttatgagagaagttgaaaatggtgagatagttttaattgaaaataataaaatgaaaagtattaaaccattccctgcaaaaaaagtaaggccttgtgtatttgagtatatttatttttcaagaccagatagtctaattggaggtaaaacagcatatgaacacagaaaaaatattggaagagagcttgcaaaagaaaatgatacagacgcagatatagtggttccagtaccagattctggaaatgctgctgctatgggttttgctcaagaattaaagatgaattttgaacatggattaattagaaatcattatgttggaagaactttcatcgaaccaagccagaaaattagaagcttgggtgtaaaattaaaattaaatgctaatcaaacaacaattaaaaataaaaaaataattcttattgatgactctcttgttcgaggaacaacatcttacaaaattgttaaaatgctttacgacgcaggtgcaaaagaagttcatgttaaaattgcatgccctgaaataagatatccagatttctatggtgtagacacaccaactaaaaaagagttgttagcagcaaataaaaataatgatgaaatatgtgaatatattggagctaaatctttaagatttttatcaatccaaggattatataaagctattggttttgaaaaaagaaatgaagcttatcctcaattaactgaccattattttactggtgaatatcctgtcaaattagtagatgaattaggagataataaaataactcaattatctttattaagtactggatcaaataattaaa

SEQ ID NO: 238722 - DNA, 289 bp, Unknown
  Bacterial polypeptide expressing nucleotide sequence isolated from the Sargasso Sea
atgtacatagaaaaccttaaagaagaatgtggcatatttggaatatttgggcaccctgatgctgcagcattaactgctcttggattacatgcacttcaacatagagggcaagaaagtgcaggaattgtttctttcgatggacaacactttaattctgaacgtcatttaggattagtaggagatcactttactaaatcttcagtaatagatagattgccaggaaattacgccttaggtcacgtgagatattctactactggaagtacttcattaaaaaacatccaaccgt

SEQ ID NO: 238723 - DNA, 820 bp, Unknown
  Bacterial polypeptide expressing nucleotide sequence isolated from the Sargasso Sea
tattattggtgcaaactttgtaagagaagttgcaaatggcgaaattgttttaattgaaaataatcaactgactagcatcaaaccttttcctcctaaaaaagtaagaccatgtgtttttgaatatatctactttgcaagacctgacagtttattagatgataaaactgcatatgaacatcgaaaaaatttaggaaaagaacttgcaaaagaaaatgatatcgatgctgatatcgtagtaccggttccagactctggtaatgcagcagcactaggattttctcaaaaacataaaatgaactttgaacatggtttgataagaaaccattacgtgggtcgaacttttattgaaccaagccaaaaaattagaagtttgggtgttaagcttaaattaaatgcaaaccaaacaactattaaaaataaaaaaattattttaattgatgactcgcttgtaagaggaactacttctcataaaatagtaaaaatgttatatgatgctggtgcaaaggaagttcatgttagaatagcttgtcctgaaattagatatcctgatttttatggcgtggatactccaactaaaaaagaattattggctgcaaataaaacgaatgatgaaatttgtgaatatattggtgctaaatccttaaaatttttgtctattgatggtttgtatagagctattggttttgataagcgaaatgacacctacccccaattaaccgatcattattttacaggagattatcctgttaaaccagttgatgagctaggggatagtaaaataacccaattatctttgttaagcactgcctcaaacaactag

SEQ ID NO: 238724 - DNA, 499 bp, Unknown
  Bacterial polypeptide expressing nucleotide sequence isolated from the Sargasso Sea
tcattatgttggaagaacttttattgaaccatcacaaaaaattcgaagtttaggagttaaactaaaattaaatgctaatttgtctgttatcaaaaataaaaaaattatattagtagacgattctttggttagaggtaccacatcatcaaaaattgtaaaaatgctttacgatgctggagcaaaggaaattcatgtgagaatagctagtccggagattaaatttccagatttctatggtgtagatactccaactaaaaaagagttattagctgcaaataattcagttgaaaagatttgtgaactgataggtgcgaaatcattaaaatttttagatattgatggtctttataaagccatgggatttgaaaaaagaaatgaactatatccccaacttactgatcaccactttacaggagactatccagttaaaataattgatgaattaggtgaagataaagtaacacaattgtctttattaagtacaggatcaaataattaa

SEQ ID NO: 238725 - DNA, 553 bp, Unknown
  Bacterial polypeptide expressing nucleotide sequence isolated from the Sargasso Sea
attgggatatagtcaaaaagcaaataaaaattttgaattgggattaattagaaatcactatgttggaagaacttttattgagccttctcaaaaaattagaagccttggtgttaaacttaaattaaatcctaataaaacatcaataaaagataaaaaagttattttggttgatgattcattggttagaggaacaacaagttataaaattgtaaaaatgctatatgatgcaggagctaaagaggttcatgtaagaatagctagtcctgaaattagatatcctgatttttatggagttgataccccaacaaaaaaagaacttttggcagcaaataaaaataatgatgagatatgcaaatatataggggcaaaaagtttgaagtatctatctatagatgggctttataaggcgattggatttgaaaatagaaataaaaattaccctcaattaactgatcattattttactggtgattatccagttaaaccaatagataatttaggtgatgataaaattacacaactttctttattaagtactggatcaaataattag

SEQ ID NO: 238726 - DNA, 568 bp, Unknown
  Bacterial polypeptide expressing nucleotide sequence isolated from the Sargasso Sea
gatgccaaagaaaaagttcaagatctataatcctaaaataaaggaagaatgtgctgtatttggtattagtaataaccaagatgcctctgctttaacagttctaggtcttcatgctcttcaacacagaggtcaggagggttgtggaattgtatcttttgatggaaaaaaatatcattcagaaaaaagatttggcttggttggagataattttagtaaagaaaaagttataaaaactttaccaggtaattatgcaataggtcataatagatattctacaactggaggtacaacattaagaaatattcaaccttttttcgctgatactaacgcaggaggtatcggtgtagcacacaatggtaacttaactaatgctattacattaagaaaaaaaatggtcgaggaaggatcaattttttatacaacatcggatactgaaaccattgttaaattaatagcaagatccaaaagagccaaaacaattgataaagttatagatgcactttttcaaattcaaggtggttatgcattggtagttatgacgcaaaatatattaatcggggtgagagat

SEQ ID NO: 238727 - DNA, 1421 bp, Unknown
  Bacterial polypeptide expressing nucleotide sequence isolated from the Sargasso Sea
atcaaaaccaagagacgaatgcggtgtttatggtgtttacaatcatgataaagcagcaaatcttactgcactaggtctacacgctcttcaacatagaggacaagattcagcgggaattgttacttcaaataatcaaaaattttttgctcatagaggaatgggtcaagtctctgatgttttttcaaataaagaaataataccaaaacttgtaggaagcatatcaataggtcataaccgttatggtacaactggagaatcagcacttaaaaatgttcaaccgcttttctctgaattagacttcggaggtattgcaattgcgcacaatgggaatttaacaaatacgaatcaaattaaagaacaactaattaagaatggagctatttttcagtcaacatctgatacagaggtaattcttcatttgatttcaactgccaaaggtactcttattgatagaattgtatacgcccttcagtctattacaggtgcattttctctggttatgctaactaatgattcccttattggagtaagggatccatttggaataagaccacttgttttaggcaaactcgatgattcatacatattaagttctgaaagttgcggactagacatcattggtgcaaatttaataagagatattgagcctggtgaaattttaattattaaaaataataaaattgactcaatcaaaccttttaaaaaaacatatctcaaaccatgtctttttgaatatatttatttttctagaccagatagtattcttgaaggaagaaatgtttatgatgttcgaaagagcataggacatcagttggcatctgaaaatcctaaagacaataaaataattgatgttgtaattccaattcctgactctgggaatgcttctgcattgggttattctgaaaagataaaaaaaccatttgaatttggaataataagaaatcactacactggaagaacttttattgaggattccatttcagtaagaaatttgtcagtaaagttaaagcataatccaaacattttatcattcaaagacaaaagtattgccttggttgacgactcaatagtcagaggtacgacttctgtaaagattgtagaaatgttaaggaattgtggtgtcaaagatgttcacatgagaattgcaagtcctccggttaaatatccatgcttctacgggatcgatacacctacaaaagaagaactgttagcatcaaaatacacaatagaccaaattaaaaaatatattggtgttgatagtcttaaatttgttacattagacggagtttacaaagcattaggctttcaaaatggaagagaaaaagaaaagccaatgtttactgatcattattttagtggtgattatcctgttaagctcattgatcaagacgctggcattaatccttctcaactttccttat

SEQ ID NO: 238728 - DNA, 552 bp, Unknown
  Bacterial polypeptide expressing nucleotide sequence isolated from the Sargasso Sea
gatgcaaaagaaaaagtacaagaactttagtccaaaattaaaagaagagtgtggtatttttggaataagtaataattacgatgcctctacactcacagctttaggtctacatgccttacaacaccgtggtcaagaaggttgtggaatagtttcttttgatggagaaaaatatcactctgaaaaaaaatttggacttgtaggtgataattttaataagcctgatatattaaaatctttaccaggaaatttttctattggtcacaatagatatagtactaccggagatacaacattaagaaatattcaacctttttttgcagatacaaattctggaggtataggagtagctcataatggaaatttaaccaatgctattactctaagaaaaaaattagtcgaagacggtgctattttttacactacatcagatactgaaactatagttcaattaatagcaaaatcaaaaagaggtaaaataatagataaagtcattgatgcattgtttcaaattcaaggaggttatgcattggtaatgcttacgcaaaactatat

SEQ ID NO: 238729 - DNA, 2623 bp, Unknown
  Bacterial polypeptide expressing nucleotide sequence isolated from the Sargasso Sea
ttgtttcttttaatcgtttctttaaataatgtttttgctcaagaagttgagacagatagcagtattgaagaaattgttgttacgggttcatatttaaaaacgagcccaacagatggcgcttcgcccatcgatgtaattgatagagatgctatcgaaaactttggagcaaatactgttgctgacttagttaggaatctagcctctaatagtggttcagaaaatgtaccagattcatttacatccggttcaacgcaaggaacatcaaatgtaaacttacgtggtttaggtctatcttcaacattggtattaattgatggaagaagacaaactgttgcaggagctacagctaatgatggtagtgtttttgtaaatacttcaattattccactaattgctattgagagagtagaagttttaaaagagggtgcagcatccgtatatggttctgatgctgtagctggtgttgtaaattatatattcagaagagattttactggtttagaagttagctacaatcatcaatttacagatattggcagtcaagaagatgatagggtgagcgttattttcggtgaaaaatttggaaatacaaatttagtaattgctgctgactttcttgaacgttcccctatgtctagtgcgcttaggccagagtcaactcaattaggtataagtggattaggaaatagttttttattatttggtccatctacagttgagtcaggcccatatgcaggaagttataccccatttactaatgttccagatgctaattgtgtggagaacaatggctttattatacctcaagcaagcggttctagatgtggtttcttgtttggtccaagatttaatatagtaaatgatgaagaacatcagaatgtttatggttctatcaaaagtgatttagctaatggaatggaatttaatgctgatgttttattttcaagtattaaagttaatgataatccgcagtcaccttcgtatcctgctctatcttatttaagtccatctaacgctatattacctggacagggcggtaatccattcggtgttccagtgttatggcttggaagacctcttggttctgcatttccatcaccaaatgcgccaagagatattgataatttgagattttctgtaggattgactggtaatcttgggggcttcgattgggatctaagatatacacacagtgagacagatcattatttttatcaacctgatacaagcacaacaagatttagcgcagctattgctggacaaggtggtacaagtggaacagaaagttggaatttatttgatccttctgctaactcggcttcattaagagaatggatttcgactgctcaagaaacatggtccgaaaatgaattagatgtagttgatcttgtattttcaggagagattggatccactgctgcaggtaatattgatatcgcttttggtcttcaatacagagaggaggcttttgatctaaaaagagataaaggctctatagttgaatttgattctgaaggaaacctagttaaaccagctgacttacttttcttaggcggcggatcggagtctaatgcaagcagagatgcaattgctctatttgctgaagtatccgttcctgtcacagataaactacaagttaatggtgcggtaagatatgaggagcttgaggatgatagtacatttgatcctaaaatttcattacgttacgaagtgtccgatagtttaatattaagggcatctgcaagtacatcatttagagaagcatcattatcacaactttattcaagtggtgttggtttacaaggaattcaggattttactacagatggaactccaaaagggggtacaacctttattcgtatagctcaagatggcaatccaaatttatctccagaagagtctgataacttgaatataggcgttatatggagaccacagtcaaatctagaaataaaattagattattggtctatcgattatagtgatgttattacaattgaaagtgctcaaggtattgttgctgcaacaccccttgctcctgcagttaagagaactattgatggaacattaataggtgtaacaacagggtattttaacgcatctaatgtgaaaacagacggtattgattttgaggttaactattctttagacacaagtttcggcgatatagagcttggtcttagcggctctcatatgaataaatatgaaatacctaatgctaaaggcgaaacccaggatgttgttggattattcaatcatgataattttgcaagatctttacctgaaaccaaaatgactctatctgctgttcttaatagtgggcctcataagttagctttatatggtaagcacatatcagattataaaactacgagagcattatctgatacagctaaatcaagaggatatacacaaaaaattgatgaatggttcagtgttgatcttcaatacaattacacctttgatatggatgataatcaaattcgtttgaccctaggtggcatcaatattcttgatgaggatccaccacttgtattcgatgcagctaactttagttatgattcacgtcagcatgatgcaagaggtagaataatgtatgttgggattaagctaattagataat

SEQ ID NO: 238730 - DNA, 1042 bp, Unknown
  Bacterial polypeptide expressing nucleotide sequence isolated from the Sargasso Sea
tcggatactgagacgatagtaaaattaatagctaaatcaaaaagagtaaagacgattgataaaattattgacgctatatttcaaatccaaggtggctatgctcttgttatgatgacacaagacacacttattggagttagagatccatacggtataagaccattagtaattggaaaacttaaaaattcgtatgtttttgcatctgaaacttgtgcttttgatataattggagcaaaatttgtaagagaagttgagaatggagaaatagtatacattgagaaagatgaacttaaaagtattaaaccttttccaccaaaaaaagctaggccatgtgtatttgaatatatttatttctcaagacctgacagtattttaaatggaaagactgcttatgaatatagaaaaaactttggaagacaattggctaaagaagataaattagaagcagatttagttgttccagtgcctgatggaggaagtgcagcagctttaggttatgctgaagaaaaggcaattaattttgatttaggtttgataagaagtcattatataggaaggacatttattgaaccatctcaaaaaattagaagtttaggtgtaaaattaaaactaaacgcaaatatttcagtaattaaaaataaaagaataattttggtagatgactctttagttaggggaacaactacctcaaaaattgtaaagatgctttacgactcaggagctaaggaaattcatgtacgtattgcaagtcctgaaataaaatacccagatttttatggtgttgatactccaacaaagaaagaattattagctgctaataaatctgtgaatgaaatatgtgaattcatacaagctaaatctttaagattcctaactttaaacggtttgtataaagctattggatttgaaaaaagaaatgatgattatccacaattaacagatcatcattttactggagattatccagtaaaaattattgatgagttaggcgaagacaaggtaactcaattatccttattgagtacagcttcaaataattaaa

SEQ ID NO: 238731 - DNA, 289 bp, Unknown
  Bacterial polypeptide expressing nucleotide sequence isolated from the Sargasso Sea
catgtgcggtattgttgggatagttgctcatgaagatgtgaatcaaaatctttatgatgccttaacagtgcttcagcatcgagggcaagatgccgctggtatcatgacctgtgcaggagacagagtgtcgttgcgaaaatccaatgggatggtctacgatgtttttcgccaagaccacatgcgtcggcttgtcggtcctatgggtattggccatgtgcgatatccaactgctggctgcaacagctccgctgagtctcaaccgttttatgttaattcgccgtatgggatt

SEQ ID NO: 238732 - DNA, 796 bp, Unknown
  Bacterial polypeptide expressing nucleotide sequence isolated from the Sargasso Sea
aatggttaaagaaaattgtggtgtagttggaatttacagtgaaggcgatgttaatgttatccctatggtaattgatgcattacgtgcattacaacaccgcggacaagaagcatggggattggcaattccgaataaggctccattaaaacgtcttggccttgtttctgcgtcctctaatgaattcaaaaaaatcactgaagaatatgcgtcccattctgcaattggtcatgttaggtattctaccgtcggtaaaagtgatcttgaaagcgcccaaccactaaaagtaaaggacttgtgtgttgcacataatggaacaatctcaaatgtcgaagaactttctaacttggtaggtggttgtacctttactcctcaaaatgctagtgacacattagttgcagcccaaaggcttgtttctctgattactgaaaatggtaaacttggaagtgcattatcaatattaaaaaatgaaatggtaggttctttctgtttcacatttttatctgatgatgatgctgtatttgctgcaagagatcctaaaggattccgtcctatggtgatgggtcataaagaagaaggtaacgtgcacattgtaacttctgaatcttctgcaatctctgcaattggggcaaaacttgtacgtgatgttgtacttggtgagttgatcaaaattagcaaagatggaatggaaactgaaatgttctctgatgataagaatcgtgcacattgttcatttgaatttacatattttgctcagccttcaagtaaaatggaaggaactaacatctatcttgcaaga

SEQ ID NO: 238733 - DNA, 674 bp, Unknown
  Bacterial polypeptide expressing nucleotide sequence isolated from the Sargasso Sea
aattataaaacagggcctccatcatgatgtggatgtggtgattccaatttctgacactagcagatcaaccgcacttcaggtggctcatcatcttggcgtcaagtatagagaaggcttcattaagaatagatacattgggcgaacattcattatgcctggacaggaaatcagaaaaaaatctgtaaaacagaaactcaatccaattgatctagaaatacgagataagaacgtattattgattgatgattcaattgtcagagggacaacttcaaagaaaataatacaaatggctcgaaacacaggcgctaataaagtattttttgcttcggcagcaccgccggttaagcatcccaatgtttatggaattgatatgccttcaacagccgagttattggcaagcaatagaacggaagaagagcttgccagatacattggcgcagattggttaatctaccaagagttggatgatctcatttcagcagttcagtttgatgaatctgatgccgaagcatttgatacgtcttgcttctctggtgaatacgtcactggagatgtaacatcaaattatcttgatttcattgagagcaaaagaaatgacgctgcaaaagcaaagaaagaaatagagcgcaagcagatcgaaattcaggatcagtcgtcaatgactgtcagctaaa

SEQ ID NO: 238734 - DNA, 531 bp, Unknown
  Bacterial polypeptide expressing nucleotide sequence isolated from the Sargasso Sea
gtttacctttcgaattaggaataattagaaatcattacgttggtcgaacatttattgagccacagcaatctactcgtgattttggcgttaaacttaagcataatataaaccgacatgctgtaagaggtaaaaaagttgtgctcattgacgactcgattgttcgcggtacgacttcggtgaaaatagtggagttaatgcggcaagcgggcgctcaggaggttcatatgaaaatagcttctcctccgataaaatatcctgacttttatggcatcgacacaccagaaaaggcgcaattgttagcatcactaaagtcagaggaagaaatggctgcatacataggagcggatagtttatcattcctttcagttgatggtctctacagagcaatggggtatgaaaaaggtagagatgatgccaatccggcatttaccgatcattgttttacaggtgactatcccacgccattagaagacaataatattgcttggttatttgaaacatcacagctttccgtccgcaatgagaactaac

SEQ ID NO: 238735 - DNA, 253 bp, Unknown
  Bacterial polypeptide expressing nucleotide sequence isolated from the Sargasso Sea
atgtgtggaatagttgggatttcggctgaaacaaacgtagctgctgaaatctatgattctcttttaatgcttcagcatagaggtcaagatgctgcaggaatatctgtttgcaacaatgatgatcaattaaactctagaaaatcaatgggatatgtccgagatgtttttcaacaaagacatatggataagcttgccggaaattatggaatagggcatgtaagatatccaacggctggtggtgctggtaaagaat

SEQ ID NO: 238736 - DNA, 852 bp, Unknown
  Bacterial polypeptide expressing nucleotide sequence isolated from the Sargasso Sea
atgttttcgcctcagaaacatgtgcattggatattattggagcaaaatttataagagaggttgaaaatggagaaatagtttgtattgaaaataatgaaataaaatctttaaaaccgttcccaccaaaaaaaataagaccttgtatttttgagtatatttatttttcaagaccagacagtttattaaatggtaagactgcttatgaatatagaaaaaaatttggtgagtatcttgcaaatgaggatgtagttgatgccgatgttgtcgttcctgttcccgactctggaaatgcagcagcattaggctatagccaaaaaaaagatattacatttgatttaggtttaattaggaatcattatgttggaagaacatttatagagcctggacaaaaaataagaagtttaggagtaaaattaaaactaaatgcaaacaaatcttcaattaaaaataaaaaaattgttttagtagatgactctttggtaagaggaacaacctctgaaaaaattgtaaaaatgttatatgatggaggagctaaggaagttcatatgaggatagcatgtcctgaaattaagtatcctgatttttacggtgtcgacatgcctacgaaaaaagaattgttagcagctaataagtcggttgatgaaatttgtaaatttattaacgcaaagtctcttaaatttttatctgttgatggtttatataatgctatgggttatgaaaaaagaaatgaaacttacccccaacttacagatcattattttacaggagattatcctgttaaaataattgatgaattaggaaatgataaagttacccaactatctcttttaagtacagcttcaaataattaat

SEQ ID NO: 238737 - DNA, 595 bp, Unknown
  Bacterial polypeptide expressing nucleotide sequence isolated from the Sargasso Sea
ctggcaattgaaaatagtgttgcagcagatgtagttgttcctatccctgactcaggtgtttctgctgcaataggtttttcacaaaaatcttctataccatttgaactaggcattataagaagccattatgtagggcgaacatttatagagccttcacaaacaatacgacaatttggggttaaacttaaacatagtgttaataaatcttgcatagaaaataaaaaagttattctaattgatgactcaatagttagagggactactgcgagcaaaattgtaaaaatggtttatgaagctggagcaaaagaagttcatttaggaatttcatgtccccctattatgcatcctgatttctatggaattgatacaccaaactataatgaattaattgcatcacagtctgatttgaatgaaatgactaaacttgttggagcaaaatctttgttttttttatctttggctggaacttataaagcgatgggatgtgacaaaagaaactctataacacctcaattcacagatcattgttttacaggagagtatccaatagacgtttctgaaattctagaaataaataaaaaaatcaatgaataaa

SEQ ID NO: 238738 - DNA, 1126 bp, Unknown
  Bacterial polypeptide expressing nucleotide sequence isolated from the Sargasso Sea
gagtttcacataactggcaatataacaaacgcaattactataagacaaaaaatggtagaggaaggagctattttttatactacctctgatactgagacaattgtaaaactaattgcaaaatctaacagaggaaaaattattgataaagttatagatgctatttttcaaattcaaggtggatactcacttgttatgttggctcaaaatatattaataggagtaagggatccacatggaataagacagcttgtaataggtaaattgaaaaattcatatgtgctagcatctgaaacatgttcattagatattataggtgcaaaatttgtaagagaagttgagaatggcgaagtagtttatattgagaatgatgaattaaaaagtgtgaaaccatttcccgaaagaagagccagaccatgtgtctttgaatatatttatttctcaagaccagatagtttactcaatggaaaaacagcatatgaatatagaaaaaatttaggtatagaacttgctaaagaaactcatgagaaagctgatgttgtagtacctgtaccagattctggaaatgcagcagcaattggttatagcaaacatgtagggatagattttgatctaggtcttataagaaatcattatgtgggtagaacttttattgagcctagtcagcaaattagaagtttaggtgttaaattaaaacttaatgctaatcaatcatctataaaaggtaaaaaaattattctaattgatgactctcttgtgagaggaacaacatgctataaaattgttagaatgctatatgacgcaggagccaaagaagtgcatgtaagaattgcctctcctgagataaaatatccagatttttacggtgttgatactcctacgaaaaaagaactattagctgctaataaaacaaacgatcaaatatgtgagtatataagtgcaaaatcacttaaatttttgtcagttgatggaatgtataaggctatcggttttgaaaaaagaaataatgcctatccgcaattaactgatcattattttacaggagattatccaataaaacctattgataaactcggagataataaaattactcaattatcattattaagtgtaacatctaataattaaa

SEQ ID NO: 238739 - DNA, 241 bp, Unknown
  Bacterial polypeptide expressing nucleotide sequence isolated from the Sargasso Sea
atgaaaaatcgactaaaattcttaaaaaaatttgaggtaagacaatctcattttcccagatttaatgaggagtgtggtgtttttggaataagtggaaccaaagatgctgctgctttaacagctcttggtttgcatgcgttgcaacatcgtggtcaagaaggttgcggaattgtcagttatgatggcaactcctatcactcagaaagaaaatttggattagttggagataattttacgaaga

SEQ ID NO: 238740 - DNA, 984 bp, Unknown
  Bacterial polypeptide expressing nucleotide sequence isolated from the Sargasso Sea
aatggttaaagaaaactgtggtgtagttgggatttacagtgaaggggatgtcaatgttattccgatggtaattgatgcattacgtgcattacaacatcgtggtcaagaagcttgggggttggcaattccaaacaaggctccattaaaacgattaggacttgtttctgcatcttctggtgaattcaaaaaaatctctgaagaatatgcttctcactctgcaattggacatgttaggtattctactgttggaaaaagtgatcttgaaagtgcgcaaccacttaaagtaaaagatctttgtgttgcacataatggaacaatttctaatgtcgaagaactttcaaatcttgttggtggatgtacctttactccacaaaatgctagtgacacacttgtagccgcacaaagattggtatcgctaattactgaaaatggaaaacttggaagtgcattatctattttaaaaaatgaaatggtcggttcattttgtttcacatttctttctgatgatgacgctgtatttgcagcaagagatcctaaaggattccgtcctatggttttaggtcataaggaagagggtaatgtccacattgttacttctgaatcatctgcaatttctgcaattggcgcaaaacttgtacgtgatgtcgttccaggtgaattaattaaaattagtaaagaaggtggttttgaaactgaaatgttttctgatgatacaaatcgtgcacactgttcattcgaatttacatattttgctcaaccatctagtaaaatggaggggacaaacatctatcttgcaagaaaacgaattggtcaattccttgcaaaaaaatatcctatacatgatgctgatgttgtaattcctgtacctgattctgcaagacctgctgcattaagatttgctcaagaactcgaaatacaatttgacgaaagattgttaaaggatcgctatagtaagaaaggtccgttaataagtttcattgaacc

SEQ ID NO: 238741 - DNA, 547 bp, Unknown
  Bacterial polypeptide expressing nucleotide sequence isolated from the Sargasso Sea
ggctttgcacaatttaaaagaatgaattttgaacttggtttgatcagaaatcactacgttggaagaacttttatcgaacccacacaaagtataagaagtcttggagtaaaattaaaattaagtgcaaacatgtcatctattaaaaataaatctgtaatattgattgatgattctctagtcagaggtacaacatgtcataaaatagtagaaatgttgtatagttcaggagcaaaagaggttcatgtaagaatagcatcaccagaaattagatttcctgatttttatggtatcgatatgccttctaaaaaagaattgttagcagctaataaaaatttagatgagatgtgtaaacacataaaagcagactcacttaaatttttaagtattaatggtatgtacaatgcattatgtggagaaagccggaaagatttatatcctcaatttactgaccattattttactggagattatccagtagaaccagtggacaattcaaataaaaaagtttcacaattgtctttcttaagtggtaaatccacaaattaat

SEQ ID NO: 238742 - DNA, 155 bp, Unknown
  Bacterial polypeptide expressing nucleotide sequence isolated from the Sargasso Sea
gatgcaaaagaaaaaattaaggatatataatccaaaacttaaagaagagtgtggagtttttggaattagtaatacaaaggatgcctcaacactaactgcacttggtttgcatgctttacaacacagaggtcaagagggttgtggaattgtttcat

SEQ ID NO: 238743 - DNA, 631 bp, Unknown
  Bacterial polypeptide expressing nucleotide sequence isolated from the Sargasso Sea
aggaactgaactagcaaaagaagatgatgttgagggagatgttgttgttcccgttccagattcgggtaatgcagcagctttaggttacagtcaaaaagcaaataaaaattttgaattaggtttaattagaaatcattatgttggaagaacttttattgagccttctcaaaaaattagaagtcttggtgttaagcttaaattaaatcctaataaaacatcaataaaaaataaaaaaattattttagttgatgattcattggttagaggaacaacaagctataaaattgtaaaaatgctatatgattcaggggctaaagaagttcatgtaagaatagcaagcccagaaattagatatcccgacttttatggggttgatacgcctacaaaaaaagaacttttggcagcaaataaaaataatgatgaaatttgtaaatatataggagcaaaaagtttgaaatacttatcaataaatggactttataaagcgatgggatttgaaagtagaaataaagactatcctcaattaacagatcattattttactggagattatccagttaaaccaatagataatttgggtgatgataaaattacacaactgtctttattaagtactggatcaaataattaa

SEQ ID NO: 238744 - DNA, 1120 bp, Unknown
  Bacterial polypeptide expressing nucleotide sequence isolated from the Sargasso Sea
atgtgtgggcttgtaggtatatatcataaaaaagatcaggtctcagccgatatatatgacggactggtccaggtccagcacagaggccaggatgcagcaggaatagcaacatgggacaaatcaaaaatgtatacacacaaagaacttggactagtttcagaggtatttaaaacaagtgactctttaataaacttgaatggcaatatgggcataggtcatgtccgctaccccaccgctggctgtgatgatgtaagtgaagctcaaccattttatactgccaacccaattaatataaccctagcacataatggaactcttacaaacagtgaaagaattaaagaagagctaatcaaaacacatttttgtcagtttaatactagctcagactctgaggttctgctcaaattatttgcctatgagctctacaaaacaaattacagaaaggtctctaacaaccatatttttagagcattaaaaaatgtctttaaaagatgttcaggcggttatgctgttataatgctgatagcaggcgttggcattgttgcctttagggaccctaaaggaatcaggcctatggctattggatcaaataaaaagtcttatatgatcgcatcagagagtagcgcccttacctctatgggatataggaccatagaagatgtactacctggtcaggccattattataaatgaagatggtttgatacataaaaaaagattaataagaaatgctgtgcaccagccatgcatatttgagtatgtatatttttcaaggccagactcaaccattgatgagatctccgtccataagtcaagactaaggatgggcgacttcctcggtgataaaattttaagagaatataaaaatattgaggtagatgttgttatccccgttccagatacaagcaggacatctgccatgcaggtggctcataagttaggtgtgaaatacagagaggggttcatgaaaaacagatatatcgggagaacctttatcatgccaggacaaaacacccgtaaaaaatctgttgcaagaaaactcaacccaattgaaatagaatttaaagataaaaatgtgctgctggttgatgactctatagtaaggggacacacctcaaaaa

SEQ ID NO: 238745 - DNA, 1284 bp, Unknown
  Bacterial polypeptide expressing nucleotide sequence isolated from the Sargasso Sea
atgaaaaatccagaatgaacctggttggaaatttaggtatcggtcatgttagatatccaacagccgggagcaacgatgttaatgattcacaaccattctatactagcaaccctgtaaatattacactagcccataatggaaccctaaccaatagcgattctataagagaagaactaataaaaacacatttctgtcagttcaacactaattctgactctgaggctctattgaatctttttgcatatgagttatacaaaacaaattttagaaaactaacaaaatcacatgttataagagccctaaaggcaatatatgaaaaatgttctggagggttctccgttgttgccattgtttcaggaattggtatagtagcgtttagggatccaaacggcattcgtccgttatctataggatataaaaaaaattctttcatgattgcgtcggaaagcagcgcactaactgccttagattttcactctattgaagatgtcaaaccagggcaagcagttattatagaactaaatggaactcttacaaaaagaaaaatagaaaaattgtctatgcacacaccctgtctctttgaatttgtctacttttcaaggcccgattcatcaatagacgatatttcagttcacaagtctagacttcgaatgggggattttttgggagaaaagattcttagagaatatccaaagctcaatgtagacgttgtaatacctatccccgacaccagtagaacttcggccatgcaggttgctttcaagcttggtgtaaaatatcgtgaggggttcatgaaaaacagatatattggaagaaccttcattatgccaggccaaaaccttcgtaaaagatctgtaaagcaaaaactcaatcccattgaaattgagtttaaggataaacgtgttttgcttgttgatgattcaatagttagaggacacacatcaaaaagtattgtaaaaatggtcaaaaaatgtggtgcaaaaaaagtttttctagcatctgcttctcctcctattcgccaccagaatgtttacggaattgatatgccagctacaacggaacttgttgggcacaaacgctctactgaagaaataaaaatgtatatcaaagctgatgaattaatatatcaagatctggaagacttgaaacgatcggcaaccataggaaacccaaaaataaccagttttgaagattcggtatttacggggaattatcgtgttgggaacataacaaaagatttcttaaaaaatctagaaaacactcgatcaaatctatcaaaataat

SEQ ID NO: 238746 - DNA, 928 bp, Unknown
  Bacterial polypeptide expressing nucleotide sequence isolated from the Sargasso Sea
tatgtgtggaattgttggaattgtttcttgtgatgatgtaaatcaacagatttatgacagtcttctgctacttcagcatagaggtcaagattcaaccggaatagctacaatggaagatactgtttttcatatacataaagctaaaggacaagtaaatactgcttatagaacaagagatatgaggaatttaataggaaaaattggcttagggcacgttaggtacgcaactaaaggttcagcagaaagtgttgaagaagcacaacctttctatgttaatgctccttatggaatagttttgattcataatggaaaccttaccaatacaagagacctagagaaacaattatttaatgtagataagcgccatactaattcttcaagtgatactgaaatgttgttaaacatattcgcaactgaattacaagaacagatccacaatcaagatctagagccagatataatttttaattcagttaaaaatttacataaaagaattcaaggttcatatgcttcaattgctttaatttcagggcatggtttattagcttttagagatcctttcggtataagacctttagtaattggaaaaagaatttctcttattactcaaaaggaagagtggatggtagctagtgagtctttagtattagaaaataatgattatcaagttgttagagatgttgaacctggtgaggcaatttttataacccataatggtgaatttttttcaaagcaatgctcagaaaacccaaagttatttccttgtgcttttgaatatgtttatttagctagaccagattcagtgatgaacggaatttcagtttatcaagcacgtttgaaaatgggtgattatttagctgaaacaattaagcaaacaatacagtctggggatgttgatgtagtaatgcctattcctgattcttcacgt

SEQ ID NO: 238747 - DNA, 650 bp, Unknown
  Bacterial polypeptide expressing nucleotide sequence isolated from the Sargasso Sea
tgaatatagaaagaattttggttacgagctagcaaaagaaagtgatgatgttggggacattgttgttccagttccagactcaggtgttcctgctgcaattggatacagtcaatataaaaaaataggctttgaacttggtttaattagaaaccattatgtgggaagaacttttattgagcccaaacaaaatattagaagttttggtgttaaattaaagttaagttctaataaatcttcaattaaaaataaatctatagttcttattgatgactctatagtgagaggtactacttgttcgaaaatagttaagatgctgtatgacggaggagctaaagaggtacatgttagaatatcctcacctccaataaaatttccagatttttatggtattgatatgccttcaaaaaaagagttgttggctgcaaataaaaatttaaaagaaatgtgcaaacatatacaggccgactctttaaaatttttaagtttagaaggtctatataaagctatatttagtcagagcagaaataatacgtatccacaattaaccgatcattattttactggagaataccctgttgatttagtagatcagcaaaaaaatgataaagttgctcaactatctcttctaagcggtaaatcaagtaattaat

SEQ ID NO: 238748 - DNA, 728 bp, Unknown
  Bacterial polypeptide expressing nucleotide sequence isolated from the Sargasso Sea
aaaaaaagtaaggccttgtatttttgagtatatttatttttcaagacccgatagtattttaagtggaaaaactgcttatgagtatagaaaaaattttggtgcgcaattagctaaagaggatacttttgatgctgatttggttgtgccggtgccagattctggaaatgctgcagcactaggatatgctcaagaaaaaaaagtaaaatttgatttaggtcttattaggaaccactatgtcggacgaacatttattgagccctctcagcaaattagaagccttggagtaaaattaaaattaaatgctaacttatcagtaattaaaaataaaaaaataatattaatcgatgactcgcttgttagaggtacaacctcttataaaatagttaagatgttatatgatgctggagctaaagaagtgcatgttagaattgctagtcctgaaatcaaatatcctgatttttatggtgtagatacccctacaaagaaagaacttttggctgctaataaaactgtagatgaaataaaagaatttataagtgcacaaagtttgaaatttttgagtttagatgggctgtataaagccatgggatttgaaaaaagaaatgataactatcctcaattaacagatcattattttactggtgattatccagtaaaaataattgatgaattaggtggggataaagttactcaattatcactcttaagcactggttcaaataactgat

SEQ ID NO: 238749 - DNA, 135 bp, Unknown
  Bacterial polypeptide expressing nucleotide sequence isolated from the Sargasso Sea
aatgcaaaagacaaggttcaagatatatgaccctaagttaaaagaggagtgtggtgtttttggaataagtaacacaaacgactctgctgcactaaccgcactaggacttcatgctcttcaacatagaggacaaga

SEQ ID NO: 238750 - DNA, 204 bp, Unknown
  Bacterial polypeptide expressing nucleotide sequence isolated from the Sargasso Sea
gatgaaaaagaatacaaagaagcaaaagaaaaagttcaagatatataacccgaagttaaaagaagagtgcggagtatttggtataagtaataatccagacgcttctactttaacagcgctaggtttacatgctctacaacacagaggtcaggaaggctgtgggatagtttcttttgatggaaaaaagtatcattctgaaaaaag

SEQ ID NO: 238751 - DNA, 544 bp, Unknown
  Bacterial polypeptide expressing nucleotide sequence isolated from the Sargasso Sea
agtcaacacgtaggaagaaagtttgacttaggtctaataagaaatcactacgttggtagaacatttattgagcctgttcaaaaaattagaagccttggagtaaagttaaaacttaatgcaaacaaatcaactattaaaaataaaaaaatagttcttattgatgattctctagtaagaggaacaacttgttataaaatagtaaaaatgctttatgatactggagctaaagaagtgcatgttcgaattgcttctccagaaattaaatttccagatttttatggtatagatacaccaacaaaaaaagagctcttagcagctaacaaaaataatgaggaaatctgtaaatatataaatgcaaaatctttaaaatttttgtctatagacggaatgtatagaggtatgggttttgaaaaaagaaataatacttatcctcagcttacagaccattattttacaggagattatcctgttaaaccaattgatgaccttggggatgataaaataactcaattatctttattgagtactgcatctaataactaat

SEQ ID NO: 238752 - DNA, 521 bp, Unknown
  Bacterial polypeptide expressing nucleotide sequence isolated from the Sargasso Sea
tataggttatgcaaatgagagtaaaataccatacactgaaggacttataagaaataggtatgttggcagaacatttatttccccaagtcaaaaattaagagaattaggcgtaaaaactaaatttaatgttttaaatgaagttgttagaggacaaaggataatacttatagatgattctatagtaagaggaacaactacttctagagtaatagaaatgataaaagatgcaggtgctaaagagattcatatgagagtttcttctccacctattacatctccatgtttttttggagttgatatggctacaacatcagaactaattgcaaataaattttcggtagagaaaattagaaaaatgcttggagcagattcattagggttcttaagtgtaaataatctaaaagagtctgtaaatgcttctgaaaataattattgcaaagcctgttttacaggagattaccccattcctgtgcaactagactttgataaatttcatcttgaaaaaataaggcaaaagtaaa

SEQ ID NO: 238753 - DNA, 1132 bp, Unknown
  Bacterial polypeptide expressing nucleotide sequence isolated from the Sargasso Sea
ggaattggagtgtcacataacggaaacttaactttttcaatatcattaagaaacaaactagttcaagaaggtgcaattttttacactacttctgatacagaaactatagtccagttaattgctaaatcaaaaagatcaaaaacaattgataaaataatagacgccatattccaaattcaaggtgggtatgcattagtaatgatgacacaaaaatctttaataggtgtaagagatccatatggaattagaccattaatgattggaaaattaggaaacagctatgtgctagcctccgaaacttgcgcattagatataattggcgcaaaatttataagagaaattgagaatggagaaatagtattaattgaaaatgatgaattaacaagtatcaaacccttctctcctaaaaaagtaagaccatgtgtatttgagtatatttatttttcaagaccagacagcttacttgataataaaacggcttatgaacacagaaagaatttaggaaaagaactagcaaaagaaaatgatataaaagcagatatagttgtacccgtaccagattcaggaaatgctgcagcacttggttttgctcaacatttgaaaatgaattttgaacatggtttaattagaaatcattatgttggaagaacttttattgagccaagtcaaaaaataagaagcttaggtgtaaaattaaaattaaatgcaaaccaaagcacaattaaaaataaaaaaattatcttaattgatgactcgttagttagaggaactacatcttataaaatcgttaaaatgttatatgatgcgggtgcaaaagaagttcatgtaagaatagcttgtcctgagataaagtatccagatttttatggcgtagatactccaactaaaaaagagttattagcagcaaataaaactaatgatgaaatttgtgaatatataggtgcaaaatcacttaaatttttatctattgatggattgtatagagcaattggatttgacaaaagaaatgaagcttatcctcaattaacagatcattattttactggggattacccagtaaaacccgttgatgaattgggtgataataaaataactcaactttctttattaagtacagcatctaataattaat

SEQ ID NO: 238754 - DNA, 238 bp, Unknown
  Bacterial polypeptide expressing nucleotide sequence isolated from the Sargasso Sea
gatgctaaagaaaaagttcaagagctataatcctaaattaaaagaagagtgcggtgtatttggaataagtaattttgaagatgcttctgcattaactgctctgggacttcacgcattgcaacacagaggtcaagaaggatgtggaattgtatcatatgatggaaataaatattattctgaaaaaagatttggtttagttggtgataattttaacaacgaaaaggtattaaaaaaatta

SEQ ID NO: 238755 - DNA, 1459 bp, Unknown
  Bacterial polypeptide expressing nucleotide sequence isolated from the Sargasso Sea
aatgtgtggaattgtaggcatatatcatgataatgaaaatgtgtgtggttctatatatgatggattaattcaagtacagcacagagggcaagatgctgttggaatttctacatgggataaaacaaaaatgtatttgcataaggatacgggtcttgtaacagaggtatttaaaactgataattctttatcccagcttaatggcaatattggaatagggcatgttagatatccaacggcaggatctgatgactccagtgaggcacaacctttttatacagcaaatcccgtaaatatcgcactggcgcataatggtacccttatcaacagtgaacaaataaaatcacaacttataaaaactcatttttgtcagtttaatacgacatccgattctgaagtattgctcaatctatttgcttacgagctatataaaacaaatttcaggaaattgaccaatgcgcatgtgtttaaggcactgaaagaggtttattctaagtgttccggaggctacgctgttaccatgttgatagcaggtgttgggatcgttgcattccgtgatccaaatggaataaggccactatcattaggaattaaaaaaggttcaattatggttgggtctgaaagcagtgcgctggcagccctaggctataatagcttatccaatgttgaaccgggtcaagcggttataattagcgaagatggtacgatatctaaaaagaagatcattagaaagtcagagcatacaccttgtctttttgagtttgtttatttttcaaggcccgattcaacaatagatgctatatcagtgcacaaaacaagactgagaatgggcgatctacttggtgaaaatattaaaaccaattttaaagacttaggcgttgatgttgtcatacctattccagatacaagcagaacctcagcgatgcaggtagcctataagctaggggtgaaataccgagaaggttttatgaaaaacagatacattggaaggactttcataatgccagggcaaaagcttagaaaaaagtctgtaaagcaaaagctaaaccctatagatattgaattcagggataagaatgtcctgctggttgatgactcgatcgtcagggggcatacatcaaaacaaataatccaaatggtaaagaactgtggtgcaaaaaaagttttttttgcatcagcttctccccctgtcaggttccaaaatgtttatggaattgatatgcctgcaaccaaagagctcatagcacacaaacgtactgtccgacaaataaagaggaaaatcggcgcagatgaacttatctatcaagacctggaagatctaactctcgctgcacatattggtaatcccaagatcaagaaatttgaagattctgtttttacaggggattattgcgctgggaatgtgaccgaagagtttttagagggtcttgaaaaagatagaatggatgctatgcgacaatag

SEQ ID NO: 238756 - DNA, 855 bp, Unknown
  Bacterial polypeptide expressing nucleotide sequence isolated from the Sargasso Sea
tattagcttcagaaacatgtgcgctcgatattttaggagcaaaatttataagggaaattgaacccggtgaagtcattgtaattactgaagatggtgaagagagtattaaaccttttccaaatgcacgattacgtccctgtatatttgagtatatctacttctctagacctgattcaatgttagatggaaaatctgtctatgaatgcagaaaatcatttggaagaaatttagctagagaatgcccctcaaaagctgatattgttgttccagttcctgattctggtgttccggcagctttaggttattctgaagaatcaaaaatacctttcgaattatcaataataagaaatcattatgtaggaagaacatttattctaccgacccaatcaaatagacaatcatctgtaaaacttaaacataatcctgatagagtctcaataaaaggcaaaagtgtagttttagtcgatgacagtgtagtgagaggaacaacttcaatcaaaattgttgaattaatgagagaagctggggcatcagagatacacatgagaatagcctgccctcctataaagtatcccgatttctacggaatagatactccagagactgaacaattgttagcttcaaataaaaatttagatgaaatgtgtaaatatataggcgctgactctcttggttttctatcattagatggtttatatcagtcgatgggatataaaaaaggaagaaataatgataatcctgaatatactgatcattgctttacaggagattatcctacaaatctaagcgattacaaaagtgagaagattcaagaacaattatccttattatcagaaaatgaaagccaaaattaat

SEQ ID NO: 238757 - DNA, 980 bp, Unknown
  Bacterial polypeptide expressing nucleotide sequence isolated from the Sargasso Sea
tgatgcgttgatgcaaatttcaggagcatgggcattagtagttttaactaacaaaaaattaattggcgctagagacccttttggaataagacccctcgtcttaggagaattagacggagcaaaaatgttagcttcagaaacatgtgcgcttgatattattggtgcaaaatttataagagaaattgaacctggtgaaatcattgtaattacagaagatggcgaggagagtattaaaccttttccaaacgcaagattgcgtccttgcatatttgagtacatatatttttctagacccgattccatgctagatggaaaatctgtttatgaatgtagaaaatcatttggaaaaactctagctaaggaatgtccagctaacgccgatattgttgttccagttcctgactcaggcgttccagcagctttaggatactcagaagaatcaaaaataccttttgaattatcaataataagaaatcattatgtaggaagaacatttattctaccaacacagtcaaacagacaatcatctgtaaaacttaaacataatcctgatagaggctcaataaaaggcaaaagcgtagttttagtcgatgatagtgtagtaaggggaacaacttcagtcaaaattgttgagttaatgagagaggctggtgcttcagagatacatatgagaatagcctgccctccgataaaatatccggatttttatggaatagatactccagagactgaacaactattggcttcaaataaaagtttagatgaaatgtgtaaatatattggcgccgactcgttaggtttcctttcattagacggtttatataaatcaatggggtataacaaaggaagaaataatgatagtccagaatatactgatcattgctttacaggagactaccctacaaatctaaatgattacaagagcgaaaagattcaagaacaactctctttactatctgaaaatgaaagccaaaattaat

SEQ ID NO: 238758 - DNA, 1216 bp, Unknown
  Bacterial polypeptide expressing nucleotide sequence isolated from the Sargasso Sea
ggtatttcggctatggcccacgttagatactcaacacgaggggaaacaatcttgaggaatgttcaaccgctttacgcagaccttgacacgggtggattcactgttggtcacaatggtaatcttaccaacactctactgctacgagagaaacttgtttcaagcggggcgattttccaatccacctcagatacggaggtcatactgcatttagtggcaaaaagcaagaaactaaaatttattgataaatttattgacgccattggttatttagagggggcctatgctctcgtggcattgactaataaaaagttgattggcgcaagagacccacttggaattagacccttggttcttggaaaacttgataaatcttatattttagcatctgaaacatgtgcgctggatattattggcgctgagtttattagagaagtagaaaatggtgaagttatagttattactgatgatggaatagagagccactatccttttccaaagcaaagtcctagaccttgcatatttgaatatatttattttgcgatgcctcacagcgtaattggtggtaggagtgtatacgaaatacgaaaacaacttggatacgaactttcaaaagaagacaatgtaaaagctgaaattgttgttccagttccagactctggcgttcccgcggcacttggatattcagaaggatcaaaaattaattttgattatggattaattcgtaatcattatgttggaaggacatttatagaaccaactcaaaatattagacaatttggtgtgagactaaaacattcggctaacgtgcaaatggttaaaaataagagtgtagtactcctagatgatagcttggttagaggaacaacctccgtaaaaatagtaacaatgctctttgagtcaggcgcgaaagaggtacatttaagaattgcatcaccacccataaaatacagcgattactatggaattgatactccagaaaaagatagcttgctcgcagcaaagcataatattgatgagatgagagactatattggttgcacatctctaaaatttttatcaattgagggtttatatagggcattaggatacagcgagagaaacaacgaaatgccgcaatttacagatcattgctttactggtgactacccaaccaaattgagtgatattgaacaaatcccagatcatacaagccaactatcactcttagaggaataaa

SEQ ID NO: 238759 - DNA, 1010 bp, Unknown
  Bacterial polypeptide expressing nucleotide sequence isolated from the Sargasso Sea
caaatctaaaagatcaaaaacaattgataaaataatagatgcaatatttcaaattcaaggaggttatgcattagttatgttgactcaaaactctttaattggtgttagagatccttatggaataagaccattaattattggaaaattaggtaagagctatgttttagcttctgagacttgtgctttagatattattggtgcaaaatttataagaaatgttgaaaacggtgaaattgttttaattgaaaatgaaaaactaaaaagtattaaacccttccctctaaaaaaagttagaccttgcgtatttgagtatatttatttttcaagacctgacagcatcatagataacaaaactgcttacgaacatagaaaaaacattggaaaagaacttgccaaagaaaacaatattgatgccgacatagttgttcctgttccagattcaggaaatgccgctgctctaggatttgcacaacacttaaaaatgaattttgaacacggcttaattagaaatcattatgtaggacgaacctttattgagcctagtcaaaaaattagaagtttaggagttaaattaaaactaaatgctaatcaatctactattaaaaataagaaaatcatcttaatagatgactcgttagttagaggaaccacttctcataaaattgttaaaatgttatatgactcaggagctaaagaagttcatgttagaattgcctgccctgaaataagatatccagatttttatggcgtggatactcctacaaaaaaagaattattggccgcaaacaaaacaaatgatcaaatttgcgaatatatcggtgctaaatctttaaaatttctttcacttaatggattatataaagcaattggatttgaaaaaagaaatgatacttatcctcaattaacagatcactattttactggtgactacccagttaaaccaattgatgaattaggtgacgataaaatcactcaactatcacttttaagtagtgcatcaaataattaaa

SEQ ID NO: 238760 - DNA, 783 bp, Unknown
  Bacterial polypeptide expressing nucleotide sequence isolated from the Sargasso Sea
catgtgcggcatcttcggaatttttggtcatcccaaagcctcagaactgacctttcttgggctccacgctttacagcatcgtggccaggaaagcgtcggcatcagtgtttccgacggagagaccatccatacccgacgcggacagggtttggtcagtgaagtattttcccgtgatgaatacctggaattcgaagggaatcaggccatcggacatgtccgttacacaacagccggagacagtggacttctgaacgcccagcctttggtgttccgctataccggcggtcaggttgcggttgctcacaatgggaacctggttaacgccaaacgtctccgtgatcagttggaacgccagggttcgatttttcagaccaacagcgataccgaagtggtatcccatctaatcgcacgtgccgggcctccaatcgatcatgcttttcaggatgccctgagagtaatcgatggagcttatgcacttttattgatgacggaaaagcagatgattgccgcacaggatccaagaggtttccggccgctttcccttggacagttcgaaaatgcatgggtcgtcagttctgaaacatgcgcgctcaacaccataggggcggattttgttcgtgagatcaagcccggggaactgctcgtttttgatgaaaagggtttgcatatgcgttcctttacgggggtgcaaacaaggaaaatctgctcctttgagtacatctattttgcccgtcctgacagtgaagtggacggaatcagcgttcattcggtacgaaaagaact

SEQ ID NO: 238761 - DNA, 915 bp, Unknown
  Bacterial polypeptide expressing nucleotide sequence isolated from the Sargasso Sea
gatgaaaaatcgattaaattttctaaaaaaattcagggtaaggcaatctcatgttcccagatttaatgaggagtgtggtgtttttggaataagtggaaccaaagatgctgcagccttaacagctcttggtttgcatgcgttgcaacatcgtggtcaagaaggttgcggaattgtaagttatgatggcaactcctatcactcagaaagaaaatttggattggttggcgataattttacgaagaaacactcattagataagttaaagggaaaaattgcgataggacacaatcgctattctacaacgggtggtgaaacaataaggaatatacaacctttttatgctgaccttcatggtggagctattagtattgctcataatggaaatctaaccaatgcactccttctaagagagcaaatggtacgtgaaggtgcaatatttcaaacaacatcagatactgaaacaattgttcaactagtagctcgttcaaaaaagaaagatatattaaataaaattattgatgctttaatgcaaattcaaggtggttatgctttatcaattattgctaacggtacattgattggcgcaagagatccattaggtattcgaccacttgttttaggtaaatttaaaaatgcatttatccttgcctctgaaacttgtgcgttagatattataggtgcaaaatttatccgtgaaattgaaaatggagaagttgtagttattaatgataataaagttgaaagtagaagaccatttccaaaaaaacaaatcaaaccatgtgtatttgaatatatttatttttcgcggccagatagtattttaaaaaataaaactgcctatgaatatagaaaaaatttaggtacatatttagcaaaagaaaccgatataaaacctgatgtagtcgtaccagttcc

SEQ ID NO: 238762 - DNA, 632 bp, Unknown
  Bacterial polypeptide expressing nucleotide sequence isolated from the Sargasso Sea
aatgtgtggaatagttgggatttcggctgaaacaaacgtagctgctgaaatctatgattctcttttgatgcttcagcatagaggtcaagatgctgctggcatatctgtttgcaatagtgatgatcaattaaactctagaaaatcaatgggatatgttcgcgatgtttttcagcaaaggcatatggacaaacttgctggaaattatggtattggacacgttagatatccaacagccggtggtgctggtaaagaatttgctcaacctatgtatgtaaattcaccatacggcattagtcttgcacacaatgggaatttgactaattcaaagcagttaggaactcaattatttcatgcagaaatgagacatctcaggacggacagtgactcggaggttttattaaatatatttgctcatgaacttggcaagcaaagagagatatatccatcagaaaaaaatatttttaaggcagtaactaaaactcatataagatgtgatggagcatatgcagttattgctcttataaatggatacggtctggttgcttttcgagacaataacggaataagacctctatctataggagtaagaaaaggaaaagaaagagaggaatacattgtttcttctgaagatg

SEQ ID NO: 238763 - DNA, 847 bp, Unknown
  Bacterial polypeptide expressing nucleotide sequence isolated from the Sargasso Sea
acattcttgcctcggaacctgtgcattagatattatcggggcaaactttgttcgcgaagtagaaaacggcgagattgttgtcataacagatgatggtattgagagcgtaaaaccgtttccaccagtgaaacccaggccatgtgttttcgaatacatttattttgctcggccggatagttcggttggtggacaaagcgtctatgaatgcagaaagtcatttggacgcgagctagctaaagaatctggtgtagaggctgatctagtaatccccgtcccagacagtggcgtgccggcagcaatcggatatgccgaggctgcgaatataccttttgaattaggtattatcaggaaccattatgttggaagaacattcatagaaccgcaacaatcaatacgcgctttttccgtaaaattaaaacataacgcaaaccggattcttgtaggtggcaaacgggtaatactaatcgatgactcaatcgttcgcggaacaacctctataaaaattgtccaaatgatgagagacgctggagcacttgaggttcatatgcgaattgcttcacctccaataaaatatcctgactattatggaattgatacaccggtacaagatcaacttttggcggcaaaccaaacgttggagaaaatgcgggagtttatcggggcggatagtctttcatttttaagtgtcaatggtctttataaagcaatgggtcacccagaaggacgcgaccccaataatccattatacaccgatcactgtttcaccggcgattatcctactcagctgcaagatcaacaaactgatgaacatatcaaacagctttcgcttttgtcagagaggcgttga

SEQ ID NO: 238764 - DNA, 829 bp, Unknown
  Bacterial polypeptide expressing nucleotide sequence isolated from the Sargasso Sea
ggcatcggtcatgtacgctatccaaccgcaggaacactcagttcatcggaggcacaacctttttatgtgaactctccatttggaatctgcttggctcacaatgggaatcttgttaacaatgaggagcttagaaagcatctaagtgaagtcgatcgaagacatttaaatactgaatctgatacagaggctttattgaatctatttgcccatgaactacaggaaaatttcgatgggagcctctctcctgaaattattttcaaagctgcaactcatctttttaataaatcctcaggcggttatgccgttgtttcaatgatcttgaatgagggactggttgccatgagagatccaaatggaatccgtcctctgatacttggaaagagagaagttgggcaaggtacagaatatatgattgcttctgaaagtgtggcattggacatcgctgattttgaaatcatgagagatgttaagcctggtgaagtgatttacatcaccaaggaaggagaattgttttctaagcaatgcgtgaaaccaaaatcatacacgccttgtatatttgagtttgtatattttgcaaggccagattcgatcattgatggcatgtcagtttataaatctagactcagaatgggtgagtatttggcacagagaatcataaaaaaaggtctgcatcacgatgtggatgtagtgattccaattcctgataccagtcgatcaactgcgctccaagtcgcccatcatctgggtgtcaaatacagagaaggctttattaagaatcgatacattggacgaacattcattatgcctggacaggaaatcaggaaaaaat

SEQ ID NO: 238765 - DNA, 674 bp, Unknown
  Bacterial polypeptide expressing nucleotide sequence isolated from the Sargasso Sea
cttgggaagaagtacacataaaacattcggggaacatcctcgagaagagtgcggagtcgttgcggtatactctcaaagagatcaaactagcaggctagcattcttcggactatatgcgttgcaacatcgcgggcaagagagcgcaggaattgcttcagctgatttaacagatatacacgtccacacagacatgggactagtgtcacaagtcttcagggaagatagtttgagccacttgcaaggtaatcttgtaatcggccatactcgatattctacgacaggaagcagcaatgcgtgtaacgctcagccaatcgtcgtaaatggcattcatgggaaactagcgctggctaacaacggcaacatcataaacgcggccaagctcaaatcccaacaacaattagaatggaattgtacctacacctctacgacagactccgaagtcttggcatatcaactagcgaactctcctggagtagattggcatgaccgagcgaagcaattcatgagatccgtccaaggagcgtattcgttggtagctgtaaccaaagatacaatgatcgcagcaagagaccctctaggaattcgccccatgtgtctaggcaagtgggatgatgggtggattatagcttcagaaacttgcgctcttgaccacttaggtgcagagtttataaaga

SEQ ID NO: 238766 - DNA, 559 bp, Unknown
  Bacterial polypeptide expressing nucleotide sequence isolated from the Sargasso Sea
actgctgccttcacttgctgcagatttaaataagccttatcgacagggttttgtaaaaaatagatatattggtaggacttttataatgcctctccaagaagagagaaaaaaatctgtcagaagaaagctaaatattcttgatttagagttcaaggacaagaatgtcctacttgttgatgattcaattgttagagggacaaccagcaaacagattatagaaatggtaagagaagctggggcaaaaaaagttttatttgcatctgcatgccctccagttaaatatcaaaatctttacggtattgatatggcagcaactaaagaattagttgctcatgataaaacagaaaatgagattgcagatgctattggagcagacgagcttatatatcagacccttgaagatcttattagctctgttcaagagggaaatcctgaaataaaagaatttgaaacttcaatctttacaggaaaatatccaacagatatcgatgacggataccttgaaaatctagaagaggaaagaagtgacattatcaaaatgtcaaaaaaagaaagctaa

SEQ ID NO: 238767 - DNA, 880 bp, Unknown
  Bacterial polypeptide expressing nucleotide sequence isolated from the Sargasso Sea
attgaaaaaatttaaatctgataaattaaatgaggaatgtggtatttttggagtatcaaaccatgaaaatgcgtctagggtagttgcgcttggattgcattctcttcaacacagaggtcaagagggttgtggaattgtgtcttttgatggtagaagctttcattcggaaaaaagacaaggtttagtgggtgatcactttacaaatattgaaactttaaaaaaattaccaggtaattccgctataggtcacaatagatattcaacaactggcgaaacatctctaagaaatatacaacctttttttgcagatttatatcatggtggtttaagtattgctcataatggaaatcttactaatgctatatctttaagaaatgatcttgtaaaaaatggttcaatttttagaactactagtgacactgaaacaattgttcaattaatcgcaaaatctaaaagagaaaaaatattagataaaattacagagactttatttaaaattcaaggaggttatgctcttgtgattttaactaataaaaaattaattggaatacgagatccgcttggaataagacccttagtgataggaaaattaggtaaatcatatatatttgcatcggaaacatgtgcattagatattgtagatgcaaaatttattcgagaagttgaaaatggagaaatagttgttatagaaaacgatcaaattaaaagttttaaaccatttaataaaattaaaactagaccatgtgtttttgaatatatttattttgctagacctgatagcattctaaaaggtgagtgtgcttatgagtaccgcaaaagattagggatagagctagcaaaagagtcagaaattgaggctgatatggttgtgcctgttcct

SEQ ID NO: 238768 - DNA, 678 bp, Unknown
  Bacterial polypeptide expressing nucleotide sequence isolated from the Sargasso Sea
tagctaggccagattcaattatgaatggaatttcagtgtataaagctcgtttgaaaatgggagattatttatctgaaacaataaaggaaataattacttctggagatgttgatgttgtaatgcctattcctgattcttcacgacctgctgctatgcaagttgcaagacagctaggtattgagtatagagagggcttttttaaaaatagatatgttggtagaacatttattatgcctggtcaacagaaacgtaagaaatccgtaagacaaaagttaaatgctatgagtgcagaatttaaaaataaaaatgtattaatagttgatgattcgatagtaagaggtactacttcaaaagaaattgtacagatggctaaagatgcaggagcaaataaagtttctttcacatcagctgctcctccagttcgttttcctcatgtttatggaattaatatgcctaatagagatgaattaatagctcatgatagaacaataagtgaaattgctgataaacttgaaattgataatctcgtttatcaaagtgttgaaaatttacgtaaatctataataagtgattctcttgttgaacatttggagatgagttgttttactggtacttatgtaacaggaacagtaaatcaagagtatttaaattgggtcgaaaatgaatatacttcttagg

SEQ ID NO: 238769 - DNA, 985 bp, Unknown
  Bacterial polypeptide expressing nucleotide sequence isolated from the Sargasso Sea
catgagagatccaaatggaattcgtcctctattactcggaaagagagaagtggggcaaggtacagaatatatgatgcttctgaaagtgtggcattggacatcgctgattttgaaatcatgagagatgttaagcctggtgaagtaatttacatcaccaaggaaggagaattgttttctaagcaatgcgtgaaaccaaaatcatacacgccttgtatatttgagtttgtatattttgcaaggccagattcgatcattgatggcatgtcagtttataaatctagactcagaatgggtgagtatttggcacagagaatcataaaaaaaggtctgcatcacgatgtggatgtagtgattccaattcctgataccagtcgatcaactgcgctccaagttgcccaccatctcggtgttaaatacagagaaggcttcattaagaatagatacattggacgaacattcatcatgcctggacaagaaatcaggaaaaaatccgtgaaacagaaactcaatccaattgatctggaaattcgagataaaaatgtattattgattgatgactcaatagtcagagggacaacttcaaagaagataatacaaatggctcgaaatgcgggtgcaaacaaagtattttttgcctccgcagcgccaccggttaagtatccaaatgtttatggcattgatatgccttcaactgcagagcttttggcaagcaacagaacagaggaggagcttgcaagatatatcggtgcagattggttgatctatcaagaccttgatgatctcatttcagcggttcagtttgatgaatcagatgcagaggcttttgatacctcttgtttctctggagagtatgtcactggagatgtgacaccaaattatctggatttcattgagaacaagagaaatgatgctgcaaaggcaaaaaaagagatagagagaaaacagattgaaatacaagatcagtctttaatgactgtcagctaaa

SEQ ID NO: 238770 - DNA, 664 bp, Unknown
  Bacterial polypeptide expressing nucleotide sequence isolated from the Sargasso Sea
tccgttatgaacggcatatcggtgtacgagtcgcgtttacggatgggtgatcgtctggctcaaaccattgctgaaacattgccggctggtgatattgatgttgtgatgccgattcctgattcagcgagaccttcggcgatgcaggtggccaagcaattgggtcttgagtatcgagaagggttttacaagaaccgctatgtcggccgcaccttcatcatgccgggtcaagctgaaaggaagaaatcagtgcggcagaagctcaatgctctcggaactgaattcgccgggaagaatgttctgattgtcgacgattcgattgttcgtggaacaacatcccgcgagattgttcagatggcacgcagcgctggtgccaacaaggtgacgttcacctcggctgctccaccggttcgctatcccaatgtttatgggatcaacatgccaacccgggcggaactccttgcccacggccgaaccagtgagcagatctcagatgttctcggagctgatcatgttgtttatcagactgttgagaacctgctggaaagcattgtggagaatactgagatcaaggatctcgagatgtcttgttttgacggccactatgtgaccggtggaatcgacgaagattatttccagtggttggagcagaattgccgctcctgat

SEQ ID NO: 238771 - DNA, 317 bp, Unknown
  Bacterial polypeptide expressing nucleotide sequence isolated from the Sargasso Sea
aatgtgtgggatagttggaatttctgctgaaactaacgtagctgcagaaatatatgacgctcttttaatgcttcagcacagaggtcaagatgctgctggcattgctgtatgcagttctgaagatcagttaaattcaagaaaatccatgggttatgtacgtgatgtttttcaacaaaggcacatggaaaagcttgtaggtaactatggtattggtcatgttagatatcctactgcaggtggtgctggtaaagagtttgctcaaccaatgtatgttaactctccgtacggtatcagtttagctcacaatggaaatctaa

SEQ ID NO: 238772 - DNA, 790 bp, Unknown
  Bacterial polypeptide expressing nucleotide sequence isolated from the Sargasso Sea
gatgctaaagaaaaggttcaagaactttaatccaaaaattaaagaggaatgtggagtatttggtataaccaataatgatgatgctgcagcccttactgctttagggttgcatgcgcttcaacatagaggacaagaaggatgtggaatagtatcttttgatggaacaaaatatcattctgaaaaaagatttgggttagttggtgataattttaataaggaaaaagttttaaaaaaattaaatggtaactatgcacttggtcacaatagatatagtacaactggtggaacaacattaagaaatatacagcctttttacgcagatacaaatgctggtggaataagcatttctcacaatggaaaccttacaaatgcaattacactaagatcaaaattagtaaaagatggagcaatcttttatactacatctgatacagaaacaattgttcaattaattgctaaatcaaaaaggcaaaaaacaattgataagataatcgatgccttatttcagatacaaggtggttatgcacttgtaatgttgactcaaaaaacacttataggtgtaagagatccttttggaattagacccttagttataggaaaaattaaaaattcttatgtattagcatctgaaacttgtgctctagatattattggagctaaatacatcagagatgtggaaaatggtgaaatagtatttatagaaaatgacaaattagaaagtattaaacctttccctaaaaaaaaagaaagaccatgtattttgaatatatatatttctctagaccagaca

SEQ ID NO: 238773 - DNA, 946 bp, Unknown
  Bacterial polypeptide expressing nucleotide sequence isolated from the Sargasso Sea
atgtgtggaatagttggaatttcagctgaatctaacgtagctgctgaaatatacgatgctcttttaatgcttcagcatagaggtcaagatgctgcaggcatcactgtatgcaatagtgacgataaattaagcacaagaaaatcaaaaggatatgtaagagatgtttttgctcaaagacatatggaaaagctaattggcgactatggaataggacacgttagatacccaacagcaggaggtgcaggtaaggaattttctcaaccatattatgtcaattcaccatatggtattagtcttgcgcacaatggcaatttaacaaattcaaaacagcttgcaaatgaattgtttcatgctgaaatgagacatcttaaaactgactcagactctgaggttttactaaatatttttgctcacgaattagcaaaacagagagaaatatatccatctgcagaaaatatatttaaagctgtttcaaagacgcatctaagatgtgatggtgcatatgctgttcttgcattaatagctgggcatggcttagtagcctttagagataataatggaattagacctttatcaattggaataagaaaaggtgagacaagagatgaatatgtaatttcatctgaagacgcactattttcatcacatggttttaaaaaattaagagatgttgagcctggcgaagcaatttttattgataaaaatggagaactcttctcacagcaatgtgcagataagccaaaaaaaagaccatgcattttcgaatatgtttatttctctagaccagattctaaaattgatgaaatatcagtctataaggcaagaacgagaatgggtacaaagctagcttctcaaattaaaaactcaaaaccagatcatgatattgatgttgttattccaattccagatagctcagtaactgcagctcatcaattagcagttgact

SEQ ID NO: 238774 - DNA, 874 bp, Unknown
  Bacterial polypeptide expressing nucleotide sequence isolated from the Sargasso Sea
acaacctttttatgtgaactctccatttggaatctgcttggctcacaatgggaatcttgttaacaatgagcagcttagaaagcatctaagtgaagtcgatcgaagacatttaaatactgaatcagacacagaggctttattgaatctatttgcccatgaactacaggaaaatttcgatgggagcctctctcctgaaattattttcaaagctgcaactcatctttttaataaatcctcaggcggttatgccgttgtttcaatgatcttgaatgagggactggttgccatgagagatccaaatggaattcgtcctctgatacttggaaagagagaagttgggcaaggtacagaatatatgattgcttctgaaagtgtggcattggacatcgctgattttgaaatcatgagagatgttaagcctggtgaagtgatttacatcaccaaggaaggagaattgttttctaagcaatgcgtgaaaccaaaatcatacaccccttgtatatttgagtttgtatattttgcaaggccagattcgatcattgatggcatgtcagtttataaatctagactcagaatgggtgagtatttggcacagagaatcataaaaaaaggtctgcatcacgatgtggatgtagtgattccaattcctgataccagtcgatcaactgcgctccaagtcgcccatcatctgggtgtcaaatacagagaaggcttcattaagaatcgatatattggacgaacattcattatgcctggacaggaaatcaggaaaaaatccgtgaaacagaaactcaatccaattgatctggaaattcgagataaaaatgtattattgattgatgactcaatagtcagagggacaacttcaaagaag

SEQ ID NO: 238775 - DNA, 503 bp, Unknown
  Bacterial polypeptide expressing nucleotide sequence isolated from the Sargasso Sea
gatgaaaaatcggcaaaatttcctaaaaaaattcgaggtaaggcaatctcatgttcccagatttaatgaggagtgtggtgtttttggaataagtggaaccaaggatgctgctgccttaacagctcttggtttgcatgcgttgcaacatcgtggtcaagaaggttgtggaattgtaagttatgatggcagctcctatcactcagaaagaaaatttggattggttggcgataattttacaaagaaacactcattagacaagttaaagggaaaaattgcgataggacacaatcgctattcaacaacgggtggtgaaacaataaggaatatacaacctttttatgctgacctgcatggtggagctattagtattgctcataatggtaatttaactaatgcacttcttttaagagagcaaatggtacgtgaaggtgcaatatttcaaacaacatcagataccgaaacaattgttcaacttgtagctcgttcaaaaaagaaagatattt

SEQ ID NO: 238776 - DNA, 1003 bp, Unknown
  Bacterial polypeptide expressing nucleotide sequence isolated from the Sargasso Sea
aactcaaaatctttagctaaagagttattttttgctgaaatgagacacttaaacactgactcagattcggaagtccttttaaatatactggctcatgagatagctaagcagaaagcaattaacccaacacctgaacatttttttaaggctgtttcaaaaacccacataagatgtgatggcgcatacgcagttgttgccttgattactggagcaggaattttggcttttagagatccaaatggtattaggccattggtaatcggtgagcgtgaaggtaagaacagaaaagaatatgttattgcatcagaaaatgctctatttgcatctttaggctttaaaactcttagagatgttgagccaggagaggcggtctttatagataaaaaaggaatcatttcctcaaaacagtgctctctatcagctaagtcacaaccatgcatttttgagtacgtttatttatcaagacctgactcaaccttagatcaaatttctgtttatcaatcaagaatgagaatggggaaatatttagcaaagaatattttggacaatatgtcagaccatgacatagatgttgtgattcctattccagatagctcaacaacagctgccttgcaactagcaaacgaactgaatattccctatcgggagggatttgtaaaaaatagatacattggtaggacattcataatgccttatcaagaagaacgtaaaaaatctgttagacgcaaattaaatatcttggagttagagtttttaaataagaatgttctcttggttgacgactcaatagtaagaggaaccacaagcaagaaaattattgagatggccaaaatggcaggtgcaaaaaaagtgtatttcgcctctgctgcgccacaatcagatatcaaaatctttatggaatcgatatggctgctactgaggagttggttgctcattaataaactgaagaagaagtttgtgttgagatcggagccgataagattttttatcaacattagatgat

SEQ ID NO: 238777 - DNA, 922 bp, Unknown
  Bacterial polypeptide expressing nucleotide sequence isolated from the Sargasso Sea
acccctaacaattggagtaagaaagggtaaaaatagatatgaatatatcatttcatcagaaactgcacttttctcagcacttggctataagtttttaagagatgttgaacctggagaagcagtttttattgataactcaggaaaaatattctctcaacaatgttcttcagaaatttctaaaaaaccttgtatatttgagtatgtatatcttgctagacctgattcaataattgatgaaatttctgtttataaatcgaggatgagaatgggtttaaagttagcagataggataaggaatcttaatcttgttgatgaaattgatgttgtcattccaattcctgacagctctacaactgcggcattgcaacttgcagcagatttaaaaaaaccttatcgccaaggttttgttaaaaacagatatataggtagaactttcataatgcctttgcaagaagaaagaaaaaaatcagttagaagaaaacttaatattcttgatttagagtttaaggataaaaatgttttacttgtagacgactcaattgttagaggaactactagtaggcagattatcgagatggtaagagaggcaggagcaaagaaagtcttgtttgcatccgctgctcctcctgttaagtatcaaaatctatatggaattgatatggcagcaacaaaagaattgattgcgcataataaaacagaggctgaagttgcagatgcaattggtgctgatgagcttatttatcaatctcttgatgaccttataagttcagttcaagaagggaatccagatatcaaagattttgagacttccatctttacaggtaattatcctactcaaattgaagatggatatcttgaaaatctcgaagaagaaagaagtgacattatcaaaatgtctaaacaagaaaaaaataaaacctaa

SEQ ID NO: 238778 - DNA, 589 bp, Unknown
  Bacterial polypeptide expressing nucleotide sequence isolated from the Sargasso Sea
caagagataccagatgaagatattgatgtggttatacctatacctgagagctctattacaagtggaacaaaagttgctcgtgttttaaataaagacttagcttatggttttgtgaagaatagatatgtaggcagaacttttatcatgcctgaacaaattcttcgcagagaatctgttcgaagaaaattaaatcctatatcagatgaatttaaagataagaaagttcttctagttgatgattcaattgtgagaggcacaacaatgaagcaaatagtgtcaatgtgttataaagctggagctaaaaaagtatcagttgcttcggctgcagcagaagtaaaatttccaaacgtctatggaattgatatggcagcaaaaaaagacttaatcgcaagctcaagaactaataacgaaataaaagaatttcttggttgtgatcatctagtttatcaatcacttgaggatatggttcaatctgtgattgagcttaatcccaatattaacagcgtagaaaaatcaatttttgacggcaactatcctacgaatatttctacggaatatttagaaaatctcgagaaaatcagaggataga

SEQ ID NO: 238779 - DNA, 562 bp, Unknown
  Bacterial polypeptide expressing nucleotide sequence isolated from the Sargasso Sea
gatgctaaagaaaaagttcaagaattataatccaaaacttaaggaagagtgcggagtatttgggataagcaacaataatgatgcttctgcacttacggctctaggattgcatgctcttcaacacagaggtcaagaaggttgcggaattgtaacttttgatggtgatcaatatcattctgaaaaaagatttggtttagtgggagacaatttcaataaagaaaaagtattaaaaaatttaataggaaactatgcaattggacacaatagatatagtaccactggcggaactacattgagaaatattcaaccattctttgcagacacaaatgctggtggaataaccatatctcataatggtaatttaactaatgcaataactttaaggtcaaaactggttagtgagggagctatatttcacaccacatctgatactgaaactatagttcaattaattgccaaatcaaaaagaaacaaaactttagataaaattatagatgcattgtttcaaattcaaggaggttactcattagtaatgctaacacaaaagaaattaataggagtt

SEQ ID NO: 238780 - DNA, 667 bp, Unknown
  Bacterial polypeptide expressing nucleotide sequence isolated from the Sargasso Sea
ttggtgaatgaactacccgatctagattttaatgacgatcgcttgcgtgaggaatgcggtttattcggcgtatatggccatcccgacgcagctgctctaacagcccttggcctgcatgcccttcagcacagaggccaagaatcggtaggaatagtaagctacgatggagagcgctttaacgccgaacgtcggctcggtctagtaagtgaaaattttaccaaagcttctgtgctagaacagttaattggcagaaattcaattggacacgttcgctactctactactggagaaacaaccctacgcaatgtacagccactttttgcggatttagctgggggaggattagcggttgctcacaatgggaatttaacaaacgctgtcacacttagagatgaattggtgaacagcggatgtattttccaaactacctctgacacagaaactattttgcatttaatcgctcgctcgaagcgcggcaataccctagcccggtttattgacgctcttttcaaaattgagggcgcttacgctcttgttgtactcaccaataagaaattgattggcgtgagagatccgttaggcatacgccctcttgtaattggagaattagacggaagctacattcttgcctcggaaacctgtgcattggatattatcggggcaaact

SEQ ID NO: 238781 - DNA, 702 bp, Unknown
  Bacterial polypeptide expressing nucleotide sequence isolated from the Sargasso Sea
attgaaaaaatttaaattagataaattaaaagaagaatgcggaatttttggcatatcaaaccatgaagatgcatcagcaatggttgctttaggattacatgcattgcaacatagaggacaagagggatgcggtattgtatcatttgatggaaaaaattatcactctgaaaaaaggcaaggactagtaggagatcactttacagatccggaagctttaaaaaaattaccaggcacatttgctattggacataatcggtattcaacaacaggtgagacctcattaaggaatatacagccattttttgcggatttgcatatgggtggattaagtgttgctcataatggaaatttaacgaatgctataattttaagagaatctcttgttaaagatggagcaatatttagaacaactagtgacactgaaacaatagttcaattaatagcaaagtctaaaagagaaaaatttttagataagcttatagatgctttatttcaaattcaaggtggttactctcttattttaatgactaataaaaaacttgtgggagtaagagatccatttgggataaggccgcttgtaattggtaaattaaaaaattcatttattttagcctctgagacttgcgctttagatattattggagccaattttatcagagaagttgaaaatggtgaaatagttataattgaaaacgaagaata

SEQ ID NO: 238782 - DNA, 874 bp, Unknown
  Bacterial polypeptide expressing nucleotide sequence isolated from the Sargasso Sea
cgctatcccacgcagggtagctctggcacggcgttggcccagcccttttatgtgaactccccttacgggatagcactggcgcataacggcaatctcacgaattccgcgtttttgtccgaagaattattccagtccgatcttcgccacctcaatacggactcagattcagaagtgctgctcaatgtatttgcccatgagctgcatcgcctgggcaagctccagcccaccgccggcgacatttttgatgccatcaaggtggtccataaacgctgcgaaggtggttatgccgcagtggcgctgatttccggctttggtctggtggccttccgtgaccctaacggtattcggccgctggtggtcgggcagcgtgaaggtaagggcggcagtactgagtacatggtcgcctcggagagtgtggcgctggatgtattgggttttgagctgttgggtgatgtgctgccgggggaagccatttgtgtcacgcagacgggtgagcttcatcgagagcaatgtgccgattcgccaaagctgaccccctgtatttttgagcacgtctattttgcgcggccggattctctcatcgatagtatctcggtctacaagacacgcatgcgtcagggcgcggcgctggcaaaaaagattcttcgcgagcgacccgagaacgacattgatgttgtcattcccattccggataccagtcgcgtcgccgggcagtcgttggcctacgaattaggcgtcaagttccgtgaaggattcatgaaaaaccgctacatcgggcgcactttcatcatgccggggcaaagtgagcggaaaaaatctgtgagacagaagctgaaccctgtgccgctggaatttcaggataaaaccgtcctgc

SEQ ID NO: 238783 - DNA, 766 bp, Unknown
  Bacterial polypeptide expressing nucleotide sequence isolated from the Sargasso Sea
cattctgaaaaaagacaaggtttagttggtgatcattttactaaaggcgataccattaaaaaattacctggtagctttgctattggtcataatagatattcaacgactggagaaacgtccttaagaaatattcaaccgttttttgcagatctttttggaggaggattaagtatttcccataatggaaatctcacaaatgcaatatctttaagagaaagtttagtaaaagatggtgcaatatttagaactactagtgataccgaaacaatagtacagctaatagctaaatctaaaagaaataaaattattgataaaattattgaggcattgtttcagatacaaggagcctattctctaattttattaactaacaaaaaattaattggtgttagagacccatatggtattaggccattagttattgggaaactaaaagattcttatattttagcatcagaaacctgtgctttagatttagtaaatgcaaaatatattagggatgttgaaaacggtgagatagtagttatagaaaagaaaaagcttacaagtataaaacccttcccaaaatacaaagcaagaccatgtgtttttgagtatatctacttcgcgagaccagatagtcttatcaataacaaatgtgcttatgagtatagaaaaaatttaggtattgagctagctaaagaatctgatattaaagctgatctggtaattccagttcctgactctggagttccagctgcattaggttatgcacaattaactaaaa

SEQ ID NO: 238784 - DNA, 854 bp, Unknown
  Bacterial polypeptide expressing nucleotide sequence isolated from the Sargasso Sea
aattcaaggtggttacgcattagtaatgttaactcagaattctttgattggagttagagacccttatggaattagaccattgataattggtaaattaggtaacagctatgtactagcctctgaaacgtgtgctttagatattattggtgcaaaatttttaagagaagttgaaaatggtgaaatagttttaatagaaaatgataaactaaaaagtgtcaaaccttttcctttaagaaaagtaagaccatgtgtctttgaatatatttattttgcaagaccggatagtctcatagataataaaacagcttatgagcacagaaaaaatttaggtaaagaacttgctaaagaaaataatattaacgctgacatagttgttcctgtgcctgattcaggtaatgcagcagctctaggattttctcaacatttaaatattaatttcgaacacggtttaataagaaatcactatgttggtagaacatttattgagccaagtcaaaaaatcagaagtttaggagtaaaactaaaattaaacgcaaatgaaaccacaattaaaaataagataattattcttatagatgactcgcttgtaagggggactacatcgcataaaatagttaaaatgctatatgatgcaggcgctaaagaagttcatgtaagaatagcttgtccagaaatcaaatatcctgatttttatggggttgatactcccacaaaaaaggaattacttgctgcaaacaaatctaatgaagaaataagagaatatattggagctaaatctctaaatttcttgtccattgaaggtttgtatagagcaataggtttgaaaaaagaaatgaaacatatccacagttaac

SEQ ID NO: 238785 - DNA, 496 bp, Unknown
  Bacterial polypeptide expressing nucleotide sequence isolated from the Sargasso Sea
attgacttctactgaacatcctattcgagacgaatgcggtgtttttggtattatggatcatcctgatgctgcgactctaactgcacttggattgcaagcacttcaacatagaggccaagaggcagctggtatagtcaccgtcgatggcgaccgattttttgctgaaaggcgcatgggattagtaagagataatttcaccaaaaattctgtgataaatagactttgtggaaatatcgctgtggggcatgttagatattctactacaggtgaaaccgcgatgcgaaatgttcaaccattatttgcggatatgaattttgggggactatcgctagcacacaatgggaatctaactaatgctttagcaataagacgtgaactagaaaaaaccggagccatatttcaatctacgactgatacagagaccatactacatttaattgcccagtctaccaaagtgggtatagttgacaagtttattgatgcgctctttcaagtt

SEQ ID NO: 238786 - DNA, 952 bp, Unknown
  Bacterial polypeptide expressing nucleotide sequence isolated from the Sargasso Sea
tatgtgtggcatcgtaggaatcgttgccagcgatgaggtccgtcaggatctttacgatgcattaactattttgcagcaccgagggcaagatgccgccggtattgtgaccagtgatggtaaccagtgttttttaaggaaaagtaatggtctagtgagtgatgtatttcaagagcatcacatgcaaaggcttcatggcacagtaggcttaggccactgtcgatatccaacggctggttcctcgagctcagctgaggcacaacccttgtatgtgaattccccttacggattagcactggcccacaatggtaatctcactaattcggctgaattacgttcagagttgaccgcaaatcaattgcgtcacttgaataccagcagcgattcagaagtacttttgaatatctttgcaaatgagcttggttccaggcaggcggtcgagccttcgcctaacgatatatttaaggcggtcggcgccgtacacgaacaatgtaagggcgcctatgcatcagtagcaatgataattggttctggcattgtgggttttcgcgatccgtatggaattcgacctcttgtgtatggacgtcgccaaacggatattggttttgactatatgatcgcatcagagtctgttgcgctggatatcttggggtttgaattggttgcagacgttagcccgggcgaagcaatttttatcagcaatgatggtcaggtatatacgcaacaatgtgcaaggaaggtggagttggtgccatgtatttttgaacacgtttatttggcgaggccggactccattttggacggtatgtcggtgtataaaagccgcttaaaaatgggagagtatctggccgaacaggtgttgaagcactatagcggtcgggaccacgatatagacgttgtaatccctattcccgatacgggaaggactgcagccttacctttagctcacgagctt

SEQ ID NO: 238787 - DNA, 705 bp, Unknown
  Bacterial polypeptide expressing nucleotide sequence isolated from the Sargasso Sea
attgaaaaaatttaaattaaattcgatcagagaagaatgtggtgtttttggtatacataattttattgatgcctcaactattactgctttaggtttgcatgctctacaacacaggggccaagaaggatgtggtattgtatcctttgatggaataaattttcactctgaaaagagacatggtttagttggagataattttacaaataaggatatactaaaaaaattacctgggaaatctgctatcgggcataatcgttactccaccacaggtgaaacatctttaagaaatatacaacctttttttgcagatatttatggtggtggaattagtgttgcccataatggaaactttactaatgctttaaaattaagagaaaaattagttaaagagggagcaatttttagaactacttcagatactgaaaccatagtgcaattaattgcaaaatcaaaaagacaaaaaatgattgataaagttatagataccctttttcaagtacaaggtggttatgcgttagttatgatgagtaataaaaaattaataggtgcacgtgatcctttgggaatacgccctttggttttaggaaaaataaaagattcatacgtgttagcctctgaaacatgcgcatttgatataattggtgcaaaattcataagagaaattgaaaatggagaagttgtcgttatagaggataatagtttgaa

SEQ ID NO: 238788 - DNA, 487 bp, Unknown
  Bacterial polypeptide expressing nucleotide sequence isolated from the Sargasso Sea
ttgaagaactttaatccaaaattaaaagaggaatgtggagtatttggaataagcaatatgcaagatgcttctgccttagctgctttaggtttacatgccttacagcacagaggtcaagaagggtgtggaattgttacctttgatggtgagcagtattattctgaaaaaagatttggtttagttggagataattttaataaagaaaaagttttaaaaaatcttaaaggaaattatgccattgctcataatagatacagtactactggaaataatactttaagaaatattcagcctttttttgctgatactaatgcaggaggtataggagttgcccataatggaaatttaacaaattctatccatttgagaaataaattggttgaggacggtgctattttttatacaacttcagatactgaaacaattgttcaacttatagctaaatcaaaaagagttaaaacaatagataaagtagttgatgcagttt

SEQ ID NO: 238789 - DNA, 856 bp, Unknown
  Bacterial polypeptide expressing nucleotide sequence isolated from the Sargasso Sea
gttaaagatgcatctgccttgaccgcactaggattacactcactacaacatcgaggacaggaaggttgtggaatagttacatttgacggtaaaaaatattattctgaaaaaagatttggattagttggagacaactttaataaagaaaaagtccttaattatcttaaaggcaactttgcaattggacataatcgatacagcactactggaaataatacactgagaaatattcaaccttttttcgcagatactaatgcaggtggaattggtgttgctcataatggaaacttaactaattcaatttatttaagaaacaaacttgttgaagatggtgcaattttttatacaacttctgatactgaaacaatagttcaactaattgcaaaatctaaaagatcaaaaacaattgacaaaataattgatgcaatttttcaaattcaaggtggttacgctttagttatgttaacccaaaattcattagtaggagtaagagatccacatggaataagaccactggtaataggcaaattaaaaaatagttttgttcttgcgtctgaaacttgtgctttagacattattggagcgaaatttgtaagagaagttgaaaatggagaaatagttttaatagaaaatgacaaactaaatagtattaaaccttttccaaccaaaagggtcaggccctgtgtgtttgaatatatttattttgcaagaccagatagtattctgaatggaaaaactgcatacgaacaccgaaaaaatttaggaaaagagttagctaaggaaaataatgttgatgcggatatcatagttccagttcctgattctggaaatgcagcagctttaggctttgcacaac

SEQ ID NO: 238790 - DNA, 323 bp, Unknown
  Bacterial polypeptide expressing nucleotide sequence isolated from the Sargasso Sea
aatgaaaaaatgtatcaagactctaaagaaaaaatcgaagatttataatccaaagctaaatgaggaatgtggcgtttttggaattagcaatgtaaaagacgcgtctgctttagctgctcttggattgcattcgctacaacatcgaggacaagaaggttgtggaatagttacatttgatggagagagatattattcggaaaaaagatttggattagttggagacaactttaataaagaaaaagtactagataatcttaaaggaaattttgcaattggtcataatcggtacagcactactgggaacaatactttaagaaatattc

SEQ ID NO: 238791 - DNA, 817 bp, Unknown
  Bacterial polypeptide expressing nucleotide sequence isolated from the Sargasso Sea
ttgaaaaattctaaaatagataaattaagagaagagtgtggtatttttggaatatcaaatcacgctgactcagctgcattagtagctttaggtttacatgcgcttcaacacagaggtcaagaaggatgtggaatagtttcattcgatggtaaaaactatcattctgaaaagagacaaggtttagttggcgatcattttactgactctgaaactcttaaaagattacctggaacatttgcaattggtcataatagatactccactacaggagaaacatctttgagaaatatacagccttttttcgctgatttacacatgggtggattaagcgtagctcacaacgggaatttgactaatgctctgcagcttagagaggctctagttaaggatggggcaatttttagaactactagtgatacagagaccatagttcaattattagcaaaatcgaaaagagagaaatttttagataaattagttgacgcattgtttcagattcaaggtggctattcgcttttattaatgacaaataaaaaattagtaggagttagagatccgtatggcataagaccattagtaatcggaaagttaaatagttcatttatttttgcttcagaaacatgtgctcttgacattgttggagctacattcgttagagaagtagaaaatggagaaatagtagtaattgaaaataataaactgcaaagtataaaaccttttccgaagcaaaaaccaagaccttgtgtttttgaatacatatattttgcaagacctgacagtctgataaatggaaaatgtgcttatgagtatagaaaaa

SEQ ID NO: 238792 - DNA, 907 bp, Unknown
  Bacterial polypeptide expressing nucleotide sequence isolated from the Sargasso Sea
aaaagaattggtgaaggacggggcaatttttacacaacttcagactctgaaacaatagttcagttaatagcaaggtccaaaaaagaaaaaaatatcgataaaattattgaagcaatttcacaaattcagggaggctatgcgttggtgatgcttactaaagacgttctcattggtgcgagagatatatatggtatcagaccattggtaataggtgtaattaataattcgtatgttttggcatctgaaacgtgtgctcttgatattataggtgcagaatttttaagggaagttgagaacggtgaaattgtttatattgagaataatgaattacgtagtcttaaaccatttggagatcacaaacctcgcccttgtgtttttgaatatatatattttgcaagaccagatagtatcttaagaggcaaaacagcttatgagtatagaaaaaatttaggtagagaattagcaaaagaggatgaagtagatgcggatttagttgtaccggttccagactcaggaaatgcagctgcaataggatatagtcagcaaaaaaaaattaattttgaattgggtttaattagaaatcattatgttggaagaacttttatagagccaggccaacaaataagaagtttaggagtaaagcttaaattaaatgccaacagaagctctattgaaaataaaaaaattattctagtagatgactctttagttcgtggtacaacctcacataaaattgtgaggatgctgtatgatgcaggagctaaagaagttcatttaagaatagcttgtccagaaattaaatttcctgatttttatggtgtggacatgcctacaaaaaaagaattattagcagcaaatagaagtgttgaagaaatatgtgattatataaaagcaaaaaagttaaaat

SEQ ID NO: 238793 - DNA, 921 bp, Unknown
  Bacterial polypeptide expressing nucleotide sequence isolated from the Sargasso Sea
ctaagcttaaagaagagtgtggtatattttggaattagtaatactaaagatgcttctgcattaacagctctaggacttcatgctcttcaacacagaggccaagaaggatgtggaatcgttacctttgatggtaaacaatatttttctgaaaaaagatttggtttagtaggtgataattttaataaagagaaaatattaaaaaaacttcaaggtgattatgctattggacataatagatatagtacaacaggtgaaaatactcttagaaacattcagcctttctttgctgatactaatgctggagggatcggcgtagctcataatggaaatttaactaattctatttctttaagaaaaaaattagttgatgaaggtgcaattttttatacaacatctgatacagaaacaatagttcaattaattgctaagtcaaaacgagcaaaaacaatagataaaattgttgatgcaatttttcaaatacaaggtggatatgctttagtaatgttaactcaaacttcattggtgggtgttagagatccttttggtataagacctttggttattggaaaattaaagaatagttatgtcctagcatccgaaacgtgtgctttagatataattggtgcaaaatttatacgagaagttgaaaatggtgagatagttttaattgaaaataatgaactgaaaagtattaaaccatttccaccaagaaaagttaggccttgtgtttttgaatatatttattttgcaagaccagatagtatgcttgatggaaaaactgcatatgaacacagaaagaatcttggttcagaacttgcaaaagaaaatgatattgacgctgatattgttgtaccagtgccagattctggaaatgcagctgctttaggttttgcacaatccctgaatgtaaaatttgaagct

SEQ ID NO: 238794 - DNA, 810 bp, Unknown
  Bacterial polypeptide expressing nucleotide sequence isolated from the Sargasso Sea
aaaaaattacctggcaaatatgctataggtcataacagatattcaacaactgggggtacagctttaagaaacgtacaaccattttttgcagatacaaatgcaggaggcattggtgtagctcacaatggaaatttaaccaatgcgataactttaagaaataaattagtccaagaaggtgctattttttatactacttctgacactgaggttattgttcaattaattgctaaatcaaaaagatcaaaaacaattgataaaattattgacgcaatatttcatgtccaaggaggatatgctttggtaatgatgactaaaaatacacttataggattaagagatcctttcggaattagacctctagtaattggaaagttaaaaaattcatatgtattttgttcagaaacttgcgcattagatattataggtgcaaaatttgtaagagaagtagaaaatggagaaatcgtctatgtagagaacgatgaactaaaaagtttaaaacctttttctccaaaaaaagttagaccttgtatttttgaatatatatatttttcaagacctgacagtattttaaatggtaaaactgcttatgaatatagaaaaaactatggagttcaattagcaaaagaagatgagctagaagcagacatagttgtacctgttccagactctggaaatgctgccgcattaggttatgcccaagaaaaaaatattccttttgatttgggattgataagaaaccactatgtcggtagaactttcattgaaccttctcaaaaaattagaagcttaggtgtaaaattaaaattaaat

SEQ ID NO: 238795 - DNA, 840 bp, Unknown
  Bacterial polypeptide expressing nucleotide sequence isolated from the Sargasso Sea
ggtaataggaaaacttaaagactcttatgtttttgcttctgaaacttgtgcattagatattataggggctaaatatataagagacgtagaaaatggtgaaatagtttatgttgaaaataaaaaacttattagtttaaaaccatttccattaaaaaaaattagaccatgtgtttttgaatatatctacttttcaagaccggacagtattttaaatggaaagtgtgcatatgaatatcgaaaaaattttggtagagaacttgcgaaggaaactagcattgatgctgatttagtggttcctgttccagactcagggaatgctgcagctatcggttatagccaacatgaaaatattaattttgatcttggtttaataagaaaccattatgttggaagaacttttattgaaccagctcaaaagataagaagccttggggtcaaattaaagttaaatgcaaataaatctacgatcaaaaataaaaaaattgtattggttgatgactccttggtaaggggtacgacctcacataaaatagttaaaatgctgtacgattttggggcaaaagaagtgcatgttagaattgcgtcaccagaaattagattcccagacttctacggcgttgatacacctacaaaaaaagagcttttagcagctaataaaactaatgaagagatttgcaaatatatcgatgcaaaatctcttaaatttttaagtgttgatggtttgtataaagcaatgggttatgagaaaagaaacgcaacatacccacaattaactgatcattattttacaggtgattaccctgtaaaattaattgatgaactaggtgataataaagtgac

SEQ ID NO: 238796 - DNA, 547 bp, Unknown
  Bacterial polypeptide expressing nucleotide sequence isolated from the Sargasso Sea
atgaaaaagaatacaaagaagcaaaagaaaaagttcaagatatataatccaaaaataaaggaagaatgtggggtttttggtattagcaataatctagatgcttcaactttaacagcgctaggtctgcatgctctacaacatagaggtcaggaaggctgtggaatagtttcttttgatggaaaaaaatatcattctgaaaagagatttggattagttggtgacaattttaataaagaaaaagtattaaaaaaacttccaggaaaatatgccataggtcataatagatattcaacaactggtggaacagctttaagaaatgttcaacctttttttgcagataccaatgcaggtggtattggagtttcacacaatggtaatttaaccaatgctataactataagaaataaattagttgaagaaggagctatattttacacaacatctgatactgaggttattgttcaattgattgcaaaatcaaaaagattaaagactattgataaaataattgatgcaatatttcaaatacaaggcggatatgctttag

SEQ ID NO: 238797 - DNA, 847 bp, Unknown
  Bacterial polypeptide expressing nucleotide sequence isolated from the Sargasso Sea
tgagccagctttgagaaacgtccagccactatttgcagatctttctgtaggcggatttgcaattgcccataatggaaatttaacaaacgcattgaagttaagaaatgaattggtacagagcggggcaatttttcaatccacatccgacacagaagtacttcttcaattgatagctcggtcaaaaagtaacggtgtaatcaatcggtttgttgatgcgctaaaagaaattgatggtgcttatgcattggttgcattaacggatgataaattaataggtgccagagatcctctaggtatacgcccattaattttaggtaaacttgaaaatcggttcattttatcttctgaaacatgtgcattagatatcattggcgcaaaatttgttagagaaatcgaaaatggagaggtggttgtgatttctggtgaaaacatagaaagtatcaggccttttccaaaaataaaaaaacggccttgcatctttgagtacatttacttcgcacgaccagatagtgtttttggaggaaaaagtatttatgaatgccgcaagaactttggtcatgagcttgccgctgaagctccctgttctgctgatgtagttattccagtacccgacagcggagttccggccgctttgggttatgctgaggcagcgggattatcttttgagctaggaataatcagaaatcattacgttggtcgaacatttattgagccacaacaatccactcgtgattttggcgtgaagctaaagcataatatcaaccgaaatgctgttaaaggtaaaaaagttgtgctcattgacgactcgattgttcgtggcacgacatcagtaaaaatagtagaattg

SEQ ID NO: 238798 - DNA, 784 bp, Unknown
  Bacterial polypeptide expressing nucleotide sequence isolated from the Sargasso Sea
ataggccataatagatatagtactactggtggtacaaccttaagaaatattcagccattttttgcagatacccatgcaggtggtattggcgtagcccataatggaaatcttacaaatgcacttacaataagaaaaaagctcgtaaaagatggcgcaatattctactcgacatcagatactgaggtaataattcaattaattgctaaatctaaaagatcgacgacagtagaaaaaattactgatgctatttttcaaattcaaggtggctatgctttagtaatgttggcgcaaaataaattgataggtgttagagatcctttgggaataagaccgcttgtaataggaaaattaaaaaattcctatgtattagcttcagaaacatgtgctttagatattattggtgcaaaattcataagagaagtagataatggagaaattgttattatagaaaatgataaacttgaaactataaaaccttttcctaaaaaaaaacaaaggccgtgtatttttgaatacatatatttttcaagacccgacagtatattaaatggtaaaactacttatgaatttagaaaaaaatttggtgaacaattagctttggaagacaatatcaaagctgatcttgtcgttccggttccagactcaggcaatgctgcggccttgggttatagccaaaaaactaaaataaattttgatctaggtttaattagaaatcattatgttggtcggacttttattgaacctgctcaaaaaattagaagcttaggtgttaaacttaaattga

SEQ ID NO: 238799 - DNA, 721 bp, Unknown
  Bacterial polypeptide expressing nucleotide sequence isolated from the Sargasso Sea
atgaagaaactaaagaaaaagttcaagatatatgatcctaaaattaaagaagaatgtgcagtttttggtataagtgactctaatgatgcgtctactttaactgctttaggtcttcatgctcttcaacacagaggccaagagggttgtggtattgtttcatatgatggtgaaaaatatcattctgaaaaaagatttggtttagttggagataactttaatgatgaaaaagttttgaaaaaacttcctggaaaatatgcaataggtcataatcgttactcaacaactggtggaactgctttaagaaatgttcagcctttttttgctgatacaaatgcaggtggtataggagttgcacataacggtaatcttacaaatgcaatcacattaagaaataagttagttcaagaaggagctattttttatactacatctgatacagagaccattgttcaattaatagctaaatcaaaaagagtaaaaactatagataaaattatcgatgctatatttcaaattcagggtggctatgcacttgtaatgatgacacaaaatacacttattggtgttagagatccttatgggataagaccactggtgattggtaaacttaaaaattcctatgttcttgcatctgaaacatgtgcttttgatattattggagctaaatttgttagagaggtagagaatggtgagattgtttatattgaaaatgatgagtgaa

SEQ ID NO: 238800 - DNA, 643 bp, Unknown
  Bacterial polypeptide expressing nucleotide sequence isolated from the Sargasso Sea
ttgaagaactttgatccgaaacttaaggaagagtgtggagtatttggtattagtaatgcgaaagacgcttctgctttaactgcactcggtttacatgctttgcaacacagaggtcaggaaggttgtggtattgttacttttgatggagaaaaatattattctgaaaaaaggtttggattagttggagacaattttaataaagaaaaagtattgaataatcttaaaggtaattttgcgataggtcataacagatatagtaccactggacataatactttaaggaatatacagccgttctttgctgatactaatgctggaggtataggtgtttcgcacaatgggaacttaacaaattctatctatttgagaaaaaaactagttgatgagggagctattttttacactacatctgatactgagaccatagttcaattaattgcaaaatcaaaaagatcaaagacaattgataaagttatagatgcaatatttcaaatccaaggtgggtatgcactagttatgttaacacagaatagtttaataggtgtgagagatccctacggaattagaccattaatgattggtaaattaggcaagagctatgttttggcatccgagacatgtgcattagatataattggggcaa

SEQ ID NO: 238801 - DNA, 459 bp, Unknown
  Bacterial polypeptide expressing nucleotide sequence isolated from the Sargasso Sea
aatgaaaaaacatatcaagactctaaagaaaaaattaacgaactttgatccgaagattaaagaagagtgtggtgtatttggtataagtaatgctaaagatgcttcagctttaactgcacttggattacatgctcttcaacatagaggccaagaaggttgtggaatcgtaagttttaacggtaaagaatatttttctgaaaaaagatttgggttagttggagataattttaataaggaaaaagtcctcaaaaaacttcagggtgattttgcaattggtcataataggtacagcactacaggtgaaaacacacttagaaatattcagcctttttttgcagacacaaatgcaggaggaattggagttgctcacaatggaaatttaactaattcaatttcacttagaaaaaagttggttgatgacggagctattttttatacaacttccgatactgaaacaat

SEQ ID NO: 238802 - DNA, 849 bp, Unknown
  Bacterial polypeptide expressing nucleotide sequence isolated from the Sargasso Sea
ttaattggagtaagagatccttatggaattagaccacttgttatcggtaaattaggaagtagctatgtattagcatctgaaacatgtgctttagatattattggtgcaaagtttttaagagaagtagaaaatggagaaattgttttagtagaaaacaatgaattgaaaagtattaagcccttccctccaaaaaaagttagaccatgtgtttttgaatatatttattttgctagaccagatagtctcatagataataaaactgcttatgaacacagaaaaaacttaggaaaagagcttgctaaagaaaatgacattaaagccgatatagtagttccagtaccagactcaggaaatgctgcagctttaggatttgcacaaaatttaaatattaattttgaacatggcttaataagaaatcactatgttggtagaacttttatcgaaccaagtcaaaaaattagaagtttaggtgttaaactaaaattgaacgcgaatgaaactacaataaaaaataagaggataattcttattgatgactctcttgtaagaggaactacatcacacaagatcgttaaaatgttatatgatgctggagcaacagaagttcatgtaagaatagcttgcccagagataagatacccagatttttatggagttgatacacccacaaaaaaagaattacttgcagcaaataaatcaaatgatgaaataagagagtatatcggtgccaaatctctaaagtttttatctatagatggtttatatagagctattggttttgagaaaagaaatgaaacttatccacaactaacagatcattattttacaggggattatcctgtaaaacca

SEQ ID NO: 238803 - DNA, 795 bp, Unknown
  Bacterial polypeptide expressing nucleotide sequence isolated from the Sargasso Sea
aatggaagaatgtggtgtatttggaataagtaattttgaagatgcttctgcattaacagctctgggtcttcatgcgttacaacacagaggtcaagaaggttgtgggattgtgtcttttgatggaaaaaaatactactcagaaaaaagatttggtttagttggtgataatttcaacaatgaaaaagtattaaaaaatttaccaggaaattatgcaattggtcataatagatacagtacaactggaggaacaacattaagaaatattcagccttttttcgctgatactcatgctggtggtataggcgttgctcataatggaaatcttactaatgctttaacattaagacagaaactagttaaagacggagcaattttttactctacatcagacacagaagtcattattcaattaattgctaaatcaaaaagatcttcaacagttgaaaaaataactgatgcaatttttcaaattcaaggtggttacgctctcgtaatgcttgctcaaaataaacttataggagtaagagatcctttaggaataagacctcttgtcattggaaaattaaaaaattcatatgtattggcgtctgaaacgtgtgctttagatataattggtgcaaaatttttaagagaagttgaaaatggtgagatagtagtaattggaaatgatcaactcgaaagtataaaacccttccctgctaaaaaatcaagaccatgtatttttgagtatatttatttttcaagaccagacagtattttaaatggaaaaactacttatgagtttagaaaaaaatt

SEQ ID NO: 238804 - DNA, 884 bp, Unknown
  Bacterial polypeptide expressing nucleotide sequence isolated from the Sargasso Sea
tgcagcatcgaggccagatgctgctggaatcatgacatgtgagaatactaacttgtaccttagaaaagataatggattagtaagagatgtcttaaaaactcgtcacatgcttaatctaaaaggtaacatgggaattggtcacgttcggtatccaacagctggctgctcatcttccgccgaagcacaacctttctatgttaattctccatacggaatcacactagcgcataatggtaatttagttaatgctgagccattgaaagaagatttgatgcgagatgatttgcgccatttaaatacgaattctgattcagaagtgcttttaaatatcttagctcacgaacttaataaaattgggaaacatcgcagcaaacttaatcctgatgatatctttgatgcggttggccgcttacatcaaagatgtaaaggagggtatgctgctgtagcaatgataactgggattggtatcttggggtttcgcgatccaaatggcataagaccaatcgtttttggagaacgaaaaactgatattggtactgaatctattatagcatctgaaagtgttgcagtagacgcacttgattttcagcttattcgtgacattgaaccaggtgaagcagtttttatttcagttgaaggagaaatattcacaaggcaatgcgcagataacacaaagtatagcccttgtatttttgaatatgtatatcttgccagaccagactcaataatagatggtatatcggtctataaggctagacttcgtatgggtgaaacattggctagaaaaattctaaaactttatccaacgcatgacatagatgttgttataccaattccagattcgagtcgaacagcagcattatccttagcaaatgaaatgggta

SEQ ID NO: 238805 - DNA, 572 bp, Unknown
  Bacterial polypeptide expressing nucleotide sequence isolated from the Sargasso Sea
aatgaggaaaaatacaaagaatctaaagaaaaaattaaagatatataatccaaaactcaaagaagagtgtggagtgtttggtataagtaacgccagtgatgcttcaacacttgctgctttaggcttgcatgctttacagcatagaggccaagaaggttgtggtattgtttcttatgatggaaaaaactatcactctgaaaaaagatttggattagttggtgataactttaataaagaaaaaatactaaaaaaattgccaggtaattatgctataggacataatagatatagcacaactggagcaaccactttgagaaatgttcaaccattttttgccgacactaatgctggtggtatagtagtagctcacaacggaaatctaacaaatgctttaactttaagaaagaaattagttgaagatggggcaattttttatagtacttcagatacagaaactatcatccaacttatagcaaaatcgaaaagagagaaaaaaattgataaaatcattgatgctctttttcaaatccaaggagcttatgctcttgtttttctaactcaaaatactttga

SEQ ID NO: 238806 - DNA, 407 bp, Unknown
  Bacterial polypeptide expressing nucleotide sequence isolated from the Sargasso Sea
attgaaaccgaataaaaaatcaacctttcttaatgatgataagttacatgaagaatgtggtgtttttggtatatacaatcatgaagattcagcagcattaactgctttagggcttcatgccttacaacatcgcggtcaagaggctgcagggatagtaacttttgatggaacaaaatttatatctgagagacatccgggattagtaagtgataactttacaaaagcatctgttatcaatcgattggtgggtaatagcgccgtgggacataacagatattcaactacaggagctactattcagagaaatatacaacctttttttgctgatttatggggtggaggatttgcaattgctcataatggaaatattactaatgcattatcattaagagatgaacttattaaga

SEQ ID NO: 238807 - DNA, 819 bp, Unknown
  Bacterial polypeptide expressing nucleotide sequence isolated from the Sargasso Sea
gcatctgctcttgtggcattaggattgcattcattgcaacatagaggtcaagaagggtgtggaattgtgtcctatgacggaaaaaactatcattcagaaaaaaaacaaggtttagtaggtgatcattttactaacacagacgtaataaaaaatttacctggtaattctgctattggccataatcgatactcaacgactggtgagacttctttaagaaatatccagcctttttttgcagatcttcacttaggtggtctaagcattgctcataacggtaatttaacaaatgcaatctctttaagagatagtcttgttaaggatggtgctatttttagaactactagtgataccgagacaattgtacaattaattgcaaaatccaaaagattaaaaatattagataaaattatagatgcattatttcaaattcaaggaggttattctcttgtcatgatgacaaataaccaattaattggtttaagagatccttatggaataaggccgctagttttaggaaaattaaaaaactcttttatattcgcttctgagacgtgcgctttagatatagttggagctaagtatataagagatattgaaaatggagaaattgttataattgaagatgacaaaataaaaagtgtaaaaccatttccaaaactaaaagctaaaccatgcgtatttgaatatatatacttttcaagaccagacagtattcttgatggtaaatgcgcttatgaatatagaaaggaatttggtaaacaaatggcaatagaaactgatatagactccgacattggttgtgcctgttccggactcggg

SEQ ID NO: 238808 - DNA, 455 bp, Unknown
  Bacterial polypeptide expressing nucleotide sequence isolated from the Sargasso Sea
aatgataaaaaagaactctactaaagtaagagaagaatgtggtgtttttggtatttctaatatcaatgatgcttcagctttggcagctttgggtttgcatgcactacaacacaggggtcaagagggttgtggaatagtttcttatgatggaaaaaattattattctgaaaaaagatttggccttgttggtgataattttaataatgaggatacaataaagaaattacctggtaattttgcgattgggcataatagatacagtacgactgggggtaaaatattaagaaatgttcaacctttttttgcagatactaacgcaggtggtataggagtctctcataacggtaattttacaaatgcaattacattaagaaaagaactggttaaagaaggagcaattttttatacaacatcagactctgaaacaatagttcagcttatagctaggtcaaaaa

SEQ ID NO: 238809 - DNA, 738 bp, Unknown
  Bacterial polypeptide expressing nucleotide sequence isolated from the Sargasso Sea
attgaggaactttaattcaaaactaaaagaagaatgtggagtttttggaataagtaataaccctgatgcttcaaccttaactgccttaggattgcatgctcttcaacatagagggcaagaaggatgcggaatagtatcttttgatggtgaaaaatattattcagagaaaagatttggactagttggtgataattttaataaagaaaaagttcttaaaaacttagctggtaaatatgcaattggtcacaaccggtatagtacaactggtggaacaactttaagaaatgttcagccattctttgcagatacaaatgcgggaggtattggaatttcacataatggtaaccttacaaatgcaattacattaagaaaaaaattggttgaagatggagctattttttatactacctctgacactgaaactatcgtgcagcttatcgcaaaatcaaaaagaaataaaactatagataaaataattgatgcactatttcaaatacaaggtggttacgctcttgtcatgttagctcaaaatatgcttataggtgtaagagatccttacggtattaggccgttagtaataggtaaaattaaagattcttatgtctttgcttcagagacttgtgctttagatattattggagcgaaatttgtaagagaagtagaaaatggagaaattgtttatgttgaggataatgtaattaaaagtttaaaaccattttccctaaaaaaagcaagacc

SEQ ID NO: 238810 - DNA, 619 bp, Unknown
  Bacterial polypeptide expressing nucleotide sequence isolated from the Sargasso Sea
ttgccaaatttattaaatgacagacctcatcatgagtgtggtgttttcggaatttatgggcatcctgatgcagcagcattgacagcattagggcttcatgcattgcaacatagaggccaagaagcagctggtattgttacttttgataataaacattttcatgcagaacgaagaatgggtcttgttagtgatacatttactaaaacaagtgttttaggaaggcttaaaggacaatctgctattggtcatgttagatactctaccacaggaggaacacttttaagaaatgtacaaccattatttgctgatttagcattgggaggatttgcgattgctcataatggtaatttaacaaatgccctatctgtacgtttagaattggtgaaagaaggagctatttttcaatcaacgtctgatactgaaactattttacaattagtagcaaaatcaaaaaaaagttttacaattgataggatgattgatgctctttcccaaattgaaggggcatttgcattagttgcacttacaaacaaagaattaattggcgtaagggatccatttggaattcgtccattggtacttggagaattggatggtaagtatattttgtgttcggaga

SEQ ID NO: 238811 - DNA, 487 bp, Unknown
  Bacterial polypeptide expressing nucleotide sequence isolated from the Sargasso Sea
atgaagatacaaaagataaagtacaagaattataatccaaaattaaaagaggaatgtggtgtttttggaattagtaattccaaagaggcatcaacgttaactgcactaggattgcatgcgttacaacatagaggccaagaaggatgtggaatagtttcttttgatggtgaacaatatcattcagaaaaaagatttggtttagtgggtgacaattttaataaggaaaaagttttaaaaaacctttcgggtaattatgcaataggtcacaatagatatagtacaactggaggagcagctttaagaaatattcaaccttttttcgcagatactaatgcaggggggataggaatttctcataatggtaatttaactaatgcaattactttgagaaacaaattagtacaagaaggagctatattttatacaacgtctgacactgaaactatcgtccaattaatgcaaaatcaaaaagggagaaaactataga

SEQ ID NO: 238812 - DNA, 925 bp, Unknown
  Bacterial polypeptide expressing nucleotide sequence isolated from the Sargasso Sea
tccactgatgcctctacccttaccgctttaggtctccatgcacttcaacataggggccaagagggttgtggtattgtttcatatgatggagaaaaatatcactctgaaaaaagatttgggttagttggagataattttaatgacgaaaaagttttaaaaaagcttcctggcaaatatgcaattggtcataatcgatattcaacaacaggaggaactgctttaagaaatgtacaacctttttttgctgatacaaacgcaggtggtattggtgttgcacataatggtaatcttactaacgctataacactaagaaacaagctagtacaggatggagcgatattctatacaacatcggatactgaaacaattgttcaattaattgctaaatcaaaaagaagaaaaacgatagataaaatcatagatgctatatttcaaattcaaggaggttacgcacttgtaatgatgacacaaaatacactaataggtgtaagagatccttacggaattagaccgttagtaataggtaaattaaaaaactcatatgtatttgcctctgaaacttgtgcctttgatattattggagcaaaatttgtaagagaagttgaaaatggagaaattgtttatattgaaaatgatgagttaaaaagtattaaaccatttccaccaaaaaagatcagaccttgcgtatttgaatacatttatttctctagaccagatagtatcttaaacggtaaaactgcatacgaatacagaaagaattttggacaacaattggcaaaagaggacaaaatagaagctgacttagttgtgcctgtcccagactcagggaacgctgcagcactcggatatgctgaagaaaaaggtctaaagttcgacctgggtttaattcgaaaccattatgttggtaggacctttatgagccctc

SEQ ID NO: 238813 - DNA, 922 bp, Unknown
  Bacterial polypeptide expressing nucleotide sequence isolated from the Sargasso Sea
aagagaataaaaacaatagataaaattgttgatgcaatttttcaaatacaaggtggctatgccttggtaatgcttactcaaacttcattggtaggagtaagggatccatatggtataagaccattggtaatcggaaaacttaaaaatagttatgtattagcatctgaaacatgtgccttagacataattggagcaaagtttataagagatgttgaaaatggtgaaatagttttaattgaaaacaatcaacttaaaagtattaaaccttttcctttaaaaaaggtaagaccttgtgttttcgaatatatttattttgcaagaccagacagtatacttgatggtaaaacagcatatgaacaccgaaaaagtcttggggcagaacttgcaaaagaaaatgatataaatgccgatatcgttgtgcctgttccagattctggaaatgcggctgcacttggctttgcgcaacatttaagtatgagttttgaacttgggttagttcgtaaccattatgtaggaaggacctttattgagccgagtcaaaaaattagaagcttaggagtaaaattaaaattaaatgctaatcaatcagcaataaaaaataaaaaaataattttaattgatgattctttggttagaggtacaacatcccataaaatagtcaaaatgttatacgatgcaggtgctagtgaagttcatgtcagaattgcttgtccagaaattaagtatcctgacttttatggagttgatactcctacaaaaaaagagctgttagctgcaaataaaacaaatgatgaaatttgtaactatattggtgcaaagactttgaaatttttaaccttaaatggaatgtataaagctattggatttgataaaagaaatgaaaattacccacaattaacagatcattattttacaggagatt

SEQ ID NO: 238814 - DNA, 541 bp, Unknown
  Bacterial polypeptide expressing nucleotide sequence isolated from the Sargasso Sea
ctagacccgctgcaatgcaagttgcaagaacagttagggatagaatatagggaaggtttttttaaaaacagatatgttggtagaacattcataatgcctggtcagcagaaacgtaagaaatctgtaaggcaaaaattaaatgccatgagtgcagagtttaaaaataaaaatatcttaattgttgatgactcgatagtaagaggtactacttcaaaagaaattgtccagatggctaaagatgcaggagcaaataaagttttttttacatcagcagctcctcctgttcgttatcctcacgtttatggaattaatatgcctaatagagatgaattaatagctcataataggacaataagtgaaatcgccgataaacttgaaattgataaccttgtttatcaaagtgttgaaagtttgcgtaaatctataattggtgattctcctattaaaggtttagagatgagttgttttacaggtgattatgtaactggaacagtaaaccaagaatacttaaattgggtggaaaatgtatataaatcttagt

SEQ ID NO: 238815 - DNA, 712 bp, Unknown
  Bacterial polypeptide expressing nucleotide sequence isolated from the Sargasso Sea
aatgtgtgggatagttggaatttctgctcaaaccaacgtagctgcagaaatatatgacgctcttttaatgcttcagcacagaggtcaagatgctgctggcattgctgtatgcagttctgaagatcagttaaattcaagaaaatccatgggttatgtacgtgacgtttttcaacaaaggcacatggaaaagcttgtaggtaactatggtattggtcatgttagatatcctactgcaggtggtgctggaaaagagtttgctcaaccaatgtatgttaactccccatacggcatcagtttagctcacaatggaaatctaactaattcaaaacaacttggtaatgaactttttcatgctgaaatgagacatttacagactgatagcgattctgaagttcttctcaatatatttgcacatgagttaggaaaacaaagagagattcatccttctgcagaacatattttcaaagctgttgctaaaacacatataagatgtgatggagcatatgcagttctggctctaatatctggttatgggatgttagcctttcgtgataataatggaataagaccactttcaattggggttagaaaaggcaaaataagaaacgattatataatttcttctgaagatgcattatttactccgcttggttatgagaagcttagagatgtagatcctggcgaagcagtatttattgataaacatggcgag

SEQ ID NO: 238816 - DNA, 490 bp, Unknown
  Bacterial polypeptide expressing nucleotide sequence isolated from the Sargasso Sea
atgaaaaagaatacaaagaagcaaaagaaaaagttcaagatatataacccgaagttaaaagaagaatgtggagtatttggtataagtaataatccagacgcttcaactttaactgcgctaggtttacatgctctacaacacagaggtcaggaaggctgcgggatagtttcttttgatggaaaaaagtatcattctgaaaaaagatttggactggttggcgataactttaataaagaaaaagtattaaaaaaactaccaggaaagtttgctattggacataatagatactcaacaacggggggaacagctttaagaaatgttcaaccattttttgcagataccaatgctggtggaattggtgtagcacataatggaaatttaactaacgcaataactataagaaataaattagttgaagaaggagctatattttacacaacatctgatacagaagttatagttcagttaatagcaaaatcaaaaagatcat

SEQ ID NO: 238817 - DNA, 834 bp, Unknown
  Bacterial polypeptide expressing nucleotide sequence isolated from the Sargasso Sea
atctatatacatcgataaaaacaatgagcttcattctcatcaatgcgtcgaaccaaaaagttacacaccttgtatctttgaatttgtttattttgcaagaccagattctattatcgatgggatgtccgtttataaatcaagactaagaatgggtgaacacctagcacaacaaattattcaaaaaggacttcatcatgatgttgatgtcgtaatcccaattccagataccagcagaacaagtgctattcaagttgctcatcatctaggggtaaaatatcgtgaagggtttataaagaatcgttatattggcagaacatttatcatgccaggtcaagaaaaaagaaagaaatctgtcaaaaaaaagttaaatcctattgatctagaaattaatgataaaaatgttttattgatcgatgattctattgttagaggaaccacatcaaggcaaatcattgagatggctaggaacgccggagcaaaaaaggtttttttcgcgtcagcagcacctcctgttaaatttcctaacgtttacggaattgatatgcctgcaacctctgagttaattgctagtaacaaaaacgatgaagacctctcagcatatattggggcggactggttaatctaccaatctttggatgatttaatagaggcagttcgttttgaggaatcagaggtcaatcattttgatacttcatgtttttctggagaatacgtcactaatgatattacggagaaataccttcagagaattgagctaaaaagaaacgatgaagcaatggccaaaaaggaaatggaacgcaagcagttagacattcaggacccgacaaaaattct

SEQ ID NO: 238818 - DNA, 400 bp, Unknown
  Bacterial polypeptide expressing nucleotide sequence isolated from the Sargasso Sea
ttgaatgataggcctcagcatgagtgtggtgtatttggtatatttggtcatgaagatgcaggagctttaactgctttaggactgcatgctttacaacataggggacaagaagctgcaggaatggttacatatgatggaaaacattttcatgcagagcgcagaatgggtttagtgagtgatacttttacaaaaactagtattttaggaagacttaaaggtaattcagcgattgggcatgttagatattcgacaacaggaggtacactattaagaaatgtacagccactatttgctgatttagcattaggcggatttgcaatagcccataatggtaaccttactaatggactcacaatacgtcttgaattagtaaaagaaggtgcgattttccaatctactt

SEQ ID NO: 238819 - DNA, 415 bp, Unknown
  Bacterial polypeptide expressing nucleotide sequence isolated from the Sargasso Sea
atgataaagacgaactctactaaaattagagaagaatgtggtgtttttggaatttcaaacataaatgatgcttcagctttggcagctttaggtttacatgctctacagcatagagggcaagagggctgtggcatagtcacatatgatggaaaaaattattattccgaaaaaagatttgggctagttggagataattttaataatgaggacacgattaagaaattaccaggctcttatgcaattgggcacaatagatacagcacaaccggtggtaaaattttaaggaatgttcaacctttttttgcagatactaatgctggtggcataggtgtctctcataacggtaattttacgaacgcaataacactcaggaagaagctagttgaagatggtgcaattttttatacaacattct

SEQ ID NO: 238820 - DNA, 901 bp, Unknown
  Bacterial polypeptide expressing nucleotide sequence isolated from the Sargasso Sea
atgagagatccaaatggaaatcgtcctctaatactcggaaagagagaagttgggcagggtactgaatatatgattgcttctgaaagtgtggcattggacatcgctgattttgaaatcatgagagatgttaagcctggtgaagtgatttacatcaccaaggaaggagaattgttttctaagcaatgcgtgaaaccaaaatcatacacgccttgtatatttgagtttgtatattttgcaaggccagattcgatcattgatggcatgtcagtttataaatctagactcagaatgggtgagtatttggcacagagaatcataaaaaaaggtctgcatcacgatgtggatgtagtgattccaattcctgataccagtcgatcaactgcgctccaagtcgcccatcatttgggtgtcaaatacagagaaggcttcattaagaatagatacattggacgaacattcatcatgcctggacaggaaatcaggaaaaaatccgtgaaacagaaactcaatccaattgatctggaaattcgagataaaaatgtattattgattgatgactcaatagtcagagggacaacttcaaagaagataatacaaatggctcgaaatgcgggtgcaaacaaagtattttttgcctctgcagcgccaccggttaagtatccaaatgtttatggcattgatatgccttcaacagcagagcttttggcaagcaacagaacagaggaggagcttgcaagatatatcggcgcagattggttgatctatcaagaccttgatgatctcatttcagcggttcagtttgatgaatcagatgcagaggcttttgatacctcttgtttctctggagagtatgtcactggagatgtgacaccaaattatctggatttcatgagaacaagag

SEQ ID NO: 238821 - DNA, 838 bp, Unknown
  Bacterial polypeptide expressing nucleotide sequence isolated from the Sargasso Sea
atttacatcaccaaggaaggagaattgttttctaagcaatgcgtgaaaccaaaatcatacaccccttgtatatttgagtttgtatattttgcaaggccagattcgatcattgatggcatgtcagtttataaatctagactcagaatgggtgagtatttggcacagagaatcataaaaaaaggtctgcatcacgatgtggatgtggtgattccaattcctgataccagtcgatcaactgcgctccaagtcgcacatcatctgggtgtcaaatacagggaaggctttattaagaataggtacattggacgaacattcatcatgcctggacaggaaatcaggaaaaaatcagtgaaacagaaactcaatccaattgatctggaaattcgagataaaaatgtattattgattgatgactcaatagtcagagggacaacttcgaagaagataatacaaatggctcgaaatgcgggtgcaaacaaagtattttttgcctctgcagcgccaccggttaagtatccaaatgtttatggcattgatatgccttcaacagcagagcttttggcaagcaacagaacagaggaggagcttgcaagatatatcggtgcagattggttgatctatcaagacctagatgatctcatttcagcggttcagtttgatgaatcagatgcagaggcttttgatacctcttgtttctctggagagtatgtcactggagatgtgacaccaaattatctggatttcattgagaacaaaagaaatgatgctgcaaaggcaaaaaaagagatagagagaaaacagattgaaatacacgatcagtcttcaatgactgtcagct

SEQ ID NO: 238822 - DNA, 550 bp, Unknown
  Bacterial polypeptide expressing nucleotide sequence isolated from the Sargasso Sea
atgtctgaagttccagcacataccgaggaggggtttttacccgataagcttcatgaggaatgcggagtttttggtatttttggtcatactgacgctagcgctatagtggcattaggacttcacgctttgcaacatcgtggccaagaagccgcgggaatagttacatatgatggtaaacattttcacgctgaaagaaaactaggtttagtaagtgatacctttactgattcaaggatattagagcagttaacagggaaagctgccgttgggcacgttagatattctaccacaggtgagacagttttaagaaatgttcaacctctttttgcagatttagccggtggcgggtttgctatcgcccacaatggaaatcttacaaatgcacttagccttagagatgagcttgtaatgcaaggtgcaatattccagtcaacctcagatactgagacaattctgcaactagttgctagatctaaacgagataatacgctatctcgattcattgacacccttttcaagattgagggcgcctactccctagtgtcatgac

SEQ ID NO: 238823 - DNA, 937 bp, Unknown
  Bacterial polypeptide expressing nucleotide sequence isolated from the Sargasso Sea
agatggtgcaatttttagaacaacaagtgatacagaaacaatagtacagttaatagcaaaatctaaaagagataaatttatagataaactaattgatgcacttttccaaataaaaggaggatattctcttattttaatgaccaataaaaagttagtgggtgtgagagacccttttggtataagaccactggttattggaaaattaaaaaactcatatatttttgcctctgaaacttgcgcactagatattgtaggcgcaacattcataagagaggtagaaaatggcgaaatagtttttatcgaggatgaaaaaattaaaagtattaaaccttttccgaaacaaaaatctcgcccatgtgtatttgaatatatttattttgcaagacctgatagtctaattgatggtaaatgcgcatatgagtatagaaaaaaattaggttctgagctagcaaaagagactgatatagatgcagatttagttgtacccgttcctgactcgggtgtgccagctgcactaggttatgcagcacaagcgaataaaaaatttgagcttggattgattagaaaccattacgtaggtagaacttttattgaaccatcgcaaaatataagaagtttaggtgttaaattaaaactcagctctacaaaaaccatagttaagaataaaaaaattattcttatagatgactctcttgtaagaggtacgacttgtttaaaaattataaaaatgctttatgaagctaaggcaaaagaagttcatgttaggattgcttgcccggaaattaaatatccagatttttatggtgttgatatgcctactaaaaaggaattgcttgcacataacagaagcaatgatgaaatgtgccaatatattaaagctaaaagtcttaaatttttaaagtttaaatggtttatacaaagctctgacaggcgataa

SEQ ID NO: 238824 - DNA, 754 bp, Unknown
  Bacterial polypeptide expressing nucleotide sequence isolated from the Sargasso Sea
tttgacaaattcaatttatctaagaaataaattagttgaagagggagcaattttttacacaacctctgatactgaaacaattgttcaattaattgcaaaatcaaaaagagagaaaaaaattgataaagttgtcgatgcaatatttcaaatacaaggtggctatgctttagttatgcttacacaaaaatctttaattggtgtaagagatccttatggtatcagaccactagttattggaaaattaaaaaacagctatgtccttgcatcagaaacttgtgcgttagatatcattggtgcaaaatttattagagaagttgaaaatggagagatagttttaattgaagacgacaaattagaaagtattaaaccatttcctcccaaaaaagttaggccttgtgttttcgaatatatatattttgcaagaccagatagtatacttagtggaaaaacggcctatgagcatagaaaaaatttaggaaaagagcttgcaagagaaaatgatattgaagcagatatcattgtgccagttccagatagtggtaacgctgctgcattaggatttgctcaacatttaagtaaaaattttgaacttggcttaataagaaatcattacgttggaagaacttttattgaaccaagtcaaaaaattagaagtcttggtgttaaattaaaactaaatgcaaatcaaacaactattaaaaataaaaaaattgtattaatcgatgactctcttgtaagggggacaacttctcat

SEQ ID NO: 238825 - DNA, 739 bp, Unknown
  Bacterial polypeptide expressing nucleotide sequence isolated from the Sargasso Sea
aatgtgtggaatagttgggatttctgctgaaactaatgtagcagctgaaatatacgattctctcttaatgcttcagcatagaggtcaagatgctgcgggcatggttgtttgtgatacagaagatcaactgaatagccgtaaatctatgggatatgttagagatgtgtttgagcaaaaacacatgaataatcttattggcaactacggcattggtcatgtaaggtacccaactgctggtggatctggatcagaatttgcacaaccaatgtatgtaaattcgccgtatggtattagccttgcacataatggaaatttaacaaattctaaacaactttcagccgaactttttcatgctgaaatgcggcatctaaaaacagattctgattctgaggtattgcttaatatttttgcacatgaactagctaaacaaaaagaaatatacccttcagcggaacatatctttaaagcagtttctaaaacccattttagatgtgatggagcttatgcagttcttgcactaatcacagggcatggcattttagctttcagagacaacaatgcaattagacctttatctataggtataagaaatggaaaaactagagaagaatatattatatcatctgaggacgcactatttacttccatgggttttgataagttacgagatatcgaacccggagaagctatttttattgataagaatggaaaacttcactcacaacaatgtgcagaagag

SEQ ID NO: 238826 - DNA, 772 bp, Unknown
  Bacterial polypeptide expressing nucleotide sequence isolated from the Sargasso Sea
gatgttaagcctgggagaagtgatttacatcacgaaggaaggggaattgttttctaagcagtgtatcaaaccaaaatcatatacgccttgtatatttgagtttgtatattttgcacgaccagattcgatcattgatggtatgtcagtttataaatctagactcagaatgggagagtatttggcacagaggatcataaaaaaaggtctgcatcatgatgtggatgtggtgattccaattcctgataccagtcgatcaactgcgctccaagtcgcccatcatctcggtgtcaaatacagagaaggcttcattaagaatagatacatcggacggacattcattatgcctggacaggaaatcaggaaaaaatccgtgaaacagaaacttaatccaattgatctggaaattcgagaaaaaaatgtattattgatcgatgactctatagtcagagggacaacttcaaagaagataatacaaatggctcgaaatgcaggtgcaaacaaagtattttttgcctctgcggcaccaccggttaagtatccaaatgtttatggtattgatatgccatcaaccgcagagcttttggcaagcaacagaaccgaggaggaacttgcaagatatatcggtgcagattggttgatctatcaagaccttgatgatctcatttcatcggttcaatttgatgaatcagatgcagaggcttttgatacctcatgtttctctggagagtatgtcactggagacgtgaccccgaattatctggattttcattga

SEQ ID NO: 238827 - DNA, 295 bp, Unknown
  Bacterial polypeptide expressing nucleotide sequence isolated from the Sargasso Sea
atgaaaaagcaaaagaaaaagttcaaaatttataatccaaaactcaaggaagaatgtggtgtttttggtattggtaatatttcagatgcttcagcgttaactgctctcgggctccatgcgcttcagcatagaggtcaagaaggttgtggaatagtttcttttgatggagaaaaatatcactctgaaaaaagatttggactagttggagacaattttaacaaagaaaaagttttaaaaaaactacccggaaagtatgcaataggacataatagatactcaacaactggtggcacag

SEQ ID NO: 238828 - DNA, 517 bp, Unknown
  Bacterial polypeptide expressing nucleotide sequence isolated from the Sargasso Sea
agccagacagcttggaattgagtatagagagggattttttaaaaataggtatgttggtagaacattcataatgcctggacatcaaaaacgtaagcaatcggttagacaaaagctgaatgctatgagtacagaattcaaaaataaaaatgtattaatagtcgatgattctattgttagaggaacgacttccaaacaaatagttcagatggctaaagatgcaggagcaaataaagttttttttacttctgctgcaccaccagtcaggtttccgcatgtttatgggattaatatgcctaatagggatgagctaatagctcacgatagaacgatcattcaaatagctgaaaagcttgaaatcgataatcttgtttatcaaagtgtggagaatctaagaaaatcaataataaaggattctcttgttaaagatttagaaatgagctgctttactggatcttatgtaactggaatggtaaatcaagagtatttagaatgggttgaaaatgaatataaatcttaa

SEQ ID NO: 238829 - DNA, 443 bp, Unknown
  Bacterial polypeptide expressing nucleotide sequence isolated from the Sargasso Sea
gatgctaaagaaaaagttcaagaactttaatcctaagataaaagaagagtgtggagtatttggtataagcaacaataaagacgcatctgcccttactgctctcggattgcatgcccttcaacatagaggccaggaaggatgtggaattgtaacttttgatggagatcagtatcattccgaaaaaagatttggactagttggagataattttaataaagaaaaagtattaaaaaccttgattggaaattatgcagttggtcataatagatatagcactactggaggaacaactttaagaaatattcaacctttttttgcagacaccaatgctggtggaataagcatttcacataatggtaatctaacaaatgcaataactttaaggtcaaaattagttaaagatggagctatattttatactacatcagataccgaaactattg

SEQ ID NO: 238830 - DNA, 763 bp, Unknown
  Bacterial polypeptide expressing nucleotide sequence isolated from the Sargasso Sea
catttaaatactgaatctgatacagaggctttattgaatctatttgcccatgaacttcaggaaaattttgatgggagtctctctcctgaaattattttcaaagctgcaactcatctttttgataaatgctcaggcggttatgccgttgtttcaatgattctgaatgagggactggtggccatgagagatccaaatggaattcgtcctctaatactcggaaagagagaagttggacagggtactgaatatatgattgcttctgaaagtgtggcattggacatcgctgattttgaaatcatgagagatgttaagcctggtgaagtgatttacatcaccaaggaaggagaattattttctaagcaatgcgtgaaaccaaaatcatacacgccttgtatatttgagtttgtatattttgcaaggccagattcgatcattgatggcatgtcagtttataaatctagactcagaatgggcgagtatttggcacagagaatcataaaaaaaggcctacatcacgatgtggatgtggtgattccaattcctgataccagtcgatcaactgcgctccaagtcgcccatcatttgggtgtcaaatacagggaaggctttattaagaatagatacatcggacgaacattcatcatgcctggacaagaaatcaggaaaaaatctgtgaaacaaaaactcaatccaattgacctggagattcgagataaaaatgtattattgattgatgactcaatagtcagagggacaacttcaa

SEQ ID NO: 238831 - DNA, 940 bp, Unknown
  Bacterial polypeptide expressing nucleotide sequence isolated from the Sargasso Sea
ttaccgatatataattcaaagctcaaagaagaatgtggagtttttggtattagtaatagtatcgatgcatctgctttgaccgctttaggactgcacgctcttcaacatagaggacaggaaggttgtggaattgtttcttatgatggtcaaaaatactactctgaaaaaagatttggcttagttggtgataattttaataaacaaaaaattttaaaaggtttgccaggaaattatgcgattggccataacagatatagtaccactggcgatacttcattaagaaatattcaacctttctttgcagacacaaatactggtggaattggagtggcacataatggaaatttaaccaatgccattaccttgagaaaaaaattagtaaaagatggagcaatttttcacacaacatcagatacggaaactattgttcagttagttgctaaatcaagaagaaataaaattattgataaaataatagatgctttatttcaaattcaaggtggatatgccttggtaatgttaacacaaaatatcttaataggggtaagagatccttttggaatcagacctttagttattggaaaagtaaaagactcttatgtttttgcttctgaaacatgcgctttggacattataggagcgaaatatattagagatgttgaaaatggtgaaattgtttgtgttgaaaatggaaagttaaacagcttaaaaccctttcctgcaaaaaaaataaggccttgtgtttttgaatatatatatttctctcgaccagacagcatattaaatggtgaatgtgcatacgaatatagaaaaagacttggggcagagttagcaaaagaatcaagtattgacactgatgtagtagttccagtaccggactcaggcaatgctgcagctataggttatagcaaacattccggtattaattttgaattaggca

SEQ ID NO: 238832 - DNA, 670 bp, Unknown
  Bacterial polypeptide expressing nucleotide sequence isolated from the Sargasso Sea
gatgcaaaagaaaaagttcaagatctataaccctaaattaaaagaagagtgtggtgtatttggaattagtaattttgaagatgcgtctgcattaactgctttgggacttcatgctttacagcatagaggtcaagaaggctgtggaattgtatcttatgatggaaatcaatattactctgaaaaaagatatggtttagtaggcgacaattttaacaacgaaaaagttttaaaaaaattgcctgggaattttgcgattggccataacagatatagtacaactggtggaacaaccttaagaaatatccaacctttttttgcagacactcatgctggaggaattggcgttgctcacaatggaaatcttactaatgctgttacaataagaaaaaaacttgtaaaagatggtgctattttttactctacttcagacacagaagtaattatacaattaattgcaaaatcaaaaagatcaacgactgttgaaaaaataactgatgcaatttttcaaattcaaggcggatatgctttagtcatgctggctcaaaataaactaattggagtaagagatcctttaggaataagacctttagttatcggtaaattaaaaaattcctatgttctggcttcagagacatgtgcattagatattataggagcaagatttttacgg

SEQ ID NO: 238833 - DNA, 871 bp, Unknown
  Bacterial polypeptide expressing nucleotide sequence isolated from the Sargasso Sea
aatgaaaaaaaatataaagaatctaaagaaaaaattaaggatatatagtcccaaaataaaagaagagtgcggtgtttttggtattagtaatagtatggacgcctccacattaactgctttaggattgcatgctttgcaacatagaggccaggaaggttgtggaatagtttcctatgatggaaaaaattatcattctgaaaaaagatttggattagttggagataacttcaacaaagaaaaagttttaaaaaatttgcctggtaattatgcaattggacataatagatatagtacaactggagctacagctttaagaaatgttcagccattttttgctgacacaaatgctgggggtattggagtggctcacaatggcaatctaactaatgcaataactttaagaaaaaaattagtagaagatggagcaattttttataccacctctgacactgaaactatcgttcaattaattgcaaagtctaaaagaaaagacacgatagataaaattattgatgctctttttcaaattcaagggggttatgctctagtaatgatgactcaaaaaattttaatcggtgtaagggatccttatggaataagacctttggtaataggaaaattaaaagattcatatatatttgcctctgagacttgtgcgctagatattattggagcaaaatttttaagagaagtagaaaatggtgaaattgtttacgttcacaacaacaatttaaaaagcatcaaaccatttcccgtgaaaaaaccaagaccatgtgtgtttgaatatatttatttttcaaggccagatagtattttgagtggtaagtgtgtttacgagtatagaaaagattttggtaaagagctcgctaaa

SEQ ID NO: 238834 - DNA, 898 bp, Unknown
  Bacterial polypeptide expressing nucleotide sequence isolated from the Sargasso Sea
gagaaattagttaaggatggagcaattttcagaacaacgtctgatacagaaactattgtacaattaattgctaaatcaaaaagatcaaaaatgattgataaaattattgatactctttttcaggtacaaggaggttatgctttagtaatgatgagtaataaaaaattgataggggctcgtgaccctttaggtatcaggcctctagttttgggaaaattaaaaaattcttatgttttggcttcagaaacttgtgcttttgatattataggagctaaatttatcagagagattgaaaatggagaagtaattatgattgagggtaataatttaaaaagtattaagccatttaataaaaaaaaatctaggccatgtgtttttgaatatgtttacttctcaaggccagacagttatcttaagggtaaatgtgcttatgaatatagaaaaaactttggttatgaacttgcaaaagaaagtgatgatgttggagaaatcgttgttccagtcccagattcaggtgtgccggctgcaattggatatagtcaatataaaaaaattagtttcgaacttggtttaatcagaaatcattacgtaggaagaacttttatcgaacccaaacaaaacattaggagttttggtgttaaacttaaattaagttcaaataaatcatccattaagaataaatcaatagtgttaattgatgactccattgttaggggtacaacatgttctaaaatagttaaaatgctttatgatggcggggccaaggaagttcatgtaagaatatcttcaccgccaataaaatttcctgatttctacggtattgatatgccgtcaaaaaaagagttattagctgcaaataaaagtttagaggaaatgcggaaacatattgaggcagact

SEQ ID NO: 238835 - DNA, 378 bp, Unknown
  Bacterial polypeptide expressing nucleotide sequence isolated from the Sargasso Sea
aatgagaaaaataaatgaagaatgtggtgtttttggaattcacgatattgatgacgcttctgctttaacagctttaggtcttcatgctttacagcacaggggacaagaaggttgtggaatagtttcttttgatggaaaaacttttcattctgagaaaaggcatggattggttggcgataattttaccaataaagatgtattaaaaaaattacctggaaaatttgctgttgggcacaatcgatattcaacaactggtgaaacttctttgagaaatattcaaccattttttgctgatctccatgggggaggaatagcaattgcacataacggaaacttaacaaatgcactacgtcttagagagtctttagtaaaagatgg

SEQ ID NO: 238836 - DNA, 598 bp, Unknown
  Bacterial polypeptide expressing nucleotide sequence isolated from the Sargasso Sea
attgaatgaagaatgtggtgtatttgggattgccaatgtaaaagatgcctcagctttaaccgctcttggattacactctctacaacacagggggcaagagggctgtggaatagtaacatttgatggagaaagatattactcggagaaaagatttgggttagttggtgacaactttaataaagaaaaagtcctagataaccttaagggaaattttgcaatcggtcataatcgatatagtacaactggaaataatacattaagaaacattcagcctttctttgcagataccaatgctggtgggattggggttgctcacaatggaaacttaacaaattcaatttacttgagaaacaaacttgttgaagaaggagcaattttctacacaacttcagacactgaaacaattgttcaacttattgcaaaatcaaaaagattaaaaactattgataaaataatagatgcgatatttcaaattcaaggtggatatgcccttgtaatgttaactcaaaatttattggtaggagttagagatccttatgggattagacctctagttataggaaaattaaaaaatagttacgttcttgcatctgagacc

SEQ ID NO: 238837 - DNA, 565 bp, Unknown
  Bacterial polypeptide expressing nucleotide sequence isolated from the Sargasso Sea
atgctaaagaaaaagttcaagaattataaccctaaactaaaagaagaatgtggggtatttggaataagtaatgtgaatgatgcttctgcggttactgctcttggtttgcatgctcttcagcaccgaggacaagaaggatgcggaattgtaacttttgatggtgaaaaatatcattctgaaaaaagatttggtttagttggagataattttaacaaagaaaaggttttaaaaaaattaccaggtaagtatgctgtgggccacaatagatacagcacaactggtgggacaacattaagaaacattcagccctttttcgccgacaccaatgctggaggaataagtgtttctcacaatggaaatttaacaaatgccataactttaagatcaaagctggttcaagaaggttcaatattttacactacctccgatactgaaactattgtgcagttaatagctaagtcaaaaagatcaaaaactgaagataaaataatagaagctttgtttcaaattcaaggtggttatgccttagttatgctaacacaaaaaaaattaataggagttagag

SEQ ID NO: 238838 - DNA, 810 bp, Unknown
  Bacterial polypeptide expressing nucleotide sequence isolated from the Sargasso Sea
atcgtgagcaatgtgccgattcaccaaagctgacgccctgcattttcgagcacgtctacttcgcgcggccggattctctcatagatagcatctcggtctacaagacgcgcatgcgtcagggcgcggcgctggcgaaaaaaattctacgggagcgacccgagaacgacatcgatgttgtcatccccattcccgataccagtcgagtcgccgggcagtcgttggcctacgaattaggcgtcaaattccgcgagggctttatgaaaaaccgctacatcgggcgcaccttcatcatgccggggcagagtgagcggaaaaagtccgtcagacagaagctgaaccctgtgccgctggagtttcaggataaaactgtcttgctcgtcgatgactccattgtgaggggcacgacctgcggccagattattcaaatggcgcgcgaagcgggggcgaggcaggtttacttcgcgtctgcggcgccaccggtgcgattccctaacgtctatggcatcgatatgcccgccgctaacgaactaattgctcatggtagaagcgttgaggaagtgcgcgaggaaatcggtgccgattggctggtctatcaggatcttgaagatctcatcaaatgctcgagggagggtaaccccgaagttgacggtttcgagtcgtccgtatttgacggtgagtacctcgcggggaacatcgatgatcagtacttgcagtcgattgaggctgcgcgcgccgacggcgccaaagggcggggtcctttccttgggaccagtgatggggcggttgtcggcctgcacaacgacaactgaa

SEQ ID NO: 238839 - DNA, 800 bp, Unknown
  Bacterial polypeptide expressing nucleotide sequence isolated from the Sargasso Sea
tcctgtacttgcctctgaaacatgcgcattagatattataggggcaaagtatgtaagagatgttgagaatggggaaataattgttataacagacaataaaattgagagtattaagccatttcctaatgttaatgagcgtccatgtatttttgaaagaatatatttttcaagacctgatagtattattgatggtcgatcagtttattcataccgaaaaaatttaggctctgaacttgcaaaagagtataaaattgatgctgacgttgttgttccaattccagactcaggagttccagctgcattaggattttcgcaaacttctagtatcccttttgaattaggcctaatcagaaaccattatgttggaagaacctttattgagccaactcaaagtattcgccagtttggagtgaaattaaagcatagcgttaatgtctcatatattaaaaataaaaaagtaattttgattgatgattctatagttaggggaacgacagcaaaaaaaatagtgaagatggtttatgatgcaggagcaaaagaggttcatcttggagtctcttgtccaccaattacacatcctgatttttatggaattgatactcctaattatgatgaattaattgcttcaaacaaaaatatagatgaaatgtcatctattattggaacaaaatctctattttttttaagtttggatggaacttaccgagctatgggctgtgaagaaagagataattcatctcctcaatttacagatcactgttttacaggtgagtatccaacaccattaattgatatggaac

SEQ ID NO: 238840 - DNA, 363 bp, Unknown
  Bacterial polypeptide expressing nucleotide sequence isolated from the Sargasso Sea
aatgaaaaaacatatcaagattctaaagaaaaaattaaagaactataatccaagattaaaggaagaatgtggagtttttggtattagcaatgcaaaggatgcttcagctctaacagcacttgggctacatgctctacaacacagaggtcaagaaggttgtggaatagttacttttgatggagaaaaatattattctgaaaaaagatttggtttggttggtgataatttcaataaagaaaaagtacttaataatcttaaggggaattatgcaattggccataacagatacagtacaactggaaacaatatattaagaaacatacaaccttttttcgctgacactaatgcaggtggaattggagt

SEQ ID NO: 238841 - DNA, 889 bp, Unknown
  Bacterial polypeptide expressing nucleotide sequence isolated from the Sargasso Sea
ggtagtggcgatgataaccggttacggaatagtaggttttcgtgacccgcatggaataaggccactcatctttggaatgaaaaaaaatgacggcggccaccgtgacttcatgattgcatcggagtcagtggcattagtttcacaagggtttgagattgagcgtgacgtgtctgctggggaggctgtctttttcgatactgagcataactgtcacacccagcaatgctcagacaatgctcgactcacgccttgtatttttgagcatgtctatcttgcacggccagattcgatagtagacgaagtgtcggtatataaaacacggttaagaatgggtgtaaaattggcagagaaaatctgtcgttctcgtccggatcatgatattgatgttgtcatgccaatccctgattctggacgaacatctgcaatgtcgctcgctgagagtctgggagttccttaccgggaaggtttcatcaagaacaggtatatcggacgaacctttattatgcctggacaggcggtccgtaaaaaaagtgtcaggcaaaaattgagcccgatatcgttagagtttaaagataaagttgtttgccttgtagatgattcaattgttcgaggcaccacatgttcacagattatcggtatggctcgagatgcaggtgcccgtaaggtgtacttttgttcggccgcaccagcggttcgttttccgaatgtttacggcatagatatgccaacatcagaagaacttgtggcgtacaatcgcacggatgaagaggtcgctcaagtcatcaatgcggattggcttgtgtatcacgatcttgatgacttggtagagtgttcaaaggtggggaaccgaagcattgattcttttgaatgctccgtttttgatggcaac

SEQ ID NO: 238842 - DNA, 888 bp, Unknown
  Bacterial polypeptide expressing nucleotide sequence isolated from the Sargasso Sea
taaagatgcatcagctcttactgctctaggcctccatgcgcttcagcatcgaggtcaagaaggatgtggaattgtaacttttgatggaaaaaaatattattcagaaaaaaggtttggattggtaggagataattttaataaagaggaaattttaaataaacttaaaggaaattatgctatcggtcacaacagatatagtactacaggtgacaatattttaagaaacatgcagcctttttttgcagatacaaacgcaggggggatcggagttgcccacaatggaaatttaacaaactcaatttcaataagaaataagttagtagaggatggtgcaatcttttatactacgtctgatacagaaactattgtaaaattaatagcaaaatcaaaaagatcaaaaactattgataaagttgttgatgcaatttttcagatccaaggtggatatgctttagtaatgctcactcaaacatcattaattggagtaagagatcctttgggcataagacctttgattataggaaagctaaaaaatagctatgtattaacatctgaaacctgtgctttagatattattggagctaaatttataagagaagttgaaaatggagaaattgtagttatagaaaataatgagcttaaaagtataaagccttttcctccaaaaaaaatgaggccttgtgtttttgaatacatctattttgcaagaccagatagtattttaaatggtaaagctgcttatgaacatagaaaaaacctaggagtagagctggctaaagaaaataatacggatgcagatattgttgtaccggttccagactcaggtaatgctgcagctttaggttttgcacagcaccttagtaaaaaatttgagcttggattaatcag

SEQ ID NO: 238843 - DNA, 313 bp, Unknown
  Bacterial polypeptide expressing nucleotide sequence isolated from the Sargasso Sea
atgaaaaagattatcaaaatactaaagaaaaagttcaagaattataatccaaaaatcaaagaggagtgtggtgtatttgggattagtaacaatgaagatgcatcaactttaactgcgcttggtctacatgctttacaacatagaggccaggaaggttgtgggatagtgtcatttgacggcaaaaaatatcattcagaaaaaaggtttggtttagttggtgataactttaataaagaaaaagttttaaagtcactacctggaaactatgcaatcggccataatagatatagcactacgggaggtacaactttaa

SEQ ID NO: 238844 - DNA, 1006 bp, Unknown
  Bacterial polypeptide expressing nucleotide sequence isolated from the Sargasso Sea
gggtagttttgctattgctcacaatagatacagtaccactggaggtacaacattaagaaatattcaacctttttacgcagacactaatactggaggaattggagtagctcacaatggtaatcttacaaacgcaataactcttagaaaaaaactagtcgaagatggtgcaattttttatactacgtctgatactgaaacaatcgttcagttaattgcaagatcaaaaagaggaaaagttatagataaaattattgatgctttgtttcaaatacaaggaggttatgctcttgtaatgttagcaagagatttacttattggagtaagagatccttttggaataagacctttggtaataggaaaacttaaagactcttatgtttttgcctccgaaacttgtgcattagatattataggagctaaatatataagagacgtagaaaatggtgaaatagtttatgttgaaaataaaaaacttattagtttaaaacctttcccattaaaaaaaattaggccatgtgtttttgaatatatctatttttcaagaccagatagtattttaaatggaaaatgtgcatatgagtatagaaaaaattttggtgtagagcttgcaaaagaaacgagcattgatgctgatttagtagtacctgttccagactcagggaatgctgcagctatcggttatagccaacatgaaaaaattaattttgatctcggtttaataagaaatcattatgtgggaagaacttttatagaaccagcgcaaaagataagaagccttggagttagattaaaattaaatgcaaataaatctactatcaaaaataaaaaaattgttttagttgatgactctttagtaagaggtacgacctcacataaaatagtaaaaatgttatatgactttggggcaaaagaagttcacgtaagaattgcttcaccagaaattaaatttcctgacttttacggcgttgacacacctacaaaaaaagagcttttagcggctaacaaa

SEQ ID NO: 238845 - DNA, 762 bp, Unknown
  Bacterial polypeptide expressing nucleotide sequence isolated from the Sargasso Sea
ataatgatttgaaaagtataaagccttttcctaaacaaaaagcaagaccatgtgtttttgagtatatttattttgctagacctgacagcttaatcgatgggaagtgtgcttacgaatttagaaaaaattttggctctcaattagcaaaagaaactgatattgatgcagatattgttttgcctgttcctgactcaggtgttccagccgctttaggatatgcagaatattctaaaaaaagattcgaactgggattaataagaaatcattatgtaggcagaacttttattgaaccaactcaaagtatcagaagtttaggtgttaaattaaaattaagtccaacaaaaagtattgttaaaaacaaatcgataatattaattgatgactccttagttcgaggcactacatgtcacaaaattataaagatgctttacgaagctggggctaaagaagtacatgtgaggatagcttgtccagaaataaaatttccagatttttatggcgtagatatgcctacaaaaaacgagttgttagcacacaaaaagaatgtcaaagagatgtgtgagtatataaaagcaaaatctttaaaatttttaagtttagagggtttatacgttggtcttgaaaaaggtaaacgaaataaaacttatcctcaatttagtgatcactactttactggtgattatcctgtaaaaccatcagataatttaggtgaaaataaaataactcaattatcattgcttagtggaaaatctagtaattagt

SEQ ID NO: 238846 - DNA, 559 bp, Unknown
  Bacterial polypeptide expressing nucleotide sequence isolated from the Sargasso Sea
aatgagaaaacatatcaagattctaaagaaaaaattaaagaactataatccaagattaaaggaggaatgtggagtttttggtatcagtaattcaaaagatgcttcagctctaactgcgcttggactacatgctctgcaacacagaggtcaggaaggctgtggtatagttacttttgatggggaaaaatattattctgaaaaaagatttggtttagttggtgataatttcaataaagaaaaagtgctaaataatcttaagggaaattatgcaattggtcataacagatacagcacaactggaaataatatattaagaaatatacagcctttttttgctgacaccaatgcaggtggaattggagtagcacataatggaaatcttactaattcaatagctttgagaaataaactagttgaagacggagcaatattttacactacctcagatactgaaactattgttcaattaattgctaaatcaaagagaccaaaaacaatcgataaagtaattgatgcaatttttcaaattcaaggtggctatgcattaatgatgttaacg

SEQ ID NO: 238847 - DNA, 892 bp, Unknown
  Bacterial polypeptide expressing nucleotide sequence isolated from the Sargasso Sea
cgatattcaacaactggagaaacttcattgaggaatattcaaccattttttgcagatttacatatgggtgggttaagtgttgcacataatggtaatctaacaaacgctttgcttttaagggaggcattagtaaaagacggtgcaatttttaggacaacaagcgatactgagactatcgtacaacttatagctaaatcaaaaagggagaagtttactgataagttaatagactctctttttcagattcaaggtggttactctttagtattaatgacaaataaaaaattagtaggcgtaagggatcctttcggaattagacctttggtagttggaagacttaataaatcatttatttttgcctcagaaacttgtgccttagatatagttggagctaaatttataagagaggtagagaacggagaaatagttgtcgtagaaaatgataatttaaaaagtatcaaaccgtttcctaaacaaaaatctagaccttgcgtctttgaatacatctattttgcaagaccagatagtttgatttcaggaaagtgtgcttatgaatatagaaaaaatctagggcgtgaactagcaaaagaaaataatgatcagtctgatctaattgtaccagtaccagattcaggagtacctgctgccttgggttacgcggaggagtcaggtataaagtttgagctcgcacttattcgaaaccattatgttggtagaacttttattgaacctacacaaaatattagaagcttaggggttaaattaaaacttaacccttctaaaactttagtgaaaggtaaatcaatcacattaatagatgactcattagtaagaggaactacttgtaataaaatagttaaaatgctttacgaggctggagccaaagaagttc

SEQ ID NO: 238848 - DNA, 675 bp, Unknown
  Bacterial polypeptide expressing nucleotide sequence isolated from the Sargasso Sea
aagcaagaatgagaatgggaacaaagcttgctgggcaaatcaagaaaactagacctgatcacgatatcgatgttgtgataccaattccagatagctcagtaactgctgcacatcaattagccgttgacttgaatgtgccctatagagaaggctttgtaaagaatagatatattggaagaacttttattatgccttatcaagaagagaggaagaaatcggtaagaagaaagttaaatattcttgatttagaatttgaaggaaaaaacgtattacttgttgatgactcaattgtaagaggaacaactagtaaaaaaattatagagatggctagagaggctggggcaaaaaaagtttattttgcatccgctgctcctgcaataaagtatcaaaatttatatggaattgatatgcctgcaacagctgagctaatagcatcaaataaatcaaatgatgaagtcgcctctgaaattaatgcagattggttaatctatcaaacactagaagatttaatagattctgtgagggaaggtaatccagaaataagtgaatttgaaacttcaatttttaccggtgagtacttcactcctctagttgaaaattatcttgaagaattagaaatttctaggaaagacgaacttaaaatgcaaagggaaaaatctaaagctaagagctaac

SEQ ID NO: 238849 - DNA, 644 bp, Unknown
  Bacterial polypeptide expressing nucleotide sequence isolated from the Sargasso Sea
aatgaaaaaacatatcaagattctaaagaaaaaattacagaattataatccaagattaaaggaagaatgtggagtttttggtattactaatgcaaaggatgcttcagcactaactgcgcttggactgcatgcgttgcaacacagaggtcaagaaggctgtggaatagtcacttttgacggggaaaaatattattctgagaaaagatttggcttagttggtgataatttcaacaaagaaaaagtgcttaacaatcttaagggaaattatgcgattggccataacagatacagtacaactggaaacaatatattaagaaatatccagcccttttttgctgacaccaatgcaggtggaattggagttgctcataatggaaatcttactaattcaatttctttgagaaataaactagttgaagatggagctatattttacactacttcagacactgaaacgattgttcaattaattgccaaatcaaaaagaccaaaaacaattgacaaagtaattgatgcaatttttcaaattcaaggtggctatgcattagtgatgttaactcaaaactcattaattggcgttagagatccttatggaattagacctctggctattggtaaactaggcaatagttatgtcttagcgt

SEQ ID NO: 238850 - DNA, 966 bp, Unknown
  Bacterial polypeptide expressing nucleotide sequence isolated from the Sargasso Sea
gaaagcatcatcgaccgtaccgtcgccgctttgcaagaagtagagggcgcattttcgttagttgccctccacaatgacacgctgatcggtgttcgtgatccgcacggtgttcgacctctagtgttgggacgttttgaaaatgcctgggttttagcttcggaaacatgtgctctagatattatcggcgcagaatatattcgggacgtgcaaccaggtgaattggtagtaattgacgagaatggcatcaaatcaatgagacctttctcaagtaaacctcgcaagctttgtatcttcgaatatatttattttgcacgacccgatagtacaatagatggccagaatgtatatgacgctcgaaagtccattggaagagagctagcgaatgaaagtggggttgctgcggatatcgtcattcctgttccagattccggcgttccggcggcactaggctatgcagaagcagcagacattccctacgagttaggaattatccggaaccattatgttggacgtaccttcatagaaccaaccgaacaaatacggcatttgggcgttaaattaaaacataatgccaatcgcgatgtgataaaaggtcgccgcataattcttgtagatgatagtattgttagggggacaacatcagtcaaaatagttgaaatgatgcgtgctgctggagcgacagaggtgcacatgagaattgcgagcccacccaccacgcactcttgcttctacggtgttgacacgccttcacgagaccaacttctggcagctaagaacaatatacaagaaatggctggtataattggagtaaacacccttgcattcgtctctctcgatggtctttatcgtgcaatgggtatggagagccggtatggtcccgaccctaaatactgcgatgcctgtttttctggagaataccctattacacctaccgatcaactggagagggaccaagtccacagctct

SEQ ID NO: 238851 - DNA, 928 bp, Unknown
  Bacterial polypeptide expressing nucleotide sequence isolated from the Sargasso Sea
ttacagtaaaaaattaattggtattagagacccttatggaattagacctctagttttaggtaaattaggagatacctatattttctcatcagaaacgtgtgctttggatattattggagctgagtacattagagagatagaaaatggagaaatcgttataattgataaaaatggaatcgaaagtataaagccatttcctaaaatcgatgcaagaccttgcgtatttgagtatatttatttcgcaagaccagacagtattttaaaaggaaaagctgtacacgaatatcgtaaaaatttaggtattgaacttgcaaaagagtcttatgtagaagccgatatgatatctccaataccagactctggtttgccagcagcacttggatttgcaaataagtctaacatagagtttgatatgggaattattagaaaccactacgttggaagaacatttattgagccaacccaacaaattagacagcttggtgtaaaattaaaacacaatcctaataaacaaattataaaaaataaaagaattattttagttgatgactcaattgttcgaggaacaacgtcaaaaaagattgttgacatgctatatcatgctggagcaaaagaaatacatttacgtgtatcaagcccacctataaaataccctgactattatggaattgacacaccaaataaaaaagatctcatagctgcaaatttatctgttgatgaaattgctaaacaaattggcgttaagtctttaaaatttttaagtattgaaggtctttacaaagctctaggatacaaaaatcgaaataataaaaatcctcaactaactgatcattgtttcacaggtgattaccctgtaaaacctacagataataaaaatttaatagataaaaataatcagctatctcttcttagcaacgttagatcgtga

SEQ ID NO: 238852 - DNA, 819 bp, Unknown
  Bacterial polypeptide expressing nucleotide sequence isolated from the Sargasso Sea
gctattttttataccacttcagatactgaaactattgtacaattaattgcaaaatcaaaaagatcgaaaactatcgataaagtaattgatgcaatttttcaaatacaaggtggatatgctttagtaatgcttactcaaaactctcttattggggtaagagatccatatggcattagacctttgttaattggtaaattgggaagtagttatgtattagcgtcagaaacctgtgcattagatattattggtgcaaactttgttagagaagttgaaaatggagaaattgttttaattgaaaataatcaactgactagcatcaagccctttcctcctaaaaaagtaagaccatgtgttttcgaatatatctactttgcaagacctgacagtttattagataataaaactgcttatgaacatcgaaaaaatttaggaaaagaacttgcaaaagaaaacgatattgatgctgatatcgtagtaccagttccagactctggaaatgcagcagcgctaggattttctcaaaaacataaaatgaactttgaacatggtttaataagaaaccattacgtgggtcgaacttttattgaaccaagccaaaaaattagaagtttgggggttaagcttaaattaaatgcaaaccaaaccactattaaaaataaaaaaattattttaattgatgactcgcttgtcagaggaactacttctcataaaatagtaaaaatgttatatgatgctggtgcaaaggaagttcatgttagaatagcttgtcctgaaattagatatcctgatttttatggtgtggatactccaactaaaaaa

SEQ ID NO: 238853 - DNA, 749 bp, Unknown
  Bacterial polypeptide expressing nucleotide sequence isolated from the Sargasso Sea
attgggagctaaacttgtccgagaggtctcaaatggagaggttgttgtaatatctgatcaaggcattcgtagtttcatgcctttcccagttgccccttatcggccatgcatttttgagtacatctattttgctaggccagacagtgtagtgggaggattaagcgtatatgaatgtaggaaaaaaattggtcaacaacttgctaaagagtcgacaaattttggcgaagttgtggtaccagttcccgatagtggtgtgcctgcggcccttgggtttgcggaagagtcgaaaatcccatttgagcttggtattataagaaatcattatgtggggagaacttttatagagccacaacagtctagcagagattttggcgtgaaattaaagcacaatgtaaatcgacaagcagtagatgggaaaagtgtggttctaatcgatgactcaattgtccgaggcaccacttccgttaagattgttgagttgatgcgtgaagccggagcatctgaagttcatatgaaaattgcatcgccaccaataaagtttccagatttttatggcatcgacacgccgaatcaaagccagttattagcgtcatttaaatccatagatgaaatgagaaaatttattggtgcggatagtttgtcgtttctttctgtagatgggttatacaaagctatgggtcacaaaaatgggagggataatgataatccagcatttaccgatcactgttttacgggcgattatcctacga

SEQ ID NO: 238854 - DNA, 628 bp, Unknown
  Bacterial polypeptide expressing nucleotide sequence isolated from the Sargasso Sea
agaataagaaaacttaatctagttgacgaaatagacgtcgttattccaatacctgatagctcaacaactgctgcacttcaacttgctgcagatttaaaaaagccttaccgccaaggctttgttaagaatagatatattgggagaacattcataatgcctcttcaagaggagagaaagaaatctgtcagaagaaagttgaatatccttgatctagaatttaaggacaagaatgtcttgcttgttgatgattcaattgttagaggaacaactagtagacaaataatcgaaatggtaagagaggctggcgcaaaaaaagttttatttgcatccgcatctcctccagttaagtatcaaaacctttatggtatagatatggcagcaactaaagaattaatagctcatgataaaacagaaaatgagattgcagatgctataggagcagatgagctgatatatcaaaaccttgaagacctaattagctcggttcaagaaggaaatcctgaaataaaagactttgaaacatcaatctttacaggaaaatacccaacagatattgatgatggataccttgaaaatctcgaagaggaaagaagtgacatcattaaaatgtcaaaaaaagaaagctaag

SEQ ID NO: 238855 - DNA, 544 bp, Unknown
  Bacterial polypeptide expressing nucleotide sequence isolated from the Sargasso Sea
gatgtgccatatagagagggttttgtaaaaaatagatatattggaagaacatttatcatgccatatcaagaggaaagaaaaaaatcagttagaaggaaattaaatatattggatttagaatttgatggtaaaaatgttttattagtagatgattcaattgttagaggaacaactagcaagaaaattattgaaatggcaagagaagctggagcaaaaaaagttttttttgcttctgcagctccagcaattaaatatcaaaatttatatggtattgatatgcctgcaacatcagaacttatagcatctaataggtccgataaagatgttgctaaagaaattaatgcagattggttaatttatcaaaagcttgatgacctcatagagtctgtaaaagaaggcaaccctgaaatagaggaatttgaaacttcaatttttactggtaaatatataacgcctttaaatgaaaattatcttgaagatcttgaaaacacaagaaaagatgaattaaagattcaaagagaaaaatctaaagcaagcggctagg

SEQ ID NO: 238856 - DNA, 663 bp, Unknown
  Bacterial polypeptide expressing nucleotide sequence isolated from the Sargasso Sea
aatggcacgaattaaagaagagtgtggagtttttggaatttttgacagtagagatgcagctgcattaactgcgcttggattgcatgcgttgcaacatagaggacaagaaggttgtgggatagttacttgtgatggaaaaaatttttttgctgaaagaagacttggtttggtgggtgataactttactaaaggtaaagttttggaaaacttgcctggaaaaaatgctataggtcataatcgttattcgacaacaggaaataatttaattaaaaatgttcaacccttttttgctgatcttcactcaggaggaatagcaatagctcataacggaaatttaagtaacgctttacacttaagaaaagaattggtcaaaaatggttctatttttcaaacaacttctgatacagaaactattgtacaattaatagctaaatctaaaagaacaaaaatagttgataaaattattgatgcactatttaaaattcaaggaggatacgctttaactattttaactaataataaattaataggagtccgtgatccttttggaattcggcctctcgtaataggaaagcttaaaaattcatttgtattagcttctgaaacctgtgcttttgatattataggtgctaaatttattagagaagttaagaacggggaaat

SEQ ID NO: 238857 - DNA, 738 bp, Unknown
  Bacterial polypeptide expressing nucleotide sequence isolated from the Sargasso Sea
gatgcaaaagataaagtcaaagaaatataaaccgaaacttagtgaagaatgcggagtttttggaattagcaatactcaagaagcttctactcttactgctttaggtctacatgccctacaacacagaggtcaagaaggtagcggtattgtttcttatgatggaaaaaattatcactcagaaaaaagatttggattagttggtgataattttaacaaagaaaaagttttaaaaaaattaccaggaaaatatgctattggacataatagatacagtacaacaggagcaacaactctaagaaatgttcaaccattttttgcagataccaatgctggtggtatagcaattgcacacaatggtaatctaactaatgcaattactctaagaaaaaaattagttgaagatggtgcaattttttatagcacttcagatacagaaacaattattcagcttatagctaaatcaaaaagagagaaaaaaattgataaaattattgatgcaatatttcaaattcaaggcgcttatgctcttgtttttctaactcaaaatactcttataggagtaagagatccttttggaataaggcctttggtaattgggaagttaaacaattcttatatatttgcttctgaaacttgtgcactagacataataggagcaaaatatgtaagagaagttgaaaatggagaaattgtctgtattgaaaataataaattaaaaagtattaaaccttttcctaa

SEQ ID NO: 238858 - DNA, 845 bp, Unknown
  Bacterial polypeptide expressing nucleotide sequence isolated from the Sargasso Sea
tgcatctgccttggctgccttaggtttacatgcattacagcacaggggtcaagaaggttgtggaatcgtctcttatgatggaaaaaactatcattcagaaaaaaggcaaggtttagtgggtgatcatttcacggataaaaaaatattagaaaaacttccaggtaattttgcaataggtcacaatcgatattcaacaactggtgaaacctcttatagaaatattcagccattttttgcagatctacatatggggggactaagtgttgctcataatggaaatttaactaacgcattattattgagagataatttagtaaaagagggtgcgatttttagaacaactagtgatactgaaactatagtccaacttattgctaaatcgattagaaaaaaatttattgataaattaattgatgtcctttttcagattcagggaggttactctttggttttattgaccaataaaaagcttgtaggtgtcagagaccctttcggaattagaccattagtaattggtaaacttaaaaactcatttatccttgcttcagaaacttgtgctcttgatataattggtgcgaattttgtgagagaagtagaaaacggagaaatcattattattgaaaatcaagaactcaaatcaataaaaccttttccgaaacaaaagccgagaccatgcgtttttgaatatatttattttgcaagaccagatagcataataaataaccaatgtgcctatgaatatagaaaaaaattgggtatagaacttgcaaaagaaactgatataaaagctgactttatagtgcctgtacctgactccggtgtacctgctgctttaggatttgcag

SEQ ID NO: 238859 - DNA, 820 bp, Unknown
  Bacterial polypeptide expressing nucleotide sequence isolated from the Sargasso Sea
catgtgcggtattgttgggatagttgctcatgaagatgtgaatcaaaatctttatgatgccttaacagtgcttcagcatcgagggcaagatgccgcgggcattatgacctgtgcagaagacagggtgtcgttacgaaaatcgaatgggatggtctacgacgtttttcgccaagatcacatgcgccggcttgtcggtcctatgggtattggccatgtgcggtacccaactgcaggctgtaacagctctgcggagtcccagccgttttatgtcaactcaccgtatgggattgccctcgctcataatggcaatctcacgaattccgatgagttggaagaagagctttacaagtccgacttgaggcatatcaatacatcgagtgacagcgaagtaattctgaatgtgtttgcgcatgaattgcataaagtcggccagcaaaagctcacgccagagggcgtgtttgaagcggttcgtagtgttcataatcgttgtcgaggagcgtatgctgtggtcgcaatgatcactgggtatggcatagttggtttccgtgacccattcggaatcaggcccctaatttttggttccaaaaaaaataaagatgctggccgggacttcatggttgcgtcagagtcggtggccttggtttctcagggctttgaggttgagcgagatgttgctccaggagaagcagtcttctttgatacgcacaacaactgccatatgcgtcaatgttctgaccatgcatcactcacgccttgtatttttgagcatgtgtatctggcgagaccagactcaatagttgatgaagtttctgtttataaa

SEQ ID NO: 238860 - DNA, 406 bp, Unknown
  Bacterial polypeptide expressing nucleotide sequence isolated from the Sargasso Sea
atgcaaaagataaagtacaagaattatagtcctaaacttaaagaagagtgtggagtttttggtattagtaattctttggagtcttcaacattaacagcgttaggcctgcatgcattacaacatagagggcaagaaggttgtggaatagtttcttatgacggaaaaaactatcattctgaaaaaagatttggtttagttggggataattttaataaagaaaaaattttaaaaaatttacctggtaaattcgctgttggacacaatagatatagtacaacaggtggtgcagcattaagaaatattcaacctttctttgctgatacaaatgcaggtggtattgctatttcacataatggaaacttgactaatgctatcactcttagaaataaattagtaaaagaaggtg

SEQ ID NO: 238861 - DNA, 866 bp, Unknown
  Bacterial polypeptide expressing nucleotide sequence isolated from the Sargasso Sea
tacagaaaccatagtaaaacttatagcaaaatcaaaaagaccaaagaaaattgataaagttattgacgctctttttcaaattcaagggggatatgcattagttatgatgacacaaaatactcttattggtgtaagagatccttatggaattagacctctggtcataggaaaattaaaaaactcttatgtttttgcatctgagacatgtgcttttgatattatcggtgcaaaatttgttagagaagttgaaaatggtgaaattgtttatgtagaaaatgatgaattaaaaagtattaagccatttcctcaaaaaaaagtgagaccatgtgtttttgaatatatttatttttcaagaccagatagtattttgaatggcaaaacagcctatgaatatcgaaaaagatttggagctgaattagcaaaagaggatgatttagatgctgacttggttgtgcctgtaccagattctggaaacgcagctgcattaggttacgcggaagaaaaaaaaataaattttgatttaggtctgataagaaatcattatgttggtagaacttttatagagccgtcacagcagattagaagtttaggagttaaattaaaattaaatgcaaatgtttcggttataaaaaataaaaaaattattttggttgatgactctctagttagaggaactacttcatcaaaaattgtaaagatgttatatgataatggtgcaaaagagatacatgtgaggatagctagtccagaaataaaatatccagatttttatggagttgatacacctactaaaaaagaactattagcagcatacaaaactgtagatgagataaaagaatttataaaagcacaatcgcttaaatttt

SEQ ID NO: 238862 - DNA, 894 bp, Unknown
  Bacterial polypeptide expressing nucleotide sequence isolated from the Sargasso Sea
aatgtgtggattagctggtatatattctagtaaacctgttgctgctgagctctatgatagcctaattcacttacaacatcgtggtcaagatgctgccggaatcatcacctataaaacacgtatgcataaatcaaaagggtctggcttagtgcgagatatattcacagacaaaaaaatagctaatttaaaaggaaacattggtattgcacacaaccgctatcctacgcatggtggttttggacatggagaggttcagcctttttggacttcagtgccatacggcatagctttagctcacaatggaaatctgacaaattataatgagctgtcaaaaatgatcactaacagtaaaactcgctatctaaatacacatagcgatacagaagtccttttgcatttgtttgctgatctcctacataagaaacaacaacccgataatgatgatgatgatgagttttttgaaaatctatgctttgctgttaaaaaagtttttgaaaaagcacagggggcctactctgtcgtttctttaattgttgggaaggggttggttgcttttagagacccccatggaattcgtcctcttgtaaagggcgttagggttaatgacaaaggtgaaaaagaatatatcatcgcctctgaaaacacgatgttttattctttggggtttgatccagacggcagtgttttacctggagagcttatttatattaatcaaaatggtaaagtatttaagaaaagaataacaaaacaaaagtttaatccgtgcgtatttgaatacgtttattttgcccgccctgacgcctctctcaacgatgtgagtgtatacagatcaagattaagaatgggtcaaaatcttgctgaaaaatggaaaaaaaacttccctaataaaaatcc

SEQ ID NO: 238863 - DNA, 659 bp, Unknown
  Bacterial polypeptide expressing nucleotide sequence isolated from the Sargasso Sea
agttagtgttatccaagcaagacaaaatatgggaatgaagctagctgaaaaaattaaaaaacatatacctgatgaagacattgatgtagttataccaataccagaaagctcaataactagcggaacaaaagtagcggaatgcttaaataaagaagttatctatggatttgtaaaaaacagatatattggtagaaccttcataatgcctgaacaggatatgagaagaaggtcagtgcggagaaaattaaatcccatcaatgatgaattcaaagataaaaatgtcttattagttgatgattcaatagttagaggaaccactatgaaagaaattgttgctatgtgctataaagctggagctaaaaaagtttctgttgcttcttcatcttcagaagtaaagtttcctaatgtgtatggaattgatatgccagctaagagcgaattaatcgcaagcaatagatctgtagaagaagtaaaagaattcataggttgcgataatttaatttatcaggatttatctgatctagttgattcggttactgaactcaattcagaactaaatgatgttgaaaagtctatttttactggcacctacccaacaaatatttcagatgaatatttagaggatcttgaaaaaaagagacaagctattaattcttaat

SEQ ID NO: 238864 - DNA, 485 bp, Unknown
  Bacterial polypeptide expressing nucleotide sequence isolated from the Sargasso Sea
aatgtttctttgggacaaagctgacgataagttacgtgaagagtgtggtgtttttggtatctctggtcatgaagaggctgcagccgtaacggcactgggattgcacgctttgcagcatcgcggtcaagaagcagctggtattgtaagctgggatggaaaacgttttcattcagagaggcgtgtagggcttgtaagtgatcacttcacaaaaaagccaataatagagagaattcaaggccaaatggctatgggccacgttagatactctacaacgggcgagccagctttgagaaatgttcagccactatttgcggatctttctgtaggcggatttgcgatcgcacataatggaaatttaacaaatgctctgaaattaagaaatgaattggtacaaagtggggcaatttttcagtccacatctgatacagaggtacttcttcaattaatagctcgttcaaaaagtaacggcgtaatcaatcgctttg

SEQ ID NO: 238865 - DNA, 673 bp, Unknown
  Bacterial polypeptide expressing nucleotide sequence isolated from the Sargasso Sea
attgaagaattataaccctaaattaaaagaagagtgtggtgtttttggaataagcaatgcaaaagatgcatcagctcttacagctcttggtcttcatgctcttcaacatagaggacaagaaggttgcggaatagtaacttttgatggagaaaaatattactcagaaaagagatttggtttagttggtgataattttaataaagaaaaagtacttaataatcttaagggaaattttgctattggtcataacagatatagcacaacagggaataatatattgaggaatattcagcctttttttgctgacactaatgcaggtgggataggagtagctcataatggaaatctcacaaattcaatatctttaaggaataaattagttgaggaaggtgctatattttacactacatcagatactgaaacgattgttcaactaattgctaaatcaaaaagaccaaagacaattgacaaagtaatcgatgcaatttttcagattcaaggtggctatgctttggttatgctgacacaaaactctctaattggagtaagagacccttatggtattagacctttggttattggtaaacttggtaacagttatgttttagcatcagaaacctgtgcatttgatattattggagcaaaatttttaagagaagttgaaaaccggtga

SEQ ID NO: 238866 - DNA, 910 bp, Unknown
  Bacterial polypeptide expressing nucleotide sequence isolated from the Sargasso Sea
catgaagaatgcgccatttttggtatttatggaactaatgaggctaacgttaatacagctcttggcttacacgctctgcaacatcgcggtcaagaagcagccggcatcgtcacctttgacggacgacattttcatgcgcatcgtggccttggtcatgtcggtgaaaactttgatgcgggttcagcagaaatgcaggctttacacggccatgtggcaattggacataatcgctattcaacaagcggaaaaaccaatgcctttatggaaatccagccattttcttcagaactcgcttttggtgggtttgctctagcacataacggcaatctgactaacgcggcgcgcttgcgtgcatcactcgtagataccggtagcctgtttcaatcctcatctgacactgaaatcattgtgcatctagtggcgcggtcgcatcaagacactgttattgacagattgattgatgccatcaaacaaattgaaggcgctttttcacttgtttgcattgccaaagacatgttgataggtgtgcgtgacccgcatggtgtccgtccgctggtgctcggcaaacagggtgatgcttttgtattagcgtcagaaacctgtgctttggatattgtaggcgccagtttggtgcgtgacgtcgctcccggtgagatggtagttataaacgaaaatggcatcaattcacgccagccctttcaacctcaaagccaccgtttttgtgtgtttgaatatatctattttgcccgacccgatagtgttttagaggggcgcggcgtctatcacgcacgtaaagcgattggcgaagaacttgctaaagaagcaccggccgatgccgatgttgtcgtgccggtcccagactccgggttgccggccgctctaggattcgccggcgcatcaaaaatcccgt

SEQ ID NO: 238867 - DNA, 565 bp, Unknown
  Bacterial polypeptide expressing nucleotide sequence isolated from the Sargasso Sea
attgaagaactttaatccaaaacttaaggaagaatgtggtgtgtttggcatcagtaatattgaagatgcatctgctttaactgcattggggcttcatgctcttcagcacagaggccaagaagggtgtggaattgttacttttgatggtgaacagtattactctgagaaaaggtttggtttagttggtgataattttaataaagaaaaagtccttaaaagactaaaaggaaattatgcaataggacataacagatatagcactacaggaagcaatactctaagaaatattcagcctttttttgcagatactaatgctggtggaattggtgtagctcataatggaaatttgacgaactctattcatttgagaaaaaaattagttgaagatggagctattttttacactacttcggatactgagacaattgttcaattaattgcaaaatccaaaagagttaagacaattgataaagtagttgatgcaatttttcaaattcaaggaggatatgctttggtaatgctaacacaaaaatcattaataggtgttagagaccctcacgggatc

SEQ ID NO: 238868 - DNA, 736 bp, Unknown
  Bacterial polypeptide expressing nucleotide sequence isolated from the Sargasso Sea
atgaataatcgattaaatttctttaaaaaatttgaggttagacaatctcattttccaagaattcatgaggagtgtggtgtttttggaataagtggatcaaaagatgcagcagctttaacggcacttggtttacatgctttacaacatcgtggtcaagagggttgtggaattgtaagttatgacggtaactcttatcactcagaaagaaagtttggtttagtaggagataacttcacaaaaaaacaatccttagataaattaaagggaaaaatagcaataggtcacaatagatattccactactggtggagaaactatcagaaatattcagcccttttatgctgatctgcatggtggagctataagtattgctcacaatggaaacttaacaaacgctcttttgctaagagagcaaatggtacgtgaaggagcaatctttcagactacatctgatactgaaacaattgtacaattagttgccaggtcaaaaaaaatagaaattgttgataaacttatagacgcccttttacaaattcaaggaggtttcgctctttcaattatagctaatggattgttgattggtgcaagagatccattaggtattcgaccactagttttaggaaaactaaaaaatgcatacatcttagcttctgaaacatgtgctcttgatattatcggtgctaaatttgttcgagagatagaaaatggtgaagtagttattatttcaggtgaaagat

SEQ ID NO: 238869 - DNA, 868 bp, Unknown
  Bacterial polypeptide expressing nucleotide sequence isolated from the Sargasso Sea
tctgacactgaaacaattgttcagcttattgcaaaatcaaaaagattaaaaactattgataaaataatagatgcaatatttcaaattcaaggtggatatgcccttgtaatgttaactcaaaatttattggtaggagttagagatccttatgggattagacccctagttataggaaaattaaaaaatagttacgttctggcatctgagacctgtgcattggatattattggtgcaaaatttattcgagaagtcgataatggtgaaattgttttaattgaaaatgataaactaagaagtattaaaccttttccgataaagaaaatcagaccttgcgtttttgaatacatttattttgcaagaccagacagtattcttaatggaaaaactgcatatgaacaccgtaaaaatttaggtaaagaattagcaaaagaaaacgatattgatgctgatatcattgttccagtcccagactctggaaacgctgcagctttgggttttgcacagcacttaaataaaaattatgaacacggattaattagaaatcattatgttggaagaacctttattgaaccaagtcaaaaaataagaagtttgggggttaagcttaaattaaatgcaaatcaaacaacaattgaaaataaaaagattattcttgttgatgactcattggttagaggaacaacatcacataaaattgtaaaaatgctttatgatgcgggagcaaaagaggttcatgttagaattgcttgtcctgaaattaaacacccagatttctatggagtggatacgccaacgaagaaagagttgttagctgcaaataaaaataatgacgaaatctgtgaatacatcggtgctaaatcattaaaat

SEQ ID NO: 238870 - DNA, 931 bp, Unknown
  Bacterial polypeptide expressing nucleotide sequence isolated from the Sargasso Sea
gaaggttgcggaattgtaagttatgatgcaatttcttatcactcagagaggaaatttggattggttggagataattttacgaagaaacattcattagataaacttaaaggaaaaattgcaatcggacacaatcgttattcaacaacaggcggtgaaacaataaggaatatacaacctttttatgctgaccttcatggtggagctattagcattgctcataatggcaatttaacaaatgcacttcttctaagagatcaaatggtacgtgaaggagcaatatttcaaacaacatccgataccgaaacaattgttcaacttgtagctcgttcaaaaaagaaagatattttaaataaaattattgatgctttaatgcaaattcaaggtggttatgctttatcaattattgctaatggtacattgatgggtgcaagagatccgttaggtattcgcccacttgttttaggtaaatttaaaaatgcatttatccttgcctctgaaacttgcgcgctagatattataggtgcaaaatttatccgcgaaattgaaaatggtgaagttgtagttattaaagacaataaagttgaaagtagaagaccatttccaaaaaaacaaattaaaccatgtgtttttgaatatatttatttttcgcgaccagatagtattttaaaaaacaaaactgcttatgaatatagaaaaaatttaggtacatacttagcaaaagaaaccgatataaaacctgatgtagttgtaccagttccagactctggtgttcctgcagcacttggctttagtcaagagtctggtattccttttgaattagggttaataagaaatcattatgtagggaggacatttattgagccaactcagcaaattagaagtttaggcgtaaagttaaaactaaatcctaacaaaagttcaataaaaaaaa

SEQ ID NO: 238871 - DNA, 965 bp, Unknown
  Bacterial polypeptide expressing nucleotide sequence isolated from the Sargasso Sea
agcgattctgaagtgttgttaaatgtttttgctcatgaacttcaaatggttggagcgattgatcccagcccgagtgatttatttcaggcattacagggtgtctataaacgttgtcatggagctttcgctgcggtcgccatgattattgggactggaatagtcggatttagggattcatttgggattcggcctttggtttacggttttaaagagacagatcagggcatggagtacatgttggcatcagagtctgtagccttggatctattaggattccaaaaaatagctgatgtggagcctggcgaagctgtatttatttctaatgaaggagaaataacgctccagacatgcgctgaacagacacgtttgaatccgtgtatttttgagcacgtttattttgctcgccccgattcaattatagatgacgtgtctgtttataaaagccgactacgtatgggggaatatctcgctcaaaatattctatccaattactcccaaaactctcatgatatagatgtcgtagtgccggttcccgatacaggacgtacatctgcattaccacttgctcatatgctggatgtgaaatttcgagaaggatttgttaaaaaccgctacattgggcgaacatttattatgcctgggcaaaaacaacgacgcagatctgttaggcacaagttggctacaatagatctggaatttaaaggaaaaaacgttctgatagttgatgattcaattgtccgcggaactacaactaaagagattattcaagcggctagagaagcaggcgcaagaaaggtctatatagcctcagccgcgcccgcgctgagatatcaaaatgtctatgggattgatatgcctgcgagagaagaagtagttgcacatgagcgtactgaagaagaggtggcggatattatcgatgccgactggctaggttatcagtcgatcgatgacctcaaatccagtgt

SEQ ID NO: 238872 - DNA, 732 bp, Unknown
  Bacterial polypeptide expressing nucleotide sequence isolated from the Sargasso Sea
tttgatacataatggtaatttgaccaataccagagatttagaaaaacagttatttaagattgataagcggcatacaaattcttctagtgatactgaaatgctattaaatgtatttgcgacagaattgcaagaacaaattcataatcaagagttagaacctgatattatttttaatgccgtcaaatctttgcataaaagaattcagggatcatacgcttcaatcgcattaatttcaggacatggtttattagctttcagagatcctttcggtattaggcctctagtaataggaaaaagactttcattaactacaaaaaaagaagagtggatggttgcaagtgaatctttagttcttgagaataatgattatcaagtcgtaagagatgtagatcctggagaagctgtttttataaatcttaatggcgagtttttttctaagcaatgctctgaaaaaccaatgttatttccatgcgcttttgaatatgtatatcttgcaaggcctgattcaattatgaacgggatttctgtttataaagctcgtttaaaaatgggagattaccttgcggaaacaattaaaaaaacaattaatacaggggatgttgatgttgtaatgcctattcctgattcttcgcgacctgcggctatgcaagttgcaagacaattaggcatagaatatagagaaggtttttttaaaaatagatatgttgggagaacattcataatgcctggcca

SEQ ID NO: 238873 - DNA, 811 bp, Unknown
  Bacterial polypeptide expressing nucleotide sequence isolated from the Sargasso Sea
agtgatactgaaatgttattgaatgtatttgctacagaattacaagaacaaattagtaatcaagaattagaacctgatattatttttgatgctgttaaatctttacacaaaagaattcagggctcatatgcttcaatcgcattaatttcagggcatggtttattggcatttagagatccttttggtataagacctttagtgataggaaaaagactttcattaactacgaacaaagaagagtggatggttgctagcgaatctctagtgcttgagaataacgattatcaagtagtaagagatgtagatccaggagaagctatttttataaatcttaatggtgaatttttttcgaagcaatgttctgaaaacccaatgttattcccttgtgcttttgaatatgtttatttagcaagaccagattcaattatgaatgggatttctgtttataaagcacgtttaaaaatgggagatcatttagctgaaacaataaaagaacaaataaattctggagatgttgatgttgtaatgcctattcctgattcttctcgtcctgcagctatgcaagttgcaagacagctaggtattgaatacagagagggtttttttaaaaatagatatgttggcaggacatttataatgcccggtcagcataaacgtaaaaaatctgtaagacaaaaattaaacgctatgagtgcagagtttaaaaataaaaatgtattaattgttgatgactcgatagtaagaggaaccacttcaaaagagattgttcaaatggcaaaagatgcaggtgcaaataaagtttattttacat

SEQ ID NO: 238874 - DNA, 743 bp, Unknown
  Bacterial polypeptide expressing nucleotide sequence isolated from the Sargasso Sea
atttgcatctgaaacttgtgcattagatattataggcgcaaaacttgtaagggaagtagaaaatggagagattgtatatatagaagatgatgaactaaaaagtttaaaacctttttctccacaaaaaattagaccttgtatttttgaatatatatatttttcaagaccagacagtattttaaatggcaaaactgcttatgaatatcgaaaaagttttggagtgcagttagcaaaagaagataatttagaagctgatatagtagtacctgtaccagattcaggaaccgcagcagctttaggatatgctcaagaaaaaagtattcactttgatttaggattaattagaaatcattacgtaggcagaacttttattgagccttcacaaaaaattagaagtttaggggtaaaattaaaattaaatgcaaatctatctgttattaaagataaaaaaataattttaattgatgactctttggtaagagggactacatctcataaaatagttaaaatgttatataatgtaggagctaaagaggttcacgttagaatagcgagtcccgaaataaaatatccagatttttatggtgtggatatgccaactaaaaaagaacttttggccgcagataaatcagttaaagaaatatgtgattatattaatgcgaaatccttaaaatatttaaccattgatggtctttataaagcgatgggttttgacaaaagaaataatatatatccacaatgac

SEQ ID NO: 238875 - DNA, 393 bp, Unknown
  Bacterial polypeptide expressing nucleotide sequence isolated from the Sargasso Sea
gatgaaaaatcaattaaatttccttaaaaaatttgaggttagacaatctcattttccaagaattaatgaggagtgtggtgtttttggaataagtggatctaaagatgctgcagctttaactgctctcggtctacatgctttacaacatcgtggtcaagaaggttgtggaattgttagttatgatggtaactcttatcactcagaaagaaagtttggtttagtaggagataactttacaaaaaaacaatccttagaaaaattaaagggaaaaatagcaataggtcataatagatattccacaacaggaggcgaaactatcaggaacattcaacccttttacgctgatttgcatggtggagctataagtattgctcacaatggaaaatttaacaa

SEQ ID NO: 238876 - DNA, 869 bp, Unknown
  Bacterial polypeptide expressing nucleotide sequence isolated from the Sargasso Sea
aaaacttaaaaaaagttatgtacttgcgtctgaaacttgtgcactagacatcattggagcaacttttgtaagagaagttgaaaatggtgaaattatattaattgaagataataaggttaaaagtataaagcccttccctcctaaaaaagtcaggccatgtgtttttgagtatatctattttgcaagaccagatagtattttgggtggtatatcagcatatgaacatagaaagaatttaggtaaagaacttgctaaagaaaatgatgttgatgcagatatcgttgtgccagttcctgatagtggtaacgcagcggctttaggatttgcacaatacttaggtaaaaattttgaacatggattaataagaaatcattatgttggaagaacttttattgaaccaagtcaaaaaataagaagtttaggtgttaaattaaaactcaacgcaaataaaacaactataaaagataaaaacataattttaattgatgactctcttgttagagggacaacatcgcttaagatagtaaaaatgctctatgaagctggagctaaagaagtacatgtaaaaattgcatgtcctgaaattaaataccctgatttttatggagttgatactcctacaagaaaagaattattagcagctaataaatcaaataaagaaatctgtgaatatattggagcaaaatccttaaaatttctatctattaccggaatgtatcgagcgattgggtttgataaacgaaatgaaaattaccctcaattgactgatcattattttactggtgattatccagttaaaccaattgatgaattaggagatagtaaaattactcaattatctttgcttagcactgcatcaaataattaat

SEQ ID NO: 238877 - DNA, 952 bp, Unknown
  Bacterial polypeptide expressing nucleotide sequence isolated from the Sargasso Sea
agtgttgcgcataacggggaattttacaaacgcattaaaattaagagaaaagttggttaaagaaggtgcgattttcagaacaacctctgataccgaaactatagtacaattaattgcaaagtcaaaaagacagaaaatgattgataaagttattgatactctttttcaagttcaaggtggatatgcacttgtaatgatgagtaataaaaaattaattggtgcacgcgaccctttaggtataaggcctttagttttaggaaaattaaagaactccttcgttcttgcatcagaaacttgtgcttttgatattattggagcgaattttattcgtgaaatagataatggagaaataattattattgagaatggtgatcttaaaagtataaaaccgttcacaacaaaaaaagctagaccctgtgttttcgaatatgtttatttttcaagacctgacagctttataaatggaaaatgtgcctatgaatatagaaaaaattttggttatgaattagcaaaagaatgtgacgatgttggtgatattgttgttcctgtacctgactctggtgtacctgctgctataggttatagtcaacataaaagtaaaagttttgaattaggattaattagaaatcattatgtcggaagaacttttattgaacctaaacaaaatataagaagttttggggtaaaactaaaattaagttcaaataaatcctctattgaaaataagtctattatattaattgatgactcaattgttagaggcacgacatgttcaaaaattgtaaaaatgctctacgatggaggtgctaaagaagtacatgttagaatatcttcaccaccaattaaatatccagatttctacggtattgatatgccatcaaaaaaagaattactagcggcaaataaaaatttagaacagatgagaacacatatcggagctgactcgcttaat

SEQ ID NO: 238878 - DNA, 831 bp, Unknown
  Bacterial polypeptide expressing nucleotide sequence isolated from the Sargasso Sea
ttcaaatacaaggtggttatgctttggtcatgcttactcaaacctccttaattggagtaagagatccatttggtataaggcctttagttataggaaaacttaaaaatagttatgtgttggcatcagaaacatgtgctctagatataatcggagcgaaatttattagagaagttgataatggtgaaatagttttaatagaaaacgatcaattacaaagcattaaacctttccctacaaaaaaaataaggccttgtgtgtttgagtatatatattttgcaagaccagacagtatattagataaaaaaactgcttatgaacatagaaaaaatcttggcaaagaacttgcgaaggaaaatgatattgacgctgatataatagtacctgtgccagattctggtaatgcagcagctcttggttttgctcagcatcttggaaaaaattttgaattgggtcttattcgtaatcattacgtaggaagaacatttattgagccgagtcaaaaaataaggagtttaggtgttaaactcaaactaaatgctaatcaatctgctataaaagataaaaagataattttaattgatgactctttagtgagaggaacaacttcttacaaaattgtaaaaatgttatatgaggcgggagcaaaagaagtacatgtcaaaattgcttgccccgaaataagatatccagatttttatggtgttgatacaccaactaaaaaagaactacttgcagctaataaaacaaatgatgaaatatgtgaatacattggagcaaaatctttgaaatttttatcattagatggaatgtataaagcgaattggatttgaa

SEQ ID NO: 238879 - DNA, 401 bp, Unknown
  Bacterial polypeptide expressing nucleotide sequence isolated from the Sargasso Sea
aatgtgtggaatagttgggatttcggctgaaacaaacgtagctgctgaaatctatgattctcttttaatgcttcagcatagaggtcaagatgctgcaggtatatctgtttgcaacaatgatgatcaattaaactctagaaaatcaatgggatatgtccgagatgtttttcaacaaagacatatggataagcttgtcggaaattatggaatagggcacgtaagatatccaacggctggtggtgctggtaaagaatttgcgcaacccatgtatgtgaattcaccttatggcataagtcttgcgcacaatgggaatctgactaattctaagcagttaggaactcaattatttcatgcagaaatgagacatctcagaacagatagcgactccgaggttttattaa

SEQ ID NO: 238880 - DNA, 826 bp, Unknown
  Bacterial polypeptide expressing nucleotide sequence isolated from the Sargasso Sea
attgaaaaaatataaaattaataaaattagagaagaatgtggggtttttggtattcatgatttcaatgatgcatctactataacagccttaggtcttcacgccttacaacacaggggacaagaaggttgtggtattgtttcttttgatggaaaaaattttcactctgaaaaaagacatgggttagttggtgataattttacaaataaagaaattttaaagaagcttccaggacgatctgccattggtcacaacagatactctacgactggagagacatctcttagaaatatacagcctttttttgcagatatttatggcggtggaattagtgtggctcataacggaaattttactaatgctttaaaactgagagataaattagtcaaagatggagctatatttagaacaacttcggacacagaaacagtagttcaattaattgccagatcaaaaagattaaaaatgattgataaagttgtagatacactctttcaggttcaaggtgggtatgctttagttatgatgagtaacaaaaaattaattggtgcacgtgatcctttgggcatacgtcctttagttttaggaaaaataaaaaattcttttgtacttgcttcagaaacttgtgcctttgatattatcggtgccaaatttataagagaaattgaaaatggggaagttattgttattgaggacaatgtaataaaaagtattaaaccatttacacaaaaaaagcctaggccttgtgtttttgaatatgtttatttttcaagaccagacagttatttacaggggaaatgtgcctacgaatatagaaaaaatttggat

SEQ ID NO: 238881 - DNA, 943 bp, Unknown
  Bacterial polypeptide expressing nucleotide sequence isolated from the Sargasso Sea
gtatataatcatgaagattcagctgcactaactgccttaggacttcatgctttacagcatcgtggtcaagaagctgcaggaattgtaacttttgatggaacaaagtttatatctgaaagacatcctggattagtaagtgataactttacaaaaacttcagtaataaatcgattagtcggtaatagcgctgttgggcacaatagatattcaacaactggcgctactattcaaagaaatattcaacctttttttgcagatttatggggtggaggatttgcaatatctcataatggaaatattacaaatgcattgtcactaagagatgaactcatcagaaaaggttcaattttccaatctacctctgatacagaaacgatcttacagttagtagctagatctgatgcagatagaacattagatcgcttagttgatgcattaatgcaaatttcaggagcatgggcattagtagtgctaactaacaaaaaattaattggcgctagagatccctttgggataagacctctcgtcttaggggaattagatggaggaaaaatattagcttccgaaacatgtgctcttgatattattggtgcaaaatttataagagaaattgaacctggtgaaatcattgtaattacggaagatggtgaggagagcattaaaccttttccaaatgcaagattacgcccttgtatatttgaatatatctatttttctagacccgattcaatgttagatgggaaatctgtttatgaatgcagaaaatcatttggaaaaaatctagcaaaggaatgtccggctaaagccgatattgttgttccggttcctgactcgggcgttccagcagctttaggatactctgaagaatcaaaaataccttttgaattatcaataataagaaatcattatgttggaagaacatttattttacctacgcaatcaa

SEQ ID NO: 238882 - DNA, 919 bp, Unknown
  Bacterial polypeptide expressing nucleotide sequence isolated from the Sargasso Sea
atgtgcggagtcgtaggcattatcagcagtaggcccgttaaccaagaaatatatgatgctttaacagtgctgcaacaccgtgggcaggattcagcaggaatcatgacggacaacaacggtgtgctttgtcttagaaaaagcaatggtttggtcaatgatgttttttcaaatgaacacatgactagactgagaggcaatatgggcatcggtcatgtacgctatccaaccgcaggaacactcagttcatcagaggcacaacctttttatgtgaactctccatttggaatttgcttggctcacaatgggaatcttgttaacaatgaggagcttagaaagcatctaagtgaagtggatcgaagacatttaaatactgaatctgatacagaggctttattgaatctatttgcccatgaacttcaggaaaattttgatgggagtctctctcctgaaattattttcaaagctgcaactcatctttttgataaatgctcaggcggttatgccgttgtttcaatgattctgaatgagggactggtggccatgagagatccaaatggaattcgtcctctaatactcggaaagagagaagttgggcagggtactgaatatatgattgcttctgaaagtgtggcattggacatcgctgattttgaaatcatgagagatgttaagcctggtgaagtgatttacatcaccaaggaaggagaattgttttctaagcaatgcgtgaaaccaaaatcatacacgccttgtatatttgagtttgtatattttgcaaggccagattcgatcattgatggcatgtcagtttataaatctagactcagaatgggtgagtatttggcacagagaatcataaaaaaaggtctgcatcacgatgtggatgtagtgattccaattcctgataccagtcgatcaa

SEQ ID NO: 238883 - DNA, 835 bp, Unknown
  Bacterial polypeptide expressing nucleotide sequence isolated from the Sargasso Sea
gataagataattgatgctatatttcatattcaaggcggatatgctttggtgatgatgacaaaaaatacacttataggactaagagatccttatggtattaggcctctggttataggaaagttaaaaaactcatacgtatttgcgtctgaaacttgtgctttagatattataggcgcaaaatttgtaagagaagttgaaaatggagaaattgtctatgtagaaaatgatgaactaaaaagtttaaaacctttttccccaaaaaaagttaggccttgcgtatttgaatatatatatttttcaagacctgatagtattttaaatggaaaaaccgcttatgaatatagaaaaaattatggcattcaattagcaaaagaagacgatatagaagcagatatagttgtgcctgttccagactcgggaaacgcagcagccttgggatatgctcaagaaaagaagttatcttttgacttaggattaataagaaatcattacgttggtagaacttttattgaaccttctcaaaaaattagaagtttaggtgtaaaattgaaattaaatgcaaacttatctgttattaaggataaaaaaataattttaattgatgattcgttggtcagaggaactacgtcacataaaattgttaaaatgttatataatgcaggagcaaaagatgttcacgtaagaattgctagtcctgaaattaaatttccagatttttatggtgttgatatgcctactaaaaaagaactcttagcagcaaataattctgtaaaagaaatatgcaattttatcaacgccaaatctttaaaatatttaagtatagatggtctttata

SEQ ID NO: 238884 - DNA, 665 bp, Unknown
  Bacterial polypeptide expressing nucleotide sequence isolated from the Sargasso Sea
tggcgttagagacccttttggaattagacctttaataataggcaaattaaaaaattcttatatttttgcctctgaaacatgtgcgctagatattgtgggagcaaattttatcagagaagttgaaaatggggaaatagtaataatagaaaataacgagatgaaatctattaagccttttcccaaacaaagatcgagaccgtgtatttttgaatatatatattttgctaggcccgatagtttaataaatggcaaatgcgcttatgagtatagaaaaaaattaggctctgaattggcaaaagaaactgatataaatgcagatttagtagttcctgtccctgactcgggggtaccagcagcattaggttatgctgaacaatctaagaaaaaatttgagttgggtttaatcagaaatcattacgtaggaagaacttttattgaaccctctcaaaatataagaagtttgggtgttaaattaaagcttagttctacaaaatctattgttaaaaataaatcgataatactcatagacgactcattagtaagaggaactacatgtcacaaaatagtaaaaatgctctatgaggcaggcgctaatgaggtgcatgtaagaattgcatgcccagaaatcaaattcccagatttttacggagtggatatgccaacaa

SEQ ID NO: 238885 - DNA, 834 bp, Unknown
  Bacterial polypeptide expressing nucleotide sequence isolated from the Sargasso Sea
gggtcttgtgcgtgaagtttttagtcagaatcacttcgaaagattaagaggaaactatggaattggtcatgttagatacccgacagcaggaggtaatacaaaagaatacgctcagccaatgtacgttaattcgccatatggcatttccttggctcataatggaaatttatcaaatactcccgatttagctaaagaactttttcacagcgatttgagacatatttcaactgattctgattcagaagttttactcaatattcttgctcatgaaatttcaaaacataaagaaaaagatccaagtccggagatattctttgaagcaatttctaacacttttctaagatgcgaagggagtataagtgttgtttcaattattaccgattatgggcttcttgccttcagagataagttaggaataaggcctttaattcttggttcaagagaaaatgaatctggaggtttagactatatggttgcttctgagagtgcagccttccactccaatggtttcaagatcaaaagagatattgctccgggagaggcagtatttatcactttcgatggacagcttttttcaaatcaatgcgaagaagaaccaaaactcactccctgtttattcgaatttgtatattttgctagaccagattcaattattgatggagttagtgtttatgaagctagacagaatatgggagaaagattggcaaaaaaaattaaatctgagattcctcttgatgatattgatgttgtcatgccaatacctgagagttcaatagtcagtgggacaaaagtagccgagtatctcgataaacaaattgcctatggcttcgtaaa

SEQ ID NO: 238886 - DNA, 766 bp, Unknown
  Bacterial polypeptide expressing nucleotide sequence isolated from the Sargasso Sea
atgaaagaaataagagaagagtgtgggatttttggtatctatgattctgaagatgcttcgactttgaccgctttgggtcttcatgctttgcagcatagaggtcaagagggatgtggcattgtatcttttgacggaaaaaattttcattcagaaaaaagaaatggtttggttggcgataattttacaaacaaagaagttttaaaaaaattacctggaaattctgcaataggtcataatcgttattctacaacaggtgagtcttcgtttagaaacattcagcctttctttgcagatctatatggaggaggtatcagcatcgctcacaacggcaacctaacaaatgccattcagctaagagaaaacttggtaaaagatggagctatttttcgaacaactacggatactgaaactattgttcaattaattgcaaaatctagcaggagtgaagtcgtagataaaattattgataccctatttcaaattcagggtggttatgcattggtgattatgacaaataaaaaattaataggagtgagagatcctttgggaataagacctttggttttgggaaaattaaaaggctcatatatcctcgcttctgaaacttgtgcgctagatattattggtgcaaaatttattagagaaattgaaaatggtgaaataataataatagaaaaagaatcatttaaaagtttaaatccttttccaaagaaaaaaagcagaccgtgtatttttgaatatatttatttttcaagaccagaatagt

SEQ ID NO: 238887 - DNA, 688 bp, Unknown
  Bacterial polypeptide expressing nucleotide sequence isolated from the Sargasso Sea
tggtggtataggtgttgctcataatggaaacttaacaaattcaatttcattaagaaataaattggttgaagatggtgctattttttacactacctctgataccgaaacgattgttcaactaattgcaaaatctaaaagaccaaaaacaatcgataaggttgtagatgctatatttcaaatacaaggtggatatgctttggtgatgctgactcagaactctttgataggagtaagagatccatatggaataagaccgttagtaattggtaaattaggtaagagttatgtgctagcatctgagacatgtgctttagatattattggcgcaaaatttttaagggaagttgaaaatggtgaaatagtttttatagaaaataatgaattaacaagtattaaaccttttcctccaaaaaaggtaaggccatgtgttttcgaatatatatattttgcaagaccagatagtctcataaataacaaaactgcatatgaacatagaaaaaatttaggaaaagaacttgcaaatgaaaacaacattgatgctgatatagtggtgcctgtaccagattctgggaatgcagcagctttaggattttctcaaaagttgaaaattaattttgaacatggtctaataaggaaccattatgttggtcgaacttttattgagcctagtcaaaaaattagaagttta

SEQ ID NO: 238888 - DNA, 578 bp, Unknown
  Bacterial polypeptide expressing nucleotide sequence isolated from the Sargasso Sea
aatgtgtgggatagttggaatttctgctgaaaccaacgtagctgcagaaatatatgacgctcttttaatgcttcagcatagaggacaagatgctgctggcatttctgtatgtagttctgaagatcagttaaattcaagaaagtccatgggttatgtgcgtgatgtttttcaacaaagacacatggaaaagcttgtaggtaactatggtattggtcatgttagatatcctactgcaggtggtgctggcaaagagtttgctcaaccaatgtatgttaactctccatacggtatcagtttagctcacaatggaaatctaactaattcaaaacaactcgctactcagctttttcacgctgagatgagacatctacaaactgatagcgattcagaagttcttctcaatatatttgcacatgagttaggaaaacaaagagagatttatccatctgcagaacatattttcaaggctgttgctaaaacacatattagatgtgatggagcttatgcagttctagctctaatatctggctatggcatgttagcctttcgtgataataatgggataagaccactttcaa

SEQ ID NO: 238889 - DNA, 474 bp, Unknown
  Bacterial polypeptide expressing nucleotide sequence isolated from the Sargasso Sea
tatgtgcgggatagtagctgtttacggaaccaacaatgtagttcgcgatatatatgaatcgctaactgtattgcaacatcgcggccaggatgcctcaggtattctaacaaatcatgacggtaaaattactctacgaaaatcattgggcttagtcagagacggatttgatgctaaacatatcacgagattaaaaggtaagttaggaatcggacatgtaagatacccaactgctgggcatgctgatagttccgcagaagcccagccattttatgttaattcaccctatggtatcggtttagcacataatgggaatctcattaattcaactgatttaaagaaaaatttattttcagaagatcttagacatataaatacaaaatctgactcagaaatactcttaaatatatttgctcatgagctacatttgcacagcaaagaatcttttactccagatgatgttttttatgctgttgc

SEQ ID NO: 238890 - DNA, 790 bp, Unknown
  Bacterial polypeptide expressing nucleotide sequence isolated from the Sargasso Sea
aatttccagatgaaaaaaactacgatgatgctaaagaaaaagttcaagaactttaatactaaaataaaagaagagtgtggtgtatttggaataagtaataataatgatgctgcggctcttactgctttaggattgcatgcacttcagcacagaggacaagaaggatgtggaatagtatcttttgatggaaaaaaatatcactctgaaaaaagatttggattagttggtgataactttaataaagaaaaagtattaaaaaaattatctggaaattatgcagttggacataatagatatagtacaacaggtggaacaacattaagaaatattcaacctttttatgcagataccaatgcaggtggtataagcatatctcataatggaaatctaacaaacgcaattacattaaggtcgaaattagtcaaagatggagctatcttttataccacatctgatacagaaacaattgtccaattaattgcaaaatcaaaaagacaaaaaactattgataaaataatagatgctttatttcaaatacaaggcggatatgcacttgtaatgcttacacaaaaaactctaatcggtgtaagagatccatttggaataagacctttggttgttggaaaaattaaaaattcttatgttctagcatcagaaacttgtgcattggatataataggagctaaatatataagagatgttgaaaatggtgaaatagtttttattgaagatgataagttagaaaggataaaaccttttcctaaaaaaaaacagagaccatgtgtattga

SEQ ID NO: 238891 - DNA, 862 bp, Unknown
  Bacterial polypeptide expressing nucleotide sequence isolated from the Sargasso Sea
gtaagagatccatatggcattagacccttgttaattggaaaaatggaaagtagctatgtcctagcatcagaaacctgtgcgctagatattattggtgcaaactttttaagagaagtacaaaatggtgaaatagttttaattgagaacaatcaactgattagtataaaaccttttcctcctagaaaagtaagaccatgtgtatttgaatatatatactttgcaagaccagatagtttaatagataataagactgcttatgaacatagaaaaaatttaggtgttgagcttgcaaaagaaaataatatcaatgcagatattgtggttccagttccagactctggtaatgcggcagcactaggattttctcaaaaccttaaaataaactttgaacatggtttaattagaaatcattatgtgggtcgaacttttatcgaaccgagtcagaaaatccgaagcttaggtgttaagcttaaattgaatgctaaccaaacaaccatcaaaaataaaaaaattattttaatagatgactcacttgttagaggaactacttctcataaaatagtaaaaatgttatatgatgcaggtgcaaaagaggttcatgttagaatagcatgtcctgaaattagatatccagatttttatggtgtggatactccaaccaaaaaagaattattagccgcaaacaaatcaaatgatgaaatttgccagtacattggcgctaaatcattaaaatttttgtccattgatggtatgtatagagctattggttttgataagcgaaatgatacctaccctcaattgacagatcattattttacaggggattatcctgttaaaccagtcgatgaactaggagatagca

SEQ ID NO: 238892 - DNA, 811 bp, Unknown
  Bacterial polypeptide expressing nucleotide sequence isolated from the Sargasso Sea
ttgaaagaagaatgtggaatatttggtataagtaatgccaaagatgcatcagcattaactgctcttggacttcatgctttacagcatagaggtcaggaaggttgtgggatcgttacatttaatggaaaacaatatttttctgaaaaaagatttggattggttggtgataattttaataaagaaaaactgctaaataaattgcaaggagattatgcaataggacataatcgatatagtacaacaggggaaaatgctttaagaaatatccagccattttttgctgatactaatgcaggaggtgtaggtgtggcacacaatggaaatttaacaaattcaatttctttgagaaaaaagttagttgaagatggagcaattttttataccacatccgacacagagacaattgttcaattaattgcaaaatctaaacgtattaaaacaattgataaggttgtagatgcaatttttcaaatacaaggggggtatgctttagtactgcttactcaaacatctttgattggtgtaagggatccatttggaattagacctttagtaatcggtaaattaaaaaatagttatgtatttgcgtcagaaacatgtgctctagatatcattggtgctaaatttattagagaagttgagaatggagagattgttttaattgaaaatgatgaattaaaaagcattaaacccttccctccaaaaaagataaggccttgtgtttttgaatacatctattttgctagacctgatagcattttaaataaaaaaacagcttatgaacatagaaaaaacctggaacagagctagc

SEQ ID NO: 238893 - DNA, 487 bp, Unknown
  Bacterial polypeptide expressing nucleotide sequence isolated from the Sargasso Sea
atgtgtggtatcgtcggaatagttggccaatcatcggttaatcagaccatttatgacgcactgaccgtgcttcaacacagaggtcaggatgcggcaggtattgtgaccgttgatcgtggtgctttcagactacgtaaagccaatggtctggtcaaagatgtatttgaagtcaaacacatgcagcgcctacagggcaatgcaggtattggccacgtacgttatcctactgcaggcagttccagcgcgtcagaagcgcagcctttctatgttaactcgccatttgggatttcattagcccataacggtaacttaaccaacacggttgaattagctgaaggcctgatcaaaaaacgtcgccatgtgaacaccacatccgactcagaagtattattaaacctgctggccgatgagctgcaaaaaaccactagcttaatgctgacacctgacgaagtgttcgacactatcgctaaagtgcacgagcaagccc

SEQ ID NO: 238894 - DNA, 763 bp, Unknown
  Bacterial polypeptide expressing nucleotide sequence isolated from the Sargasso Sea
agtaggcgtattttccgctgatgaacctgtaactcgtattgcgttttttgggttatttgctctacaacatagaggacaggaaagtgcaggttttgcttcatgggacggaaccgaactaaggattaaaactgccatgggtcttgttgcacaaggcttcactgaagatcaaatatccttgctacctggctactcggccattggtcataccagatactcaaccacaggaagcagtcattcaaaaaatgcccaacctatcagatcaaaaggaccaaatggagaaattgctcttgcacacaacggtaatgtcgttaattctgtagaacttcgtagagaacttattgattggggctgtaactttgaaacatcaaatgattctgagatcatcgcccatatgctcacatatttacctggttcagactgggggcaaagatgttcttcattgatgagacgacttagcggagcgtattctctgactgtgctcaccaaagagggagttatggctatacgtgatcctttaggtgtcaggccgttatgcattggctctcttggtaaaggctgggtaattgcatcagaaacctgtgctctcgatcatgtcggggctaaattcattcgtgaagttatgccaggagaagccataatggtaaattcagatggcataaagacaatctaccaaaaaccgagtaatggccgagctgcttcttgcatctttgaaaacatttattttgctagacctgatagcagtttggatggaaaacttgtctat

SEQ ID NO: 238895 - DNA, 848 bp, Unknown
  Bacterial polypeptide expressing nucleotide sequence isolated from the Sargasso Sea
ttttgcctctgaaacttgtgctttagatatagttggagcaaacttcattcgtgaggttgaaaacggagagattgtaataatagagggtaatcagattagctgcattaaaccatttcccaaactaaagtctaggccttgtgtttttgaatatatctattttgcaagaccagacagtttaattaatggaaagtgtgcttacgaatatagaaagaatttgggttttgaacttgctaaagaaaccaacttaaaagctgatttagtagttccagttccagactctggagtgccagcagcccttgggtttgcagaacaatcaaaaaagaaatttgagttaggtttaattcgtaatcattatgtgggaaggacttttatagagcccacacaaaatataagaagtttgggtgtaaaattgaaacttaattcaacaaaatctttggttgaaaataaatcaataatccttattgatgactctttagtaagaggcactacttgtcataagatagttacaatgctttatgaaaatggtgcaaaagaggttcatgtaagaattgcttgcccggaaattaaatatccagatttttatggtgttgatatgcccacaaaagaggaattgttagcatataaaaaaaataatgatgaaatgtgtaaatatattaatgcaaaaagtttaaaatttctgagtttagagggtttatatagagctttgacggggcaaaaaagaaacaatatatatccacaatttagtgatcattattttactggtgactatcctataaagccctctgataatttacatggtttgaaaataaagcaactttctttacttagcggaaaatcaaataactagt

SEQ ID NO: 238896 - DNA, 657 bp, Unknown
  Bacterial polypeptide expressing nucleotide sequence isolated from the Sargasso Sea
attgaggaactttgatcctagattaaaggaggagtgtggtgtgtttggtatagctaatgctaaagatgcatcagcattgactgctctaggacttcatgctcttcaacatcgaggccaagagggatgcggaattgttacatttaacggggagcaatatttttctgaaaaaagatttggtttagttggagataattttaataaagaaaaagtgcttaaaaagcttcctggtagttatgctattggtcacaataggtacagtactacaggtgaaaataccttgagaaatattcaacctttctttgcagacacaaacgctggtggtatcggagttgctcataatggaaacttaacaaactctatttcacttagaaaaaaacttgttgcggatggagcgattttttatactacctctgacactgagacgatagtgcaattaattgcaaaatcaaaaagagcaaaaactatagataaaattgttgatgcaatttttcaaattcagggtgggtatgctttagtcatgctaactcaaaactctctagttggggtaagagatccttatggaattcgaccactagtgataggaaaactaaaaaatagttatgtattaacttctgaaacatgtgccctagatataaatggtgctaaattcgtaagaga

SEQ ID NO: 238897 - DNA, 757 bp, Unknown
  Bacterial polypeptide expressing nucleotide sequence isolated from the Sargasso Sea
aaactaaaaagtattaaaccatttccagaaaaaaagattagaccttgtgtttttgaatatatatattttgcaaggccagatagcattctcaataaaaaaacagcctatgagcatcgtaaaaatttaggaaaagaattggcaaaagaaaatgatattgatgctgacattattgtgccggttccagactcaggtaacgctgcagctttaggttttgcgcaacatttaggtaaaaactatgaacatggattaattagaaatcactatgtgggaagaacatttatagagccgagtcaaaaaataagaagtttaggagttaagcttaaactaaatgcaaatcaaacaacaatagaaaacaaaaaaattattcttgttgacgactctttagttagaggaaccacatctcataaaatcgtaaaaatgctttatgatgctggtgcgaaagaaattcatgtaagaattgcttgtcctgaaattagatacccagatttttatggagttgatacaccaacaaaaaaagaattattagcagcaaacaaaaataatgacgaaatctgtgaatacattggtgctaagtcattaaaatttttatccattcaaggcatgtataaagctattggatttgataaaagaaatgaaaattatccacaattaacagatcattatttcaccggagattatcctgtaaaacctattgatgaactaggtgatagcaaaataacacagctttctttattaagtactgcatcaaataattaat

SEQ ID NO: 238898 - DNA, 783 bp, Unknown
  Bacterial polypeptide expressing nucleotide sequence isolated from the Sargasso Sea
agttaaactgattgctaaatctaaaagaataaaaacaatagataaaattattgatgctatatttcaaattcaaggtggctatgcacttgtgatgatgactcaaaatacccttataggagtaagagatccttacggaattagaccactagtaattggcaaattaaaaaactcgtatgtatttgcctccgagacatgtgcctttgatataataggagctaaatttgttagagaagttgaaaatggcgagatcgtttatattgaaaatgatgaactaaaaagcattaaaccatttccaccaaaaaaagtcagaccttgcgtttttgaatatatttacttttcaagaccggatagtattttgaatggaaaaacagcctacgaatatagaaaaaactttggagcacaacttgctaatgaggacaatataaatgctgacttagttgtgcctgtaccagactctggaaatgcagcggcattaggctacgctgaaaaaaaaggattaaaatttgacttaggtttaataagaaatcattatgttggcagaacttttattgaaccatctcaacaaattagaagcttaggagttaagttaaaattaaatccaaatatttctgtgattaaagataaaagaataattctagttgatgactcacttgtaagaggtactacatcgtcaaaaatagtgaagatgttatacgactctggagcaaaagaaattcatgtgagaatagcaagccccgaaattaaatttcctgatttttatggtgttgatacaccaacaaaaaa

SEQ ID NO: 238899 - DNA, 946 bp, Unknown
  Bacterial polypeptide expressing nucleotide sequence isolated from the Sargasso Sea
ttttttcaatctacatctgacactgaaacaattttgcaattagtagcgcagtctgagagaaagcaaatagttgataaacttatagatgctttatttcaaatccatggcgcctattcacttgttattcttacaaataagaaacttattggcgtaagagatccttacggaataaggcctttagttcttggtgacctcaatggggccccagttctagcttcagaaacatgtgctcttgatattattggtgcaaaatttataagagaaattgaaaatggagaaataataataatttcagaaaaagggatggaaagtattagacctttcccgaaagttgctgaaagaccatgtatttttgagagaatctatttttctcgacccgacagtatgctgggaggtaatacagtttattcttatagaaaaaatcttggaatagaattagcaaaagaacatcaagttgatgcagatatagttgtacctgttcctgactcgggggttccagccgctcttggctatgctcagcagtcaaatacgccatttgaacttggtataattagaaaccactatgttggaagaacatttattgagccatcccaaagtattagacaatttggtgttaagcttaaacataacgctaacgtatcttatattaaaaataaaaaagttattttaattgatgattcaattgtgagaggaactacagctaaaaaaattattaaaatgatctatgatgcaggtgcaaaagaagtacatttgggtatagcatgtcctccgataaagcatcctgatttctatggtatagatacacctgactataatgaacttattgcgtcaaaaaacagtattgaagagattaataaagctattggatctaaatctttatttttcttatcattagaaggaacttatcaagctatgggttatgactccaagaaataccgatcaacct

SEQ ID NO: 238900 - DNA, 733 bp, Unknown
  Bacterial polypeptide expressing nucleotide sequence isolated from the Sargasso Sea
aatgtgtggaattgttggaatagttcaaaaagataattgttttacagaactttatgattctttaattatgttgcagcacagagggcaagatgcagctggaattactgtatgcgaaaatggtcgtctacattcaagaaaggctaaaggccttgtaaaagaagtttttagtcagcaacattttgagagactaaaaggtaattatggtattgggcatgttagatatccaacagccggaggaaattcaaaggaatatgctcaaccaatgtatgtgaattccccatatggtatttctttggcccataatggaaatttatcaaatacttctgatcttgcagaagagttatttcatagcgacctaagacatatttcaactgattctgattcagaagttctattaaatattcttgcacatgagatttcaaaaagaggcaaaaatgagcctagtcctgatactttttttgatgctgttgaaatgacttttcaaagatgtgaaggcagcataaatgtcgtctcaataataactgattatggtttattggcatttagagataaatttggcataaggcctcttacattagggtggagacaaaatagtgatggtagtaatgattatatggttgcatcagagagttgtgcatttgcctcttcaggttatgaactaaaaagagatataaaaccaggtgaagctatctttattacttttgatggagaactctattctagaatgtgctca

SEQ ID NO: 238901 - DNA, 797 bp, Unknown
  Bacterial polypeptide expressing nucleotide sequence isolated from the Sargasso Sea
gatgctatttttcaattcaaggtggatactcacttgtaatgatgacacagaatactttattggtgttagagatccatacggaattagaccattagtgattggtaaattaaaaaattcatatgtgcttgcttcggaaacttgtgcatttgacataattggagcaaaatttgtaagagaggttgaaaatggagaaattgtttatattgaaaatgatgaattaaaaagtattaaaccttttcctccaaaaaaaattagaccatgcgtgtttgagtacatttatttctctagaccagatagtatcttaaacggtaaaactgcatacgaatacagaaagaattttgggcaacaattggcaaaagaggacaaaatagaagcagacttagttgtgcctgtcccagactcaggtaacgctgcagcactcggatatgctgaagaaaaaggtctaaaattcgacctaggtctaattcgaaaccactacgttggtaggacttttattgaaccctctcaacaaattagaagtttgggagttaagctaaaattgaatccaaatatctcagtaataaaaaataagaggattattttggttgatgactcactagtaagaggtactacatcgtcaaaaatagtaaaaatgctatacgactctggagcaaaagaagttcacgtgagaatagcaagtcccgaaattaagtttcctgatttttatggagttgatacaccgacaaaaaaagagcttctagcggctaacaaatctacagctgaaatatgtgaatttataagggcaaaatcattaaaat

SEQ ID NO: 238902 - DNA, 865 bp, Unknown
  Bacterial polypeptide expressing nucleotide sequence isolated from the Sargasso Sea
aatgtgtgggatagttggaatttctgctgaaaccaacgtagcagcagaaatatatgacgctcttttaatgcttcagcacagaggacaagatgctgctggcatttctgtatgtagtgctgcagatcagctaaattcaagaaagtccatgggttatgtgcgtgatgtttttcaacaaaggcacatggaaaagcttgaaggtaactatggtattggtcatgttagatatcctactgcaggtggtgctggcaaagagtttgctcaaccaatgtatgttaattctccatatggtatcagtttagctcacaatggaaatctgactaattcaaaacaacttggtaatgagcttttccacgcagagatgagacatttgcagactgatagcgattctgaagttcttctcaatatatttgcacatgagttaggaaaacaaagagagatttatccatccgcagagcatattttcaaagcagttgctaaaacacatataagatgtgatggtgcttatgcagttctggctctaatatctggctatggaatgttagcctttcgtgatgataatggaattagaccgctttcaattggggttagaaaaggcaaaaccagaaacgattatataatttcgtctgaagatgcattatttactccacttggttatgaaaagcttagagatgtagatcctggagaagcagtatttattgataaacacggagagttattttcacagcaatgttcagatgatcctcaaaaaagaccatgtatttttgagtatgtttatttttcaagaccagattctaaaatagatgaaatatctgtatataaagcaagaatgagaatgggtacaaaacttgctggtcaaattaaaaag

SEQ ID NO: 238903 - DNA, 596 bp, Unknown
  Bacterial polypeptide expressing nucleotide sequence isolated from the Sargasso Sea
gatgaaaaatcgacaaaatttcctaaaaaaattcgaggtaaggcaatctcatgttcccagatttaatgaggagtgtggtgtttttggaataagtggaaccaaagatgctgcagctttaacagctcttggtttgcatgcgttgcaacatcgtggtcaagaaggttgtggaattgtaagttatgatggcaactcctatcactcagaaagaaaatttggattggttggagataattttacgaagaaacaatcattagataagttaaagggaaaaatagcgataggacacaatcgctattcaacaacgggtggtgaaacaataaggaatatacaacctttttatgctgatcttcatggtggagctattagtattgctcataatggtaatttaactaatgcactccttttaagagagcaaatggtacgtgaaggtgcaatatttcaaacaacatcagataccgaaacaattgttcaacttgtagctcgttcaaaaaagaaagatattttaaataaaattattgatgctttaatgcaaattcaaggtggttatgctttatcaattattgctaatggtacgttgattggtgcaagagatccat

SEQ ID NO: 238904 - DNA, 935 bp, Unknown
  Bacterial polypeptide expressing nucleotide sequence isolated from the Sargasso Sea
ttctttaggaactccagccattttttgctgatttgcacatggggaggtttaagtgttgcccataatggaaatttaacaaatgcattattattaagagaaagtttagtaaaagaaggtgctatttttagaactactagtgacactgaaactatcgtccaattaatagcaaaatcaaaaagagataaatttttagataggctaattgatgctctattccaaattcaaggaggctatgctttaattttgatgacaaataaaaaacttgttggtgtaagagatccaatcggaatacgacctttagtaattggaaagttaaaagattcttatattttcgcatctgaaacttgtgcactagatattgtaggtgcaacttttgtaagagaagtagaaaatggagaaattgtaataatagagaataataatttaaaaagtgtaaagccttttcctaatcaaaaaccaaggccttgtatatttgagtatatttattttgctaggcctgatagtttaattaatggagagtgtgcttacgagtatagaaaaagattaggtgcagagctcgcaaaagaaacagatttaaaagctgatttagttatccctgttcctgactctggtgttccagctgctcttgggtatgctgagcaatcgaaaagaagatttgaattaggtttgattagaaatcattacgtcggaagaacttttattgaaccaacacaaaatataagaagtttgggtgtaaaattaaaacttagcccaacgaagaccactgtgaaaaataagtcaataatcttaatagatgattctcttgttagaggaactacttgccataaaattgttaaaatgctttatgagtcaggagccagagaaattcatgtgagaatagcgtgccctgaaattcgatttcctgatttttatggcgtagatatgccaacaaaaga

SEQ ID NO: 238905 - DNA, 961 bp, Unknown
  Bacterial polypeptide expressing nucleotide sequence isolated from the Sargasso Sea
accgactcagattctgaggtattactaaatatttttgctcatgagttaggcaaacaaagagaaatatatccaaatgcaaaaaatatttttaaagcagtttctaagacgcatttaagatgtgatggagcatatgctgttatagcattaataacaggacatggattaattgctttcagagataataatggtatcaggcctttgtctataggaattagaaagggtaaaacgagagacgaatatattcttgcttctgaagatgctttattctcatctttaggatttactaaactaagagatgttgatcctggagaagcagtatttattgataaaaatggagaactttttactcaacaatgctcagataatcctcaaaaaagaccatgtatctttgagtatgtatatttttcaagacccgattcgaaaattgatgaaatatctgtttataaagcaagaatgagaatgggaaaaaaattagctaagcaaattagtaatcaaaaatcagaccatgatattgatgttgtaataccaattcctgatagttcttcaatagctgcacatcaattagcagtaagcctagatataccatatagagagggctttgttaaaaatagatatattggtagaacttttataatgccatatcaagaagaaaggaaaaaatctgtgagaagaaaactcaatatattagatgaagaatttcagggcaaaaatgttcttttggttgatgattcaatagtaagaggaacaacaagcaaaaaaataattgaaatggcaagagatgctggcgccaataaagtatattttgcatctgctgctccagctattaaatatcagaatctttatggaattgatatgccagctacatctgaattaattgcatctaataggtcagacgaagaagtagctgcagaaatagatgctgattggttaatatatcaaacattggaagatttgatttgaa

SEQ ID NO: 238906 - DNA, 928 bp, Unknown
  Bacterial polypeptide expressing nucleotide sequence isolated from the Sargasso Sea
acccgtctggggccttttgcctttgctcacaacggcaatcttgtcaatgccgctgagctccgggacaagctcgatgatggtcagaccgaattcacctccaccactgattcggaattaattgctttcgcgattcagcaggccgtgaatcgtgggctggattggaagccggccatcatcgaagccgctgccatgtgccgcggagccttcagcttggtgattggtaccgtcgacgcgttgtatgcccttcgggacagttatggcgtccgaccgttggtcttcggtcggttgggagatgccgagagtggtcactgggtggtgagcagtgaaagctgtggtctcgacatcatcggtgcagcttttgaggctgacgtcgaacctggcgagttgattacctttcggcttggagacactgagccccagcgggagcaatgggcggagccttcaacgcggatgtgtgtgttcgagatgatttatttcgctcgtccagatagtcgctttttcggtgagtcgctgtatagctatcgccaacggattggtcagattctggcccgtgaatcgggcgttgaggctgatttggtgatcggtgtaccggattctgggattccggcagcgattggtttctctcaggccagtggcatcaccttcgctgatggtctgatcaaaaatcgctatgtgggtcgcaccttcattcagcccactcaggcgatgcgagaggcgggaatccgcgtcaagctcaatccgttgccggatgtcttggctggtaagcgggtggtggtgattgatgactccatcgtgcgcggtacgaccagccgcaaattggtgcaggctctgcgtgatgcaggcgccactgaggtgcacatgcggatcagttcaccgccagtcacccatccctgcttctacggcatcgataccgatacgcaggatcagt

SEQ ID NO: 238907 - DNA, 964 bp, Unknown
  Bacterial polypeptide expressing nucleotide sequence isolated from the Sargasso Sea
ggcattatcagcagtaggcccgttaaccaagaaatatatgatgctttaacagtgctgcaacaccgtgggcaggattcagcaggaatcatgacggacaacaacggtgtgctttgtcttagaaaaagcaatggtttggtcaatgatgttttttcaaatgaacacatgactagactgagaggcaatatgggcatcggtcatgtacgctatccaaccgcaggaacactcagttcatcagaggcacaacctttttatgtgaactctccatttggaatttgcttggctcacaatgggaatcttgttaacaatgaggagcttagaaagcatctaagtgaagtggatcgaagacatttaaatactgaatctgatacagaggctttattgaatctatttgcacatgaacttcaggaaaattttgatgggagtctctctcctgaaattattttcaaagctgcaactcatctttttgataaatgctcaggcggttatgccgttgtttcaatgattctgaatgagggactggtggccatgagagatccaaatggaattcgtcctctaatactcggaaagagagaagttgggcaaggtacagaatatatgattgcttctgaaagtgtggcattggacatcgctgattttgaaatcatgagagatgttaagcctggtgaagtaatttacatcaccaaggaaggagaattgttttctaagcaatgcgtgaaaccaaaatcatacacgccttgtatatttgagtttgtatattttgcaaggccagattcgatcattgatggcatgtcagtttataaatctagactcagaatgggtgagtatttggcacagagaatcataaaaaaaggtctgcatcacgatgtggatgtagtgattccaattcctgataccagtcgatcaactgcgctccaagttggccaccatctcggtgtaaatacagagaaggcttcattagaataga

SEQ ID NO: 238908 - DNA, 508 bp, Unknown
  Bacterial polypeptide expressing nucleotide sequence isolated from the Sargasso Sea
atgaaagcattgaaaacgaatagaaaatcaccttttattaaagatgataaattacatgaagaatgtggagtttttggtgtatacaaccatgaagattcagctgcactaactgccttagggcttcatgctttacagcatcgtggtcaagaagctgcaggaatagtaacttttgatggaacaaagtttatatctgaaagacatccaggattagtaagtgataactttacaaaaacgtctgtaataaatcgattagtaggtgatagcgctgttggacataacagatattcaacaacaggtgctaccattcaaagaaatattcaacctttttttgctgatttatggggtggaggatttgcaatagctcataatggaaatattacaaacgctctatcgctaagagacgagctcataagaaaagggtctatcttccaatcaacctctgacacagaaacaattttacaattggtagctagatctaatgcagatagaacattggatcgcttggttg

SEQ ID NO: 238909 - DNA, 913 bp, Unknown
  Bacterial polypeptide expressing nucleotide sequence isolated from the Sargasso Sea
tttggtattagtaatgcaaaagacgcatctgctttaactgcacttggattacatgctttacaacatcgaggacaagaaggttgtggaattgttagttttgatggtgaaaaatattattctgaaaagcgatttggtttagttggagacaactttaacaaagaaaaagttttaaataatttaaaaggtaattacgccataggccacaatcgatatagtacaactggtaataatactttgcgaaatatccaacctttttttgctgatactaatgctggaggaattggagtttcacacaatggaaatttaactaattcaatttctttgagaaaaaaactagttgaggaaggagctattttttataccacttcagatactgaaactattgtacaattaattgcaaaatcaaagagatcgaaaactatcgataaagtaattgatgcaatttttcaaatacaaggtggatatgctttagtaatgcttactcaaaactctcttattggggtaagagatccatatggcattagacctttgttaattggtaaattaggaagtagctatgtactagcgtcagaaacctgtgcattagatattattggtgcaaacgttgttagagaagttgaaaatggcgaaattgttttaattgaaaataatcaactgactagcatcaaaccttttcctcctaaaaaagtaagaccatgtgtttttgaatatatctactttgcgagacctgacagtttattagatgataaaactgcatatgaacatcgaaaaaatttaggaaaagaacttgcaaaagaaaatgatatcgatgctgatatcgtagtaccggttccagactctggtaatgcagcagcactaggattttctcaaaaacataaaatgaactttgaacatggtttgataagaaccatta

SEQ ID NO: 238910 - DNA, 354 bp, Unknown
  Bacterial polypeptide expressing nucleotide sequence isolated from the Sargasso Sea
attgaggatctataatccaaagttaaaagaggagtgtggtgtatttgggatcagtaatattaaagatgcatctgctctaaccgcattaggattacattcgctacaacatcgaggacaagaaggttgtggaatagttacatttgatggaaaaaaatattattctgagaaaagatttggattagttggagacaatttcaacaaacaaaaagtgcttgattatcttaaaggcaactttgcaattggacataatcgatatagcactactggaaataatacactaagaaatattcaacctttttttgcggatactaatgctggtggaataggtgtcgctcataatggaaacttaactaa

SEQ ID NO: 238911 - DNA, 568 bp, Unknown
  Bacterial polypeptide expressing nucleotide sequence isolated from the Sargasso Sea
aactacagctgcattacagcttgcagcagcattaaagcttccttatagacaaggctttgtaaaaaacagatacgttggtagaacttttattatgccaaaccaagaggaaagaaaaaagtcagttagacgtaagcttaatattttagatcttgaatttaaggataagaatgttttattagttgatgactcaatagttaggggcacaacaagtaaaagaattatcgagatggcaaaagaagcaggagctaaaaaagtatatttttcatctgcagctccaccagtcaaatttcaaaatttatatggaattgatatggcagctaccaatgagttgattgcctctggcaaaactgatgaagaagttgctaaagcaataggtgcagattggttgatttatcaagatttaaaggacttgattgactctgcaagagagggcaatccagcaattgaaaattttgagatctctatttttgatggcaagtatccaacatcaattagttctgattaccttgaagaccttgaagtaactagaggagatgaaacaaaagttgccagagaaaaatctagttaa

SEQ ID NO: 238912 - DNA, 586 bp, Unknown
  Bacterial polypeptide expressing nucleotide sequence isolated from the Sargasso Sea
gagcacgtttattttgctcgccccgattcaatcatagatgacgtgtctgtttataaaagccgtctgcgtatgggcgagtatctcgctcaaaacattctatccaactactctcagaattctcacgatattgatgtcgtggtcccggtaccggatacaggacgtacgtcagcattaccactcgctcatatgctggacgtaaaatttcgagagggttttgttaagaaccgctacattgggcgcacctttattatgcctgggcaaaaacaacgacgcagatccgtcaggcaaaagttagccacgatagatctagagtttaaaggtaaaaatgtcctcatagttgatgattcaatagttcgcggcactacaactaaagagattattcaagcggctcgagaagcaggcgcaagaaaggtctatatagcctcagccgcgcccgcgcttagatatcaaaatgtctatgggattgatatgcctgcaagagaagagttggttgcacatgagcgtactgaagaagaggtggcggatattatcgatgcggactggctagtttatcagtcgatcgatgacctcaaagccagtgtccacg

SEQ ID NO: 238913 - DNA, 353 bp, Unknown
  Bacterial polypeptide expressing nucleotide sequence isolated from the Sargasso Sea
aatgaaagcattgaaaacgaatagaaaatcaccttttattaaagatgataaattacatgaagaatgtggagtttttggtgtatacaaccatgaagattcagctgcactaactgccttggggcttcatgctttacagcatcgcggtcaagaagctgcaggaatagtaacttttgatggaacaaagtttatatctgaaagacatccagggttagtaagtgataactttacaaaaatgtctgtaataaatcgattagtaggtaatagcgctgttggacataacagatattcaacaacaggtgctacaattcaaagaaatattcaacctttttttgctgatttatggggtggaggat

SEQ ID NO: 238914 - DNA, 721 bp, Unknown
  Bacterial polypeptide expressing nucleotide sequence isolated from the Sargasso Sea
attaaaaaccttagacaaaattgtagatgctatttttcaaatacaaggtggttatgctttagtcatgttaacccaaacttcattaataggtgttagggacccatttggtataagaccgttagtaattggcaagcttaaaaatagttatgttttggcctcagaaacttgtgctttagatataatcggtgcaaaatttataagagaagtcgataatggtgagatagttttaatagaaaatgatgaattaaaaagtattaaaccttttccgccaaaaaaaattcgaccttgtgtcttcgaatatatatactttgctagaccagatagtattctcaatggaaaaactgcttacgaacatcgaaagaaccttggtgctgaacttgcaaaagaaaataatataaatgcagatattgttgttccagtgccagactcaggaaatgcagcagctttaggttttgctcaacatcttggtatgaatttcgaactaggattagttcgaaatcattatgttggacgaacttttattgaaccaagtcaaaagattagaagtttaggggtaaaattaaaattaaatgccaacaaatcaactatcaaagataaaaaaataattttagtagatgactctttggttagaggtactacttcatataagatagtaaaaatgctatatgatgctggagctaaagaggttcatgtaaaaattgcatgtcctgagattaaatat

SEQ ID NO: 238915 - DNA, 883 bp, Unknown
  Bacterial polypeptide expressing nucleotide sequence isolated from the Sargasso Sea
tcattacagcacagaggccaagaatcagcaggtattgctacaagtgacggctccttgatatatgaacacaaggatttgggattaataaatcaagtttttgatgaagataaaattttaaaattaaaggggaatatttctattggccatacaagatattccactactggatcaaataattataataattctcaacccataaaagtatctggtgtcaatggagatttgttaatagggcataatggaaatttaattaacaccgaagaaataatgcaaatattagattcatggggcatatcaacttttaacacaacttctgattctgaattaattgctttgatgtatgttaatgcaccgggatctaattggggagaaaaatctaagtattgtatgggcagactaaaaggtgcttattcaatagtaatgctaaataaagattcattaatttgtgttagagaccctaatggattcagacctttggttttaggtaaatacagagaaggctttatagtagcttcagaaacatgcgcccttgatcatgtaggagcttcctttataagagatatacagccaggagaaacaatagtaattagtaaaaatgaactgaattcttctttagtgagcaataatgcaaaaaaatcgctatgctcatttgaacaaatttacctttctaggcctgatagtattttagatggagaattaacatattctagaagaatgaaaatgggcgagattcttgccaatgagcagcctgcttctgccgatctagttattgatgttcctgattcagcaaccgcagcggcagttggatatgcaaatcgatccggaattccttatgtttctggtttaattaaaaatagatatgttggaagaacttttatttctc

SEQ ID NO: 238916 - DNA, 621 bp, Unknown
  Bacterial polypeptide expressing nucleotide sequence isolated from the Sargasso Sea
ccgaccatgatattgatgttgtaattccaatacctgatagttctgtaactgctgctcatcaattagctgttgatttacaagttccttatagagaaggtttcgtaaagaatcgatatattggaaggacatttataatgccttatcaagaagaaagaagaaaatcagttcgaagaaagttgaatatcttagatttagaatttgatggtaaaaatgttttgttagtcgatgattcaattgttagaggtactactagtaaaaaaattatcgaaatggctagagaagctggtgcaaacaaagtgtattttgcttctgctgctccagctattaaataccaaaatctttatggtatagatatgcctgcgacggctgagttgatagcttcaaacaagagtaacgatcaggtagcaaaagaaataaatgcagactggcttatttatcaaaccttggatgatcttattgattctgtcagagaaggtaatccagaaattaaagaatttgaaacatctattttcactggtaagtatttcactccattggttgagaattatcttgaagagcttgaaatttcaagaaaagatgagctaaaaatgcaaagagaaaaaactaaagctaaaggctaag

SEQ ID NO: 238917 - DNA, 910 bp, Unknown
  Bacterial polypeptide expressing nucleotide sequence isolated from the Sargasso Sea
aatggtggagtattttggaataagtaattacaacgatgcttctgcattaactgctcttggtcttcatgccctccaacatagaggtcaagaaggatgtggaattgtttcatttgatgaaaaaaaatattattctgaaaaaagatatggtctagttggtgataattttaataaggaaaaagtattaaaaaaattacctggaaattttgcaattggacataatagatatagcactacaggcggcactacacttaggaacattcaacccttttttgccgatactaatgctggaggaataggtgtagctcataatggcaatcttactaatgcactaactattaggaaaaaactagtaaaagaaggagctatattttattcaacatcagacactgaagtaataattcaattaattgcaaaatcaaaaagacctacgactattgaaaaaataattgatgcgatttttcaaattcaaggaggttatgcgttagtaatgctcgcacaaaataaacttgtaggagcaagagatcccttgggtataagaccattggtaataggtaaaattaaaaattcatacgtacttgcttctgaaacatgtgctttagatataattggcgcaaaatttttaagagaagtagaaaatggagagataatagttatagaaaatgatgaacttaaaagcataaaaccatttcctccaaaaaaaccaagaccttgcatatttgagtatatttatttttcaagacctgacagtattttaaatggcaaaacagcttacgaatttagaaaaaaatttggtgagcaattggcaactgaagatgatattggagcagatatcgtagttccagtgccagactcgggtaatgcagcagctttaggttatagtcaaaaaactaaaataaattttgatttaggg

SEQ ID NO: 238918 - DNA, 630 bp, Unknown
  Bacterial polypeptide expressing nucleotide sequence isolated from the Sargasso Sea
aatatatgggcaaattccttgctaaagaaagtaacacaaaaggtgatatagttattcctgttccagattcaggagttcctgctgctttgggatatgctgaagagtctaatacaccttttgatcttggcataatcagaaatcattacgtaggaagaacttttatagaaccaacacaaaaaattagacaattaggaataaaattaaaacataatcccaataaaaaattaataaagggaaaaaaagtaatattaatagatgactctatagtaagaggtactacagctattaaaataattgaaatgctaaaagatgcagatgctgctgaaatacacatgaaaatttcaagtcctcccattaaatatcctgactattatggtatagatacacctagtaaagacgagttgattgcagcatattcgtccattgatgatataaaaaagaaacttgggttaaactctctacaatttttatcgattaatggcttatacaaagcaatgggacattcaaaaagaaataatgataatccgcagtatacagaccattgttttacaggtaattacccaacagaattagtagacagagactcaggaaatttgtcaaagcaactttcattacttaatgattattaaa

SEQ ID NO: 238919 - DNA, 406 bp, Unknown
  Bacterial polypeptide expressing nucleotide sequence isolated from the Sargasso Sea
atgaaaaaacatatcaagattctaaagaaaaaattaaagaactataatccaagattaaaggaggagtgtggggtttttggtataagtaatgcaaaagatgcttcagctttaacagcactcggcctgcatgctctacaacacagaggtcaagaaggctgtggtatagtcacctttgatggggaaaaatattattctgagaaaagatttggcttagttggtgataattttaataaagaaaaagtgcttaataatcttaagggaaattatgcaattggccacaatagatacagtacaaccggaaacaatatattaagaaacattcagcccttttttgctgacactaatgctggtggaattggagttgctcacaatggaaatctcactaattcaatatctttaagaaata

SEQ ID NO: 238920 - DNA, 731 bp, Unknown
  Bacterial polypeptide expressing nucleotide sequence isolated from the Sargasso Sea
attgaagaactttgatccaaaacttaaagaagagtgtggtgtttttggtgtaagtaatgcaacagatgcttctgctttaactgcacttggacttcatgctttacaacatcgtggacaagaaggttgtgggatagttacatttgatggtgaaaaatattattcagaaaagagatttggattagttggagataattttaataaagaaaaagtacttaaaaaactaagaggaaattacgcaattggacataatagatacagcacaactggtgaaaatactttaagaaacatccaacctttcttcgctgacactaatgcaggtggaattggcgttgcacacaacggaaatttaactaattcaatatcattaagaaataaattagtggaagatggtgctattttttatacaacttcagacactgaaaccattgttcaattaattgcaaaatctaaaagacctaagacaattgataaagttgtcgatgcaatatttcaaattcaaggtggctatgcattagtaatgttaactcaaaattctttaattggtgttagggatccttatggaataagacctcttgtaatcggaaaattaggcaaaagttatgttttggcctcagaaacatgtgctttagatatcattggagcaaaatttgtaagagatgttgaaaatggagagatagttttaattgaaaatgatgagttaaagagtatcaagcccttccctcctaaaaaag

SEQ ID NO: 238921 - DNA, 784 bp, Unknown
  Bacterial polypeptide expressing nucleotide sequence isolated from the Sargasso Sea
caagcaaaaaagaatatgaagatgctaaagaaaaagtttcagatatataatccgaaattaaaagaggaatgcgcagtttttggaattagtgataattcagatgcttcaactcttactgctttaggattacatgcacttcaacatagaggtcaagaaggatgcggtattgtatcttttgatggaaaaaaatatcattcagagaaacgatttggcttagttggagataattttagcaaagaaaaagttattaaaactttgcctggaagatttgcaattggtcataatagatattctactacaggaggaacaacattaaggaatattcagcctttctttgcagatactaatgcaggtggtataggtgtttcgcataacggtaatcttacaaatgcaattaaattaagaacaaaaatggttgaggaaggttcaattttttatacaacatctgatactgaaacaattgtaaaacttattgcacgatcaaaaaggtcaaaaactgtagatagagtaattgatgcattgtttcaaatccaaggaggatatgctttagttgttttgacacaaaacattttaataggagcaagagatccatttggaattaggcctttggttgtaggtaaattaaaaaactcttatgttttagcatctgaaacttgtgctctagatattattggagcaaaatatatcagagatgttgagaacggagaaatagtgtgtattgaagatggtaaattacaaagtattaaaccttttcctcaaaaaaaaattagaccatgtgtattga

SEQ ID NO: 238922 - DNA, 844 bp, Unknown
  Bacterial polypeptide expressing nucleotide sequence isolated from the Sargasso Sea
acactgactgcccttggtttacacgctctacaacacagaggtcaggaaggttgtggaatagtatcatttgatggaaaaaaatatcattcagagaaaaggtttggtttagtaggagacagctttaataaagaaaaagttttaaagtcattaccaggaaaccatgctattgggcacaatagatatagcactactgggggcacaactttaagaaatatacagcctttttttgcagatactaatactggaggaataggcgtttctcacaacggtaatttaacaaatgcaattacactcagaaagaaattagttgaggatggtgcaattttttacacaacttcagatacagagacaattgttcaattaattgcaagatctaaaagagtaaaaacaatagataaaattgtagatgcattatttcaaattcagggtggatattctttggtgatgcttacacaaaatactttaattggagtaagagatccttttgggataaggccacttgttattggaaaattaaataattcttatgtctttgcatcagagacatgtgcgttagatataattggagctaaatatattagagacgttgaaaatggtgaaattgtatctattcaagatgatactttggttagtattaagccttttcctgttaaaaaaattagaccttgtgtttttgaatatatttatttttcaagaccagatagtttattaaatggtaaatgtgcatatgaatacagaaaaaattttggagcagagcttgcaaaagaaaactcgttaaaagcagatttagtagtaccagttccagactcgggtaatgctgcagcgataggttttagtcattaac

SEQ ID NO: 238923 - DNA, 862 bp, Unknown
  Bacterial polypeptide expressing nucleotide sequence isolated from the Sargasso Sea
acttcattggtaggtgttagagatccttttggcatcagacctttagtgattggaaaattaaagaatagttatgtactagcatctgaaacatgtgctttagatataattggtgcaaaattcatacgagaggttgaaaatggtgagatagttttaattgaaaataatgaattaaaaagtattaaaccctttccaccaagaaaagttagaccttgtgtttttgaatatatttattttgcaagaccagatagtatgcttgatggaaaaacagcatatgaacatagaaaaaatcttggttctgaacttgcaaaagaaaatgatatagatgctgatattgttgtgccagtcccagattctggaaatgcagctgctttaggttttgcacaatcattaaatgtaaaatttgagcttggtttagtcagaaatcattatgtcggaagaactttcattgaaccaagtcagaagattagaagtttgggtgttaaattaaaattaaatgctaatcaatcaactattcaaggcaaaaaaataattttagtagatgactcactagtaagaggtaccacgtcccataaaatagttaaaatgctttatgacgctggtgcaaaagaggttcatgttagaattgcctgtccagaaatcaaatttcctgatttttatggagttgataccccaactaaaaaagaattgcttgctgctaataaaagtaactcagaaatctgtgagtacataggtgcaaaatcattaaaatttttgtcagtaaatgggatgtatcgggcaattggttttgatggaagaaacgagagttatcctcaattaactgaccattattttactggagattatcctgttaaacctatcgatg

SEQ ID NO: 238924 - DNA, 756 bp, Unknown
  Bacterial polypeptide expressing nucleotide sequence isolated from the Sargasso Sea
tatgaacaataaattaaattttcttaaaaaatttgaggttagacaatctcattttccaagaattaatgaggagtgtggtgtttttggaatcagtggatctaaggatgctgcagctttaactgctcttggtcttcatgctttacagcatcgtggtcaagaaggttgtggaattgtgagttatgatggtaactcttatcactcagaaagaaagtttggtttagtaggagataacttcacaaaaaaacaatccttagaaaaattgaagggaaaaatagcaataggtcacaatagatattccacaactggaggtgaaactataagaaatattcagcccttttacgctgatctgcatggtggcgctataagtattgctcacaatggcaacttaacaaacgctcttttgctaagagagcaaatggtacgtgaaggagcaatttttcagactacctctgatactgaaacaattgtacaattagttgccagatcaaaaaaaattgaaattgttgataaacttatagatgcccttttacaaattcagggaggttttgctctttcaattatagctaatggattgttgattggcgcaagagatccgctaggtattcgaccactggttttaggaaaactaaaaaatgcttatattttagcctccgaaacatgtgcccttgatattattggtgctaaatttgttcgagagatagaaaatggtgaagtagttattatttcaggcagaaagataataagcagaagactttt

SEQ ID NO: 238925 - DNA, 847 bp, Unknown
  Bacterial polypeptide expressing nucleotide sequence isolated from the Sargasso Sea
agatacagagacgattgttcagttaattgctaaatcaaaaagagataacactatagataagattgtagatgcattgtttcaaattcaaggaggttacgctttggtaatgttaactcaaaacattttaattggagtaagggatccttttgggataagaccactggtaattggaaaattaaaaaattcatatgtttttgcatcagaaacatgcgctttagacattatcggagctaaatacattagagatgtagaaaatggcgaaattgtttatatagagaataataatttaaaaagtattaaaccatttcctgcaaaaaaaattagaccttgtgtgtttgaatatatttatttctcaagacctgacagtatacttaacggaaaatgtgcctatgaatatagaaaaaattttggaaaagaacttgctaaagaaacaaaggtagatgcagatttaatagttcctgtgccagactctggaaatgcagcggcaattggatatagtcagcacgtaggcaaagaatttgaacttggtttaattagaaatcattatgttggaagaacctttattgagccttctcaaaaaataagaagtttaggtgttaaactaaaattaaatgcaaacaaatcgtcaataaaaaataaaagaattattttagttgatgattcacttgtccgaggaacaacttcacataagatagtacaaatgttgtatgatgctggggcaaaagaagtacatgttagaattgcttctcctgaaattaaatttccagatttttatggtgtggacactccaacaaaaaaagaacttctagcttcaaataaaactaatgatgaaatttgtaaatatatt

SEQ ID NO: 238926 - DNA, 855 bp, Unknown
  Bacterial polypeptide expressing nucleotide sequence isolated from the Sargasso Sea
gagttacaagagttgggggcagaccgcccagatgcagagcagattttcaaagctgttgaagaggtacaccgacgctgttctggaggctacgctgggatagcgttaattatgggagcggggattgttggcttcagagatccgttgggtatcaggccactgatttatggaaaaaaagagactgctaccggaatagattatatgttggcatctgagagtgtagcgcttgatgctctgggttatcaacgtattcgcgatgttaagccgggcgaggccgttttcataagtaataatggcgagattagcactgccatttgcgcggacaagacacgattgatcccttgtattttcgaatatgtttatctagcaagaccagattcaattatagatcaagtatcggtatacaaggctagattgcgcatgggagagcatcttgggaaacgtattatggaacgatttcctgcaaatgatcatgatatcgacgtggttgtcccaatccctgatactgggcggaccgcagcattaccgctagcgcatcaattaaatgttaagtatcgagaaggttttgttaagaatcgctatattggcagaacttttatcatgcctgggcagtccgaacggaagcgatcagttaggcagaaattcaattctattgggctggagcttaagggcaagaatgttcttcttgtagatgattcgattgttagaggaactacaatcaaacaaattattcagatggccagagacgctggagctaggaaggtttatttggcttctgcagcccctcccgttagataccctaatgtctacggaattgatatgccaagcgttaatgagtttgtggcaaataataaatcc

SEQ ID NO: 238927 - DNA, 691 bp, Unknown
  Bacterial polypeptide expressing nucleotide sequence isolated from the Sargasso Sea
atgcaaaagaaaaagttcaagagctatagcccaaaattaaaagaggaatgtggtgtctttgggataagtaattctgaagatgcttctgcattaacagccttaggtctgcatgctttacaacatagaggtcaggaaggatgcgggatagtttcttatgatggaaaaaaatattattctgaaaaaagatatggcttagtgggtgataattttaataatgaaaaagtattaaaaaaattaccaggaaaatttgcaattggccataatagatatagcacgacaggtgggacgacattaagaaatattcaacctttttttgctgacacgcatgcagggggcataggagtagcccacaatggtaatttaactaatgcgctaactataagaaaaaaactggtaaaagatggtgcaatattttattccacatctgacacagaggtaataattcagttgattgcaaaatcaaaaagatcaacaactgaagaaaaaataacagatgcaatttttcaaattcaaggtggttacgcgcttgttttattggcacaaaataaattaattggggttagagaccccttagggataaggccattagtaattggtaaaattaaaaactcttatgttttggcctctgaaacatgtgctttagatataattggtgcaaaatttttaagggaagtgaaaatggagagatagt

SEQ ID NO: 238928 - DNA, 762 bp, Unknown
  Bacterial polypeptide expressing nucleotide sequence isolated from the Sargasso Sea
tgggatatcatcggggcaaattttattcgtgaagttgaaaacggtgaggtcgtggtcattaccaaggatgaagtaaagagttatcacccgtttcctgaaaagccccgtcgtcattgcatatttgagtatatatattttgctcgtccagatagcgtggttgacgggcatagtgtttatgaatgtcgaaagagttgtggtagggaattagcgagtgaaagtcatgtccaagccgatatggtaattccagtgcctgattcaggtgttcctgcggctatcggttatgctgaggaatcacagataccgtttgaactagggataaccagaaaccattatgttggacgaacgtttattgaaccaaagcaatccataagatcgttttcagttaaacttaaacataatgcaaatcgagctttggtggaagggaagcggattgtgctggtagatgattcgattgttcgaggaacgacttcggtgaagatcgtgcaaatgatgcgagatgccggcgcccttgaagtacatatgcggattgctgctcctcccattactcatccagatttttatggtattgatacacctagcaaagatcagctcttagcggccaacatggatttggaggaaatgtgcaaacaccttggtgcagatagtttggcttttcttacagttgatggtctttatcgagctttggggcatcctgaaggcaggaatcctgagctgcctcaatataccgatcactgtttcaccggcgattatccaaccagtctc

SEQ ID NO: 238929 - DNA, 788 bp, Unknown
  Bacterial polypeptide expressing nucleotide sequence isolated from the Sargasso Sea
aattacagagacattgtttaagattcaaggcggatatgcactagtaatacttacaaataaaaagttaattggaataagagatccattgggaataagacctttggtaattgggaaattaggaaattcttatatatttgcctctgaaacttgtgcattagatattgtggatgctaaatttgttagggaagttgaaaatggagagattgttgtagttgagaacaatgaaattaaaagttttaaaccttttaataaaattaagtccaggccatgtgtatttgaatatatttattttgctaggccagatagtatacttggaggagagtgcgcttatgaatatcgcaaaagattaggtgaacaattggctaaagaatctagggttgaagcagatatcatagtcccagttccagactctggtgttccagctgcaatcggatattctcaatcctctaagattaaatttgagttgggtcttatacggaatcattatgttggtagaactttcatcgaacctacacaaaatattagaagttttggagttaaactaaaattgagttctacaaaaagcattctaaaaaacaagtcaatagttttaattgatgactctttagttcgaggtactacttgtaataaaatagtcaaaatgctttataaggctggagcaaaagaagttcacgtaagaattgcttgtccagaaataaaatatccagatttttatggagtagatatgcctacaaaaaaggaattgttatcaagcaataaaactaaagctgagatctgtgattttttag

SEQ ID NO: 238930 - DNA, 850 bp, Unknown
  Bacterial polypeptide expressing nucleotide sequence isolated from the Sargasso Sea
tggtgaagtgatttacatcaccaaggaaggagaattcttttctaagcaatgcgtgaaaccaaaatcatacaccccttgtatatttgagtttgtatattttgcaaggccagattcgatcattgatggcatgtcagtttataaatctagactcagaatgggtgagtatttggcacagagaatcataaaaaaaggtctgcatcacgatgtggatgtggtgattccaattcctgataccagtcgatcaactgcgctccaagtcgcacatcatctgggtgtcaaatacagggaaggctttattaagaataggtacattggacgaacattcatcatgcctggacaggaaatcaggaaaaaatcagtgaaacagaaactcaatccaattgatctggaaattcgagataaaaatgtattattgattgatgactcaatagtcagagggacaacttcgaagaagataatacaaatggctcgaaatgcgggtgcaaacaaagtattttttgcctctgcagcgccaccggttaagtatccaaatgtttatggcattgatatgccttcaacagcagagcttttggcaagcaacagaacagaggaggagcttgcaagatatatcggtgcagattggttgatctatcaagacctagatgatctcatttcagcggttcagtttgatgaatcagatgcagaggcttttgatacctcttgtttctctggagagtatgtcactggagatgtgacaccaaattatctggatttcattgagaacaaaagaaatgatgctgcaaaggcaaaaaaagagatagagagaaaacagattgaaatacacgatcagtcttcaatgactgtcagctaa

SEQ ID NO: 238931 - DNA, 922 bp, Unknown
  Bacterial polypeptide expressing nucleotide sequence isolated from the Sargasso Sea
agcaatttccacatgcacaaggccaatggcatggtgcgcgacgtgttccgcacgcgcaacatgcgcagcctgcccggcaccaccgggatcggccaggtccgttacccgaccgccggttctgcatcgagcgaagaagaggcccagccgttctacgtgaacgcgccgttcggcatcatcctcgcgcacaacggcaatctgaccaactggcagcagctgaaagatgagatgttccgcatcgatcgccgccatatcaacaccaactccgatacggaagtgatgctcaacgtgctcgcgcacgaactgcagctttccagttcgagcctgcaactcgatccggccgcgctgttcaaggccgtgtcgggcgtgcatcgccgggtgcggggttcgtacgcgatcgtgtcgttgattgccggctacggcctgctcggtttccgcgacccgttcgggattcgcccgctgtgcctcggcaagcaggaaacgccggaaggcgtcgagtggatcctggcgtcggaatcggtcgcgatcgaaggtatcggtttcgaattcgtgcgtgatattgcgccgggcgaggccattttcatcgacctcgaaggcaacctgcactcgcagcaatgcgcgactaacccgagcctgaacccgtgtattttcgaactcgtgtatctcgcgcgtccggactcggtgctcgacggcgtgccggtctacaacgtgcgtttgcgcatgggcgactacctcgccgagaagatcaagcgtgaattgcccgacgtcgagatcgacgtcgtgatgccaattcccgattcgtcccgtccggccgcgatgcaggtcgccaagaagctgggcgtcgagtaccgcgaaggcttcttcaagaaccgctacgtgggccgcacctttatcatgccgggccaggcgatgcgcaagaagtcgg

SEQ ID NO: 238932 - DNA, 832 bp, Unknown
  Bacterial polypeptide expressing nucleotide sequence isolated from the Sargasso Sea
tgtggtgttgatgacgcggctgggggcctttgctttggcccacaacggcaacctggtgaatgcccgcgaattgcgggagttggtggacgacggacaggcggagttcacctcaacaacggattcggaactgatcgccttcgctgtgcagcaggcggtggatcgtgggctcgactggtcagatgccatagaggccgcgctcaagctgtgtcggggtgcgttcagccttgccatcggaacgccggatggtctgtttgctgtacgcgacggtcatggcatccgtcctttggtgttcggcacgctgggggatccagccactggtcattgggtggtgagcagtgagacctgtggcttggagatcatcggcgcccgctatgtcgatgatgtccagcccggtgaattggtccggtttgaactcggatcagcagagcctcagcgtcggcgttggagtgaggaaccgaaccgcctgtgcgtgttcgagatgatttatttcgccaggccggacagtcagttcttcggcgagtccctctacagctaccgccagcgcattggacgaacccttgcttgcgagtcgtgcgtggaggctgatctggtgatcggtgttccagattccggcattcctgcagccattggtttttctcaggaaagtggcatcccctacggcgatggtctgatcaagaaccgttacgtcggccgtactttcatccagcccacccaggcgatgcgggaagcgggcattcgggtgaaactcaaccctctgccggatgtgctggccggaaagcgcttgatcgtgattgatgactcgatcgtgcgtgggcacaccagccgcaaattg

SEQ ID NO: 238933 - DNA, 835 bp, Unknown
  Bacterial polypeptide expressing nucleotide sequence isolated from the Sargasso Sea
cttactaacaaaaagcttattggagtaagagatccgtttggaataaggcctctagttttaggtgaaaaagatggatctcctgtgttggcttcagaaacttgtgccttagatatgataggagcaaaatatataagagatgtggaaaatggtgagataattataattactgatagtggcatagaatctattaaaccatttaaaagagtttctgaacgaccttgtatttttgaaagaatttattttgcaagtcccgatagtatagttggaaaaaaaactgtgtatacctatagaaaggctcttggcgagcagctagcaaatgaaaatagtattattgcagatgtagttgtgccgatacccgactcaggtgtttctgctgcaataggtttttcacaaaaatctttaattccttttgaattaggtattataagaagccattatgtaggtcggacatttatagaaccttcacaaactataagacaatttggagttaagcttaaacatagtgtcaataaatcctgcatacaaaataaaaaagttattctaattgacgattcaatagttagaggaactacagccagcaaaattgttaaaatggtctatgaagcaggagcaaaagaagttcatttaggaatatcatgcccccctattatgcatccagatttctatggaattgataccccaaactacaatgaattaattgcatctcaatctgatttaagtgaaatgactaaacttgttggagcaaaatctttattttttctttctttagctggtacgtataaagctatgggatgtgaaaaaagaaattctaagacaccccaatttactgatcatt

SEQ ID NO: 238934 - DNA, 859 bp, Unknown
  Bacterial polypeptide expressing nucleotide sequence isolated from the Sargasso Sea
gactcatatgtttttgcttccgaaacttgtgcattagatattataggagccaaatatatcagagacgtagaaaatggtgaaattgtttatgttgaaaataaaaaacttattagtttaaaaccatttccattaaaaaaaataaggccgtgtgtttttgaatatatctatttttcaagaccagatagtattttaaatggaaaatgtgcgtacgagtatagaaaaaattttggtgtagagcttgcaaaagaaaccagtattgatgctgatttagtagttcctgttccagactcagggaatgctgcggctattggttatagtcaacatgaaaaaattaattttgacctcggtttaataagaaatcattatgttggaagaacttttattgaaccagctcaaaagataagaagccttggggtcagattaaagttaaatgcaaataaatctacaatcaaaaataaaaaaattgtcttagttgatgattctttagtaaggggtacgacctcacataaaatagtaaaaatgttatacgacttcggggcaaaagaagtgcatgttagaattgcatcgcctgaaattagatttccagacttctatggtgttgatacacccacaaaaaaagagcttttagcagctaataaaactaatgaagagatttgcaaatatatagatgcaaaatctttaaagtttttaagtgttgatggtttatatagagcaatgggttatgaaaaaagaaactctacatacccgcaattgactgaccactattttacaggtgattatcctgtaaaattaattgatgacttaggtgataataaagtgacacagttgtctttattgagtacaaagtctaataattagg

SEQ ID NO: 238935 - DNA, 746 bp, Unknown
  Bacterial polypeptide expressing nucleotide sequence isolated from the Sargasso Sea
gatgcaaaagaaacagttcaagatttataaccctaaaataaaggaagaatgtgctgtatttggtattagtaataaccaggacgcttctgccctaactgttttaggtcttcacgctcttcaacatagaggccaagaaggttgtgggattgtatcttttgacggtaacaaatatcactcagaaaaaagatttggcctcgttggagataattttagtaaagaagaagttataaaaacattacccggaaattatgcaataggtcataatagatactcaacaactggaggaacaacattaagaaatatccaacctttttttgctgatactaatgcaggaggtataggtgttgcacataacggtaatttaacaaatgctattacactaagaaaaaaaatggtcgaggaaggatcaattttttatacaacatcagatactgaaacaattgtaaaattaatagctagatctaaaagagttaagacaattgataaagttatagatgcgctttttcaaattcaaggtggttatgctttggtagttatgacacaaaatatattgattggagttagagacccttatggaattagacctttagttattggaaaacttaagaattcctatgtcttagcttcagaaacttgtgcactagacataattggagcaaagtttgttagagaagtagaaaacggtgaaattgtttgtatcgaaaatgataaacttcaaagcgtaaagccttttcctccaaaaaaaa

SEQ ID NO: 238936 - DNA, 888 bp, Unknown
  Bacterial polypeptide expressing nucleotide sequence isolated from the Sargasso Sea
taagacctttagtaattggaaaactaaataattcctacatatttgcctctgaaacatgtgctttagatataattggagcaaaatttataagagaagttgaaaatggtgaaattgttacaattgaaaaaaataatttaaaaagtatcaaccctttcccatcaaaaaaacaaaggccttgtatttttgaatatatttattttgcaagacctgacagtatattaaatggtaaatgtgcttacgaatatagaaaagattttggaaaagaacttgccaaagaatcagatgtggatgctgaccttgtagttcctgtgccagactctggaaatgctgcagctattggttatagtcaatatgtaaaaaaaaaatttgatttaggtttaataagaaaccattatgttggtagaacttttattgagcctgtacaaaaaattagaagtctaggggttaaactaaaattgaacgcaaataaatcaactattaaaaataaaaaaatagttcttatagatgattcacttgtaagaggaacaacatgttataaaatagttaaaatgctttatgatgctggtgcaaaagaagttcatgttagaatagcttctccggaaataaaatttcctgacttttatggtatagataccccaacgaaaaaagagctcttggcagctaacaaaaataacgaagaaatttgcaaatatataaatgcaaaatctttaaaatttttaagtatagatggaatttacagagccatgggttttgaaaaaagaaatgaaacttatcctcagcttacagatcattattttactggagattacccggttaaaccaattgataatcttggagatgataaagtggctcaattatctttattgagcacagcttctaacaattaaa

SEQ ID NO: 238937 - DNA, 934 bp, Unknown
  Bacterial polypeptide expressing nucleotide sequence isolated from the Sargasso Sea
cagcttatagcaaaatctaaaagagaaaaatttatcgataaattaatcgatacactttttcaaattcaaggaggttactccttggtcttgatgacaaataaaaaacttgtcggagtcagagatccatttggaataagacctctagttgtcggaaaattaaaggagtcatttatattagcttctgaaacttgtgcactagatatagttggagccaaatttgtaagagaagtagaaaatggagaaatagtattcgttgaaaaaaatgaacttaaaagtgttaaaccttttcctaaggtaaaacctaggccttgtgtatttgaatatatttattttgccagaccagatagcattattgaaaataagtgtgcctatgaatatagaaaaaatttaggtatccaacttgctaaagaaacagattttgaggcagatcttgttgtacctgtgcccgattcgggtgtaccagctgcccttggatttgctgaatactcaaaaaaaaactttgaacttggtttaattagaaatcactatgttgggcgaacttttattgagccaacacaaaatatcagaagtttaggggtaaaactaaaacttagttcgacaaaaacaattgttaaaaataagtcaattatactaattgatgactccctagtaagagggactacttgtcacaaaattgttaaaatgctctatgaagctggagcaaaagaagtacatgttagaattgcttgcccagaaataaaatttccagatttttatggcgttgatatgcccacaaaagaggaattgttagcatatcaaaaaaataataagcaaatgactgattacataaaagctaaaagtttgaaatttttaagtttgaatggattatatcgtgcacttacaggtaaagatagaaattctaattaccctcaatttagtgatcattattttacgg

SEQ ID NO: 238938 - DNA, 769 bp, Unknown
  Bacterial polypeptide expressing nucleotide sequence isolated from the Sargasso Sea
aatgaaaaagactatcaaaatactaaagaaaaagttcaagagctataattcaaaaattaaagaggagtgtggtgtatttgggattagtaataacgaagatgcatcgactttaactgcactcggtttacatgctttacaacacaggggtcaggaaggttgcggaatagtttcatttgatggaagaaaatatcattcagaaaaaaggtttggtttagttggcgataattttaataaagagaaggttttaaaatcactacctggaaactatgcaatcggccataatagatatagcacaacaggtggtacaactttaagaaacatacaacctttttttgcagatactaacacaggcggaataggcgtatctcataatggtaatttaacaaatgcaattactttaagaaaaaaattggtagaagacggtgctatattttatacaacatcagatacagaaacaatcgttcagttaattgcaagatctagaagagtaaaaactatagataaaattgtcgacgctttattccaaattcaaggtggatatgctctagtaatgctaactcaaaacacattggtaggagttagagatccttttggtataaggccgcttgttataggtaaattaaatgactcttatgtgtttgcatctgaaacttgtgctttagatattataggtgctaaatatgtaagagatgtagaaaatggtgagatcgtatctattcaaaataatagattaaatagtataaagccatttccggcaagaaaaataagg

SEQ ID NO: 238939 - DNA, 695 bp, Unknown
  Bacterial polypeptide expressing nucleotide sequence isolated from the Sargasso Sea
tctaagcaatgcgtgaaaccaaaatcatacacgccttgtatatttgagtttgtatattttgcaaggccagattcgatcattgatggcatgtcagtttataaatctagactcagaatgggtgagtatttggcacagagaatcataaaaaaaggtctgcatcacgatgtggatgtagtgattccaattcctgataccagtcgatcaactgcgctccaagtcgcccatcatctgggtgtcaaatacagagaaggcttcattaagaatagatacattggacgaacattcattatgcctggacaggaaatcaggaaaaaatccgtgaaacagaaactcaatccaattgatctggaaattcgagataaaaatgtattattgattgatgactcaatagtcagagggacaacttcaaagaagataatacaaatggctcgaaatgcgggtgcaaacaaagtattttttgcctctgcagcaccacctgttaagtatccaaatgtttatggcattgatatgccttcaacagcagagcttttggcaagcaacagaactgaggaggagcttgcaagatatatcggtgcagattggttgatctatcaagaccttgatgatcttatttcagcggttcagtttgatgaatcagatgcagaggcttttgatacctcttgtttctctggagagtatgtcactggagatgtgac

SEQ ID NO: 238940 - DNA, 324 bp, Unknown
  Bacterial polypeptide expressing nucleotide sequence isolated from the Sargasso Sea
aatgtgcggaataatagggatttctgcagaaaataatgtagctgaggagatttacgagtctctacttatgttgcaacacagaggtcaagatgctgctggtatggttgtctgcgaacccagcggtaaactcaatagccggaagtcaaaaggctatgtcagagatgtatttcagcagaatcacatgagcaatcttcaaggaaatcttggaatagggcacgtaagatatccaactgctggaggaataggcaaggagtttgctcagccaatgtatgttaatactccctatggcataagcttagcccataacggaaacttaataaattc

SEQ ID NO: 238941 - DNA, 506 bp, Unknown
  Bacterial polypeptide expressing nucleotide sequence isolated from the Sargasso Sea
aatgtattgtaaaataactgataaattgaaagaagaatgcggagtgtttggaatatttggaactgaggaagcttctgttctaacgactttaggacttcattctcttcaacataggggtcaagaaggtgctggaatagtaagttttgatggtaaaaattttcatacagtacgaaaacaaggtttagtaggagataattttaataacaagaacatactatctcaacttcctggtaaaacagcaataggacacgtaagatattctactactggagaatcaaagcatgaaaatcttcaaccactatttgcaaatttagctatagggggttttgcatgtgcacataatggtaatttaacaaatacttactctataaaaaaatatttagttgaaagtggttctatttttcaaactacatctgacactgaagttattctccaattagttgcccgatcacaaaagaaaaaaataattgacaagcttattgacactcttcatcaaataaagggag

SEQ ID NO: 238942 - DNA, 910 bp, Unknown
  Bacterial polypeptide expressing nucleotide sequence isolated from the Sargasso Sea
gaaaagacaaggattagttggagatcattttaccaaaagcgatgtaataaaaaaattaccaggtaattctgcaatcggtcacaataggtattcaactactggagaaacatcaatcagaaatattcaacccttttttgcagacctgcactctggcggactaagtatagcgcataatggaaatcttactaatgcaatttctttgagggataacttggtaaaagatggtgcaattttcagaactacaacagatacagaaactatagtccaacttatagcaaaatctaagagggaaaaaataattgataaaattatagatgctttatttcaaatacaaggtggatattcattagttataatgactaataaaaagcttataggaataagagatcctttcggaataagaccgttagtgattggaaagctgaaggactcttatattttggcttcagaaacttgtgcgctagacattatcggagctagttttgtaagagaggttgaaaatggcgaagttgtatcaatagaggataaaaagttaaaatccataaaaccttttcctaaacagaaacctagaccctgtatttttgaatatatatattttgcaagacctgatagtttaataaatggaaaatgtgcatatgagtttagaaaaaattttggagttcaattagcaaaagaaaatgatattaaggctgatataattgttccagttccagactctggggtgccagcggcaattggctttgcagaggagtcaaaaattagatttgagtttggattgataagaaaccactatgtgggtaggacatttatagaaccttcacaaaaaattagaagtttaggagttaagttaaaattaagcacaacaaaaagtttagtgaaagataaatctgttttattaattgatgactct

SEQ ID NO: 238943 - DNA, 351 bp, Unknown
  Bacterial polypeptide expressing nucleotide sequence isolated from the Sargasso Sea
tttgccaagatttcatgaggaatgtggagtttttggaataagtggaacaaaagatgctgcggcgttaacagctcttggtttacatgcgttacaacatcgtggtcaagaaggttgtggaattgtaagttatgatggcaactcttatcattcagaaagaaaatttggattagttggagataattttacgaagaaacaatcactagacaaacttaaaggaaaaattgcaattggacacaatcgttattcaacgactggaggtgaaacaataagaaatattcaacctttttatgctgatcttcatggtggagcaattagtattgctcataatggtaatttaacaaatgcactttt

SEQ ID NO: 238944 - DNA, 637 bp, Unknown
  Bacterial polypeptide expressing nucleotide sequence isolated from the Sargasso Sea
attgagaaaatctgatcaagataaattaagggaggaatgtggtatttttggagtctcagaccactctgactcttcagcattagtagctttaggtttacacgccttacaacacagaggtcaggaaggatgtggaattgtttctttcgatgggaaaaattaccactcagaaaaacgacaaggactaattggagatcattttaccaatcctgaagtcataaaaaaactacctggtaaatttgcaattggacataatagatattctacaactggtggaacatctttaagaaatattcagcccttttttgcagatttgcacatgggtggattaagtattgctcataatggaaacttaacaaatgctttatttcttagagaaaacttagttaaggatggtgcgatatttagaaccactactgacactgaaacaatcgtacagctaatagctaaatcaaaaagagataaatttttagataaattaattgacacattatttcaaattcaggggggttactctttagtaattatgacaaataaaaaacttgtaggcgtaagagacccttttggtattagacctttagtaataggaaaattgaataattctttcatatttgcatcagaaacatgtgcattagatatt

SEQ ID NO: 238945 - DNA, 439 bp, Unknown
  Bacterial polypeptide expressing nucleotide sequence isolated from the Sargasso Sea
attgaagaattataatccaaaactcagtgaagaatgtggtgtttttggaatcagtaatattgaagatgcttctgctttaaccgctttaggtcttcatgcgcttcaacatagaggccaagagggttgtggaattgtaacatttgatggtgaacaatattattctgaaaaaagatttggtttagttggtgataacttcaataaagcaaaagtcttaaaaagacttaaaggcaattatgcaataggtcataatcgatacagcaccacaggaaataatactttaagaaatattcaacctttttttgcagatactaatgctggtggaattggagtggctcataatggaaatctaactaactcaattcatttaagaaaaaaactagttgaagatggtgctattttttacacaacatcagatacagaaactattgttcaattaatt

SEQ ID NO: 238946 - DNA, 763 bp, Unknown
  Bacterial polypeptide expressing nucleotide sequence isolated from the Sargasso Sea
gctatttttataaatctgaacggtgagtttttttctaagcaatgtgcagataatcctatcttatgtccctgtgcttttgaatatgtttatttagctaggccagattcaattatgaatggaatttccgtttataaagctcgtttaaaaatgggagattatttatctgaaacaattaaagaaactataaattctggagatgttgatgttgtaatgcctattcctgattcttctcgacctgcagctatgcaagttgctagacagttaggaatagaatatagagagggtttttttaaaaatagatatgttgggagaacattcattatgccgggtcaacagaaacgcaagaaatctgtaagacaaaaattgaatgctatgagtgcagagtttaaaaataaaaatgtgttaattgttgatgactcgatagtaagaggtactacttcaaaagaaattgtccagatggcaaaagatgcaggagcaaataaagttttttttacatcagcagcacctcctgttcgttttcctcatgtttatggcattaatatgcctaatagagatgaattaatagcatatgatagaacaataagtgaaattgctgatcaacttgaaattgataatcttgtctaccaaagtgttgaaaatttacgcaaatccataataattgattctcctattaaagatttggaaatgagttgctttactggttcttatgtaacagaaaatgtgaatcaggagttcttaaattgggttgaaaatgaatataaat

SEQ ID NO: 238947 - DNA, 793 bp, Unknown
  Bacterial polypeptide expressing nucleotide sequence isolated from the Sargasso Sea
gttactttcgatggaaaaaagtactattctgaaaaaagatttggattagtcggtgataatttcaataaagaggaaattttaaataagctaaaaggaaattatgctattgggcataatagatatagtactactggagacaatatattaagaaatatgcagccattctttgcagatacaaatgcaggaggcataggagtagctcataacggaaatttaactaattcaatttcaattagaaataaactagtagaagatggcgcaattttttacacaacctcagatacagaaactatagtaaaactcatagcaaaatctaaaagaaataaagttattgataaagttgttgatgcaatttttcaaattcaaggtggttatgctttggtgatgttaacccaaacctctctaattggagtaagagatcctcatggtataagacctttagttgtaggtaagctaaaaaatagttatgtcttagcctctgaaacttgtgcattagatataattggtgcaaaatttttaagagaagttgaaaatggtgaaatagttattattgaaaataacgaactaaaaagtgtaaaaccttttcccccaaaaaaagttagaccatgtgtttttgaatatatttattttgctagaccagatagtattttgaatggcaaaacagcttatgagcacagaaaaaatcttggagtagagttggcaaaagaaaataatactgattgtgatatagttgttccagtaccagattcagggaatgctgcagctgtaggttttgcacaacatctcggtaaaa

SEQ ID NO: 238948 - DNA, 455 bp, Unknown
  Bacterial polypeptide expressing nucleotide sequence isolated from the Sargasso Sea
aatggaatacattgacacttcagaagataaacttcatgaagaatgtggtgtatttggaatatttggaagccctgacgcatctccactgacagcgttaggattgcatgcacttcaacatcgtggtcaagaaggagcaggaattgtttcgtttgatggagaaaagtttcatggcgtcagaagaccgggactcgtaggcgaccactttaataaacaaaagttaattaacagactgcaaggcagtaatgcaattggacatgtcagatattctacaactggagattctattttaaaaaatattcaaccactgtatgcagatttaatatcaggcggctttgcatgcgcgcataacggaaatctcacaaatgcttctgcttttagagaaaaactttgtcgtagaggatcaattttttcatctacatctgatactgaaacaatttttgcattagttgcaacat

SEQ ID NO: 238949 - DNA, 787 bp, Unknown
  Bacterial polypeptide expressing nucleotide sequence isolated from the Sargasso Sea
atgtgcggcatcttcggaatttttggtcatcctaaagcctcagaactgacctttctagggctccacgctttacagcatcgtggccaggaaagtgccggcatcagtgtttctgacggagagaccatccatacccgacgcggacagggtttggtcagtgaagtcttttcccgtgatgaatacctggaattcgaaggaaatcaggccatcggacatgtccgttacacaacagccggagacagtggacttctaaacgcccagcctttggtgttccgttatactggcggtcaggttgcagtcgcacataatgggaatctggttaatgccaaacgtcttcgtgatcagttggaacgccagggttcgatttttcagaccaacagcgataccgaagtggtatcccacctaatcgcaagagccgggcctccaatcgatcatgcatttcaggatgccctgagagtaatcgatggagcttatgcacttttattgatgacggaaaagcagatgattgccgcccaggatccaagaggtttccggccgctttccctgggacagttcgaaaatgcatgggtcgtcagttctgaaacatgcgcactcaacaccataggggcggattttgttcgtgagatcaagcccggggaactgctcgtttttgatgaaaagggtttgcagatgcgttcctttacgggggtgcaaaccaggaaaatctgctcctttgagtacatctattttgcccgccctgacagtgaagtcgacggaatcagcgttcattcggttcgaaaagaactcggac

SEQ ID NO: 238950 - DNA, 855 bp, Unknown
  Bacterial polypeptide expressing nucleotide sequence isolated from the Sargasso Sea
tcaatttatttaagaaataaacttgttgaagagggtgcaattttttacacaacttctgacactgaaacaatagttcaacttattgcaaaatctaagagattaaaaactattgataaaataattgatgcaatatttcaaattcaaggtggatatgcattagtaatgttgacacaaaatttactagtaggtgtaagagatccttatggaattagacctttagttataggaaagttaaaaaatagttatgtgctcgcgtcagagacctgtgctctagatattataggtgcaaaatttatacgagaagttgataatggcgaaattgttttaattgaaaatgataaattaaaaagtattaaaccatttcctgaaaaaaaaattagaccttgtgtttttgaatatatctattttgcaaggccagacagtattttaagtggaaaaactgcatatgaacatcgtaagaatttaggaaaggaattagcaaaagagaataatattgatgctgatattattgttccagttcctgattctggtaacgctgctgccttaggttttgcacagcacttaaataaaaattatgagcatggactaattagaaatcactacgttggaagaacttttattgaaccaagtcaaaaaataagaagtttgggagttaagttgaaacttaatgccaatcaaacaacaatagaaaataaaaaaataattctagttgatgactctttagtgagaggaactacatctcataaaatagttaaaatgctttatgatgccggtgcaaaagaggttcatgtgagaattgcttgccctgagatcaaatacccagatttctatggtgttgatacaccaacgaaaaaa

SEQ ID NO: 238951 - DNA, 358 bp, Unknown
  Bacterial polypeptide expressing nucleotide sequence isolated from the Sargasso Sea
atggataaattaaaagaagagtgtggcatttttggtatatataaaactaatgaagcagcagttcacactgcactaggacttcattctcttcaacatagaggtcaagaaggagcaggaatagtgagttttgatggtaaaaagttttattctataaaaaaagaaggtctggttggtgacaactttaatgatataaatactttatcacagttacctggacaaacagctattggacatgtcaggtattcaactactggagaatcaaagtcagagaatttacaaccattatttgctaatctagctgttgggggtttcgcttgcgcacataatggtaacttgacaaactcgattcttaaaaaaa

SEQ ID NO: 238952 - DNA, 475 bp, Unknown
  Bacterial polypeptide expressing nucleotide sequence isolated from the Sargasso Sea
atgaaagaggagtgtggtgtatttgggataagtaataccaaagacgcctcagcattaactgctttagggcttcatgctctacaacatcgaggacaagaaggttgtggtattgttacctttgatggaaaaaaatattattctgaaaaaagatttggccttgtaggagataattttaataaagaggaaattttaaataaattaaaaggaaattatgctatcggacacaatagatatagcactactggtgataatatattaagaaatattcaacccttcttcgctgatactaacgctgggggcatcggtgttgcacataatggaaatttaacaaactcaatttcaataagaagcaaacttgttgaggaaggtgctattttttatactacctcagatactgagacaatcgtaaaactaattgctaaatctaaaagatctaagactatagataaaatcgtagatgccatattcaaatcaa

SEQ ID NO: 238953 - DNA, 608 bp, Unknown
  Bacterial polypeptide expressing nucleotide sequence isolated from the Sargasso Sea
tatgtgcggtattgtcggtatcgccggtgttatgccggtaaaccagtcgatttatgacgcgttaacggtgcttcagcatcgtggccaggatgccgcaggcatcatcactattgatgcaaataactgtttccgtttgcgtaaggcgaacggactggtgagcgacgtttttgaagctcgccacatgcagcgtatgcagggcaatatggggattggccatgttcgctatcctacggcgggcagctcaagtgcctccgaagcgcagcctttctatgtcaactcaccgtatggtattacgttggcgcataacggcaatctgaccaacgcgcacgagctgcgcaagaagctgtttgaagaaaaacgccgccatatcaacaccacctccgattctgaaatcctgctcaacatcttcgccagcgagctggataacttccgtcattacccactggaagcggataacatttttgccgcgattgccgccaccaaccgtcagatccgcggcgcctacgcctgcgtggcgatgattatcggtcacggtatggtcgcgttccgcgatccgaacggcatccgccctctggtgttgggggaacgtgatgttggcgatggtcgta

SEQ ID NO: 238954 - DNA, 742 bp, Unknown
  Bacterial polypeptide expressing nucleotide sequence isolated from the Sargasso Sea
aaagccgttccctgcaatgaaaaaaagaccatgtatttttgaatatatttactttgcacggccagatagtgtttttggagagaagagtatttatgagtgccgcaaaaactttggtcatgagcttgctgctgaagcaccctgttctgccgatatagttgtgccagtaccagacagcggggtaccagctgccttaggttatgctgaagctgcgggactacctttcgaattaggaataattagaaaccattacgtgggcaggactttcattgagccacagcaatcaacacgtgattttggtgtcaaactcaagcataacattaacagaaatgcggtaagtggtaaaaaagttgtgctaatcgacgactcgattgtgcgcggcacgacatcagtgaaaatagtggaattgatgcgtcaagctggtgctcgagaagttcatatgaaaattgcttctccaccaattaaatatccagacttttatggtattgatactccagaaaaggcacaattgttagcttcactgaagtcagagaaggaaatggctacatacattggtgctgacagtttatctttcctatcagttgatggactttatagagcaatgggacacgaaaaaggccgtgatgacaccaatccagcatttacagatcattgctttactggggattatccaaccccacttgaagataataacatagcttggttatttgagacatcacagctttcagtccgcaatgaaaattaa

SEQ ID NO: 238955 - DNA, 887 bp, Unknown
  Bacterial polypeptide expressing nucleotide sequence isolated from the Sargasso Sea
agggcaagagggatgtggaatagtatcttttgatggagaaaaatatcactctgaaaaacgttttggactagttggagataattttaatgacgaaaaagtattgaaaaaactaccaggcaagtatgcaataggccacaatagatattcaacgactggtgggacagcattgagaaatgttcagccattttttgcagatacaaatgctggaggcataggtgttgctcataatggtaatttaacaaatgctataacgcttagaagtaaactggtacaagatggagcaattttttatactacatcagatacagagactatcgttcaactaattgcaaaatcaaaaagagcaaaaactattgataaagttattgatgcaatatttcaaatacagggtgggtatgcattagttatgatgacaaaaaatacattgataggagttagggatccttacgggattagaccattggtaattggtaaattaaaaaattcatatgtatttgcgtccgagacttgtgctttggatataataggtgcaaaatttataagagaggttgaaaatggagaaatcgtttatgtagaagacgataaattaaaaagtttaaagcccttccctcctagaaaaataagaccatgtgtttttgaatatatctatttttcgagaccagatagtattttgaatggaaaaactgcatatgaatatagaaagaattttggatctcaactagccaatgaagaagatttggatgcagatttagttgtgcctgttccagactcaggtaatgcagcagcattaggatatgcgcaaagaaaaggtatcgcttttgacttgggacttataagaaatcattatgtgggaagaacttttattgaaccatctcaaaaaataagaa

SEQ ID NO: 238956 - DNA, 856 bp, Unknown
  Bacterial polypeptide expressing nucleotide sequence isolated from the Sargasso Sea
atgttagataagcttagagaagaatgtggggtttttggtatttttcaaaataaagattcagctgttttaactcaattaggtttacatgctttacagcacagaggtcaagaaggtgcaggtattgtatcatgtgatggcaatgaattttttagtataagaaaaaaaggattagtaagtgacaattttaataaacttaaaaatttaaaaaaactaaagggtaattcagctattggccatgtaagatattcaacagctggaggtagcataaaagaaaatatacaacccctatttgctaatttagctgatggtggttttgcatgtgctcataatggaaatttaatcaatgcaaaccatttaagagagaaactaacaaaaacagggtctatttttcagacaacttctgacactgaaacaattttacaattagtagcaagatcaaaagaaatttcagtagaaaaaaaaattatagatgctcttgggaaaattaaaggggctttttctttagttattttaacaaaagataaaatgtatggtattaaagatccttttggtattagaccattagtgatagggcagattagtaattcatttatttttgcatctgagacatgtgcattagatatgattggggcaaaatacgttagagatgtagaaaatggagagatagtcgagatttctattcatggtatgcgctcaattaaaccttttactaaaacaaatgaaagaccttgtatttttgagagaatttatttctcaagacctgatagtttaatagagggtaaaacagtttatagctatcgcaaacaattaggtattcaattagctaatgagaacaaattaaatgcagacgtgtaat

SEQ ID NO: 238957 - DNA, 437 bp, Unknown
  Bacterial polypeptide expressing nucleotide sequence isolated from the Sargasso Sea
tatgtgcggcataattggtctcgtcggacgcaagggctatcatatcaaccaattgctatatgatggattaaccgttcttcagcacagaggtcaagatgctgccgggatgatgaccgaatatgagggaaaatatcatcttcgtaaatccaatggtttggttaaagatgtttttttcaaacgacacatgcaaggtttgctaggctcagtgggaatcggtcatgttagatatccaactgcaggctcctcttcagtagctgaagcacagccgttttacgtcaactatccgtttggcctttctcttgcacacaatggtaaccttaccaatgcagcagagattgagacaaaactaacaaatcaatatcgaagacatgttaatactacatccgattctgaattattgctcaatctattggcaatggagttagaatcgcgctccc

SEQ ID NO: 238958 - DNA, 631 bp, Unknown
  Bacterial polypeptide expressing nucleotide sequence isolated from the Sargasso Sea
attgaaaatatttaataatgataagctaagagaggaatgtggtatttttggtgtatcaaatttagatgatgccgcaacggttgtagctcttggtttacatgcattacagcatcgtggtcaagaaggatgtggaattgtctcatttgatggaaaaaattttttttcagaaaaaaaacaaggattagttggcgaccattttacaaaaaaagatgtaataaataatttgcctggcagctcagccataggccataataggtattccactactggggaaacgtctttaagaaatatacaacctttttttgctgacttatttggtggcggaatttctattgcccataatggaaatctcactaatgctttaagattaagagaaattttagtaaaagatggcgcaatatttaggactacgaccgatacggaaacaattgttcaactaatagctaaatcaaagcgtgcaaaaatgatagataaaattgttgatacgctctttcaaatacaaggtgggtactcactaataattttaacaaataaaaaattaattggtgtgagagatccactcggtattcggcctcttgttttaggaaagttaaaaaactcttacgtttttgcctctgagacttgtgctctt

SEQ ID NO: 238959 - DNA, 598 bp, Unknown
  Bacterial polypeptide expressing nucleotide sequence isolated from the Sargasso Sea
atgctaaagaaaaagttcaagaactatagttcaaaattaaatgaagagtgtggagtatttggaataagtaatttcgatgatgcatcagcactaactgctctgggtctacacgctttacaacatagaggtcaagaaggttgcggaattgtttcgtacgatggaaaaaaatattattctgaaaaaagatttggtttggttggtgataattttaacaatgaaaaagtcttaaaaaaattaccaggaaattttgctataggacataacagatatagtacaactgggggtacaactttaagaaatatacagccattttttgctgatactcatgctgggggtataggcgtttcacataatggaaatcttactaatgccttaaccatcaggaaaaaacttgttaaagaaggtgcaatattttattcaacatcagatactgaagtaataattcaattaattgcaaaatcaaaaagatcttcaacagttgaaaaaattactgatgcaatatttcaaattcaaggaggatatgcgttagtaatgctcgcacaaaataaattaataggagtaagagatcctttgggaattagacctttagtaattggta

SEQ ID NO: 238960 - DNA, 907 bp, Unknown
  Bacterial polypeptide expressing nucleotide sequence isolated from the Sargasso Sea
ttaatcccaaagataaaagagaaatgtggtgtatttggtataagcaataacaatgacgcatctgctcttacagcattaggattgcacgcccttcagcacaggggtcaggaaggatgtggtattgtaacttttgatggagatcaataccattctgaaaaaagatttggtttagttggagataattttaataaagaaaaagtattaaaaaatctaactggaaaatatgctgttggtcataatagatatagtacaactggaggtacaacattaagaaatattcagccgttttttgcagacacaaacgcaggaggaataagcatatcccacaatggtaatttaacaaatgcaataacattaagatcaaaattggttaaggagggtgcgatatttcatactacatcagatactgaaactatcgttcaactaattgctaaatcaaaaagaaataaaactatagataaaatcattgacgcattatttcaaattcaaggaggctacgcattggttatgttaactcaaaaaaatttaataggtgttagagatccttttggaataagacctttagtaataggaaaattaaataattcatacgtattagcatcagaaacttgtgctttagatataataggtgcaaaatttttaagagaagttgaaaatggagaaattgttttaattcaagatgataaaattgaaagtattaaaccgtttccagaacaaaaggttcgaccatgtgtattcgaatatatttatttctcaaggccagacagtattttaaacggcaaaactgcttacgaatatagaaaaaacctaggcgttgaactagcaaaagaagataatgttgagggggatgttattgtacccgtaccagattcgggtaatgcagctgctttagggtatagtcaaaaaa

SEQ ID NO: 238961 - DNA, 727 bp, Unknown
  Bacterial polypeptide expressing nucleotide sequence isolated from the Sargasso Sea
ggacaaactaagagaggagtgtggaatatttggtatttctaaccacaaagacgcctctactattgttgctttaggcttacatgctttacagcatagggggcaagaaggatgcggaattgtatcttttgacggcaaaacgtttcactctgaaaaaagacaagggctagttggtgatcattttacaaagggtgatgctataaaaaagttaccaggaaaatctgctataggacataataggtactcaactactggtgaaacatccttaagaaatatacagcctttttttgcagatctttttggaggaggacttagcatttcacataatggtaatttgactaatgctttaattttaagagaaaatctagttaaagatggcgctatatttagaacaacaagtgatactgaaactattgttcagcttatagcaaaatctaaaagggataaaactatagataagattatagatgctctttttcaaattcagggtggatattctataatattaatgacaaacaaaaaactaattggggtaagagatccttttggaataaggcctttagttattggaaaattaaacaattcttttatttttgcatctgaaacctgtgctttggatttggtaggagctaaatttttaagagaagttgagaatggagaaattgtagtaatagaaaataacgaattaaaaggtattaaaccttttccgaaagttaaagctaggccttgt

SEQ ID NO: 238962 - DNA, 457 bp, Unknown
  Bacterial polypeptide expressing nucleotide sequence isolated from the Sargasso Sea
atgaaaaatcgactagagttcttaaaaaaattcgaggtaaggcaatctcatgttcctagatttaatgaggagtgtggtgtttttggaataagtggaaccaaagatgctgcagccttaacagctcttggtttgcatgcgttgcaacatcgtggccaagaaggttgcggaattgtaagttatgatggaaactcctatcactcagaaagaaaatttggattggttggagataattttacgaagaaacactcattagataagttaaagggaaaaattgcaatcggacacaatcgctattcaacaactggcggtgaaacaataaggaatatacaacctttttatgctgatcttcatggtggagctattagtattgctcataatggtaatttaactaatgcactccttttaagagagcaaatggtacgtgaaggagcaatattcaaacaacatcagataccga

SEQ ID NO: 238963 - DNA, 814 bp, Unknown
  Bacterial polypeptide expressing nucleotide sequence isolated from the Sargasso Sea
atttggaaaattaaaaaattcttatgtttttgcgtctgaaacctgtgcttttgatattattggtgcaaagtttgttagagatgttgaaaatggtgaaattgtttatgtagaaaatgatgaattaaaaagtattaagccatttcctcaaaaaaaagtgagaccatgtgtatttgaatatatttatttttcaagaccagatagtattttgaatggcaaaacagcctatgaatatcgaaaaagatttggcgctgaattagcaaaagaggataatttagatgctgacttggttgtgccggtaccagattccggaaatgcagctgcattaggttacgcggaagaaaaaaaaataaattttgatttgggtttaattagaaatcattacgttggtcgaacttttatagagccgtcacaacagattagaagtttaggagttaaattaaagctaaatgcaaatgtttcagttataaaaaataagaaaataattttagttgacgactctttagttagagggaccacttcatcaaagattgtaaaaatgttatatgataatggcgctaaagaaatacatgtgaggatagcaagtccagaaataaaatacccagatttttatggagttgatacacctacaaaaaaagaattactagcagcaaacaaatcagtagatgaaataaaagagtttataaaagcaaaatcacttaaatttttaacgttagatggtttgtatagagcaatgggttttgataagagaaatgatgcttatccacaattaactgatcatcattttactggtgattatccaataaaaataattgat

SEQ ID NO: 238964 - DNA, 907 bp, Unknown
  Bacterial polypeptide expressing nucleotide sequence isolated from the Sargasso Sea
gaagatgcctctactttgactgccttagggcttcatgctttacagcatagaggtcaagaaggttgtggaatagtatcttttgacggaactaattttcattctgaaaaaagacatggtttggttggtgataattttacaaataaagatgtattgaaaaaattacctggaaagtttgcaattggacataatcgttactctacaactggagaaacatccatgagaaatattcagcctttttttgcagaccttcatggtggtggtatagcaattgctcacaatggaaacctaactaacgcaataatgttgagagaaagtcttgtaaaaagtggtgcaatttttaggacaacaagcgatacagaaaccattgttcaattaattgctaaatcaaagagaataaagattattgataaaataattgatgctctttttcaaatccaaggtgggtttgcacttacaatgattactaataaaaaacttattggtgttagagatccgttgggtattagacctcttgttttaggtaaaataaagaactcttatattctggcatcagaaacttgtgctttagatattattggagcaaaattcattagagaagttgaaaatggagaaattgtagttattgaaaataataccattaaaagtattaaaccatttccaaaaaagaaaagtagaccgtgtgtctttgaatatatttattttgcaagaccagatagtcttttaaatggaaaaagtgcatatgaatatcgaaagaatctgggttatcagcttgctaaagaaagtaacaataatggtgatataattgtacctgtaccagactctggtgttcctgcagctttaggttacgcacaatataaaaaaatgaattttgagcttggtttaattagaaatcattatgtggcagaac

SEQ ID NO: 238965 - DNA, 589 bp, Unknown
  Bacterial polypeptide expressing nucleotide sequence isolated from the Sargasso Sea
atgcaaaagaaaaagttcaagaattataatcccaaacttaaggaagaatgtggagtatttggaataagtaatattgatgatgcatctgcggttactgctcttggacttcatgcccttcaacatcgaggacaagaaggatgtggaattgttacttttgatggggaaaagtaccactcagaaaaacgttttggattagtaggagataattttaataaagaaaaggttttaaaaaaactacctggaaaatatgctttaggccataatagatacagtactactgggggaacaacattgagaaatattcaaccattctttgctgatacaaatgcaggaggaataagtgtttctcataatggaaatttaacaaatgctataactttaagatcaaaattggttcaggaaggttcaatattttacactacttccgacactgaaaccattgttcaattaattgctaaatcaaaaagatcaaaaacagaggataaaataatagatgcattatttcagattcaaggaggttatgccttagtaatgctaacacaaaaaaaattaataggagttagagatccttttggaataagaccattgt

SEQ ID NO: 238966 - DNA, 589 bp, Unknown
  Bacterial polypeptide expressing nucleotide sequence isolated from the Sargasso Sea
ttgaatgataggcctcagcatgagtgtggtgtatttggtatatatggtcatgaagatgcaggagctttaactgctttaggactgcatgctttacaacataggggacaagaagcagcaggaatggttacatatgatggaaaacattttcatgcagagcgccgaatgggtttagtgagtgatacttttacaaaaactagtgttttaggaagacttaaaggtaattcagcgattgggcatgttagatattccacaacaggaggtacactattaagaaatgtacagccattatttgctgatttagcattaggtggatttgcaatagcccataatggcaaccttactaatggactaacgatacgtcttgaattagtaaaagaaggtgcaatatttcaatctacttcagacacagagactattttacaattagttgcaaaatcaaaaaacaaattatcaattgatagaatggttgatgctctttctcaaattgaaggagcttacgcactagtggctattacaaataaacaacttataggggtaagagatccatatggaattagacctttaatgctgggggaattagaagggaaat

SEQ ID NO: 238967 - DNA, 673 bp, Unknown
  Bacterial polypeptide expressing nucleotide sequence isolated from the Sargasso Sea
aatgataaagaagatctctactaaagttagagaagaatgtggtgtttttggtatttctaatatcaatgatgcttcagctttggctgctttgggtctacacgcacttcaacatagagggcaagagggttgtgggatagtttcatatgatggtaaaaattattattctgaaaaaagatttggccttgtaggagataattttaataatgaggatacaattaagaaattacctggaaattatgctattggtcataacagatatagtacaactggagggaaaattttaagaaatgttcaacccttttttgcagacactaatgctggtggaataggagtctctcataatggtaactttacaaatgctattactttaagaaaagaactggtcaaagaaggagcaattttttatacaacttcagactctgaaacaatagttcagcttatagcaagatcaaaaaaagagaaaaatattgataaaattatcgaagctatttctcaaatacagggtgggtatgcattagtgatgcttactaaagacgttctcattggagcaagagatatatatgggatcagaccattggtaataggtaaattaaataattcttatgttttagcatctgaaacatgtgctcttgatattataggtgcagaatttgttagagaagtgaaaacggga

SEQ ID NO: 238968 - DNA, 925 bp, Unknown
  Bacterial polypeptide expressing nucleotide sequence isolated from the Sargasso Sea
ggaatagtttcttatgatggtacaaactatcattcggaaaaaagacagggtttagttggagatcattttactaaaagcgaagttataaaaaaattacctggaaaatttgctataggacacaatcgatattcaacaaccggtgaaacttctttaagaaatattcaacccttttttgccgaccttcatatgggcggtataagcattgcgcacaatggaaatcttactaatgctttaacgcttagagaaactttagtaaaagaaggcgcaatatttagaactacaagtgatactgaaactattgttcaattaatcgctaaatctagaagagaaaaaatagtagataagctgatagatactctttttcaaataaaaggaggatatgctttagttttaatgacaaacaaaaaattaattggggtgagagacccttttgggatacgacctctagtgatcggtaggttaaatagctcttatattttagcctcagaaacttgtgcattagacattgttggtgcgaaatttatcagagaagtaaaaaacggtgaaatagtggtagtagaaaataaccaaataaatagtattaacccatttcctaaacaaaaagaaaggccatgtgtttttgaatatatttattttgcaagaccagatagtttaattaacggaaaatgcgcttatgaatatagaaaacaatttggtttacagttagcaaaagagtcagatattaacgcagatatagttgtccccgttccagactcaggagttcctgcagctttaggttatgctgaatactctaaaaaaagatttgaattaggtcttataagaaatcattacgttggaagaacatttattgaacctacccagaacattagaagtttaggtgttaaattaaaacttagttctacaaagagtatagttaaaaataaat

SEQ ID NO: 238969 - DNA, 505 bp, Unknown
  Bacterial polypeptide expressing nucleotide sequence isolated from the Sargasso Sea
atgtgtggtattgttggtattgttgggaaatatccggttaatcaagcactttatgatggtttaacagtgctacagcatcgcggtcaggatgctgccggtattgttaccgttgataacaacaccctgcgtctacgtaaagctaacggactggtaaaagacgtatttgaagcgcgtcatatgcagcgtctggcaggtaatattggtattggtcacgtgcgttatcctacggcgggatcgtccagcacggctgaagctcaacctttttatgttaacagcccttttggtattgcactggcacacaatggcaacctgacaaactcgcatgtgttaaaggaagatatttttcgcgtggccaggcgtcatgtgaacacgacatctgattcagaagtattgctaaacgtgctggcgcatgagctgcataacagcggtgttatggagctgcaggcggaacatattttccgtgccgttgcgaatgttcatcgtaaagtaaaaggtggctatgcgg

SEQ ID NO: 238970 - DNA, 668 bp, Unknown
  Bacterial polypeptide expressing nucleotide sequence isolated from the Sargasso Sea
attgaagaactttaatccaaagctaaaagaagagtgtggggtctttggtataagtaatattgaggatgcatctgctttgactgcattaggtcttcatgcccttcaacacagaggccaggagggttgtggaattgtaacttttgatggaaaacaatattactcggaaaaaagatttggtttagttggtgataattttaataaagaaaaagttcttaaaaaacttaaaggaaattatgctataggtcataatcgatatagcaccactggaagtaacacactaagaaatattcaacctttttttgcagatacgaatgctggtggtattggagttgcacataatggtaatttaactaactcaatatcacttagaaataaattggtagaagatggagcaattttttacacaacatcagatactgaaactattgtccaattgattgcaaaatccaagagaataaagacaatcgataaagttgtagatgctatatttcaaattcaaggtggttatgctttagtaatgttgacacaaaattctttaattggcgtcagagatccttatggaataaggccacttgttattggaaaattaggtaatagttatgttttggcatctgaaacttgtgccttagatattattggtgcaaagtttttaagagatgttgagaatg

SEQ ID NO: 238971 - DNA, 916 bp, Unknown
  Bacterial polypeptide expressing nucleotide sequence isolated from the Sargasso Sea
tttttttgctgatcttcatggaggtggaatagccattgcacataatggaaacctcacaaatgcacttcgtctcagagaagatttagtaaaagatggtgcgatttttcgaacaactagtgacacagaaacaattgttcagttaattgcaaaatctaaaagaattaaaattattgataaaataattgatgcgctttttcaaatccaaggtggttattctctagttatgataactaataaaaaacttataggtgttcgtgatccattgggtataagaccactaattttagggaaaattaaaaataaatttgttcttgcttccgaaacttgtgctctagatattataggtgcaaaatttataagagaaattgaaaatggtgaaattgtaattgttgaagataataatataaaaagcctaaaaccatttccaaaaaagaaaagtagaccttgcgtatttgaatatatttattttgcacggccagacagtcttttgaatggaaaaagtgcatacgagtatagaaaaaaattgggatacgcattagcaaaagaatctgaacaagtgggtgacatagtcgtgccagttcctgactcaggtgttccagcggctctcgggtatgctcaatataaaaaaatgaatttcgaagttggactagttaggaatcattatgttggaagaacatttattgaacctacgcaaagtattagaagtctcggtgtaaaacttaaacttagtgctaatatgtcatcaatcaaaaataagtcgattgtattaattgatgattctcttgttagaggaacaacttgtttgaagattgttaagatgctttatgaagccggtgcaaaagaagttcatgtaaaaatcgcatgtccagaaattaaataccccagatttttatggaatcgatatgccctccaaaaa

SEQ ID NO: 238972 - DNA, 841 bp, Unknown
  Bacterial polypeptide expressing nucleotide sequence isolated from the Sargasso Sea
tatgaaaaagcaaaagaaaaagttcaggatttataatccaaaactcaaagaagaatgtggagtttttggtattggtaatatttctgatgcatcaacattaactgctttaggacttcacgcacttcaacatagaggtcaagaaggttgtggaatagtatcttttgacggtgaaaagtatcattcagaaaaaagatttggtttagttggagataattttaataaagaaaaagtattaaaaaaacttcctggaaaatatgcaattggtcataatagatattcaactactggaggctcagctttaagaaatgtacaacctttctttgcagatacaaatgcaggaggaattggtgtttctcataatggtaatcttactaatgcaataactttgagaaaaaaattagtccaagaaggtgccatattttataccacatcagatactgagactattgttcaattaattgcaaaatcgaaaagagaaaaaataatagataaaatagtagatgctctttttcaaatacaaggcggctatgcattagtgatgatgacacaaaatactcttattggagtaagagactcttatggaattagacctttagtaattggaaaattaaaaaattcatatgtttttgcatctgaaacttgtgcgttagatattataggagcaaaatttatcagagaagttgaaaatggtgaaatagtttatgttgaaaatgatgaactaaaaagtttaaaacctttttctccaaaaagaattagaccatgcgttttcgaatatatatatttttcaagaccagatagtataatcaatggaagaacagcatatgaatatagaaaaaacttg

SEQ ID NO: 238973 - DNA, 631 bp, Unknown
  Bacterial polypeptide expressing nucleotide sequence isolated from the Sargasso Sea
tatgtgcggagtcgtaggcattatcagcagtaggcccgtaaaccaagaaatatatgatgctttaacagtgctacaacaccgaggtcaggactcagcagggatcatgacggacaacaatggtgtgctttgccttagaaaaagcaatggtttggtaaatgatgttttttcaaatgaacacatgactagactgagaggcaatgtaggtattggtcatgtgcgttatccaaccgcaggaacactcagttcatctgaggcacaacctttttatgtaaactctccatttggcatctgtttggctcacaatggtaatcttgttaacaatgaggagcttagaaagcatctaagcgaagtggatcgaaggcatttaaatactgaatcagatacagaagctttattgaatctatttgcccatgaactacaggaaaattttgatggaagcctctctcctgaaattatttttaaagctgcaactcatcttttcgataaatgctcaggcggttatgccgttgtttcaatgatcttgaatgagggactggtggccatgagagatccaaatggaattcgccctctgatacttggaaagagagaagttgggcaagttacagaatatatgattgcttctgaaagtgtg

SEQ ID NO: 238974 - DNA, 706 bp, Unknown
  Bacterial polypeptide expressing nucleotide sequence isolated from the Sargasso Sea
aatgagagaaataagagaagagtgtggtatttttggtgttcatgatgcccaagatgcatcagctttaactgctttggggcttcatgcattacaacatagaggtcaggaaggatgtggtatcgtatcttttgatggaaaaaattttcattcagaaaaaaggaatggcttggttggtgacaactttacaaacaaagaaattttaaaaaaattacctggaaattttgctataggtcataatcgttattctacaacaggagaaacttctctgagaaatatacagcccttttttgcagatctctatggcggcggtataagtgttgctcataatggtaatctgacaaacgcaattcaactaagagagagcttggtaaaagatggagctatttttagaacaactacagataccgaaactattgtacagctaattgcaaaatctagtagagaaaagattatagataaaattattgatgctatttttcaaattcaaggtggttatgccttggtaattatgacaaataaaaagttagtaggtgtaagagatcctttgggaataaggcctttagttttgggaaaaataaaaaattcatatgtattagcttcagaaacttgtgcattagatataataggggcaaaatttattagagaagttgaaaatggagaagtaatagtaaaagagaaaggatcgtttaaaagtttaaaacctttt

SEQ ID NO: 238975 - DNA, 763 bp, Unknown
  Bacterial polypeptide expressing nucleotide sequence isolated from the Sargasso Sea
gctccaacctttttatgtaaattcaccttatggcatagctttagcacataatggaaatttgataaattccgatatattaaaatctgatttatttaaagaagatttaagacatattaatacaaaatcagattctgaaatcttacttaatatctttgctcatgagttatatcttcacagcaaagaagtttttactccagacagtatattttatgctgttgctggtgtgcatagaagagtaaaaggagcatatgctgtagtatctttgattactgataaaggcatagtagcgttcagagaccctcatggtatacgtcctttatgctttggccacagagttgttggcggtaaaactgaaacaatgattgcttcagaatcagtagcacttgattcagctggttacacattagaaagggacgtcaaacctggtgaggcaatatttattgatactaatggcaatgttcatacaagattatgcgcgaaaactaatagtttcaatccctgtatatttgaatatgtatattttgcaagaccggattctataattgatggaatctcagtttacaaagctagaatgaatatggggacagcactagcgaataatatcgacaaagcattcccaaataatgacattgatgttgttatacctattcctgatacaagcagaatatcggccttagaattatctgctaaacttaaaattccatttagagagggtttcataaaaaatagatatatcggaagaacatttattatgtctgagcaa

SEQ ID NO: 238976 - DNA, 721 bp, Unknown
  Bacterial polypeptide expressing nucleotide sequence isolated from the Sargasso Sea
tatgtgtggtttagttggagttgttactactgacgatgtgggagtctgtctttatgacactttaacagtgcttcaacatcgcggtcaggatgcagcagggatcatgacgagtgataatggaaagctaaatcttcgaaaagataatgggcttgtaaaagatgtgttcagaacgcgtcatatgcgcaggcttaccggacaaatgggaataggacatgtgaggtaccctacagcaggtagttctagccccgctctagctcaacctttctatgtaaattctccctatggattatctctcgctcataatgggaatcttacaaacactgctgagttgagtagggacttatttaaggaagaccttcgacatataaacactgattcggactctgaagtattgctaaatatatttgcacacgaacttcagcaacagcaacaaattgagcctacaccagatcatattttttcagctctttcaagggtttatgaccgttgtaggggcgggtttgtggcaattgttatgattacgggctacgggattttgggttttagagataagcatggtattagacctttagtgtttggtagtagagagtcggaacgcggcaaggaatatatgattgcgtctgaaagcgttgcacttgattctcaaggattctctgtggaaagggatattgcgccaggcgaagctgtttacatagatgttaacaacaacctctatacaaaa

SEQ ID NO: 238977 - DNA, 312 bp, Unknown
  Bacterial polypeptide expressing nucleotide sequence isolated from the Sargasso Sea
gatgcaaaagaaaaagttcaagaaatttaatcctaaaataaaagaagagtgtggagtatttggtataagcaataataatgatgcttctgctcttgctgctttaggattgcacgcacttcaacacagagggcaagaaggatgtggaattgtaactttcgatggagatcaataccattcagaaaaaagatttggtcttgttggagataattttaataaagaaaaagtattaaaaaatttaataggaaaatacgctattggtcataataggtatagtactactgggggcacaacattaagaaacattcagccatt

SEQ ID NO: 238978 - DNA, 909 bp, Unknown
  Bacterial polypeptide expressing nucleotide sequence isolated from the Sargasso Sea
cttggcggaagacatctaccgcgaagacctgcgtcacatcaacaccacctctgactccgaagttctactgaatattttcgcgcacgagcttcaggagcagcgtcagctcaagccatctccagaggttatcttcaaggcggtgcggagagtgcatgagcgtatccgtggtgggtatgctgtggtcgctatgatcactggctacggtatcgttgctttccgcgatccccacggcatccgccccgctgtatttggtcaccgtgatactgcgaacggccctgagtacatggttgcctctgagtcagttgccctggatgcacaggatttcaaactcgaccgtgacatcgcgccgggtgagtgcgttatctttaccgaagatggtcagctcttcacagagcagtgtgctgagcagacggaactgacaccgtgcatttttgagcatgtttattttgcccgtcctgattccatcattgatggcatcgctgtgtataaagcccgcctgcgtatgggtgaaaaactcgccgataagatcatgcgtgagcacccggaccatgatatcgatgtagttataccgattccggataccagccgatcttcagcactggaattggcgaatcatctgggtgtgaaataccgcgaaggctttatgaagaaccgctatattggccggaccttcatcatgccggggcagcagctacgcaagaagtccgtaaaacagaagctgaatgcactcgacctggaattccgcggtaagaatgttctccttgttgatgactctatcgtacgtggaacaacgtgcgaacagatcattgaaatggcacgcgaagcgggcgcgaaaaatgtgtattttgcctctgcggcaccggccgttcgattcccgaatgtgtacggaatcgatatgccagcgaaaga

SEQ ID NO: 238979 - DNA, 954 bp, Unknown
  Bacterial polypeptide expressing nucleotide sequence isolated from the Sargasso Sea
cttgagcttttcaagcaagaagcagtttttcccaaaccaaaagacttttttgcagctgttgaaaaaacacatttgcgaataaatggcgcatatgctgtcgtagcattaataactggatatggaatcgttgcttttagagatcccttagggataagacctttaactattggagttagaaagggtaaaaacagaaatgaatatgttgtttcttctgaaacagcattattttcagcgacaggtttcaaagttctaagagatgttgagcctggtgaggctgtttttatagataattcaggcaagatatttactcaacaatgctatccaggcagtgaaaaaaaaccttgtatatttgagtatgtatatctggctcgaccggattcaactatcgatgagatttcagtttatagatctagaatgcgaatggggttgaagttagctaacagaataagagaacttaatctcgtagatgaaatagacgtcgttattccaatacctgatagctcaacaactgctgcacttcaacttgctgcagatttaaaaaagccttaccgccaaggctttgttaagaatagatatattgggagaacattcataatgcctcttcaagaggagagaaagaaatctgtcagaagaaagttgaatatccttgatctagaatttaaggacaagaatgtcttgcttgttgatgattcaattgttagaggaacaactagtagacaaataatcgaaatggtaagagaggctggcgcaaaaaaagttttatttgcatccgcatctcctccagttaaatatcaaaacctttatggtatagatatggcggcaactaaagaattaatagctcatgataaaacagaaactgaaattgcagatgcaataggagcagatgagttgatatatcaaacccttgaagatcttattagctccgttcaagaaggaaatcctgaaataaaagac

SEQ ID NO: 238980 - DNA, 712 bp, Unknown
  Bacterial polypeptide expressing nucleotide sequence isolated from the Sargasso Sea
atgtgtggtattgttggaatcgtaggtaagtatccggtcaatcaggcgttgtacgacggtttaactgtgttgcagcaccgtggtcaggatgccgccggcatagtgacagtagacaacaaaaccttacgcttacgcaaagccaatggcttagtgaaagacgtatttgaagcccgccatatgcagcgtttgtctggcaatatgggcataggtcatgtgcgttatccaacagcaggttctgccagcacggccgaagctcagccgttttataccaatagcccttttggtatagccctggcacataacggcaacctgaccaattctgaagaattaaaagacgagttattccgaacggcccgtcgtcatgtcaataccaactccgactcagaagcactgttaaacgcttttgcccatgagctggatattcatgccgatatgcatgtaaatcctgaccatattttccgtgctgtagccaatttacaccgtaaaatccgcggtggttatgcggtagtagcggtcgtcattggccatggtttagtggcctttcgtgatccaaacggtatccgtcctttagtaatgggaaaacgcgagacagcgcttggcactgagtatatggtggcttctgaaagtgtggctttggatgcagatggttttactgtattgcgtgatatcgcgcctggtgaagctgtgtacatcactgaagatggtcagctgt

SEQ ID NO: 238981 - DNA, 848 bp, Unknown
  Bacterial polypeptide expressing nucleotide sequence isolated from the Sargasso Sea
aatagtcgcaagtcaatgggctacgttcgagatacatttcagcagagacatatgaacaaattgctaggtaattatggaattggccatgtgcgatatccaactgcaggcggtgctggtaaagagtttgctcaaccaatgtatgttaattctccatatggtattagtcttgctcacaatggaaacctaacaaactctaaagttcttgcgcgtgaattatttcatgctgaaatgcgtcatctcaatactgattcagactcagaagtcctccttaatatctttgcccatgagctagggaaacaaagagcaattttgccttctaaaaagcacttttttaaagctgtcagaaaaactcacatcagatgtcaaggagcctatgcagtagttgcgttaattactggttttggattacttgcttttagagatccgcgtggcattcgtccattagtaattggtgtgaaagatggcccatctaaacaagaatatattgtggcatctgaaaatgcttctttctctgctttaggttttaaaacattaagagacgtacatcctggagaggctgtgtatatagatgttgacggaaatttacacagcgatcagtgctctgaaaatgcagagccaactccttgcatctttgaatatgtatatttggctaggcctgattctattttagatgagatttctgtttacaaagcaagaatgagaatggggcagaagctggcaaaaaaaattcttaaactaaacccagatcatgatatagatgtagtaattccgatacctgatagctctacaacagctgcgttacaacttgcagcagtattaaaaacttcttacagacaaggctttgttaa

SEQ ID NO: 238982 - DNA, 414 bp, Unknown
  Bacterial polypeptide expressing nucleotide sequence isolated from the Sargasso Sea
gatgcataaaattaagcatgaatgtggtgtgtttggattgtttggtattgatgaagcgtctgtattaaccacattaggccttcattcgcttcagcatcgtgggcaagaaggggctggtattgttagtagtaatgatggttctttttattcaattcgaaaagaaggattggttggggataattttaatgatgctgatacattatcaaaattacctggtaagcatgctattggtcatgttcgatattcaacaacaggtgattctaagcttgaaaatatacagccattttttgcaaatttagcgactggtggatttgcttgtgctcataatggtaatttgacaaatacgacaggtttgaaaaaggagttggtgagtacggggtctatttttagaacaacttcagatacagaagttat

SEQ ID NO: 238983 - DNA, 487 bp, Unknown
  Bacterial polypeptide expressing nucleotide sequence isolated from the Sargasso Sea
atgaaaaagattatcaggatactaaagaaaaagttcaagaattgtaatccaaaaatcaatgaggagtgtggggtatttggaattagcaataatgaagatgcatcaactttaacagcgcttggtttacatgctttacaacatagggggcaggaaggttgtggaatagtttcatttgatggtaaaaaatatcattcagagaaaaggtttggtttagttggtgataattttaataaagaaaaagttttaaagtcattaccaggtaactatgcaatcggccataatagatatagcactacaggtggtacaactttaagaaacatacagcccttttttgcagataccaacactggaggaattggagtttctcacaatggtaatttaacaaatgcaataacactcagaaagaaattagttgaggatggtgctattttttatacgacatctgatacagaaacaatagtgcaattaattgcaagatctaaaaggg

SEQ ID NO: 238984 - DNA, 748 bp, Unknown
  Bacterial polypeptide expressing nucleotide sequence isolated from the Sargasso Sea
aatgaaaaaacatatcaagactctaaagaaaaaattaaagaattataacccaagattaaaagaggagtgtggggtttttggtatcagtaatacaaaagatgcttcagctctcacagcacttggccttcatgctctacaacacagaggtcaagaaggctgtggtatagtcacctttgatggggaaaaatattattctgaaaaaagatttggcttagttggtgataatttcaacaaagaaaaagtgcttaataatcttaagggaaattatgcaattggccacaatagatacagtacaactggaaacaatatattaagaaacattcagcccttttttgctgacaccaatgcgggtggaattggagttgcacataacggaaatcttactaattcaatagctttgagaaataagttggttcaagacggagctatattttacacaacctcagacactgaaacaattgttcaattaattgctaaatcaaaaagaccaaaaacaattgataaagtaatcgatgcaatttttcaaattcaaggtggttacgctttagtgatgttaacgcaaaactcattaattggggttagagatccttatggcattagacctcttgttattggtaagcttggtaatagttatgtcttagcatctgaaacttgtgcgtttgatataattggtgcaaaatttataagagaagttgaaaatggtgagatagttttaattgaaaataataaacttaaaagtattaaaccc

SEQ ID NO: 238985 - DNA, 526 bp, Unknown
  Bacterial polypeptide expressing nucleotide sequence isolated from the Sargasso Sea
aatgcaagttgcaagacagctagggatagaatatagggaaggtttttttaaaaatagatatgttggcagaacatttataatgcctggtcagcagaaacgcaagaaatctgtaaggcaaaaattaaatgccatgagtgctgagtttaaaaataaaaatgtattaattgttgatgactcgatagtaagaggtactacttctaaagaaattgtccagatggctaaagatgcaggagcaaataaagttttttttacatcagcagctcctcctgttcgttatcctcacgtttatggaattaatatgcctaatagagatgaattaatagctcacaataggacaataagtgaaatcgccgataaacttgaaattgataaccttgtttatcaaagtgttgaaagtttgcgtaaatctataattggtgattctcctattaaaggtttagagatgagttgttttactggtgattatgtaactggaacagtaagtaaagaatacttaaattgggttgaaaatgaatataaatcttag

SEQ ID NO: 238986 - DNA, 1243 bp, Unknown
  Bacterial polypeptide expressing nucleotide sequence isolated from the Sargasso Sea
aatactaaatattcttaaaggtgattatgctattggtcataatcgatatagcactactgggaataatactcttagaaatattcaacctttttttgctgataccaacgctggtggtatcggtgttgcacacaacggaaatttaacaaattcaatttatctaagaaataaactagttgaggatggtgcaatattttatactacctcagatactgagactattgtccaattaatagctaaatcaaaaagatctaaaaccattgataaggttgtagatgcaatatttcaaatacaaggtggttacgctttagtcatgttaacacaaacatctttaattggagtaagagatccttatggaattaggccactagtaattggtaaattaggaagtagctatgtgttagcatcagaaacctgtgctttagatatcattggagcaaaatttataagagaagtagaaaatggtgaaattgtttttatagaaaataatcaactatcaagtatcaaaccttttcccccaaaaaaaattagaccatgcgtatttgaatatatttattttgcaagaccagacagtcttataaataacaaaaccgcttatgaacatagaaaaaatttaggaaaagagcttgctgaagaaaatgatatagatgcggatattgttgtgcccgttcctgactcgggaaatgcagcagctttgggattttctcaaaaattaaggattaattttgagcatggattaataagaaatcattatgtgggcagaacttttattgagccaagtcagaaaattagaagcttaggtgttaaacttaagttaaacgctaatgaaacaacaattaaaaataaaaaaataattctagtagacgactctttagttagaggaacaacatctcttaagattgttaaaatgctttatgatgctggcgcaaaagaagtccatgtgagaatagcttgtccagaaattaaatacccagatttttatggagttgacacaccaactaaaaaagaattgttagctgcaaataaatcaaatgatgaaatttgtgagtatattggggctaagtctttaaagttcttatctataaatggtttatacagagctattggctttgacaagagaaatgaaacttatcctcaattaaccgatcattacttcacaggtgactacccaattaaacctgttgatgaacttggtgatagcaaaataactcagttatctttactaagcacggtatcaaacaactag

SEQ ID NO: 238987 - DNA, 794 bp, Unknown
  Bacterial polypeptide expressing nucleotide sequence isolated from the Sargasso Sea
tgttttgatacataatggaaatttgactaacactagagatttagaaaaacaattatttaatatcgataaacgacatacaaattcttcaagtgatactgaaatgttgttaaatgtatttgcgacagaattacaagaacaaattcataatcaagaattagaacctgatattatttttcgagcggtcaaatctttacataaaagaattcagggatcatatgcttcaattgcattaatttcaggacatggtttattagcattcagagatcctttcggtattaggcctttagtcataggaaaaagaatttcattaactacaaaaaaagaagagtggatggttgctagcgaatctctagtgcttgagaataatgattatcaagtagtgagagatgtagatcctggagaagctgtttttataaatctcaatggtgagtttttttctaagcaatgttctgaaaatccaatgttatttccttgtgcttttgaatatgtttatttagccaggccagattcaattatgaatggaatttcagtgtataaagctcgtttaaaaatgggagattatttggcagaaacaataaaacagacaattaattctggagatgttgatgtagttatgcctattcctgactcttctagacctgccgcaatgcaagttgcaagacagttagggattgaatatagggaaggtttttttaaaaacagatatgttggccgaacattcataatgcctggtcaacagaaacgtaagaaatctgtaagacaaaagttaaatgcaatgagtgcagagttttaaa

SEQ ID NO: 238988 - DNA, 745 bp, Unknown
  Bacterial polypeptide expressing nucleotide sequence isolated from the Sargasso Sea
atgtctacaataaacaactcactatactcgcatgcgttcgatgacgataagttgcgcgaagagtgcggtgttttcggcgtttatggacataaggattcttctgccctgaccgccttaggattgcacgccctccaacatcgtggtcaagaagctgcgggtatagtgacatatgacggcaaacaattttatggtcatcgagccccagggcacgttggcgatatatttagtaatgaagcagtaataaaacgtttacccggaaccttagctgttgggcataaccgctattcaacaaccgggggaaccgctcagcgaaatattcagcctttatttgcagagtatgaatcgggggggtttgctcttgcccataacggaaacctaacaaatgcgtcgattttacatcgcgacctcgtaaaacgaggctgcctattccaatcgacaagtgatacagaagtgattattcatttgattgcgattagtgatcaagaggtagtcatcgaccgcctcatcgatgccctaaaacgcgtagtaggagcctattccctagtagccatgaccaacaatcaaatgatcggtgtcagggatccaatgggcgttcgtccccttgtcttaggattcttagatggtgcacacgttctcgcctctgaaagttgtgccctcgatattataggagcagatttcgtaagggatgttgagccaggtgaagtaattgttatcgataaagatgggctcaccagtcttaaaccct

SEQ ID NO: 238989 - DNA, 856 bp, Unknown
  Bacterial polypeptide expressing nucleotide sequence isolated from the Sargasso Sea
aaacaaagaagagtggatggttgctagtgaatctttagttcttgagaataacgactataaagtagtaagagacgttaatcctggagaagctgtttttataaaccttaatggtgagtttttttctaagcaatgttctgagaatccaaggttatttccttgtgcatttgaatatgtttatttagctaggccagattcaattatgaatggaatttcagtttataaagctcgtttaaaaatgggggattacttggctgaaacaataaaaagaaaaataaattctggagatgttgatgttgttatgcctattcctgattcttctagacctgcggctatgcaagttgcaagacagttaggaatagaatacagagaaggtttttttaaaaatagatatgttggcagaacatttatcatgcctggacaacagaaacgtaagaaatctgtaagacagaaactgaatgccatgagtgcagaattcaaaaataaaaatgtattaattgttgatgactcaatagtaagaggtactacttcaaaagaaattgtccaaatggctaaagatgcaggagcaaataaagttttttttacatcggcagcacctcctgttcgttttcctcatgtttatgggattaatatgcctaatagagatgaactaatagcacatgataaaacaataagtgaaattgctgataaacttgaaattgataatcttgtttatcaaagtgttgaaaatttacgcaaatctataattgatgattcttatatagaagatttagagatgagttgttttactggtttttatgtaacaggcaccgtaaaccaagagtatttaaattgggttgaaaatgaatatcaatcttag

SEQ ID NO: 238990 - DNA, 1036 bp, Unknown
  Bacterial polypeptide expressing nucleotide sequence isolated from the Sargasso Sea
actgagacaattgttcaattaatcgcaaaatctaaaagatcaaaaacaattgacaaaattgttgaggcaatttttcaaattcaaggaggatacgctcttgtaatgcttacccaaacttctttggttggagttcgagatccatatggtatccggcctttggtaatcggaaaattaaaagatagttatgttttggcatctgaaacttgtgctcttgatattattggtgcgaaatttgttagagaagtagaaaatggagaaatagttttgattgaaaaaaatgaattaaaaagtattaaaccctttcaattaaaaaaagtaaggccttgcgtatttgaatacatatattttgcaagacctgacagtgtgcttaatggtaaaacagcttacgagtatagaaaaaaccttggttcagaacttgctaaagaaaatgatataaatgcagatattgtcgtgcctgttccagactcaggaaatgcagcagctttgggctttgcacaacatttaaaaataaagtttgagcttggtctggtaagaaatcattatgtaggcaggacttttattgagcccagtcaaaaaattagaagtttaggtgttaaattaaaattaaatgctaatcagtcaactatcaaagataaaaaaataatcttagtagatgattctttagttcgaggtactacttcacacaaaatagttaaaatgctatatgatgctggagcggaagaagttcatgttagaattgcatgtccagaaataaaatttcctgatttttatggagttgacactccaactaaaaaagaattgcttgctgcgaataaaaacaaccaggaaatatgtcaatacataggtgcaaaatcattaaaatttttgtcaattaatggaatgtatcgagcaattggttttgatcaaagaaatgagggttaccctcagctaacagatcattattttactggcgactaccctgttaaacctatagatgaacttggtgatagtaaaataactcaattatcattattaaatactgcatcaaataattaaa

SEQ ID NO: 238991 - DNA, 1306 bp, Unknown
  Bacterial polypeptide expressing nucleotide sequence isolated from the Sargasso Sea
tggcaactcctatcactcagaaagaaaatttggattggttggcgataattttacgaagaaacactcattagacaagttaaagggaaaaattgcgataggacacaatcgttattcaacaacaggcggtgaaacaataaggaatatacaacctttttatgctgaccttcatggtggagctattagtattgctcataatggtaatttaactaatgcactactattaagagagcaaatggtacgtgaaggtgcaatatttcaaacaacatcagataccgaaacaattgttcagcttgtagctcgttcaaaaaagaaagatattttaaataaaattattgatgctttaatgcaaattcaaggtggttatgctttgtcaattattgctaatggtacgttgattggtgcaagagatccattaggtattcgaccacttgttttaggtaaatttaaaaatgcatttatccttgcctctgaaacttgcgcactagacattataggtgcaaaatttatccgtgaaattgaaaatggagaagttgtagttataaaagataataaagttgaaagtcgaagaccttttccaaaaaaacaaatcaaaccatgtgtatttgaatatatttatttttcgcgaccagatagtattttaaaaaataaaaccgcctatgaatatagaaaaaatttaggtacatacttagcaaaagaaaccgatataaaacctgatgtagtcgtaccagttccagactcaggtgttcctgctgcgcttggttttagtcaagagtctggtattccttttgagttaggattaatacgaaatcattatgtggggaggacatttattgagccaactcagcaaattagaagtttaggtgtaaagttaaaactaaatcctaaccaaagttctattaaaaaaaagaaagttgttttaattgacgactcattggttcgaggaacaacatccactaagataataaaaatgctttatgattttggcgcaaaagaagtccatatgcgtattgcttcacctgcaattaaatatcctgatttttatggagttgatactccgacccaagaagaattattagctgcaaacaaaaatttagaggaaatgtgtaaatatattggcgctaaatcattaaaatttttatcattagatggtctgtatcaagctcttggttatgatgagagagataatgataatcctcaatttactgatcattattttacaggagagtatcctatcaggcctttagattacttgaacgacgaaagtttaaaaaaactatcatttttaagtcttgcttcaaataactaa

SEQ ID NO: 238992 - DNA, 756 bp, Unknown
  Bacterial polypeptide expressing nucleotide sequence isolated from the Sargasso Sea
gccctcaaaagagaccatgtatttttgagtatgtatacttttcaagaccggattctaaaattgatgaaatatctgtttataaagcaagaataagaatgggatcaaaactagcgcaccaaattaaaaaaattaaaccagatcacgatattgatgttgtcatacctattcctgatagctcaacaatagccgcccatcaattagctgttgatttagaggttccatacagagaaggttttgttaaaaatagatatataggcagaacttttatcatgccctatcaggaagaaagaaagaaatctgttagaagaaaattaaacattttagatcttgaatttaaaggaaagaacgttttattggtagatgactcgattgtcagaggaacaactagcaaaaagataatagaaatggcaagagaagcgggcgccaataaagtttactttgcctcagcagctcctgcaattaaatatcaaaatttatatggtattgatatgcctgctacatcagaactaattgcatcaaataaatctgatgaagaggtggccaaagaaattaatgctgactggttgatatatcaaacacttgaagatttaattgaggccgtaagagccggcaatcctgaaataaatgagttcgaaaattctatttttactggtaaatatataactcctttaattgaaaattatcttgaagagcttgaaaattccagaaaagatgaattaaaaattcaaagagaaagatcaaaggcaagaggttagg

SEQ ID NO: 238993 - DNA, 705 bp, Unknown
  Bacterial polypeptide expressing nucleotide sequence isolated from the Sargasso Sea
gatgcaaaagaaaaagttcaagaactttaatcctaaaataaaagaagagtgtggtgtatttggtataagtaataataatgatgcatctgctcttacagctttaggtttgcacgcccttcaacatagaggccaggaaggatgtggaattgtaacttttgatggaaaccaataccattctgaaaaaagatttggattagttggagataattttaataaagaaaaagttttaaaaaatttaactggaaaatatgcaattggccataatagatacagtactactggtggtacaacattaagaaacattcagccattttttgctgatacaaatgcgggaggaattagtatatctcataatgggaatttgactaatgcaatatctttaagatcaaagttagttaaagaaggagctatattttacacaacatctgatacagaaactatagttcaattaattgctaaatcaaaaagaactgaaattatggataaaataatagatgcattattccaaatacaaggaggctatgctctggttatgttgactcaaaaaaaattaataggagtaagagacccatttggcataaggccattggttattggaaaattaaaaaattcatacgtattggcatcagaaacttgtgctttagatataattggagcaaaatatttaagagaagttgaaaatggagaaattgttttaattcaaga

SEQ ID NO: 238994 - DNA, 1132 bp, Unknown
  Bacterial polypeptide expressing nucleotide sequence isolated from the Sargasso Sea
tatgtgaattcaccttatggcataagtcttgcgcacaatgggaatctgactaattctaagcagttaggaactcaattatttcatgcagaaatgagacatctcagaacagatagcgactccgaggttttgttaaatatatttgctcatgaacttggtaaacaaagagagatatatccgtcagaaaaaaatatttttaaggcagtaactaaaacacacataagatgtgatggagcatatgcagttattgctcttattaccggatacggtttggttgcttttcgagacaacaacggaataagacctctttctataggagtaaggcaaggaaaagaaagagaggaatacattgtttcttctgaagatgctctttttacacctcttggttttgaaaagctaagagatatagatcctggagaagctgtatttattgataaaaatggaaaactattttctcaacaatgcgctgataatcctcagaagcgaccatgtatatttgaatatgtttatttttcaagaccagactcaaagattgatgaaatttcagtttataaagcaagaatgagaatgggaacaaagcttgctgggcaaattaatagaactagacccgatcacgatatcgatgttgtaatacccattccagatagctcagtaaccgcagcacatcaattagctgttgacttgaatgttccctacagagaaggctttgtaaagaatagatatattggaagaacttttattatgccttatcaagaagagaggaaaaaatcggtaagaagaaagttaaatattcttgatttagaatttgaaggaaaaaacgttttacttgttgatgactcaattgtaagaggaacaactagtaaaaaaattatagaaatggccagagaagctggggcaaaaaaagtttattttgcatccgctgctcctgcaataaagtatcaaaatttatatggaattgatatgcctgcaacagctgagctaatagcgtcaaataaatcaaatgatgaagttgcctctgaaattaatgcggattggctaatttatcaaacgttagaagacttagtagattctgtgagggaggggtatcccagaataagtgaatttgaaacttcaatttttacaggcgagtacttca

SEQ ID NO: 238995 - DNA, 1147 bp, Unknown
  Bacterial polypeptide expressing nucleotide sequence isolated from the Sargasso Sea
gccgcagagctattccacgcagaaagacgccacataaatacagattctgattcagaagtgttgttgaatatttttgcacttgagctttctaagcaagaagcagtttttcctaaaccaaaagacttttttgcagctgttgaaaaaacacatttacgaataaatggtgcatatgctgtcgtagcattaataactggatatggaatcgttgcttttagagatcctctagggataagacctttaactattggagttagaaagggtaaaaatagaaatgaatatgtagtttcttctgaaacagcattattttcagctgcaggtttcaaagtacttagagatgttgagccaggcgaggctgtttttatagataactcaggcaagatatttactcaacaatgttttcaaggtagtgaaaaaaaaccttgtatatttgagtatgtatatttagcacgaccggattcaactattgatgaaatttcagtttatagatctagaatgcgaatggggttgaagttagctaacagaataagagaacttaatctcgtagatgaaatagatgtggttattccaatacctgatagctcaacaactgctgcacttcaacttgctgcagatttaaaaaagccttaccgtcagggctttgttaagaatagatatattgggagaacattcataatgcctcttcaagaggagagaaagaaatctgtcagaagaaagttgaatattcttgacctagaatttaaggataagaatgtcttgcttgttgatgactcaattgtcagaggaacaactagtagacagataatcgaaatggtaagggaggctggcgcaaaaaaagttttatttgcatccgcatctcctccagttaaatatcaaaacctttatggtatcgatatggcagcaactaaagaattaatagctcatgataaaacagaaaatgaaattgcagatacaataggagcagacgagttgatatatcaaacccttgaagatctaattagctccgttcaagaagggaatcctgaaataaaagactttgaaacatcaatcttcacaggaaaatacccaacagatattgatgatggataccttgagaatctcgaagaggaaagaagtgacatcattaaaatgtcaaaaaaagaaagttgag

SEQ ID NO: 238996 - DNA, 505 bp, Unknown
  Bacterial polypeptide expressing nucleotide sequence isolated from the Sargasso Sea
ttgggaagaacttttattatgccttatcaagaagagaggaagaaatcggtaagaagaaagttaaatattcttgatttagaatttgaaggaaaaaacgttttacttgttgatgactcaattgtaagaggaacaaccagcaaaaaaattatagaaatggctagagaagctggagcaaaaaaagtttattttgcatcagctgctcctgctattaagtatcaaaatttatatggaattgatatgcctgcaacagctgagctaatagcatcaaataaatcaaatgatgaagtcgcctctgaaattaatgcagattggttaatatatcaaacacttgaagatttaatagattctgtaagggagggtaatccagaaataagtgaatttgaaacttcaatttttaccggtgagtacttcactcctctagttgaaaattatcttgaagaattagaaatttctagaaaagacgaacttaaaatgcaaagggaaaaatctaaagctaagagctaac

SEQ ID NO: 238997 - DNA, 949 bp, Unknown
  Bacterial polypeptide expressing nucleotide sequence isolated from the Sargasso Sea
tgcttatgcattagttgcattaaccgccgataaattgataggagccagagatccactcggtataagaccattgattttaggtaagcttgaaaatcggttcattttatcttctgaaacatgtgcattagatataatcggcgcaaaatttgttagagagatcgaaaatggagaggtggttattatttctggtgaaaacatagaaagcatcaaacctttcccagaagtaaagaaacggccttgcatctttgaatacatttattttgcgcgaccagatagtgtttttggggagaagagtatatatgaatgccgcaaaaattttggtcatgagcttgccgctgaagcgccctgttctgctgatgtagttattccagtgccagacagcggagttccggctgccttaggttatgctgaggcagcggaattacctttcgaattggggataattagaaatcattacgttggccgaacatttattgaaccacagcaatccactcgtgattttggtgtcaaactaaaacataatataaaccgaaatgctgtgaagggtaaaaaagttgtgctcattgatgactcgattgttcgcggtacgacgtcggtgaaaatagtggagttgatgcgacaagcgggcgctatagaagttcatatgaaaatagcatctcccccaatcaaatatcctgacttttatggtatcgacacaccagaaaaagcgcaattgttagcatcactaaagtcacaggaagaaatggccacatacattggagcagatagtttatcattcctatcagtagacggtctttatcgagcaatgggttatgagaacggtagagatgatactaatccagcatttactgatcattgttttacaggcgattatccaacgccattagaagacaacaatattgcgtggctatttgaaacatctcagctttccgtccgaaacgaaaactaa

SEQ ID NO: 238998 - DNA, 1123 bp, Unknown
  Bacterial polypeptide expressing nucleotide sequence isolated from the Sargasso Sea
gcggttgcgcataacggtaatttacccaatgccgtcactctgagaaatgagctggtaaatgatgggtgtatctttcaatcgacctcggatacggaaactattttacaattgatagcccgttcaaaacgcggcaataccttagcccgatttatcgatgctctatttcagattgagggagcttatgctctcgtagttctaaccaataagaaattaattggtgtaagggacccattaggcattcgcccgctcgttattggagaattagacggaagctatatactcgcttcggaaacctgcgctttggatattattggtgcaagttttgtacgtgaagtagaaaacggcgaaattgttgttataacggaagatggtatcgagagtgtgaaaccttttcccccagtaaacgcgagaccatgtgtctttgaatatatttattttgctaggcctgatagttctgttggcggaaggagcgtttatgaatgcaggaagtcctttggacgcgagctagcaaaagaatccggtatcgaagctgatattgtcataccagtaccagacagcggtgtgccggcagcgattgggtatgcagaggccgcaaatataccttttgaattaggcatcatcagaaaccattatgttggaagaacattcatcgagccccaacagtccattcgtgctttttcggtgaaactaaaacataatgcaaaccgaaacctagttggcggcaaacgcgtaatcctaatagatgactcgatcgttcgcggaacgacgtctataaaaattgtccaaatgatgagagaagctggggcgcttgaggttcatatgcggattgcttcgcctcctattaaatatccagacttttatggaattgacacaccagtccaagatcaacttttggcagcaaaccaaactctagagaagatgtgtgactttattggagcagacagcctttcgttcttaagtgtagacggcctttataaggcgatgggtcatccagaaggacgtgaccccagtaatccactctacacagaccactgtttcacaggggactatccgacccagctgcaggaccaacagaccgatgaccatattaaacaactttcactgttatcagagaggcggtaag

SEQ ID NO: 238999 - DNA, 1477 bp, Unknown
  Bacterial polypeptide expressing nucleotide sequence isolated from the Sargasso Sea
ttgaaaacgaatagaaagtcactttttattaaagatgataaattacatgaagaatgtggagtttttggtgtatacaaccatgaagattcagctgcactaactgccttagggcttcatgctttacagcatcgcggtcaagaagctgcaggaatagtaacttttgatggaacaaagtttatatctgaaagacatccaggattagtaagtgataactttacaaaaacatctgtaataaatcgattagtaggtaatagcgctgttggacataacagatattcaacaacaggtgctaccattcaaagaaatattcaacctttttttgctgatttatggggcggaggatttgcaatagctcataatggaaatattacaaatgcattatcgctaagagacgaacttataagaaaaggatctatcttccaatcaacctctgacacagaaacaattttacaattggtagctagatctgatgcagatagaacattggatcgcttagttgatgcgttaatgcaaatttcaggagcatgggcattagtagtattaactaacaaaaaattaattggcgctagagacccttttggtataaggcccctcgtcttaggtgaattagacggagcaaaaatattatcttcagaaacatgtgcgcttgatattattggtgcaaaatttataagagaaattgaacctggcgaaatcattgtaattacagaagatggcgaagagagtattaaaccttttccaaatgtaagattgcgtccttgcatatttgaatacatatatttttctagacccgattccatgttagatggaaaatctgtttatgaatgtagaaaatcatttggaaaaaatctagctaaggagtgcccagctaatgccgatattgttgttccagttcctgactcaggcgttccagcagctttaggatactcagaagaatcgaaaatacctttcgaattatcaataataagaaatcattatgtaggaagaacatttattctaccaacacagtcaaacagacaatcatctgtaaaacttaaacataatcctgatagaggctcaataaaaggcaaaagtgtagttttagtcgatgatagtgtagtaaggggaacaacttcagtcaaaattgttgagttaatgagagaggctggagcatcagaaatacatatgagaatagcgtgtcctccgataaaatatccagatttttatggaatagatactccagagactgagcaactattggcttcaaataaaagtttagatgaaatgtgtaaatatattggtgccgactcgttaggtttcctctcattagacggtttatataaatcaatgggatataacaaaggaagaaataatgatagtccagaatatactgatcattgctttacaggagactaccctacaaatcttaacgattacaaaagcgaaaagattcaagaacaactctctttattatctgaaaatgaaagccaaaattaat

SEQ ID NO: 239000 - DNA, 934 bp, Unknown
  Bacterial polypeptide expressing nucleotide sequence isolated from the Sargasso Sea
atgctaaagaaaaagttcaagatatataatcctaagatcaaagaggaatgtgctgtatttggtatcagtaacaatcaagatgcttcagctttaacagctttaggacttcatgctttgcaacacagagggcaagagggatgtggaattgtatcatttgatggaaatcaatatcactctgaaaaaagatttggattagttggagacaattttagtaaggaaaaagtaatcaaaactttaccaggaaattatgcaataggtcataatagatattctacaaccggaggaacaactttaagaaatatccagcctttttttgctgatacaaatgctgggggtataggtgttgcacataatggcaacttaactaatgcaattaccttaagaaagaaaatggtagatgagggatcaattttttatacaacatcagatacagagactatagtaaaattgatagcaagatcaaaaagagcaaaaacaattgataaagtgattgatgcactgtttcaaattcaaggtggatatgcattagtaataatgacacaaagtactttaataggagtcagagacccgtatggaattagacctttagttttaggaaaacttaaaaattcatatgttcttgcctcagaaacttgtgctttagatataattggtgcaaaatttgaaagggaagttgaaaatggagaaattgtttgtatagaaaatgataaattggagagcgttaaaccattccctcaaaaaaaaattaggccgtgtgtttttgaatatatttatttttcaagaccagacagtattttaaatggtaaaactgcatacgaatatagaaaaaattttggagcagaattagcaaaacaagaaaatttaaatgctgatttagttgtccctgtgccagattctggtaatgctgcggcattaggttatgcgcaagagaaaa

SEQ ID NO: 239001 - DNA, 1199 bp, Unknown
  Bacterial polypeptide expressing nucleotide sequence isolated from the Sargasso Sea
ttactcaacaacaggtggaactgctttaaggaatgttcaacctttttttgctgatacaaatgccggaggtataggtgttgcacataatggaaatcttacaaatgcaattacgctaagaaacaaattagttgaagatggtgcaatattttataccacatcagatactgaaactattgttcaattaattgctaaatctaaaagaaacaaaacaattgataaaatcattgatgctatttttcaaattcaaggtggatactcacttgtaatgatgacacaaaacacacttataggtgttagagatccctacggaattagaccattagtaattggtaaattaaaaaattcatacgtatttgcttctgaaacttgtgcatttgatataattggagcaaaatttgtaagagaagtcgaaaatggagaaatcgtttacatcgaaaatgacgagttaaaaagtattaaaccttttcctctaaaaaaaattagaccatgcgtgtttgaatacatttatttttctagaccagacagtatcttaaacggtaaaactgcatacgaatacagaaagaattttggacaacaattggcaaaagaagacaaaatagaagctgacttagttgtgcctgtcccggactcaggtaacgctgcagcactcggatatgctgaagagaaaggtctaaaattcgacctaggtttaattcgaaaccattatgttggaaggacttttattgaaccctctcaacaaattagaagtttgggagttaagctaaaattgaatccaaatatctcagtaataaaaaataagaggattattttggttgatgactcactagtaagaggtactacatcgtcaaaaatagtgaagatgttatacgattctggagcaaaagaagttcacgtgagaatagcaagtcccgaaattaagtttcctgatttttatggagttgatacaccaacaaaaaaagaacttttagcagcaaataaatctacagctgaaatatgtgaatttattaaggcaaaatcactaaaattcttaagtttgaatggtttatatttaggaatgggatttgaaaaaagaaatgaaaattatccacaattaacagatcatcactttactggggaataccctgtaaaaataatagatgagcttggcgaagataaagtaacccaactttctttattgagtaccgcatcaaataattaaa

SEQ ID NO: 239002 - DNA, 1138 bp, Unknown
  Bacterial polypeptide expressing nucleotide sequence isolated from the Sargasso Sea
tatgggaggattaagtatagctcataatggtaacttaacaaacgctttagctttaagagaaactcttgtaagagatggtgcaatttttagaacaactagtgatacagaaacgatagtacaactaattgcaaaatctaaaagagaaaaaatagttgataaattgatagatgctcttttccaaataaaaggaggtttttctttggttattatgactaataaaaaactaataggagtaagagacccttttggtataagaccattagtaattggcaaattaaaagaatcgtttattttagcttctgaaacatgtgccttggatattgttggagcatcatttgtaagagaagttgagaatggagaaattgtagttgtagaaaataataaaataaatagcataaaaccttttccaaaacaaaaagcgaggccgtgtatatttgaatatatttattttgctaggccagatagtcttgttgatggaaaatgtgcgtacgaatatcgaaagaattttggtattcaacttgccaaagagacagatattaatgcagatatagttgttcctgttccggactctggtgttcctgccgctttaggttatgcagagtattcaaaaaaaaggtttgaattaggattaataagaaatcattatgtaggaagaacatttattgaaccatctcaaaacataagaagcttgggtgttaaattgaaattaagtccaacaaaaagtattgttaaaaataaatctataatattgatagatgactctttggtaagaggaactacgtgtctcaaaatagtaaaaatgctttatgaggcaggagctaaagaggtgcatgtaagaattgcttgccctgaaataaaatttccagatttttacggtgtcgatatgccaactagaaaagagcttttagcatttcaaaaaactaatgaagaaatgtgtcaacatattaaagctaaatctcttaaattcttaagcttgggggggctttatgaaggattgaataaaggtaaaagaaataacacctatcctcaattcagtgatcattattttaccggtgattatcctatcaaacctactgataatttgggcgaagaaaaaattaaacaattatctcttctaagcagcaaatcaagcagttag

SEQ ID NO: 239003 - DNA, 1477 bp, Unknown
  Bacterial polypeptide expressing nucleotide sequence isolated from the Sargasso Sea
aatgtgtggattggctggtatatattctagcaaacctgttgctgctgaactctatgatagtctaattcacttacaacatcgcggtcaagacgctgccggtatcatcacctataaaaaccgtatgcataaatcaaaagggtctggcttggtgcgagatatattcacagacaaaaaaatagccaggttaaaaggaaacattggtattgcacacaaccgctatcctacgcatggtggttttgggcatggagaagttcagcctttttggacttcagtaccatacggcatagccttagctcacaatggaaatctgacaaattataatgaactatcaaaaatgatcacgaacagtgaaactcgctatctaaatactcatagcgatacggaagtccttttgcatttgtttgctgatctcctacataagaaacaacaacccgatagtgacgatgagttttttgaaaatttatgctttgctgttaaaaaggtctttgaaaaagcacagggggcctactctgttgtttctttaattattgggaagggtttggttgcttttagagacccccatggaattcgtcctcttgtaaagggcgttagggttaatgacaaaggtgaaaaagaatatatcattgcctctgaaaacacgatgttttatcctttgggttttgatccggacggcagtgttttacctggagagcttatttatattaaccaaaatggtaaagtatttaaaaaaagaataacaaaacaaaagtttaatccgtgcatatttgaatacgtttattttgcccgccctgacgcctctctcaacgatgtgagtgtatacagatcaagattaagaatgggtcaaaatcttgctgaaaaatggaaaaaaaacttccctaataaaaatcctgatataatcattcctgccccaagcactgcaaacacatcggcgctatcaatggcaaactctttaggtgttcgttattctgaagggttatataaaaacccatttattggtagaacctttattatgcccggtcaaaaagcacgtaaaaaatctgttcgctataagatgactccacagaaaactgaaattgaagggaaaaagataatgattgttgatgacagcattgttcgtggaaacacatcaagagaaattgttcgaatgctaaaagactttggtgcagctgaagtatactttgcggttgcctgccctccggttgtgtcgccttgtttttacggtattgatatgccaacacgtggtgagttaatagcaaacaataaaaccgttgaagaaataaaaaactatcttgatgtagaccaaattatataccaagatattcaatctttatctgaagcggtaatgagaaaaggtgatcatcatattgatcaaccttgtatggcttgttttgataaaaattacattactaaagaaatgagtggtgaacgaataaatgagctggaaaaaatgcgcataaaagaccgcaatggaaaataa

SEQ ID NO: 239004 - DNA, 908 bp, Unknown
  Bacterial polypeptide expressing nucleotide sequence isolated from the Sargasso Sea
catgtgtggcattgttggaatagttagcaaagagtcggttaaccagcagttgtatgatgcgctcacagtccttcaacataggggccaagatgccgccggaatggcaacgagtatggatggccgtctacatttaagaaaaggtaatgggttggtgcgagatgtatttcttgatcaacacatgcaaagtttagttggcaatattgggatagggcactgtcgttatcctacagcagggtcttccagttctgctgaggctcaacctatgtatgtcaattcgccctatgggattaccttggcgcataatggaaatcttacgaatgccaatcagttacaagctgatttatttgcagaagatttacggcatacaaatactgatagcgattccgaagtgctgttaaacgtgctggctcatgaacttcaaatggttggagcgattgatcccagtccgagcgatatatttcaagcattgcagggcgtttataaacgttgccatggagctttcgctgcggtcgccatgattattgggactgggatagttgggtttagggattcgtttgggattcgacctttggtttacggctttaaagagacagatcagggcatggagtatatgttggcatcagagtctgtagccttggatctattaggattccaaaaaatagcagatgtggagcctggcgaagctgtatttatttctaatgaaggagaaataaccctccagacatgcgctgaacaaacacgtttgaatccatgtatttttgagcacgtttattttgctcgcccggattcaattatagatgacgtgtctgtttataaaagccgccttcgtatgggggaatatcttgctcaaaacattctatccaattactcgcagaactctcatgatatagatgttgtagtgccggttc

SEQ ID NO: 239005 - DNA, 1483 bp, Unknown
  Bacterial polypeptide expressing nucleotide sequence isolated from the Sargasso Sea
atgtgcggcgtagttggaatagtaagtcaaacagaggtttctcctcttatatatgatgcattaaccatactgcaacatagaggacaggatgcagctggtatagccacatcaactaacaatagattctttattcgtaaacaacttggtctagttcgagatgtcattagaaaccaacacatactgaccctaagagggcagatgggtataggccatgtcagatatccaactgcaggtagtgaggatagagagcttgcgcagccaatgtacgttaactctccctttgggatcagtatttctcataatggtaaccttacaaatattgaggaattgagagagactttagttaacaaagacctaagacatttaaatactgattctgatagtgaagttttattaaatgtatttgctcatgaattacagaaacaaggttcagtaaaaccaggatcaaaagagatatttgctgcagtcagatcattgcataaaagagtaagaggcgcttattcggtcgtaattatgatcaatggtatcggtattgtaggatttagggatccatttggtataagacctctaattgttggttcaaaagagaatgacttaattggcaaggattacatgattgcatctgagagcaccgttttagattctctgggctacgagattattgatgacattcctgcgggttctgctgtatttattagtgcagagggagaaatagaaagcgaatcctgtataaataaccctattcctaccccttgtatttttgagtatgtatatcttgcaagacctgatgcaaagatagacaagatttccgttcataaatctagattaagaatgggagaatatctagctaataagataataaatcaaaggcctgaacatgatatcgatgttgtgataccaattcctgatagcagcacaacttcagcactacaacttgctacaactttaggagttaagtatcgagaaggttttgttaagaacaggtatattggtaggacctttatcatgccttttcaagaaaagcgcgaaaagtcagttaagcaaaaattaaatcctatagatcttgaatttcaagataaggttgttttattggttgacgattcaattgttcgaggaacgaccagtaggcagataattgaaatggccagatcttctggagctaagaaggtttattttgcttcagctgctccaccaattagatatcaaaatgtttacggtatagatatggcagctactacagagttagtcgcgcacaaaagatcagaagaagagatagaagagtttataaaagccgattggctaatttatcaagatttagaagatctcatcatggctgcccaaaagggtaatgaggacattaagcaattcgaatgttcgatatttaatggcaagtatgtcactgacgatattgacgacaaatatttgaagaatttggaagatgtgcgtaatgataaatccaaaatctcaagacaaatcaactaac

SEQ ID NO: 239006 - DNA, 1156 bp, Unknown
  Bacterial polypeptide expressing nucleotide sequence isolated from the Sargasso Sea
ttctttgctgacactaattcaggtggaattggagtagctcataatggtaatcttactaatgctattacacttagaaataaaatggttgaagaaggctcaattttttacacaacatcagatactgaaacaatagtaaaacttatagctaaatcaaaaagaccaaagacaattgataaggttattgatgctctatttcaaattcaaggaggatatgcattagttatgatgacacaaaatacccttattggggtaagagatccttatggaattagacctctagttattggaaaattaaaaaactcttatgtttttgcatctgagacatgtgcatttgatataatcggagcaaagtttgttagagaagttgaaaatggagaaattgtttatgtagaaaatgatgaattaaaaagtattaagccatttcctcaaaaaaaagtgagaccatgtgtatttgaatatatttatttctcaagaccagatagtattttgaatggcaaaacagcctatgaatatcgaaaaaaatttggagctgaattagcaaaagaggataatttggatgctgatttagttgtgccagtacctgactctggtaatgcagctgcattaggttatgcagaggaaaaaaaaataaattttgatttaggtctgataagaaatcattatgtgggtcgaacttttatagagccgtcacagcagattagaagtttaggagttaaattaaaattaaatgcaaatatttcagttataaaaaataaaaaaataattttagttgacgactctttagttagagggactacttcatcaaagattgtaaaaatgttatatgataatggtgctaaagagatacatgtgaggatagctagtccagaaataaaatacccagatttttatggagttgatacacctacaaaaaaagaattattagcagcaaataaatcagtagatgaaataaaagaattcattaaagctcaatcacttaaatttttaactttagatggcttatatcgaggaatgggctttgataagagaaatgacgcgtatcctcagttaactgatcatcattttactggcgattatccagtaaaaataattgatgaacttggagaagataaagttacacaattatctttattaagcacagggtcaagtaattaat

SEQ ID NO: 239007 - DNA, 424 bp, Unknown
  Bacterial polypeptide expressing nucleotide sequence isolated from the Sargasso Sea
atgaaaaatcgactaaatttcctaaaaaaattcgaggtaaggcaatctcatgttcccagatttaatgaggagtgtggtgtttttggaataagtggaaccaaagatgctgcagccttaacagctcttggtttgcatgcgttgcaacatcgtggtcaagaaggttgtggaattgtcagttatgatggtaactcctatcactcagaaagaaaatttggattagttggagataattttacgaagaaacactcattagaaaagttaaagggaaaaattgcaatagggcacaatcgttattcaaccacaggcggtgaaacaataagaaatatacaacctttttatgctgaccttcatggtggtgctattagtattgctcataatggtaatctaaccaatgcactccttttaagagagcaaatggtaagag

SEQ ID NO: 239008 - DNA, 799 bp, Unknown
  Bacterial polypeptide expressing nucleotide sequence isolated from the Sargasso Sea
aatgtgcggaataatagggatttctgcagaaaataatgtagctgaagagatctacgaatctctacttatgttgcaacacagaggacaagatgctgctggtatggttgtctgcgaacccagcggtaaactcaatagccggaagtcaaaaggctatgtaagagacgtatttcaacagaatcacatgagcaatcttcaaggaaattttggaatagggcacgtaagatatccaactgctggaggtataggcaaggagtttgctcagccaatgtatgttaatactccctatggcataagcttagcccataatggaaacttaacaaattccaagaaattagccgcagagctattccacgcagaaagacgccacataaatacagattctgattcagaggtattattgaatatttttgcactcgagctttctaagcaagaagcagtttttcccaagccaaaagacttttttacagctgttgaaaaaacacatttgcgaataaatggtgcatatgctgtcgtagctttaataacaggatatggaatcgttgcttttagagatcctttagggataagacctttaactattggagttagaaagggtaaaaacagaaatgaatatgttgtttcttctgaaacagcattattttcagcgacaggtttcaaggcgctcagagatgttgaacctggtgaggctgtttttatagacaattctggcaagattttcacccaacaatgttttcaagacagtgaaaagaaaccttgtatatttgagtatgtatatttagctcgaccggattcaactatc

SEQ ID NO: 239009 - DNA, 1196 bp, Unknown
  Bacterial polypeptide expressing nucleotide sequence isolated from the Sargasso Sea
ttacgtttatgctccttacggaattgttttgatacataatggcaatttgacgaataccagagatttagaaaaacaattatttaatattgataagcgtcatacaaattcttcaagtgatactgaaatgctattaaatgtatttgcgacagaattgcaagaacaaattcataatcaagaattagaacctgatattatttttgatgctgtcaaatctttacataaaagaattcagggatcatatgcttcaattgcattaatttcaggacatggtttattagcattcagagatccttttggtattagacctttagtcataggaagaagactttcattgaatacaaaaaaagaagagtggatggttgctagtgaatctctagtgcttgagaataacgattatcaggtagttagagatgtagatcctggagaagccatttttataaatcttaatggcgagttattttctaagcaatgttctgcaaatccaatgttatgtccctgtgcttttgaatatgtttatttagctaggccagattcaattatgaatggaatttcagtatataaagctcgtttaaaaatgggagattatttgtctgaaacaataaaagaaacaattaattctggagaaatagatgttgtaatgcctattcctgattcttctagacctgcggccatgcaagttgcaagacagttaggtattgaatacagagaaggtttttttaaaaatagatatgttggcagaacatttataatgcctggtcagcaaaaacgtaagaaatctgttcgacaaaaattaaatgctatgagtgcagagtttaaaaataaaaatgtattaattgttgatgactcgatagtaagaggtactacttcaaaagaaattgtccagatggcaaaagatgcaggagcaaataaagtgttttttacatcagcagcacctcctgttcgctttcctcatgtttatggcataaatatgcctaatagagatgaattaatagctcatgatagaacaatcagagaaattgctgatcaacttgaaattgataacctcgtttatcaaagcgttgaaaatttacgtaaatctataataagtgattcttctattaaggatttggagatgagttgttttactggtttttatgtaactggaacagtaaataaggagtatctaaattgggttgaaaatgaatataaatcttagt

SEQ ID NO: 239010 - DNA, 943 bp, Unknown
  Bacterial polypeptide expressing nucleotide sequence isolated from the Sargasso Sea
gctttagtaatgttgactcaaacttcattagtaggtgttagagatccttttggtatcaggcctttagtaattggaaaattaaaaaatagttttgtcctagcatctgaaacatgtgcattagatataataggtgcaaaattcatacgagaagttgaaaatggtgagatagttttaattgaaaataacgaattaaaaagtattaaaccatttccaccaagaaaagttagaccttgtgtttttgagtatatttattttgcaagaccagatagcatgcttgatggaaaaactgcttatgaacacagaaaaaatcttggttctgaacttgcaaaagaaaatgatgtagatgctgatattgttgtgccagtaccagactctggaaacgcagcggctttaggttttgcgcaatctttaaatgtaaaatttgagcttggtttagtcagaaatcattatgtcggaagaactttcattgaaccaagtcaaaaaattagaagtttaggtgttaaattaaaattaaatgctaatcaatcaactattcaaggtaaaaaaataattttagttgatgactcgctagtaagaggcacaacatctcataaaatagttaaaatgttatatgatgctggcgcaaaagaggttcatgttagaattgcatgtccggaaataaaatttcctgatttttatggagttgacacaccaactaaaaaagaattacttgctgctaataaaagtaactcggaaatctgtgaatacataggtgcaaaatcgttaaaatttttgtcagtaaatggaatgtatcgcgctattgggtttgatggaagaaatgaaagttatcctcaattaactgatcattattttacaggagagtatcctgttaaacctatcgatgaacttggtgataataaaatcacacaattgtcacttttaaatactgcatcaaataattaaa

SEQ ID NO: 239011 - DNA, 655 bp, Unknown
  Bacterial polypeptide expressing nucleotide sequence isolated from the Sargasso Sea
attgaagaactttgatccaaaattaaaagaagaatgtggggtatttggtattagtaatgcaaaagacgcctctgctttaactgcacttggattacatgctttacaacatcgaggacaagaaggttgtggaattgttagttttgatggtgaaaaatattattctgaaaagcgatttggtttagttggagacaactttaacaaagaaaaagttttaaataatttaaaaggtaattacgctataggtcataatcgatatagtacaactggtaataatactttacgaaatatccaacctttttttgctgatactaatgcaggaggaattggagtttcacacaatggaaatttaaccaattcaatttctttaagaaaaaaactagttgaggaaggagctattttttataccacttcagatactgaaactattgtacaattaattgcaaaatcaaagagatcaaaaactattgataaagtaattgatgcaatttttcaaatacaaggtggatatgctttagtaatgcttactcaaaactctcttattggggttagagatccatatggcattagacctttgttaattggtaaattgggaagtagttatgtactagcttcagaaacctgtgcattagatattattggtgcaaactttgtaaaa

SEQ ID NO: 239012 - DNA, 382 bp, Unknown
  Bacterial polypeptide expressing nucleotide sequence isolated from the Sargasso Sea
aatgcaaaagaaaaagtacaagatttataatccaaagcttaaagaagaatgcggtgtatttggtattgctaatatttcagatgcttcagcgttaactgctctcgggctccatgcgcttcaacatagaggacaagaaggttgtggaatagtttcttttgatggagaaaaatatcactctgaaaaaagatttggattagttggagacaattttaataaggaaaaagttctaaagaaactacctggaaattacgcgataggacataatagatactcaacaactggaggtacagctttaagaaatgtgcaacctttttttgcagatacaaatgcaggtggaattggagtttctcacaatggtaatcttaccaacgcaataacatga

SEQ ID NO: 239013 - DNA, 682 bp, Unknown
  Bacterial polypeptide expressing nucleotide sequence isolated from the Sargasso Sea
ttgaagaactttgatcccaagttaaaagaagaatgcggtgtttttggtataagtaatgcaaaggatgcctctgctataactgcgcttggtttgcacgctcttcaacatagagggcaagaaggttgtggaatagttacattcgatggtgaaaaatactactctgaaaaaagatttggtttagttggtgataactttaataaagaaaaagttcttaaaaaccttaaaggtaattttgcaattgggcataatagatacagtacaacagggaataatattttaagaaatattcagcctttttttgcagacacaaatgctggtggaattggtgttgcacataatggaaacttaactaattctatatctttaagaaacaaattagtggaggatggagccatattttatactacttctgatactgaaacaattgttcaattaattgcaaaatcaaaaagacccaaaaaaattgataaaattgttgatgcaatatttcaaattcaaggaggttatgcgttagttatgttaactcaaaattctttaattggtgcaagggacccttatggaattaggccacttgttattggaaaactaggtaacagttacgtattaacatctgaaacttgcgcattagatataattggtggaaaatttgtaagagaagttgaaatggagaaattgttttaat

SEQ ID NO: 239014 - DNA, 773 bp, Unknown
  Bacterial polypeptide expressing nucleotide sequence isolated from the Sargasso Sea
gatgcaaaagataaagttaccgatatataatccaaaactcaaagaagaatgtggggtttttggtgttagcaacagtgtcgatgcatctgctttgaccgctttagggctgcacgctcttcaacatagaggacaagaaggttgtgggattgtttcgtatgatggtcaaaaatactattctgaaaaaagatttggattagttggtgataattttaataaacaaaaagttataaaaggtttgccaggaaattatgcgattggtcataacagatatagtaccacgggtgatacttcattaagaaacattcaacctttctttgcagacacaaacactggtggaattggagtggcgcataatggaaatttaaccaatgctattaccttaagaaaaaaattagtagaagatggagcaatttttcacacaacatctgatacagaaactattgttcagttagttgctaaatcaaaaagaaataaaactatcgataaaataatagatgctttatttcaaattcaaggtggatatgccttggtaatgttaacacagaatatcttaataggggtaagagatccatttggaatcagacctttagttataggtaaagtaaaagactcttatgtttttgcttctgagacatgtgctttggacattataggagcgaaatatattagagatgttgaaaatggtgaaattgtttgtgttgaaaatggaaagttgcatagcttaaaaccttttcccacaaaaaaaataaggccttgtgttttgaatacatata

SEQ ID NO: 239015 - DNA, 454 bp, Unknown
  Bacterial polypeptide expressing nucleotide sequence isolated from the Sargasso Sea
attgaagagctttaactcaaaatttaaagaggaatgtggtgtatttggtataagcaatgctaaagatgcttcagctttgactgcgcttggtcttcacgctctacagcatcgtggacaagagggatgtggtatagttacttttgatggcgaaaaatatttttcagaaaaaagatttggtttagttggtgataattttaataaagaaaaagtactaaataatcttaagggtgattatgctattggtcataatcgatatagtacaactggtaataatactcttagaaatattcaaccctttttcgctgatacaaacgctggtggtatcggggttgcccacaatggaaatttaacgaattcaatttatctaagaaataaactagttgaagatggtgcaatattttatactacctcagatactgagactattgttcaattaatagctaaatcaaaaaga

SEQ ID NO: 239016 - DNA, 1306 bp, Unknown
  Bacterial polypeptide expressing nucleotide sequence isolated from the Sargasso Sea
atgaaaaaacttaaggaaaaatgcggtgtttttggaattcatgatattgaagatgcgtctgcattaacagcattgggtcttcatgcattgcaacacagaggacaagaaggttgtggaatagtatcttttgatggaaagaattttcactctgagaagagacaaggattagttggtgacaactttacaaataaagatgttctaaaaaaactgcctggtaaatttgctttaggacataatcgatattctacatcaggtgaaacttctttgagaaatattcaacctttctttgcagatcttcatggtggaggaatagcgattgctcataacggaaatttgacaaatgctctccatctaagagaagaactggtaaaagatggtgcaatttttagaacaaccagtgatacagaaactattgttcaactaatcgctaaatcaaaaagagtaaaaattatagataaaataattgatgcactttttcaaattcagggtgggtatgcactcacaatgataactaataaaaaacttataggtgttcgcgacccgcttggtataagacctcttgttttgggaaaaatcaaaaaaacctatgttttggcctctgaaacttgtgctttagatattattggagctacatttgttagggaaattgaaaatggtgaaattgtaattgtggaaaataatgacattcagagccttaaaccatttccaaaaaagaaaagtcgaccttgtgtatttgaatatatttattttgcaagaccagacagtctattaaatggaaaaagtgcttatgaatatagaaaaaatttaggttacgcattggctaaagagtctgagaatgttggtgatataattgtaccagttcctgattctggggttccagccgccttaggatatgctcaacacaaaaaaatgaattttgaagttgggctaataagaaatcattacgttggaagaacatttattgagcctacacaaagtattagaagtcttggggtaaaactcaaacttagtgcaaatatgtcctcaattaaaaataaatcaatagtattaattgatgactccttagtaagaggtaccacatgttacaaaattgttaagatgctttatgaggccggtgcaaaagaagttcatgttaaaattgcatgtccagaaataaaatatccagatttttatggaattgatatgccctcaaaaaaagaactccttgctgctaataaaagtttgaaagaaatgaaaaagtttattggagctgactctttaagttttttaagtttgcacggtctttatgaagctttatgtaatgaaa

SEQ ID NO: 239017 - DNA, 776 bp, Unknown
  Bacterial polypeptide expressing nucleotide sequence isolated from the Sargasso Sea
tttttcacaacaatgttctgatatgcctcaaagaggcccatgtatttttgaatatgtttatttttctagacctgattctaaaattgatgagatatcagtctataaagcaagaatgagaatgggttcgaaacttgcaaagcaaataaaagaaaccaaaccaagccatgatatagatgttgtaattcccattccagacagctcaacaactgctgcacatcaactcgcagtagaccttggtgtgccatacagagaagggtttgtaaaaaatagatatataggtagaacttttataatgccatatcaagaagaaagaaaaaaatcagttcgaaggaagctgaatattttggatttagaatttcaaggaaaaaatgtcttacttgttgatgattcaattgtaagaggtacaacgagcaagaaaataattgaaatggctagagaagctggtgctaataaggtttattttgcctctgcagcgcctgcaattaagtatcaaaatttatatggaattgacatgcctgcaacgtcagaacttatagcttctaataaaactgatgatgaggttgcagaagaaattaactcagattggctcatctatcagagattagatgaccttattgatgcagtaaaagttggtaatcctgaaattgaaaattttgaaacttcaatatttactggaaaatatattactcccttagttgaaaactatcttgaagagctagaaaactctagaaaagatgaacttaaaatgcaaagggaaaaatctcaagctagttgat

SEQ ID NO: 239018 - DNA, 922 bp, Unknown
  Bacterial polypeptide expressing nucleotide sequence isolated from the Sargasso Sea
taacaagttaataggtgcccgagatcccctgggtatacgaccattaattttaggtaagcttgaaaatcgcttcattttatcatctgaaacatgtgcattagatatcatcggcgcaaaatttgttagagaaatcgaaaatggagaggtggttgtgatttctggtgaaaacatagaaagtatcaggcctttccccgaaataaaaaaacggccttgcatcttcgagtacatttactttgcacgaccagatagtgtttttggaggaaagagtatttatgaatgtcgcaagaactttggtcatgagcttgccgctgaagctccctgttctgctgatgtcgttattccagtgccagacagcggagttccagctgctttaggttatgctgaggcagcgagtttaccttttgaactaggaataatcagaaatcattatgttggtcgaacatttattgagccacagcaatctactcgtgattttggcgtcaagctaaagcataatatcaaccgaaatgctgtaagaggtaaaaaagttgtgctcattgacgactcgattgttcgtgggacgacatctgtaaaaatagtagaattaatgcggcaagcaggggctcaggaggttcatatgaaaatagcatctcccccaataaaatatcctgacttttatggtatcgatacaccagaaaaggcacaattgttagcatcactaaagtcagaggaagaaatggctgcatacattggagcggatagtttatcattcctttcggttgatggtctttacagagcgatggggtataaaaacggcagagatggtaccaatccagcatttactgatcattgttttacaggcgattatcccacgccactagaagataacaatattgcttggttatttgaaacatctcaactttccgtccgcaacgaaaactaa

SEQ ID NO: 239019 - DNA, 871 bp, Unknown
  Bacterial polypeptide expressing nucleotide sequence isolated from the Sargasso Sea
atgaaaataattaccaagatactaaagaaaaagttcaagaactttaatccaaaacttaaggaggaatgtggtgtttttggtataagtgacaaccaagatgcatcaacgctttctacacttggtttacatgctttacaacatagaggacaggagggttgtggagtagtaacctttgatggaaaaaaatatcactcagaaaaaagatttggattagtcggtgataattttaataaagaagaagttttaaaatctttaccaggtagttttgctattgctcataatagatacagcactactggaggaacaacactgagaaatattcaacctttttacgcagatactaataccggaggaataggagtagctcataatggcaatcttacaaatgcaataactcttagaagaaaattagtcgaagatggtgcaattttttataccacgtctgatactgaaacaatcgttcagttaattgcaagatcaaaaagaggaaaagttatagataaaattatcgatgctttgtttcaaatacagggtggttatgcacttgtaatgttagcaaaagatttgcttattggagtaagagatccttttggaataagacctttggtaataggaaaacttaaagactcttatgtttttgcctccgaaacttgtgcattagatattataggagctaaatatatacgagatgtagaaaatggcgaaatagtttatgttgaaaataaaaaacttattagtttaaaaccgtttccattaaaaaaaattaggccgtgtgtttttgaatatatctatttttcaagaccagatagtattttaaatggaaagtgtgcatatgagtatagaaaaaattttggtttagagcttgcaaagg

SEQ ID NO: 239020 - DNA, 872 bp, Unknown
  Bacterial polypeptide expressing nucleotide sequence isolated from the Sargasso Sea
attgaagaattataatccaaaaataaaagaagagtgtggtgtttttggaatttgcaatagcgctgatgcatctacccttgtagctttaggactgcatgctttgcaacatagaggccaagaaggttgtggtattgtgtcttttggtaataaaaaatatcattcagaaaaaagatttggactggttggtgataactttaataaagaaaaagtattaaaaaatttaccaggtaattatgctataggtcacaatcgatatagcaccactggtggaacgactataagaaatgtacagcctttttttgctgatactaacgcaggcggtattggtgtttctcacaatggaaatttaacaaacgcaattactctaagaactaaactggttgaagatggcgcaatttttcacacaacgtctgatacagaaacaattgttcaattggtagcaaaatcaaaaagaaaaaaaacaattgacaaaatagttgacgcattatttcaaattcaaggaggatacgcattagttatgcttacacaaaacactttaattggagtaagggacccttttggaataagacctctcgtgattggaaaattaaaaaattcctatgtttttgcatcagaaacttgtgcattagatattataggagcaaaatttgttagagatgtagaaaatggcgagattgtttatatagaaaatgatgaattaaaaagcattaaacctttcccagttaaaaaaactagaccatgtgtttttgagtatatttatttttcaaggccagacagtattcttaatggaaaatgtgcctatgaacatagaaaaaattttggaattgagcttgccaaagaaacaaatgtggaagcggacttagtgaagcccg

SEQ ID NO: 239021 - DNA, 739 bp, Unknown
  Bacterial polypeptide expressing nucleotide sequence isolated from the Sargasso Sea
aatgaagaaaattaccaagatactaaagaaaaagttcaagaactttaatccaaaactaaaagaggaatgtggtgtttttggtataagtgacagtcaagacgcatcaacactttctacacttggtttacatgctttacaacatagaggacaagagggttgtggagtagtaacctttgatggaaaaaaatatcactcagaaaaaagatttggattagttggtgacaattttaataaagaagaagttttaaaatctctaccgggtagttttgctattgctcataatagatacagtactaccggaggtacaacattaaggaatattcaacctttttatgcagacactaatactggaggaataggagtagctcataatggtaatcttacaaatgcaataactcttagaagaaaattggttgaagatggtgcaattttttatactacatctgatactgaaacaattgttcagttaattgcaagatcaaaaagaggaaaggttatagacaaaattattgatgctttgtttcaaatacagggtggttatgctcttgtaatgttagcaagagatttgcttattggagtaagagatccttttggaataagacctttggtaataggaaaacttaaagactcttatgtttttgcttccgaaacttgtgcattagatattataggagcgaagtatatcagagatgtagaaaatggtgaaattgtttatgttgaaaacaaaaaaacttattag

SEQ ID NO: 239022 - DNA, 688 bp, Unknown
  Bacterial polypeptide expressing nucleotide sequence isolated from the Sargasso Sea
aatgtgcgggattgttgggatagttcaaaaagataattgttttaccgaactctatgatgctttgataatgttgcagcatagagggcaagacgctgctggcattacaatatctgaaggtggcactcttaattcaagaaaatctaaaggttttgtaagagaagtttttactcaaagacattttgaaagacttaaaggtaattacggaataggtcatgttagatatccgactgcaggaggaaattccaaagaatatgctcaaccaatgtatgtaaactctccttatggaatatcgctagctcataatggtaatttatcgaacaccaaggaattagcagcagaattatttagtagtgatttaagacatatatcaactgattctgactcagaagttcttctcaatattcttgctcatgaaatatcgaagaataatcagaaagaaccaaatccagaaactttgtttaaggcagtagagtccacttttaaaagatgcgaaggcagcataaatgttgtttcaataataaccggtcatggacttttagcatttagagatcgttatggtataaggcccttaagccttggttcaaggtctaactcagatggcacaaaagattatatgatctcatcagaaagcgcagcattttcatcttctaattatgatctagagagagacctccatccggagaagcaa

SEQ ID NO: 239023 - DNA, 538 bp, Unknown
  Bacterial polypeptide expressing nucleotide sequence isolated from the Sargasso Sea
atggaatacattgatacttcagaagataaacttcatgaagaatgcggtgtatttggtatatttggaagtccagacgcttccgcacttactgccttaggattacatgccttacaacatcgtggtcaagaaggtgcaggaattgtttcatttgatggagaaaagtttcacggcgttagaaggccaggacttgttggggatcactttaataaacaagaggtgattgataggttaaagggtagcaatgcaattggtcacgttcgatattctacaactggtgactcaattttaaaaaatattcagcccttgtatgcagatttaatgtcaggcggctttgcatgtgctcataatggaaatctcacaaatgcttcagctttaagagaaaaacttgtcagtcgcggatcaatttttcaatctacatctgatactgaaacaattttacaattagtagcgcagtctgagagaaagcaaatagttgacaaacttatagatgctttatttcaaatccatggggcctattcacttgttattcttacaacaa

SEQ ID NO: 239024 - DNA, 762 bp, Unknown
  Bacterial polypeptide expressing nucleotide sequence isolated from the Sargasso Sea
aatgaaaaaacatatcaagattctaaagaaaaaattacagaattataatccaagattaaaggaagaatgtggggtttttggaatcagtgatgcaaaggatgcatcagctctaacagcgcttggactacatgctctacaacacagaggtcaagaaggctgcggaatagttacttttgatggggaaaaatattattctgaaaaaagatttggtttagttggtgataattttaacaaagaaaaagtgcttaacaatcttaagggaaattatgctattggccataacagatatagcacaactggaaacaatatattgagaaatatacagcccttttttgctgacaccaatgctggtggtattggagttgcacataatggaaatcttactaattcaatagcattgagaaataaactagttgaagatggtgcaatattttacactacctcagacactgaaacgattgttcaattaattgctaagtcaaaaagaccaaaaacaattgataaagtaattgatgcaatttttcaaattcaaggtggctatgcattagtgatgttaacgcaaaactcattaattggggttagagatccttatggaattagaccgctagtaatcggtaagcttggtaatagttatgtcttagcgtctgaaacttgtgcgtttgatataattggtgcaaaatttgtaagagaagttgaaaatggtgagatagttttaattgaaaataatgaactcaaaagtattaagcccttccctgctaaaaa

SEQ ID NO: 239025 - DNA, 768 bp, Unknown
  Bacterial polypeptide expressing nucleotide sequence isolated from the Sargasso Sea
ttgagtttgtatattttgcaaggccagattcgatcattgatggcatgtcagtttataaatctagactcagaatgggtgagtatttggcacagagaatcataaaaaaaggtctgcatcacgatgtggatgtggtgattccaattcctgataccagtcgatcaactgcgctccaagtcgcccatcatttgggtgtcaaatacagagaaggcttcattaagaatagatacattggacgaacattcatcatgcctggacaggaaatcaggaaaaaatccgtgaaacagaaactcaatccaattgatctggaaattcgagataaaaatgtattattgattgatgactcaatagtcagagggacaacttcaaagaagataatacaaatggctcgaaatgcgggtgcaaacaaagtattttttgcctctgcagcgccaccggttaagtatccaaatgtttatggcattgatatgccttcaacagcagagcttttggcaagcaacagaacagaggaggagcttgcaagatatatcggcgcagattggttgatctatcaagaccttgatgatctcatttcagcggttcagtttgatgaatccgatgcagaggcttttgatacctcttgtttctctggagagtatgtcactggagatgtgacaccaaattatctggatttcattgagaacaagagaaatgatgctgctaaggcaaaaaaagagatagagagaaaacagattgaaatacacgatcagtcttcaatgactgtcagctaaa

SEQ ID NO: 239026 - DNA, 559 bp, Unknown
  Bacterial polypeptide expressing nucleotide sequence isolated from the Sargasso Sea
tatgcctattcctgattcctctcgtcccgcggcaatgcaagtgcaaagacagttggggatagaatatagggaaggtttttttaaaaatagatatgttggcagaacatttataatgcctggtcagcagaaacgtaagaaatctgtaaggcaaaaattaaatgccatgagtgcagagtttaaaaataaaaatgtattaattgttgatgactcgatagtaagaggtactacttcaaaagaaattgtccagatggctaaagatgcaggagcaaataaagttttttttacatcagcagctcctccagttcgttatcctcacgtttatggaattaatatgcctaatagagatgaattaatagctcataataggacaataagtcaaatcgccgataaacttgaaattgataaccttgtttatcaaagtgttgaaagtttgcgtaaatctataattggtgattctcctattaaaggtttagagatgagttgttttactggtgattatgtaactggaacagtaaatcatgaatacttaaattgggttgaaaatgaatataaatcttag

SEQ ID NO: 239027 - DNA, 1318 bp, Unknown
  Bacterial polypeptide expressing nucleotide sequence isolated from the Sargasso Sea
gttacttttgatggagaaaaatattattctgaaaaaaggtttggtttagttggtgataatttcaataaagaaaaagtacttaataatcttaagggaaattatgcaattggccataacagatacagcacaactggaaataatatattaagaaacattcagcctttttttgctgacaccaatgctggtggaattggagtagcacacaatggaaatcttactaattcaatatcattaagaaagaaattagtcgaggaaggagcaatattttatactacttcagatactgagacgatcgttcaacttattgctaaatcaaaaagacccaaaacaattgataaggttattgatgctatttttcaaattcaaggtggttatgcattagtaatgctaactcaaaactcattaattggggttagagatccttatggaattagacctctagtaatcggtaaacttggcaatagctatgtccttgcatctgaaacttgtgcatttgatattattggtgcaaaatttgtaagagaagttgaaaatggtgagttagttttaattgaaaataataaattgaaaagtattaagcccttcccttctaaaaaagttagaccttgtgtatttgaatatatttatttttcaagaccagacagtcttattggaggaaaaacagcatatgagcatagaaaaaacattggtagagaacttgcaaaagaaaacgatactaacgctgatatagtggttccagtcccggattctggaaatgcagctgccttgggttttgctcaagaattaaaaatgaattttgagcatggattaattcgaaatcattatgttggcagaacttttattgaacctagccagaaaattagaagcttaggagtaaaattaaaattaaatgcaaatcaaacaacgattaaaaataaaaaaatcatcttaattgatgactctcttgttagaggaaccacatcttataaaatagttaaaatgctttacgaagctggtgcaaaagaggttcatgttaaaattgcatgcccagaaataagatacccagatttctatggtgtagacacacctacaaaaaaagaactgttagcagcaaataaaacaaatgacgaaatttgtgaatatattggagctaaatctctaagatttttatcaatagaaggtttgtatagagctattggttttgaaaaaagaaacgaagcttatcctcaattaacagatcattatttcacgggtgaatatcctgttaaattagtggatgaattaggagataataaaataactcaattatctttattaagcactggatcaaataattaaa

SEQ ID NO: 239028 - DNA, 1143 bp, Unknown
  Bacterial polypeptide expressing nucleotide sequence isolated from the Sargasso Sea
tatgtgtggcattgttggaatagttagcaaagagtcggttaaccagcagttgtatgatgcactcacagtccttcagcatagaggccaagatgccgccgggatggcaaccagtatggatggccgtctacatttaagaaaaggtaatgggttggtgcgagatgtatttcttgatcaacacatgcaaagtttagttggcaatattgggatagggcattgtcgttatcctacagcagggtcttccagttctgctgaggctcaacctatgtatgttaattctccctatgggattaccttggcgcacaatggaaatcttacgaatgcaaaccagttacaagctgatttatttgcagaagatttacggcacacaaatactgatagcgattctgaagtgttgttaaatgtctttgctcatgaacttcaaatggttggagcgattgaccccagtgcgagcgatatatttcaggcattgcagggagtttataaacgttgccatggagctttcgctgcggtcgctatgattattgggactggaatagtgggatttagggattcatttgggattcggcctttggtttatggctttaaagagacagatcagggcatggagtatatgttagcatcagagtctgtagccttggatctattaggattccaaaaaatagcagatgtggagcctggcgaggctgtatttatttctaatgagggagaaataaccctccagacatgcgctgaacagacacgtttgaatccgtgtatttttgagcacgtttattttgctcgccccgattcaatcatagatgacgtgtctgtttataaaagccgccttcgtatgggggagtatcttgctcaaaacattctatccaactactcgcagaattctcacgatattgatgtagtagtgccggtgccggatacaggacgtacatctgcattaccactcgctcatatgctggacgtgaaatttcgagaggggtttgttaagaatcgctacattgggcgtacctttattatgtctggacaaaaacaacgacgcagatccgtcaggcacaagttagccacgatagatctggaatttaaaggaaaaaacgttctgatagttgatgattcaattgtccgcggaaccacatcaaaagagatcattca

SEQ ID NO: 239029 - DNA, 325 bp, Unknown
  Bacterial polypeptide expressing nucleotide sequence isolated from the Sargasso Sea
atgaaagcattgaaaacgaatagaaaatcaccttttattaaagatgataaattacatgaagaatgtggagtttttggtgtatacaaccatgaagattcagctgcactaactgccttagggcttcatgctttacagcatcgcggtcaagaagctgcaggaatagtaacttttgatggaacaaagtttatatctgaaagacatccagggttagtaagtgataactttacaaaaatgtctgtaataaatcgattagtaggtaatagcgctgttggacataacagatattcaacaacaggtgctacaattcaaagaaatattcaacctt

SEQ ID NO: 239030 - DNA, 401 bp, Unknown
  Bacterial polypeptide expressing nucleotide sequence isolated from the Sargasso Sea
aatgtgtgggatagttggaatttctgctgaaaccaacgtagctgcagaaatatatgacgctcttttaatgcttcagcacagaggtcaagatgctgctggcattgctgtatgcagttctgaagatcagttaaattcaagaaaatccatgggttatgtacgtgatgtttttcaacaaaggcacatggaaaagcttgtaggtaactatggtattggtcatgttagatatcctactgcaggtggtgctggaaaagagtttgctcaaccaatgtatgttaactccccatacggcatcagtttagctcacaatggaaatctaactaattcaaaacaacttggtaatgaactttttcatgctgagatgagacatttacagactgatagcgattctgaagtcttctcaa

SEQ ID NO: 239031 - DNA, 928 bp, Unknown
  Bacterial polypeptide expressing nucleotide sequence isolated from the Sargasso Sea
atgtttctttgggaccaagctgatgataaattgcgcgaagaatgtggtgtttttggcatttccggtcatgaagaagctgcagccgtaacggcgctggggttgcatgctttacaacatcgcggccaagaagctgcaggtatcgtaagctatgatggaaaacgctttcattcagaaaggcgtatagggcttgtaagtgatcacttcacgaaaaagccaataatagaaagaatgcaaggccaaatggccatgggtcatgtcagatattctaccacaggcgagccagctttgagaaatgttcagccactattcgcggatcttgctgtgggcggatttgcaattgcacacaacggcaatttaacaaatgctcttaaattacgaaatgaattagtacagagcggagcaatttttcaatcaacttcagatacagaagtgcttcttcaattgatagctcgttcaaaaagcaatggagtgatcaaccgttttgttgatgcgttaaggcaaattgatggtgcttatgctttggttgcattaacggataataagttaataggtgcaagagatcctctaggtatacgtcctttaattttaggtaaacttgaaaaccagtttattttatcttctgaaacatgcgcattagatataattggagcaaaatttgtaagggagatcgaaaatggagaggtagttgtaatttctggagaaaacatagaaagtatcaagcctttcccagaaataaaaaaacgaccttgtatcttcgaatatatttatttcgcccgaccagatagtgtttttggagagaaaagtatttatgagtgccgcaaaaattttggtcatgagcttgctgctgaagcgccctgttccgctgacgtagttattccagtgccagacagcggagtaccagccgctttaggttatgcggaggcagcag

SEQ ID NO: 239032 - DNA, 871 bp, Unknown
  Bacterial polypeptide expressing nucleotide sequence isolated from the Sargasso Sea
gggaaaaataaaaaattcgtatgtgtttgcatctgaaacatgtgccttagatataattggagcaaagtttattagagaagtagagaatggagaaatagtttatgtagaaaaggataaattaaaaagcataaaaccatttcctctaaaaaaaataagaccttgtgtatttgaatatatttacttttcaagaccagatagtattctaaatggaaaatcagcatatgattatagaaagaattttggaaaagaacttgcaaaagaaagtgatgttgatgcagaagtaattgttcctgtgcctgactcaggaaatgcagctgctattggttatagccaacatcttggtaaaaatttcgagctagggttaattagaaatcattatgttgggagaacctttattgagcctacacaaaaaattagaagcttgggagttaaattaaaactaaacgcgaataaatcgtcaataaaaaataaaaagattgttttaatagatgactctcttgttagaggaactacttgttataaaattgtgaaaatgttgtatgattcaggagcaaaagaagtccatgttaggattgcgtctcctgaaataaaatatcctgatttttatggagttgatacaccaactaaaaaagaacttttagcagctaacaaaagtgtagaaaaaatttgtgaatatataggtgctaaatctttaaaatttctatcaattgatggtttatacaaagcgatgggatttgataaacgaaatgaaacatatccacaattaactgatcattattttactggggactaccctataaaaccaattgacgaattgggtgataacaaaataactcaattatctttattgagttcagcatcaaataattaa

SEQ ID NO: 239033 - DNA, 1389 bp, Unknown
  Bacterial polypeptide expressing nucleotide sequence isolated from the Sargasso Sea
acgatgcttcagctttaactgcgcttggactccatgcacttcaacaccgtggccaagaaggatgtgggatagttacatttgatggaaaaaaatattactcagaaaaaagatttggattagtaggtgataattttaataaagaaaaaattcttaaaaaccttaagggtaattatgctattggtcataatagatacagtacaactggagaaaatactttaagaaatattcagcctttttttgctgacactaacgcaggaggtattggtatttctcacaatggaaatttaacaaattcaatatctttaagaaaaaaattagttgaagatggtgctattttttatacgacatcagatactgaaacaattgttcaattaattgcgaaatctaaaagatcaaagacaattgataaaataatagatgctatatttcaaattcaagggggttatgcattggtgatgctgactcaaaattctttaattggtgttagagatccttatggaataagaccgctagtaattggtaaattaggtaaaagttatgtgctagcctctgaaacttgtgcattagatatcatcggagcaaaatttgttagagtggtagaaaatggagaaattgttttaattgagaatgaaaagttaacgagcattaaacccttcccattaaaaaaagttagaccttgtgtatttgaatatatttactttacaagaccagatagcattattgacaacaaaactgcttatgaacatcgaaaaaatattggaatagagcttgctaaagaaaatgatattgatgcagacatagttgttcctgttccagattcaggaaatgctgctgctcttggattcgcacaacatcttaaaataaattatgaacacggtttaattagaaatcattatgtaggacgaacctttattgaacctagtcaaaaaatcaggagtttgggtgttaaattaaaattaaacgccaatcaatctactattaaaaataaaaaaattattctaatcgacgactctttagttagaggaacgacttcttataaaattgttaagatgctatatgactcaggtgctaaggaagttcatgttaaaattgcctgtcctgaaataagatatccagatttttatggagtagacactcctacaaaaaaagaattattagctgcaaataaaacaaatgatgaaatttgtaaatatattggagctaagtctttaaaatttctatcactaaatggattatatagagcaattggttttgaagaaagaaatgaaacttatcctcaattaaccgatcactattttacaggtgactacccagtaaaacctattgatgatcttggagatagtaaagttacacaattatcattactaagtactgcttctaatagttaat

SEQ ID NO: 239034 - DNA, 412 bp, Unknown
  Bacterial polypeptide expressing nucleotide sequence isolated from the Sargasso Sea
ttgaagatatttgatccaaaattaaaagaagagtgcggagtatttggcatcagtaatgctaaagatgcatctgctttaacagctctaggtttacacgcacttcagcataggggccaggaaggatgtggaatagtgacttttgatggagagaaatattattctgaaaaaagatttggcttagttggagataatttcaataaagaaaaagttttaaaaaacctaaagggtaattatgcaattggccataatcgatatagtactactggcaataatattttaagaaatattcaacctttttttgcagacactaacgcaggtggaattggagtatctcataacggaaacttaacaaatacaatatctttaagaaataaactagtagaagaaggagcaattttttatactacctctg

SEQ ID NO: 239035 - DNA, 739 bp, Unknown
  Bacterial polypeptide expressing nucleotide sequence isolated from the Sargasso Sea
tgtatttttgagtatgtttatttttcaagaccagattctaaaatagatgaaatatctgtatataaagcaagaatgagaatgggtacaaaacttgctggccaaattaaaaaaactaggcctgaccatgatattgatgttgtaatcccaatacctgatagttctgtaactgctgctcatcaattagctgttgatttacaagttccttatagagaaggtttcgtaaagaatcgatatattggaaggacatttataatgccttatcaagaagaaagaagaaaatcagttcgtagaaagttgaatatcttagatttagaatttgatggcaaaaatgttttgttagtcgatgattcaattgttagaggcactactagtaaaaaaattatcgaaatggctagagaagctggtgcaaataaagtgtattttgcttctgctgctccagctattaagtatcaaaatctttatggtatagacatgcctgctacagctgagttgatagcttcaaataagaataacgaggaggtagcaaaagaaataaatgcagactggcttatttatcagactttggatgatcttgttgattctgtcagagaaggcaatccggaaattaaagaatttgaaacatctattttcactggtaagtatttcactccattagttgagaattatcttgaagaacttgaaatttcaagaaaagatgagctaaaaatgcaaagagaaaaaactaaagctaaaggctagg

SEQ ID NO: 239036 - DNA, 712 bp, Unknown
  Bacterial polypeptide expressing nucleotide sequence isolated from the Sargasso Sea
attgactccagccccaaggaaattatgcgtgttcgaactaatttattttgctagaccagacagtaagctagacaacaatctcgtgtattcggtaaggaaacagttgggcgctcaattagccagggagcatcctgtcgacgccgacctggtaatcggagtcccagattcctcgacttcggcagctgtagggtattcagtcgaatcagggattcctttcagtgacggactcattaaaaaccgttacgtagggcgcacttttatagaacccgaacagagcttaagagatattggagtgagacaaaaattcaatccgcttatggaagtcattcaaggcaaaagattagtggtagtggacgatagcatagtgagaggcaccacaacaccgcatgtagttaatttattgaaaaagtcaggtgctacagaagtgcatctgagagtctgcgcccctcctataaaacatccttgttacatgggagtagacatggcttcaagggaagagctcatagcttctagcaaaactgtatctgaaatcaaagactatatagactgtgactctttaggctatctcagtgtcgagaatttactcaaagtggtcgacaccgattcaggtggattttgcgatgcctgttttactggtaattacccaattcctatacaacttgaaatgaccaagttatcacttgaagaaacggaagaatcccaagtcaggtag

SEQ ID NO: 239037 - DNA, 867 bp, Unknown
  Bacterial polypeptide expressing nucleotide sequence isolated from the Sargasso Sea
aatgtgcggaataatagggatttctgcagaaaataatgtagctgaagagatctatgaatctctacttatgttgcaacacagaggacaagatgctgctggtatggttgtctgcgaacccagcggtaaactcaatagccggaagtcaaaaggctatgttagagatgtatttcagcagaatcacatgagcaatcttcaaggaaattttggaatagggcacgtaagatatccaactgctggaggtataggcaaggagtttgctcagccaatgtatgttaatactccttatggcataagcttagcccataacggaaacttaacaaattccaagaaactagccgcagagctattccatgcagaaagacgccacataaatacagattctgattcagaagtattattgaatatttttgcacttgagctttctaagcaagaagcagtttttcctaaaccaaaagacttttttgcagctgttgaaaaaacacatttacgaataaatggtgcatatgctgtcgtagcattaataactggatatggaatcgttgcttttagagatcctctagggataagacctttaactattggagttagaaagggtaaaaatagaaatgaatatgtagtttcttctgaaacagcattattttcagctacaggtttcaaagtacttagagatgttgagccaggcgaggctgtttttatagataactcaggcaagatatttactcaacaatgttttcaaggtagtgaaaaaaaaccttgtatatttgagtatgtatatttagcacgaccggattcaactattgatgaaatttcagtttatagatctagaatgcgaatggggttgaagttagccaacagaataagagaact

SEQ ID NO: 239038 - DNA, 1489 bp, Unknown
  Bacterial polypeptide expressing nucleotide sequence isolated from the Sargasso Sea
atgtgcggagtagtaggcatagtaagtcaatcggaagtctctccgattatctatgacgctttaacaattctccaacatagaggccaagacgcggctggaatagctacttcaacaaataatagattcttcatcaggaagcaattaggtctcgttcgcgatgtaattagaaatcagcatattgttaacttaagaggccaaatgggtattggtcacgtaaggtaccctactgctggaacagaagatagggaattagcacaacctatgtacgttaattctcccttcggcattagcatttctcataatggaaatttaactaatcatgaagaacttaaagaaacattaaagaataaagatttaagacatttaaatacggattctgatagcgaagttttattgaatgtatttgcgcacgaacttcagaagcaaggctctatgaatccaacttctaaagaaatctttgctgctgttaagggattacataaaagggttaggggagcttattccgttgtgataatgataaacggtataggtatagttggttttagagatccttttggcataaggccattaattttaggcagcaaagatagtgacctgattggtaatgactatatggttgcgtctgaaagcactgtcttggaatctttaggttttgaagtaatggatgatattgaagctgggtcagcagtctttataaactctgaaggtgagatggaaatcgagtcttgcattaagaaccctgttccaaccccttgtatctttgaatatgtatatctcgcgagacctgatgcaaccatagataatatctcagttcataaatcaagattaagaatgggtgaatacctagctcaaaagattttaagagaaaaaccaaatcacgatatagatgttgtaatacctataccagatagtagcacaacctcagccctacaacttgcttcaactcttggtattaaatatagagaaggctttgtaaaaaatcgttacataggaagaactttcattatgccgtttcaagaaaaaagagaaaaatcagttagacaaaaactcaatgcaatagatttagagttcaaagataaagtagttcttttggttgatgactcgattgtaaggggtactacaagtaggcaaataatagagatggccagatcttcaggtgctaagaaagtttattttgcttcggcagctcctccaataagatttcaaaatgtatatggtatagacatggctgcaacgactgagttagtagctcataatagaactgaggaagagatagaaagttttatagacgcagactggttaatctatcaaaacttagaggatcttatacaggcagctcagcaaggtaacaaagatataaaacaattcgaatgctctatttttgatggaaaatatgtaactgatgacattgatgaaacttatcttaaaaatctagaagatttaagaagtgataaaactaaatcactaagacaaagtaatttaaactaat

SEQ ID NO: 239039 - DNA, 322 bp, Unknown
  Bacterial polypeptide expressing nucleotide sequence isolated from the Sargasso Sea
attgataaaatttaaatctgataagcttagggaagaatgtggtgtatttggtgtatctaacacagaagatgcggccacattagtggctttaggtcttcatgctttacaacacagaggccaagaaggttgcggaatagtatcgtttgatggaaaaaattatcactcagaaaaaagacatggactggtaggtgatcattttacaagtagcgaggttttaaaaaagttacccggcaattctgctattggtcataataggtactcgaccactggtgataattcattaagaaatattcaaccattttttgcagatttgcaatatgga

SEQ ID NO: 239040 - DNA, 1486 bp, Unknown
  Bacterial polypeptide expressing nucleotide sequence isolated from the Sargasso Sea
aatgtgtggagtagttggaatagtaagtcaaacggaagtttctcctgtcatttatgatgctcttactattcttcaacacagaggccaagatgcagctggtatagctacttcaaccaacaacagatttttccttcgaaagcaactgggcttagtgagggatgttgttagaaatcaacatatacttaatttaagagggcagatgggtatagggcatgttagatatccaacagcaggtagtgaagatagagaacttgcccaacctatgtacgtaaactcaccttttggaataagtatttcgcataatggtaatcttactaatcatgaagaattaagagattctttggtgaaaaaagatttgagacacttgaatactgactctgatagtgaggttttacttaatgtattcgctcatgaacttcagaaacagggatctattaatcctggttcaaaagaagtatttgcggcagttaagtccttacataaaagagtaagaggcgcctattcagtagtaataatgattaatggtgtaggtattgtcggctttagagatccttttggtatcagacctttgattgttggctcaaaagagagagatttaattggaaaagattacatgatagcttctgaaagcactgttctagactccttaggttatgaagtaattgatgatgtaatggctggctctgcggttttcattagctctgatggaaaaatggaaacagaatcttgtattaataatcccattcccactccatgtatttttgagtatgtatatttggcaagacctgatgcgaagatagataagatatcagtccataaatctcgtttaagaatgggtgaatttttggctaaaaagatcataaaagagagacccgatcacgacatcgatgttgtaattcctattccagatagtagtacaacttctgcattgcagttagcgatgacacttggagtaaagtatcgtgaaggttttgtaaagaatagatatatcggaaggaccttcataatgccttttcaagaaaagcgtgaaaagtctgtcaaacaaaagcttaatccaatagatttagagtttaaagataaagtagtattgcttgtcgatgactcaatcgttagaggtacaacaagcagacaaatcatagaaatggctagatattctggtgcaaagaaagtttatttcgcatctgctgctccacctataaggtatcaaaatgtatacggaattgacatggccgcaactacagaattggttgcacatcaaagaacagaaaaagagattgaatcttttataatggctgactggttaatctatcaagacttggatgatctaattagcacagttcaagttggcaataaaaaaataagtcagtttgaatgttcaatattcgatggtaaatatgttactgatgatatagacgataaatatctcaagaacctagaagatgtccgaaatgataagtctaagctttccagaaaatctgcaaattaa

SEQ ID NO: 239041 - DNA, 1030 bp, Unknown
  Bacterial polypeptide expressing nucleotide sequence isolated from the Sargasso Sea
aatgtgcggagtagttggaatagtcagtcaaacagaagtttcacctgtcatttatgatgctctaaccatccttcaacatagaggccaagatgcagctggcattgctacttctaccaacaatagattttttcttcggaaacaacttggattagttagggatgttgttaggaatcaacacattcttaatctgagagggcagatgggtatagggcatgtcagatatccaacagccggcagcgaagacagagagcttgcgcagccaatgtatgtaaactctccttttggaatcagtatttctcacaatggcaatcttaccaatcatgaagagttaagagattccttggtgaataaagatttgaggcacttgaatactgattcagatagtgaagttttactcaatgtattcgctcacgagcttcagaaacaaggctcaattaatcctggttcaaaagaaatatttgcagcagttaagtccttacacaaaagagtaagaggagcttattctgtggtgataatgattaatggtgttggtattgttggttttagagatccttttggtatcagacctttaattgtaggctctaaagagagtgatttaattggtaaagattacatgatagcttctgaaagtactgttttagactctttaggatacgatgtaattgatgacatcaaggccggctctgcagttttcatcagctccgaaggaaaaatggaaacagagtcatgcattaataatcctgttcctactccgtgtatatttgagtatgtatatttggctagacctgatgcggagatagataagatatcagttcataaatctcgattaagaatgggtgaatctttggctaaaaagatcttaaaggaaagaccagatcatgatattgatgtggtgattcccattcctgacagtagtacaacttctgctttgcagctagctactactcttggagtaaagtatagagaaggttttgtaaaaaatagatacattggaaggactttcataatgccttttcaagaaaagcggaaa

SEQ ID NO: 239042 - DNA, 979 bp, Unknown
  Bacterial polypeptide expressing nucleotide sequence isolated from the Sargasso Sea
atgtgtggaatagtagggatatattctgaaaatcacgtagcaagctcaatctatgattctttattaatgttgcaacatcgaggtcaagatgctgcaggaatgtcagtttgcgatgtaacaggaaaaattaatacccgaaaatctatgggatatgttcgagatacttttcatcaaggacatatgagtagactgttgggaaattatggtattggccatgttcgatacccaacagcaggaggaggcggtaaagagtttgcgcaaccgatgtatgtcaattctccttatggaataagcattgcacataatggaaatttaacaaattcaaaagatcttgctcgtgagttgtttcatgctgaaatgagacatatcaatacagactctgactcagaggtcttacttaacatatttgcacatgagcttggaaagcaaaaagcgattttgccctccaagaaacatttttttcaggccgttagaaaaactcatgttcgatgccaaggtgcatatgcagtagtagctttaataactggatttggcctagttgcatttagagatcctaggggaataaggccattggtaattggagaaaaagacggttctacaaaaaaggaatatatagttgcctctgaaaatgcttccttctcggctttaggattcaaaaccctcagagatgtagagcctggagaggcaatatatatagatgttgatggtaatttacatagtgagcaatgttcagatggatcacaaccaactccatgcatatttgaatatgtttacctagcaagaccggattctactcttgacgaaatctctgtttataaggcaagaatgagaatgggtcaaaagctagcaaaaaaaattttaaggttaaatccaaatcatgatattgatgttgtaatcccaatacctgatagctcaactactgctgcattacagcttgcagcagtattgaaactcccatatcgacagggatttgtaaaaa

SEQ ID NO: 239043 - DNA, 1489 bp, Unknown
  Bacterial polypeptide expressing nucleotide sequence isolated from the Sargasso Sea
tatgtgcggagtcgtaggcatagttagtaaatcggaagtttctccgattatctatgatgctctaactattctgcagcacagaggtcaagacgcagcaggaatagctacttctactaataacagattttttataaggaaacagcttggccttgttcgtgatgtcataagaaatcaacacattgttaatttaagaggtcaaatggggatagggcatgtaaggtaccctactgctggaagtgaagatagagagttagctcaaccaatgtatgttaactctccttttggcataagtattgctcataatggaaatttgactaatcacgaagaattaaaagaaactttaaaaactaaagatttacgacacttaaatacagattctgatagcgaagttctattaaatgtatttgcgcatgagcttcagaaacagggctcaatcaatcctacttcaaaagaaatttttgcagcagttagaggattacataaaagagtcagaggagcttattccgttgtcgtaatgataaatggaattggtattgttgggtttagagatcccttcggcataagaccactaatacttggtaagaaagaaagtgatcttttcggtgatgattatatggttgcatctgagagtaccgtattagaatctttagggtttgatgtaatgaatgacatagaagctggatctgctgtctttataaattcagaaggtgaaatggaaatagaatcttgcatgaataatcctataccaaccccctgtattttcgaatatgtttatctcgcaaggcctgatgcaacgattgataacatttcggtacataaatccagaatgcgaatgggtgaatatcttgctaacaaaatattaaaagacaatccaaatcatgacatagatgttgtcatacctatacccgatagcagcactacttctgctttgcagcttgcttcaactttaggcataaaatatagagagggttttgtaaagaatcgctatataggcaggacatttattatgccttttcaagaaaaaagagaaaaatctgttagacaaaaacttaatgcaattaatttagagttcaaggacaaggtcgttcttttagtggatgactcaattgtaagaggaactacaagtagacaaataattgagatggcgagatcttcaggtgcaaggaaagtttattttgcttccgcagcaccgcctattagatttcagaacgtatacggcatagatatggccgctactactgagttagttgcacataatcgaactgagaaagagatagaaagttttatagatgccgattggttaatttatcaaaacttagatgatctaataaaggctgctcagcaaggtaataaacatataaagcaatttgaatgttccatatttaatggcaaatatgtaactgacgatatagatgagaagtatctcaaaaatttagaagatctcagaagtgataaatctaaatcactcagacaaagtaatttaaattaa

SEQ ID NO: 239044 - DNA, 1483 bp, Unknown
  Bacterial polypeptide expressing nucleotide sequence isolated from the Sargasso Sea
atgtgcggtgtggttggaattatatctagtaacaaacccgttgctggcgaactttatgatagcttgatccacctgcaacatagaggccaagatgccgcaggtatcatgacatacaatgaacgatttcatattaaaaaaggtacaggtcttatcagagatatttttgatgaacagaacatgtcacgattattgggaaaagtgggtgttggacacactagatatccaaccgtaggtggattcagcattgaagaggctcagccagtatatactcatgtgccatatggcatagccatggcacacaatggaaatattgttaattatacagacctatcaaaagaggttgtcgaaaaagatcggcgtcatgtgaattcttcagttgatattgaggtcatactccacatctttgcacatgccatggaaagcaatgatagagcctctgatagctctgaattctttgaccagatctgtgattcggtcaaaactgtatacggccgggtaaagggcgcctattctgtagtaagcacgatcatgaataatggaatgtttgtttttcgtgaccctcacggcatcaggcctttagttaaaggtgagcgaaaaaatgatgacggatctgtagatcacatttttgcatctgagactaccatgttctatgctttaggattcgaacctacgggtaatgtattacctggtgaggtgatatgggtggaagaagatggtaccgttcacagtcgcatcgtagaagaaaaacagttcactccatgtgtatttgaatatgtttattttgcaaggcctgattgtattcaaaacgatgttagcgtataccggtctagattgagaatgggtcaaaaccttgcaaacaattggaaaaataagtatcctgatgttttgcctgacatagtgatcccggctccatccacagcaaatacttccgcattaagcttcgccaatgaactcggagttcgctattcagaagggttatataaaaacccatttattggaagaacatttattatgccaggaaatgaagagcgaaaaagatctgttcgctacaaactagtaccgcaggaatttgagatcagcggtaaagacgtgctcatagttgatgatagtatagtgaggggaaatacaagtcgacaaattgtcaaaatgatcaaggagttcggggcaaaaaatgtgtactttgtatcggcatgccccccagtcaaattcccatgctactatggtgttgatatgccaacccgtacagagcttacagcagcaaataagaccaatgaagagataagagaattcatgggtgtagatattctgatgtatcaagaggtggaagaccttaaagaagcagtcactcgtaagggtgagcataatattgataggccatgcatggcgtgcttagatggttggtatgttacgggtgatataaacgagcaggtaatggaaagcatggaaaatcagcgcataacagaacggtctgtgctaaaatgaa

SEQ ID NO: 239045 - DNA, 1111 bp, Unknown
  Bacterial polypeptide expressing nucleotide sequence isolated from the Sargasso Sea
ctgcaggaaaattttgatgggagtctctctcctgaaattattttcaaagctgcaactcatctttttgataaatgctcaggcggttatgccgttgtttcaatgattctgaatgagggactggtggccatgagagatccaaatggaattcgtcctctaatactcggaaagagagaagttgggcagggtactgaatatatgattgcttctgaaagtgtggcattggacatcgctgattttgaaatcatgagagatgttaagcctggtgaagtgatttacatcaccaaggaaggagaattgttttctaagcaatgcgtgaaaccaaaatcatacacgccttgtatatttgagtttgtatattttgcaaggccagattcgatcattgatggcatgtcagtttataaatctagactcagaatgggtgagtatttggcacagagaatcataaaaaaaggtctgcatcacgatgtggatgtagtgattccaattcctgataccagtcgatcaactgcgctccaagtcgcccatcatttgggtgtcaaatacagagaaggcttcattaagaatagatacattggacgaacattcatcatgcctggacaggaaatcaggaaaaaatccgtgaaacagaaactcaatccaattgatctggaaattcgagataaaaatgtattattgattgatgactcaatagtcagagggacaacttcaaagaagataatacaaatggctcgaaatgcgggtgcaaacaaagtattttttgcctctgcagcgccaccggttaagtatccaaatgtttatggcattgatatgccttcaacagcagagcttttggcaagcaacagaacagaggaggagcttgcaagatatatcggcgcagattggttgatctatcaagaccttgatgatctcatttcagcggttcagtttgatgaatccgatgcagaggcttttgatacctcttgtttctctggagagtatgtcactggagatgtgacaccaaattatctggatttcattgagaacaagagaaatgatgctgcaaaggcaaaaaaagagatagagagaaagcagattgaaataaacgatcagtcttcaatgactgtcagctaaa

SEQ ID NO: 239046 - DNA, 415 bp, Unknown
  Bacterial polypeptide expressing nucleotide sequence isolated from the Sargasso Sea
atgtgcggagtcgtaggcattatcagcagtaggcccgttaaccaagaaatatatgatgctttaacagtgctgcaacaccgtggacaggactcagcaggaatcatgacggacaacaacggtgtgctttgtcttagaaaaagcaatggtttggtcaatgatgttttttcaaatgaacacatgactagactgagaggcaatatgggcatcggtcatgtacgctatccaaccgcaggaacactcagttcatcagaggcacaacctttttatgtgaattctccatttggaatttgcttggctcacaatgggaatcttgttaacaatgaggagcttagaaagcatctaagtgaagtggatcgaagacatttaaatactgaatccgatacagaggctttattgaatctatttgccccatgaa

SEQ ID NO: 239047 - DNA, 1465 bp, Unknown
  Bacterial polypeptide expressing nucleotide sequence isolated from the Sargasso Sea
gatgctaaagaaaaagtttcagacatatgatccaaaattaaaagaagaatgtgcagtttttggaatcagtgataattcagatgcctcaactcttacagctttaggattgcatgcccttcaacataggggtcaagaaggatgcggaattgtatcttttgatggaaaaaaatatcattcagagaaacggtttggtttagtaggagataattttagtaaagaaaaagttattaaaacgttacctggaagatttgcaattggtcataatagatattctactacaggaggaacaacattaagaaatatacagcctttctttgcagacactaatgcaggtggtatcggtgtttcgcataatggaaatcttacaaatgcaattaaattaagaacaaaaatggttgaggaaggttcaattttttatacaacatctgatactgaaacaatcgtaaaacttattgcgcgatcaaaaagatcaaaaactgttgatagagtaattgacgccttgtttcaaatacaaggagggtatgctttagttgtattaacacaaaatattttaataggagcaagagatccgtttggaattagacctttggttataggtaaattaaaaagctcttatgttttagcatctgaaacttgtgctctagatattattggagcaaaatatattagagatgttgagaacggggaaatagtttgtattgaagatggtaaattacaaagtattaaaccttttcctcaaaaaaaaattagaccatgtgtatttgaatacatttatttttcaagaccagatagtatcttaaacggtaaaactgcttatgaatatagaaaaaattttggtgcagaattagcaaaagaagaaaagattgatgcagatctagttgtaccagtacctgactcaggtaatgcagcagcactaggttatgcacaacaaaaaaaaattaactttgatctaggcttaattagaaatcactatgtaggtagaacatttatagaaccatcacaaaaaattagaagtttaggtgtaaaattaaaattaaatgcaaatcactccgtaataaaagataaaaaaattattttagttgatgactcgcttgtaagaggtacaacgtcctcaaaaatagtaaaaatgctctatgatgcaggagcaaaagaagttcatctgagaatagcaagtcctgaaattaaatttccagatttctatggagttgatatgccaaccaaaaaagagttattagccgcaaacaaaacagtagatgaaattagagatattatttctgcaaaatcattaaaattcttgagtatcgatggattatacaaggcaatggggtatgaaaaacgaaatgaaaactatcctcaattaaccgaccattattttacaggagactatcctgttaaaataattgatgtattaggtgaagataaagttacacaattatcgttgttgagtacaggatctaataactaa

SEQ ID NO: 239048 - DNA, 1051 bp, Unknown
  Bacterial polypeptide expressing nucleotide sequence isolated from the Sargasso Sea
tacacaacatcagatacagaaacgatagtaaaacttatagccaaatcaaaaagaccaaagacaatcgataaagttattgatgctctgtttcaaattcaaggaggttatgcattggttatgatgacacaaaatacacttattggtgtaagagatccttatggaattagacctttggttatcggaaaactaaaaaattcttatgtttttgcatctgaaacatgtgcatttgatattattggcgcaaagtttgttagagaagttgaaaatggtgaaatcgtttatgtagaaaatgatgcattgaaaagtattaagccatttcctcaaaaaaaagtaagaccatgtgtatttgaatatatttatttttcaagaccagacagtattttaaatggcaaaacagcttatgaatatcgtaaaaaatttggagcagaattagctaaagaagataatttagatgctgacctagttgtaccagtgccagactctggtaatgctgctgcattaggttatgcagaagaaaaaaaaataaactttgatctaggtttaataagaaatcattatgttggtagaacttttatagaaccttcacagcaaattagaagtttaggagttaaattaaaattaaatgcaaatgtttcagttataaaaaataaaaaaattattttagttgatgattctcttgtaagaggaacaacctcatcaaagattgtaaaaatgttgtatgataatggtgctaaagaaatacatgttaggatagcaagtccagaaataaaatatcctgatttttatggagttgatacgcctactaaaaaagaactattagcagcaaacaaatcagtggatgaaataaaagaatttataaaagcaaaatcacttaaatttttaactttagatggcttatatcgaggaatgggttttgataagagaaatgatgcttatccacaattaactgatcatcattttactggtgattatccagtaaaaataattgatgaacttggagaggataaagttacacaattatcattgttaagtacaggatcgagtaattgat

SEQ ID NO: 239049 - DNA, 772 bp, Unknown
  Bacterial polypeptide expressing nucleotide sequence isolated from the Sargasso Sea
atgtataatcctaaattgaaggaggaatgtgctgtctttggtataagcaatacaccagaagcatcaactttaactgctttaggacttcatgcattacaacatagaggtcaagaaggttgtggaattgtatcatttgatggtgaaaaatatcactctgaaaaaagatttggtctggttggtgacaactttaatgatgagaaagttttaaaaaacctgccaggaaattacgctataggtcacaatagatattctacaactggcggaactgctcttagaaatgtacagccattctttgctgatactaattcaggtggaattggagtagcacataatggaaatttaactaatgccataacacttagaaataaaatggttgaggaaggttcaatcttttacacaacatcagataccgaaaccatagtaaaacttatagcgaaatcaaaaagaccaaagacaattgataaagttattgatgctctgtttcaaattcaaggaggatatgcattagttatgatgacacaaaatacacttattggagtaagagatccttttggaattagacctttggtaataggaaaattgaaaaactcttatgtttttgcgtctgaaacctgtgcttttgatattattggtgcaaaatttgttagagaagttgaaaatggtgaaattgtttatgtagaagatgatgaattaaaaagtattaagccattccctcaaaaaaaagtgagaccatgtgtgtttgaatatatttatttttcaaagacccagacca

SEQ ID NO: 239050 - DNA, 1213 bp, Unknown
  Bacterial polypeptide expressing nucleotide sequence isolated from the Sargasso Sea
gtatcatatgatggcaaaaaatatcattcagaaaaaagatttggtttagttggagacaactttaatgatgaaaaagttataaaaaaacttcctggaaaatatgcaataggtcataatcgttactcaacaactgggggaacagctttaaggaatgttcagccattttttgctgatacaaatgcaggtggtatcggtgttgcacataatggtaatcttacaaatgctataactttaagaaataaactagttcaagatggtgccattttttacacaacctctgatactgagactatcgttcaattaatagctaaatctaaaagagttaaaactattgataaaattatagatgcaatttttcaaattcagggtggttatgcacttgtaatgatgacacaaaatacacttattggtgttagagatccatatgggataagaccattggtgattggtaagttaaaaaattcctatgttcttgcatctgaaacatgtgcctttgatattattggtgctaaatttgttagagaagtagaaaatggagaaattgtttatattgaaaatgatgaattgaaaagtgtaaaaccttttcctccaaaaaaaataaggccttgcgtatttgagtatatttatttttcaagaccagatagcattttaaatggcaaaacagcctatgagtatagaaaaaattttggcgctcaacttgcaaaagaggacaaaattaatgcagatttagttgttccagtgccagattctggaaatgcagcagcattggggtatgccgaagaaaaaaaaatgaaatttgacttaggtttaattaggaatcattatgtgggtagaacttttattgaaccatcacaacaaattcgaagtcttggagtaaaattaaaattaaatccaaatctatctgttattaaaaataaaaaaataattttagtagatgactctttagtaagaggaactacatcatctaaaatagtcaaaatgctttacgattctggcgctaaggaagttcatgtaaggatagcaagtccagaaataaagtttcctgacttttatggagttgatacacctactaaaaaagaactcatggctgcaaataaatctacagatgaaatttgtgaatttattaaagcaaaatcccttaaatttttaagcttaaacggcttatatttaggaatgggttttgataaaagaataataactacccacagttgac

SEQ ID NO: 239051 - DNA, 1237 bp, Unknown
  Bacterial polypeptide expressing nucleotide sequence isolated from the Sargasso Sea
aaagtcactacctggaaactatgcaattggtcataatagatatagcactactggagggactactttaagaaacatacagcctttttttgcagatactaacactgggggaattggagtttctcacaatggtaatttaacaaatgcaataacactcagaagaaaattagttgaggatggtgctattttttatactacatctgatacagaaacaattgtgcaactaattgcaagatctaaaagagtaaaaactattgataaaatcatagatgcattatttcaaattcaaggaggatatgctttagtaatgctaacccaaaatactctgattggagttagagatccttttgggataaggcctcttgttattggaaaattaaataactcatatgtctttgcatcagaaacatgtgcattagacatcattggtgctaaatatattagggatgttgaaaatggtgagattgtatctgttcaagatgataagttagtaagtataaaaccttttccttctaaaaaagttagaccttgtgtttttgaatatatttatttttcaaggccagatagtttattaaatggtaaatgtgcttatgaatatagaaaaaattttggagctgagcttgcaaaagaaaactcattaaaagcagatttagtagtcccagttccagactcgggaaatgccgcagcgataggttttagtcaactaaccaaaataccatttgatcttggtttaatcagaaatcattatgttggtagaacttttatagagccagctcaaaaaattagaagtttaggtgttaaattaaaacttaatgcaaataaaactactattaaaaataaaataattgtcctagttgatgactctcttgttagaggaacaacatcccataaaattgttaagatgttgtacgacgcaggcgctaaagaagtacacgttaggatagcatgtcctgaaattagatatcctgatttttacggtgttgatacaccaacaaaaaaggagttgcttgcagcaaatatgaacaacaaacaaatatgtgaatatatcaacgctaaatcacttaagtttttaagcattgaaggaatgtataaagcaatgggatttgaaaatagaaacaaaacttatcctcaactaacagatcattatttcacaggtgattatccagtgaaactaattgataaacttggcgataataaagtgacgcagttgtcattgttaagcactgcatctaataattaa

SEQ ID NO: 239052 - DNA, 1150 bp, Unknown
  Bacterial polypeptide expressing nucleotide sequence isolated from the Sargasso Sea
tttttatgctgatctttcatcaggaggatttgcatgtgcgcataatggaaacctcactaatgcctcaatgcttagacaaaacttagtgaatgatggagcaatatttcaatctacttctgatacagaaacaattttacaattagtagcgaggtcaaagcgtgaatatataactgataagctaattgatgcattatttcaaattcaaggtgcatacgctttagtaattttaacaaataaaaaacttataggtgttagagatccatatggaataagaccattggtactaggagatctaaaaggtgctcctgtacttgcttctgaaacatgcgcattagatattataggggcaaagtatgtaagagatgttgagaatggggaaataattgttattacagacaataaaattgagagtattaagccatttcctaatgttaatgaacgtccatgtatttttgaaagaatatatttttcaagacctgatagtattattgagggtcgatcagtttattcataccgaaaaaatttaggctctgaacttgcaaaagagtataaaattgatgctgacgttgttgttccaattccggactcaggggttccagctgcattaggattttcccaaacttctggtatcccttttgaattaggtctaatcagaaaccattatgttggaagaacctttatcgagccaacgcaaagtattcgccagtttggagtgaaattgaagcatagtgttaatgtctcatatattaaaaataaaaaagtaattttgattgacgattctatagttaggggaacgacagcaaaaaaaatagtgaagatggtttatgatgctggtgcaaaagaagttcatcttggtgtctcttgtccaccaattacacatcctgatttttatggaattgatactcctaattatgatgaattaatcgcttcaaacaaaaatatagatgaaatgtcatctattattggaacaaaaactctattttttttaagtttggatggaacttaccgagctatgggttgcgaagaaagagatagttcatctcctcaatttacagaccactgttttacaggtgagtatccaacaccattaattgatatggaacaaggcaatgtttctaaacagtactctcttttgactgaaaaaagttaa

SEQ ID NO: 239053 - DNA, 745 bp, Unknown
  Bacterial polypeptide expressing nucleotide sequence isolated from the Sargasso Sea
gttaaatcatataaaccgttcaataaagtttccgctagaccttgtatttttgaatacatatattttgctcgtccagatagtattatgaatggtaaaaacgtatatgactgcaggaaaaatatgggaaagcaactagctttagaactaaagactaatgctgatttagtcattcctgttccagattctggtgtacctgctgcccttggttacgcagaagcttctaaaatcccttttaatcttggaattattagaaatcactatgtaggaagaacttttatagaacccactcaaaccattagacaattaggaataaaattaaaacataacgcaaatagctcaataattaaaaataaaaaaattgttttaatcgacgattcaattgtgagaggtaccacagctataaaaattgttgaaatgatgagaaatgctggtgcttcagaagtgcatatgagaatttcaagtcctccaataaaatttcctgattattatggaatagatactccaagtaagaatgaattgatagcttctaaaaattcttctgaagaaattagaaaaatattgaaacttgacagtctgcactttctttctttagatgggctttaccattctatgggacataaaaaaagagacacaaataaccctcaatacaccgatcattgttttacaggagattatcctaccaagttaatagatagagatgagggagccttagaaaatcagttatcgttattaaatgataagtaag

SEQ ID NO: 239054 - DNA, 498 bp, Unknown
  Bacterial polypeptide expressing nucleotide sequence isolated from the Sargasso Sea
atgggttcgtaaaaaacagatatattggcagaaccttcataatgcctgaacaagatatgagaagaagatcagtgcgaagaaaattaaacccgataaatgatgaatttaagaacaaaaatgtcttattggttgatgattcaatagttaggggaaccactatgaaagaaattgttgctatgtgctataaatctggagctaaaaaagtttctgttgcttcttcatcttcagaagtaaagttccccaatgtatatggaattgatatgccagctaagagtgaattaatcgcaagcaatagatctctagaagaaataaaggaatttataggctgcgataatttagtttatcaggatttatctgatctaatcgattcagttacagaacttaattcagaactagatgatgttgaaaagtctattttcactggtgtctacccaacaaatattacagatagatatttagaggatcttgaaaaaaagagacaagctattaattcttaat

SEQ ID NO: 239055 - DNA, 904 bp, Unknown
  Bacterial polypeptide expressing nucleotide sequence isolated from the Sargasso Sea
gccggtgttatgcccgtaaaccagtcgatttatgacgcgttaacggtgctccagcatcgtggtcaggatgctgcgggcatcatcaccattgatgccaacaactgcttccgcttgcgtaaagcaaacggaatggtgagcgatatttttgaagcgcgccatatgcagcgtttgcagggcaatatgggcatcggtcatgtgcgttacccaacggctggcagctccagcgcctccgaagctcaacctttttacgtcaactcaccgtatggcatcactcttgcccacaatggcaacctgaccaacgcgcatgagttgcgtaaaaagctgtttgaagaaaagcgccgccacatcaataccacttcagattctgaaattctgctgaatattttcgccagcgagctggataacttccgccattacccgctggaggccgacaatatttttgctgccattgcggcaaccaaccgccagattcgcggcgcctatgcctgcgtggcgatgattatcggtcacggtatggttgccttccgcgaccctaacggtatccgtccgctggtaatgggcaaacgcgatattggcgatggccgtaccgagtacatggtggcgtctgagagcgtagcgctggacacgttgggctttgaattcctgcgcgacgtagcccctggcgaagcggtgtatatcaccgaaaaaggccagctgtttacccgtcagtgtgctgataacccggtgagcaatccgtgtctgtttgaatacgtttacttcgctcgtcctgactcctttatcgacaagatttctgtctacagcgcccgtgtgaatatggggactaagcttggcgaaaaaattgcccgtgagtgggaagatctggacatcgacgtagtcatcccaatcccggaaacctcctgcgata

SEQ ID NO: 239056 - DNA, 883 bp, Unknown
  Bacterial polypeptide expressing nucleotide sequence isolated from the Sargasso Sea
tatcccaccgcaggcagctccagtgccgctgaagcccaacctttttacgtgaactccccctacggcatggtgctggcccacaacggcaacctcaccaacgccaaggagctcaaggagcagcagttcaaggtggcccgtcgccacatcaacaccacctcggactccgaggtgctgctgaacgtgctggcgcacgagctggatctctgcgacaagatggcgctgcgcccggaagacatcttctcggcggtgcgcaaggtgcaccagcagatccgcggcgcctatgccgtggtctccctggtgatcggccacggtctcatcggttttcgcgatcccaacggcattcgcccgctgatcctgggtcgccgggtcgacgagcaggggcaggtggagtacatgctcgcctccgagagcgtggcgcttgacgccatcggtttcgagacggtacgcgacgtcgcgccgggggaggccatctacatcaccgagcagggccagctcttctccgagcagtgtgcggagaacccgcagatgagctcctgtatcttcgaatatgtctacttcgctcgccctgattcgtgcattgacaaggtgtcggtctatgccgcccgtctcaacatgggccgcaagctgggccagaagattgcccgcgagtgggaagatctcgacgtggacgtggtcatccccatccccgagacctcctgcgacgtggcgctggagatcgcccataccctggacttgccgtaccgtcagggcttcgtgaagaaccgctacatcggccgtaccttcatcatgccgggccagacccagcgcaagaagtcggtgcgccgcaagctcaatgccatcagctccgagttcaagggcaagaaggtgttgctggtggacgaca

SEQ ID NO: 239057 - DNA, 1077 bp, Unknown
  Bacterial polypeptide expressing nucleotide sequence isolated from the Sargasso Sea
atgagtctctcttgatgcttcaacatagaggccaggatgctgccggaatggtggtttgtgagcctagcggaaaactcaacagtagaaaatctaaagggtatgtgagagatgtttttcaacaaactcatatgaacaatcttcaaggaaacattggtataggtcatgtaaggtatcctacagcaggaggtgtgggtaaggagtttgctcaaccaatgtatgtaaatactccgtacggtataagtttggctcataatggaaatcttacaaactctaagaaattagcagctgaattattccatgctgaaaggcgtcatattaatactgaatcagattcagaagttttattaaatatctttgctttagagttatcaaaacaagaagcagtttttccaaaaccgaaagatttttttgctgctgttgaaaaaacacacttaagaattaacggtgcttatgctgttgttgctcttattacaggatatggaatattagcattccgtgatcctttaggcataagaccattaacaattggagtaagaaaaggcgagaatagaaatgaatatgttgtatcttctgagactgcacatttttcggcaactggttttaaggctctaagggatgtagagcctggtgaagcagtttttatagataattctggaaaaatttttactaagcaatgttttcagggaagcgagaagagaccttgcatatttgaatatgtatacctagccagacctgattctactattgatgagatatcagtttacaggtcaagaatgagaatgggattaaagcttgcagaaaaaataagaaagctagaattagtagatgaaatagatgttgtcataccaattccagacagctctacaaccgctgctttgcagcttgccgcggatcttcagaagccctatcgacaagggtttgttaaaaatagatatattggaaggacttttataatgcctcttcaggaggagaggaagaaatcagttagaagaaaactaaacatccttgatctagagtttaaagataagaatgtattgcttgttgatgactcaattggtaagaggcacaacaagtaaa

SEQ ID NO: 239058 - DNA, 838 bp, Unknown
  Bacterial polypeptide expressing nucleotide sequence isolated from the Sargasso Sea
atggaatacattaatacttcagaagataaacttcatgaagaatgtggtgtatttggtatatttggaagtccagacgcttccacacttactgccttaggattacatgccctacaacatcgtggtcaagaaggtgcaggaattgtttcatttgatggagaaaagtttcacggcgttagaaggccaggacttgttggggatcactttaataaacaagaggtgattaataggttacgaggcagcaatgcaattggtcacgttcgatattctacaactggcgactcaattttaaaaaatattcagccgttgtatgcagacttaatgtcaggaggctttgcatgtgcacataatggaaatctcacgaatgcttcagctttaagagaaaaacttgttagtcgcggatcaatttttcaatctacatctgatactgaaacaattttgcaattagtagctcagtctgagagaaagcaaatagttgataaacttatagatgctttatttcaaatacacggagcctattcacttgttatacttacaaacaagaaacttattggtgtaagagatccttatggaataaggcctttagttcttggtgaccttaatggggctccagttctagcttcagaaacatgtgccctcgatattattggtgcaaaatttgtcagagaaattgaaaatggagaaataataataatttcagaaaaaggaatggaaagcattagacctttcccaaaagttgctgaaagaccatgtatttttgagagaatctatttttctcgtcctgacagtatgcttggaggaaacaaagtttatacttatagaaaaaatcttggaatagaat

SEQ ID NO: 239059 - DNA, 825 bp, Unknown
  Bacterial polypeptide expressing nucleotide sequence isolated from the Sargasso Sea
agatattattcagaaaaaagatttggattagttggagataactttaataaggaaaaagttctagataatctaaaaggaaattttgcaatcggccataatcgatacagtactactggaaacaatacattaagaaacattcagcctttttttgcagatacaaatgccggtggaattggagtagctcacaatggaaatttaacaaactcgatttatttaagaaataaacttgttgaagagggtgcaattttttacacaacctctgacactgaaactattgttcaacttattgcaaaatcaaagagattaaaaactattgataaaataattgatgcaatatttcaaattcaaggtggatatgcattagttatgttgacacaaaatttactagtaggtgtaagagatccttatggaataaggccactagtcataggtaaattaaaaaataattatgttcttgcatctgaaacctgcgctctagatattataggtgcaaaatttatacgagaagttgataatggtgaaattgttttaattgaaaatgataaattaaaaagtatcaaaccatttcctgaaaaaaaaattagaccttgtgtttttgaatatatttattttgcaaggccagatagtattttgagtggaaaaaccgcatatgaacatcgtaaaaatttaggaaaagaattggcaaaagagaataatattgatgcagatatcattgttccagttcctgattctggaaacgctgctgccttaggttttgcacagcacttaaataaaaattatgagcatgggctaattagaaatcactacgttggaagaacctttata

SEQ ID NO: 239060 - DNA, 884 bp, Unknown
  Bacterial polypeptide expressing nucleotide sequence isolated from the Sargasso Sea
ctcctttcgggaatgtctcgctcacaatggaaatttaacaaactatgatcaattagctaagtctctaatgatcgaggatagaaggcatcttaataccaaatcagactcggaagtcattttaaatgtttttgcgcatgaacttcaaaaaagactggatggagagatcacagcaaggagtattttcggagcaattgaggctgttcacgaaagatgcagtggtggctatgcagtaattattatgattattggtttcggcatcgtagcttttcgtgatccaaatggcataagaccactaattctgggaaaaagaaaatcagagacgggtgaggattatattgtagcctcagagagtgttgctcttgatgttacacactttgatatagacagagatattttgcccggagaaggtttaataatcgaaaacaacggcaagatacaaaataaaatttgctctcaaaataactcatactcaccatgtatatttgaatttgtatatttcgctagaccagattccattattgataaattgtcagtatacaaggccagactgagaatgggcgaagaattagcaagtaaaatactatccgagagaccgaatcatgacattgatgttgttataccaatcccggatacaagccgaactgcggcatcccaagttgcatataatcttggggtaaaatacagggaaggttttataaagaatcgttatgtgggcagaacttttattatgccaggacaagaagagcgaaatgattcagtaagaagaaaactaaatccaattgatttggaatttagaggaaagaatgtattgctggttgatgattcaattgtaagaggcactacctctaaacagataatcaagttggcaagagatgcaggagcaa

SEQ ID NO: 239061 - DNA, 771 bp, Unknown
  Bacterial polypeptide expressing nucleotide sequence isolated from the Sargasso Sea
aatggaatacattaatacttcagaagataaacttcatgaagaatgcggtgtattcggtatatttggcagcccagacgcttccacacttacagccttaggattacacgcccttcaacatcgtggtcaagaaggcgcaggaattgtttcatttgacggagaaaaatttcacggggttagaaggccaggacttgttggggatcactttaataaacaagatgtgattaataggttgcagggtagcaatgcaattggtcacgttcgatattctacaaccggcgattcaattttaaaaaatattcagccgttgtatgcagatttaatatcaggcggattcgcgtgcgcgcataatggaaatcttacaaatgcttcggctttaagagaaaagcttgttagtcgtggatcaatttttcaatctacatctgatactgaaacaattttgcaattagtagcgcagtctgagagaaaacaaatagttgataaacttatagatgctttatttcaaatacatggagcctattcacttgttattcttacaaataagaaacttattggtgtaagagatccttacggaataaggcctttagttcttggtgacttaaatggtgccccagttctagcttcagaaacatgcgctcttgatattattggtgcaaaatttgttagggaaattgaaaacggagaaataataataatttcagaaaaaggaatggaaagtattaaacctttcccaaaagttgctgaaagaccatgtatttttgagagaatctattt

SEQ ID NO: 239062 - DNA, 868 bp, Unknown
  Bacterial polypeptide expressing nucleotide sequence isolated from the Sargasso Sea
ttattgacaggaaatgttggtatgggtcatgtgagatatcccacagcgggcagttctaatctttcagaggcacagcctttttacgtaaactctcctttcgggatatgtctcgctcacaatggaaatttaacaaactatgatcaattagctaagtctctgatgattgaggatagaaggcatcttagtacccaatcagactcagaggtcattttaaatgtttttgcacatgaacttcaaaaaagactggatggagagatcacagcaaagagtattttcggagcaattgaggctgttcacgacagatgcagtggtggctatgcagtaattattatgattattggtttcggtattgtagcttttcgtgatccaaatggtataagaccgctgattctgggaaaaagaaaatcagagacaggtgaagattatatggtagcctcagagagtgttgctcttgatgttacacactttgatatagacagggacattttgccgggtgaaggtttaataatcgaaaacaacggcaagatacaaaataaaatttgttctcaaaagaactcatattcaccatgtatatttgaatttgtatattttgctagaccagattcaattattgataaattgtcagtatacaaggccagactaagaatgggcgaagaattagcaagtaaaatactatccgagagaccgaatcatgacattgatgttgttataccaatcccagatacaagccgaactgcggcatcccaagttgcatataatctgggggtaaaatacagggaaggttttataaagaatcgttatgtgggtagaacttttattatgccgggacaagaagagcgaaatgattcagtaagaagaaaactaaatc

SEQ ID NO: 239063 - DNA, 1019 bp, Unknown
  Bacterial polypeptide expressing nucleotide sequence isolated from the Sargasso Sea
cttaggattacacgctctacaacatcgtggtcaagaaggtgcaggaattgtttcatttgatggagaaaagtttcacggtgttagaaggccaggtcttgttggggatcactttaataaacaagaagtgataaataggctacagggtagtaatgcaattggtcacgttcgatattctacaactggcgactcaattttgaaaaatatccagccgttgtatgcagatttaatgtcaggtggatttgcgtgcgctcataatggaaatctcacaaatgcttcagctttaagagaaaaacttgttagtcgtggatcaatttttcaatctacatctgatactgaaacaattttacaattagtagcgcagtctgaaagaaaacaaatagttgataaacttatagatgctttatttcaaatccatggagcatattcacttgttattcttacaaacaagaaacttattggtgtaagagatccttatggaataaggcccttagttcttggtgacctaaatggagctccagttcttgcttcagaaacatgcgctcttgatattattggtgcaaaatttgtcagagaaattgaaaatggagaaataataataatttcagaaaaaggaatggaaagcattagacctttcccaaaagttgatgaaagaccgtgtatttttgagagaatttatttttctagacctgacagtatgttaggaggtaatacagtttattcttatagaaaaaatcttggaatagaattagcaaaagaacatcatgttgatgcagatacagttgtacctgtccctgactcaggagttccagctgctcttggctatgcgcagcagtcaaatatgccgtttgaactaggtataattagaaaccattacgttggaagaacatttatagagccatcccaaagtataagacaatttggtgttaagcttaaacacaatgctaatgtatcctacattaaaaataagaaaattattttaattgatgactcaattgtaagaggaaccacagctaaaaaaa

SEQ ID NO: 239064 - DNA, 1027 bp, Unknown
  Bacterial polypeptide expressing nucleotide sequence isolated from the Sargasso Sea
ggagataacttcaataataccaatatattatctcaacttccaggaaaaacagcaattggtcatgtaagatattctacgactggtgaatctaagccagaaaatttgcaaccattatatgcaaatttagcaattggtggttttgcatgtgcacataatggaaatttaactaatacatattcgattaaaaaaaagttggttgaaagtgggtctatttttcaaacatcttctgatacagaaattattttacaattagttgcgaggtctaagaagataaaacttgttgataagttaatagatgccctcaaacaaattaaaggtgcttattctcttataatacttactaacaaaaagctaattggagtaagagatccatttggtataaggcctttagttttaggtgaaaaagatggttctcctgttctagcctcagaaacttgtgctcttgatatgattggagccaaatacacaagagatgtagaaaatggtgagattattataattacagaaaatagtaccgaatcaatcaaaccttttaaaagagttcctgaaagaccttgtatttttgaaagaatttattttgcaagtccagatagtatagtaggtaagaagactgtatacacttacagaaaatctctaggagagcaattagcaaatgaaaatagtgttacggcagatgtagtagtacctatccctgactcaggtgtttctgctgcaataggtttttcacaaaaatcttctataccatttgaactgggcattataagaagtcattatgttgggcgaacatttatagaaccttcacaaacaataagacaatttggggttaagcttaaacatagcgttaataaatcttgcatagaaaataaaaaagttattctaattgatgattctatagttagagggactactgccagcaaaattgttaaaatggtctatgaagctggagcaaaagaagttcatttaggcatttcatgcccacctattaagcatcctgatttctatggcattgatacaccaaactataatg

SEQ ID NO: 239065 - DNA, 829 bp, Unknown
  Bacterial polypeptide expressing nucleotide sequence isolated from the Sargasso Sea
ttgagagaagagtgtggtgtgtttggtgttgccaaccatgaagattcttccgccttagttgctttaggtttacacgcattacaacatcgtggacaagaaggatgtggaatagtttcctacgatggaaaaaattatcattcagaaaaaagacaaggtttagtgggtgatcattttactaaaagtgatgttataaaaaaacttcctggaaaattttctataggacataacagatattcaacaacgggtgagacttctttgagaaatatccagccattttttgccgatcttcatatgggaggactaagtatagctcataacggaaatttaactaatgctttatctttaagagaaactttagttaaagatggagcaatctttagaacgactagtgatacagaaactatagttcaattaattgcaaaatccaaaagagagaaaatagttgacaaattaatagatactctttttcaaataaaaggaggctatgcattagttataatgactaacaagaaattaattggagcaagggaccctttcggaataaggcctttggtcataggtaaattaaaagaatcttttattttagcgtctgaaacatgcgctttagatattgttggagcgtcatttgtaagagaggttgataatggagaaattataatcgtagaaaacaacaaaattaacagtattaaaccttttccaaaacaaaaagcaagaccgtgtgtttttgaatatatttattttgccagacccgacagtattgtagacggaaaatgtgcttatgaatatcgaaaaaattttggaatacagcttgcaaaagagtcagatataa

SEQ ID NO: 239066 - DNA, 759 bp, Unknown
  Bacterial polypeptide expressing nucleotide sequence isolated from the Sargasso Sea
gatgaaaaagaatacaaagaagcaaaagaaaaagttcaagatatataacccgaagttaaaagaagagtgtggagtatttggtataagtaataatcctgacgcttcaactttaacagcgctaggtttacatgctctacaacacagaggtcaggaaggctgtgggatagtttcttttgatggaaaaaagtatcattcggaaaagagatttggattggttggtgataactttaataaagaaaaagtattaaaaaaactaccaggaaagtttgctattggacataatagatactcaacaacgggaggtacagctttaagaaatgttcaaccgttttttgcagataccaatgctggtggaattggtgtagcccataatggaaatttaactaacgcaataactataagaaataaattagttgaagaaggggctatattttacacaacatctgatacagaagttatagttcagttaatagcaaaatcaaaaagatcaaaaactattgataaaattgtcgatgcaatatttcatattcaaggtggatatgccttggtaatgatgacaaagaatacgcttataggattaagagatccttatggtattagaccacttgtaataggtaaattaaaaaattcatatgtatttgcatctgaaacatgtgctttagatattataggtgcaaaatttgttagagaagttgaaaatggagaaattgtttatgttgaagatgatgagctaaaaagtttaaaacctttttctccaca

SEQ ID NO: 239067 - DNA, 913 bp, Unknown
  Bacterial polypeptide expressing nucleotide sequence isolated from the Sargasso Sea
tcaaaagggctatgtgagagatgtctttcagcaaaaccatatgaacaatctccaaggtaatcttggcataggacatgttcgatatcccactgcaggcggaataggaaaggaatttgctcaacctatgtacgtgaatacaccttacggcataagcttagctcataatggtaatttaactaactcaaaaaaattagctgctgaattatttcatgctgagagacgtcatataaatacagattctgattcagaagtcttgcttaatatttttgctttagagctttccaagcaggaggctgtatttccaaaaccaaaagatttctttacagctgttgaaaagacacatttgagaatttatggtgcatatgcggtagtagccttgattactggatatggaattttagcctttagagatccccttggtattaggccattatcaattggtgtaagaaaaggaaaaaatagaaatgaatatgttgtatcttctgaaactgcacttttttcatcaactggttttaaatttttaagagatgttgagcctggcgaagctgtatttattgataatgcaggtaaaatcttttctcaacaatgttcaacctcttcccaaaaaaggccatgtatattcgagtatgtatatctcgctagacccgattcaacaattgatcaaatatcagtttataaatcgagaatgagaatgggtcttaagcttgcagaaagaataagaagtcttggtttagttgatgaaattgatgtagtaatacctattcctgatagctcaacaactgctgctttacaacttgcagcagatttaaaaaagccctatagacaagggtttgttaaaaacagatatattggtagaacattcatcatgcctcttcaagaagaaaggaaaaagtcagttagaagaaagcttaat

SEQ ID NO: 239068 - DNA, 856 bp, Unknown
  Bacterial polypeptide expressing nucleotide sequence isolated from the Sargasso Sea
gcaggcggtgctggcaaagagtttgctcaaccaatgtatgttaattctccatacggcattagtcttgctcacaatgggaacctaacaaactctaaagttcttgcgcgtgaattatttcatgctgaaatgcgtcacctcaatactgattcagactcagaagttctccttaatatctttgcccatgagctcggaaagcaaagagcaattcttccctctaaaaaacatttttttaaagcagtcagaaaaacacacatcaggtgtcaaggagcttatgcagtagttgctttgattactggttttgggctgcttgcctttagagatccgcgtggtattcgtccattagtaattggtgttaaagatgggccatctaaacaagaatatattgttgcatctgagaatgcttctttttctgctttaggttttaaaacattaagagatgtatatcctggagaggctgtgtatatagatgttgatggaaacttacatagtgatcagtgttctgaaaatgccgaaccaactccttgcatttttgaatatgtttatttagctagacctgattctattttagatgaaatttctgtgtacaaagcaagaatgagaatggggcagaagctggcaaaaaaaattcttaaactaaaccctgagcatgatatagatgttgtaattccaatacctgatagctccacaacagctgcgttacaacttgcagcagcattaaagcttccctatagacaaggctttgttaaaaataggtatgttggtagaacttttattatgccaaatcaggaagagagaaaaaaatcagttagacgcaagttaaatattttagaccttgagttaaaggaaaaaatgtact

SEQ ID NO: 239069 - DNA, 847 bp, Unknown
  Bacterial polypeptide expressing nucleotide sequence isolated from the Sargasso Sea
gaagaatgcggggtatttggaatttctaatcacatcgatgcttcagcacttgtagccttaggacttcatgctttacagcatagagggcaagagggatgtggaattgtatcatttgatggaaaaaattatcactctgaaaaaaggcaagggttagttggagatcattttactaattcagaaatcataaaaaaattacctggtaaatttgcgataggtcataatagatactcaactacaggtgaaacctcattaagaaatattcaaccattttttgctgacttacatatgggaggtttaagtgtagctcacaatgggaatctgactaatgcattacttttaagagaaagccttgttaaggatggagcaatatttaggactacgagtgatacagaaacaattgttcaactaattgcaaaatcaaaaaggattaaatttttagataaactaatcgatgcactttttcaaattcaaggaggatattcattgattctaatgacaaataaaaaattagtgggtgtgagggatccatttgggattaggccattagtaattggaaaattaaataactcttttatttttgcttcagaaacttgcgctttagatattgttggagcaaagtttttaagagaagtggaaaatggtgagatagtttttgttgaaaacgataaactggagagcataaaaccattcccaatacaaaaatcaagaccgtgtgtatttgaatatatttactttgcaagacccgatagtctaattggtgggaaatgtgcttacgagtacagaaaaaatttaggttcagaactagcaaaagaaacagatttaaaagcagattttgttgtacccgttc

SEQ ID NO: 239070 - DNA, 868 bp, Unknown
  Bacterial polypeptide expressing nucleotide sequence isolated from the Sargasso Sea
tgcaaaagaaaaagtttcaagatatatagtccaaaaataaaagaagaatgtggagtttttggaatcagtaattcatcagatgcttcgactttaacggctttgggacttcacgctttacaacatagaggtcaggaaggttgtggaatagtctcttttgatggcaaacaatatcactctgaaaaaagatatggattggttggtgataattttaataaagaaaaagtattaaaaaaattaccaggaaattatgcaattggtcataatagatattcaacaactggtggtacagctttaagaaatattcagccattttttgcagatactaatgctggtggaatcggagttgctcataatggaaatctaactaatgccataactctaagaaatgaattagttcaagaaggtgctattttttatacaacatcagatacagaagtcattgttcaattaattgctaagtcaaaaagatctaaaacaattgataagatagttgatgcaatatttcgtgttcaaggaggatatgcgttggtaatgatgacaaaaaatacacttataggattaagagatccttatggaattagacctttagtaataggaaaattaaaaaattcatatgtatttgcatcggaaacatgcgctttagatattataggtgcaaagtttgtgagagaagtagaaaatggagagattgtctatgtagaaaatgatgaactaataagtttaaaacctttttctccaaagaaagtaaggccatgtatttttgaatatatttatttctcaagaccagacagtattttaaatggtaaaactgcttacgaatatagaaaaaactatggagagcagttagctagagaagatgatttagaag

SEQ ID NO: 239071 - DNA, 689 bp, Unknown
  Bacterial polypeptide expressing nucleotide sequence isolated from the Sargasso Sea
gatgaaaaagaatacaaagaagcaaaagaaaaagttcaagatatatagcccgaagataaaagaagaatgtggggtatttggtataagcaacaatccagatgcttcaaccttaacagcattgggtttgcatgctctacaacacagaggccaagaaggctgtggaatagtttcttttgatggaaaaaagtatcattcagaaaagagatttggattggttggtgataactttaataaagaaaaagtattacaaaaactgccaggaaaatttgctattggtcataatagatattcaacaactgggggaacagctttaagaaatgttcaaccgttttttgcagataccaacgctggtggaattggtgtagcccataatggaaatttaactaacgcaataactataagaaataaattagttgaagaaggagctatattttatactacatctgatacagaagttatagttcagttaatagcaaaatcaaaaagatcaaaaactattgataaaattgtcgatgcaatatttcatattcaaggtggatatgccttggtaatgatgacaaagaatacgcttataggattaagagatccttatggtattagaccacttgtaataggtaaaataaaaaattcatatgtatttgcatctgaaacatgtgctttagatattataggtgcaaaatttgttagag

SEQ ID NO: 239072 - DNA, 1051 bp, Unknown
  Bacterial polypeptide expressing nucleotide sequence isolated from the Sargasso Sea
attgaagagctttgatccgaaactaaaagaagaatgtggagtatttggtattagtaacacaaatgatgcctctgctttaactgctcttggtcttcatgctttacaacatagaggtcaagaaggttgtggtattgttacttttgatggcaaaaattattactccgaaaaaagatttggattagtgggagataactttaataaagaaaaaatccttaataaacttcaaggaaattacgcaattggtcataataggtatagcacaactggaagtaatacattaagaaatattcagcctttttttgctgacacgaatgctggaggaattggagttgcacataatggaaacttaacaaactcaatttatttaagaaataaattagttgaggaaggtgcaattttttatacgacttcagatactgaaactattgtccagttaatagcaaaatcaaaaagaaaaaaaacaattgacaaagttgttgatgcaatatttcaaatccaaggtggttatgctttagtaatgcttacacaaaaatctttaattggtgtaagagatccatatggaattagaccattagtaattggtaaattaaaaaacagttatattcttgcatcagaaacttgtgcattagatatcattggagcgaagtttattagagaagttgaaaatggggaaatagttttaattgaaggtgataaattagaaagtattaaaccctttcctgctaaaaaagtaagaccttgtgtttttgagtacatatattttgcaagaccagatagtatcttaactgggaaaacagcctacgaacatagaaaaaatttaggaaaagaactcgcaaaagagaatgatattgatgcggacatcattgtgccagttccagatagtggtaatgcagctgcactaggattttctcaacacctaggtaaaaattttgagcatgggttaattagaaatcattatgttggtagaacttttatagaaccaagtcaaaaaatcagaagtcttggtgttaaattaaaattaaatgctaatcaaacaacaattaaagataaa

SEQ ID NO: 239073 - DNA, 895 bp, Unknown
  Bacterial polypeptide expressing nucleotide sequence isolated from the Sargasso Sea
attgtcggttgatccccgagttgttgatggggattctcttcgtgaggaatgcggtgttttcggaatattcgatcatgctgactcagctactttgaccacattaggattgcatgccttacagcacagagggcaggaggcagtaggtattgtaagttcagatggtaaacaattttatgctgagcgtcggttgggattagtaagtgaaaacttcactaaaccccggataatcgatcggctaaaaggtgggaatgcgattggccatgtgcgttattccactacgggtgatactattctccggaatgtccaaccgcttttcgccgatcttgccggaggaggatttgctttggctcacaatgggaatctaacaaacgctctttcacttagaaaagacctagagaaagccggtgcgatatttcaatctacttctgatacagagacggtactccaccttgtagcgcgcagtgaaaaaacaaagaccatagaccggtttgtggatgcgctagctcaggttgaaggggcatatgccttggtggggttaaccaataaaaaaatgatcggtgttcgcgaccctcttgggataaggccattggtgctcggcgagctggatggaagttatattttggcatcggaaacctgtgcattggatatcatcggggctaatttcattcgggaaatagaaaatggtgaggtggttgttattaccaaacgcggactaaagagttatcatccgtttccgaaaaagaaagttcggcactgtattttcgaatacatttacttcgctcggcccgacagcatcgtgggtgggcatagtgtctatgaatgtcgaaaaagccttggacgggaactggcaaaggagagtcatgttgaggctgatatgatcattcccggtgccgga

SEQ ID NO: 239074 - DNA, 1492 bp, Unknown
  Bacterial polypeptide expressing nucleotide sequence isolated from the Sargasso Sea
aatgtgtggaatagttggaatttcagctgaatctaatgtagcagctgaaatatacgatgctcttttaatgcttcagcatagaggtcaagatgctgcaggcatcactgtatgtaatagtgacgataaattaagtacaagaaaatcaaaaggatatgtgagagatgtttttgctcaaagacatatggaaaagcttattggtgactatggaataggacacgttagatatccaacagcaggaggtgcaggtaaggaattttctcaaccatattatgtcaattcaccatatggtattagtcttgctcacaatggtaatttaacaaactcaaaacagcttgcaaatgaattgtttcatgctgaaatgagacatcttaaaactgactcagactctgaagttttactaaatatttttgcacatgagttagcaaaacagagagaaatatatccatcagcagaaaatatatttaaagctgtttcaaagacgcatctcagatgtgacggcgcatatgctgttcttgcattaatagctgggcacggtttagtagcctttagagataataatggaattagacctttatcaataggaataagaaaaggtaagacaagagatgaatatgtaatttcatctgaagacgcattattttcatcgcatggttttaaaaaattaagagatgttgagcctggcgaagcaatttttattgataaaaatggagaactcttctcgcagcaatgtgcagatgagccaaaaaaaagaccatgcattttcgaatatgtttatttctctagaccagattctaaaattgatgaaatatcagtctacaaggcaagaacgagaatgggcacaaggctagcttctcaaattaaaaactcaaaaccagatcatgatattgatgtagttattccaattccagatagttcagtaactgcagctcatcaattagcagttgatttagatgttccctatagagagggttttgttaagaatagatatattggaagaacatttataatgccttatcaagaagaaagaaaaaaatcagttagaagaaaattaaatattttagatttagaatttgttggcaagaatgttttgttggtagatgactcaattgtaagaggaacaactagtaaaaaaataattgaaatggcacgagaagcaggagctaataaagtttatttcgcttcggccgctccagctataaaatatcaaaatttatatggtattgatatgcctgcaacatctgaacttattgcttcaaataagtctgatgaagatgttgcaaaagaaattaatgcagattggttaatttatcaaaagcttgatgatcttatagaatctgtaaaagaaggtaatcctgaaatagaggaatttgaaacttctatttttactggtgaatacatgacacctttggttgagaattatctagaagatcttgaaaatactagaaaagatgaacttaagatgcaaagagagaaatctacagcaagcggctaa

SEQ ID NO: 239075 - DNA, 859 bp, Unknown
  Bacterial polypeptide expressing nucleotide sequence isolated from the Sargasso Sea
tttgcccggtgaaggtttaataatcaaaaacaacggcaagatacaaaataaaatttgctctcaaaataactcatattcaccatgtatatttgaatttgtatatttcgctagaccagattccattattgataaattgtcagtatacaaggccagactaagaatgggcgaggaattagcaagtaaaatactatccgagaaaccgaatcatgacattgatgttgttataccaatcccggatacaagccgaactgcggcatcccaagttgcatataatcttggggtaaaatacagggaaggttttataaagaatcgttatgtgggcagaacttttattatgcctgggcaagaagagcgacatgattcagtaagaagaaaactaaatccaattgatttggaatttagaggaaagaatgtattgctggttgatgattcaattgtaagaggcactacctctaaacagataatcaatttggcaagaaatgcaggagcaaaaaaagtatattttgcttctgcggcacctcctgttaaatatcctaatgtatatggtattgatatggcagcagcctcagaattaattgcaagtaaaaagactgttgaccaaattaaagaagagattggtgcagattggctcttttatcaggaccttgaagctctcataagagcagtaagtcatgataattcagatatcactggctttgatacatcctgcttttcaggtgagtacataactaatgatgtatctgaggaatatctgaaaaaaatagagtcaataagaaatgatcaagccaaacaaaaaaaagaggcagatatgtctcaagactcagacgtatcaaaagcagatagaatagcctccctctga

SEQ ID NO: 239076 - DNA, 935 bp, Unknown
  Bacterial polypeptide expressing nucleotide sequence isolated from the Sargasso Sea
attgaagaactttgatccaaaattaaaagaagaatgtggggtgtttggcattagtaatacgaaagatgcctctgctttaactgcacttggattacatgctttacaacatcgaggacaagaaggttgtggaattgttagttttgatggtgagaaatattattctgaaaaacgatttggtttagttggagacaactttaataaagaaaaagttttaaataatttaaaaggtaattacgctataggtcataatcgatatagtacaactggtaataatactttacgaaatatccaacctttttttgctgatactaatgcaggaggaattggagtttcacacaatggaaatttaaccaattcaatttctttaagaaaaaaactagttgaggaaggagctattttttataccacttcagatactgaaactattgtgcaattaattgcaaaatcaaagagatcgaaaactatcgataaagtaattgatgcaatttttcaaatacaaggtggatatgctttagtaatgctcactcaaaactctcttattggggtaagagatccatatggcattagacctttgttaattggtaaattgggaagtagttatgtactagcgtcagaaacatgtgcattagatattattggtgcaaactttgttagagaagttgaaaatggcgaaattgttttaattgaaaataatcaactgactagcatcaagccctttcctcctaaaagagtaaggccatgcgttttcgaatatatctactttgcaagacctgacagtttattagataataaaactgcttatgaacatcgaaaaaatttaggaaaagaacttgcaagagaaaacgatattgatgctgatatcgtagtaccagttccagactctggtaatgcagcagcgttaggattttcccaaaaacataaaatgaactttgaac

SEQ ID NO: 239077 - DNA, 1276 bp, Unknown
  Bacterial polypeptide expressing nucleotide sequence isolated from the Sargasso Sea
ggcctggtcagccaggtgtttgaccaggacgtgctggcccgcatgcctggagaactggccatcgggcacaaccgctactccacaacgggcagcagtcgggtgtgcaatgcccaacctgtggtgctgatgacgcggctgggggcctttgctctggcccacaacggcaacctggtgaatgcccgcgaattgcgggagttggtggacgacggacaggcggagttcacctcaacaacggattctgaactgatcgccttcgccgtgcagcaggcggtggatcgtgggctcgactggtcacctgccatcgaggccgcgctcaagctgtgtcggggtgcgttcagccttgccatcggaacgccggatggtctgtttgctgtacgcgacggtcatggcatccgtcctttggtgttcggcacgctgggggatccagtcactggtcattgggtggtgagcagtgagacctgtggcttggagatcatcggcgcccggtatgtcgatgatgtccagcccggtgaattggtccggtttgaactcggatcagcagagcctcagcgccggcgttggagtgaggaaccgaaccgcctgtgcgtgttcgagatgatttatttcgccaggccggacagtcagttcttcggcgagtccctctacagctaccgccagcgcattggacgaactctggctcgagagtcgtgcgtggaggctgatctggtgatcggtgttcccgattccggcattcctgcagccatcggtttttcccaggaaagcggcattccctacggcgatggtctgatcaagaaccgttatgtcggccgtacgttcatccagccgacccaggcgatgcgggaagcgggcattcgggtgaaactcaaccccctgccggatgtgctggccggaaagcgcttgatcgtgattgatgactcaatcgtgcgtggcaccaccagccgcaaattggtggtggcgttacgtgatgccggtgccactgaggtgcacatgcggatcagttcgcctccggtgacgcatccctgcttctacgggattgacaccgacacccaggatcaactgatcgccgctcagatgacccttgagcagatcaaggatcacctcaaagtggattctctggcttacctcagcaaggaaggaatgctcgaggctgcgaaggctgagtccggccatttctgcagcgcctgttttgacgggcagtacccgatccccatggatcagacgttgctgtccagcaaattgatgatggagcccgcggggattgccgcgacgtcttgat

SEQ ID NO: 239078 - DNA, 1465 bp, Unknown
  Bacterial polypeptide expressing nucleotide sequence isolated from the Sargasso Sea
atgctaaagaaaaagttcaagaactttaacactaaaataaaagaggagtgtggtgtatttggaataagtaataataatgatgctgcagcccttactgctttaggattacatgcacttcagcacagaggacaagaaggatgtggaattgtatcttttgatggaaaaaaatatcactctgaaaaaagatttggattagttggtgataactttaataaagaaaaagtattaaaaaaattatctggaaattatgcagttggacataatagatatagcacaacaggtggaacaacattaagaaatattcaacctttttatgcagataccaatgctggtggtataagcatatctcataatggaaatctaacaaacgcaattacattaaggtcaaaattagtcaaagatggagctatcttttataccacatctgatacagaaacaattgtccaattaattgcaaaatcaaaaagacaaaaaactattgataaaataatagatgctttatttcaaatacaaggcggatatgcacttgtaatgcttacacaaaagactctaatcggtgtaagagacccatttggaataagacctttggttattggaaaaattaaaaattcttatgttctagcatctgaaacttgtgcattagatataataggagctaaatatataagagatgttgaaaatggtgaaatagtttttattgaagatgataagttagaaagtataaaaccttttcctaaaaaaaaacagagaccatgtgtatttgaatacatatatttttcacgaccagacagtattttaaatggaaaatctgcgtatgaatatagaaagaattttggaatacatttagcaaaagaagataatatagatggtgatgttatagttccagtcccagactctggtaatgctgctgctttaggttatagtcaacaatctaaaataaattttgaattaggcctcataagaaatcattatgtaggaagaacatttattgaaccatctcaaaaaattagaagtttaggtgtaaaattaaaattaaatcctaatcaaacatcaattttaaataagagaataatcttagtcgatgactcattagtaagaggcacaacaagttataaaatagtaaaaatgctatatgatgctggagcaaaggaagttcatgtaagaatagcttgtcctgaaataaaatatccggatttttatggagtggacacaccaacaaaaaaagaattattggctgcaaataagtcaaacaatgaaatttgtaaatatattggagcaaaaagtttaaaatttttatcaatcgatggtctttataatgctatgggttttgaaagtagaaataataattatccacagctgactgatcatcattttactggtgattatcctgtaaaaccaattgacgatcttggggatgataaaattactcaactttcattattaagcacaggatcagataattaaa

SEQ ID NO: 239079 - DNA, 1462 bp, Unknown
  Bacterial polypeptide expressing nucleotide sequence isolated from the Sargasso Sea
tatgtgcggaatagttggaatcgtttcttcaaatgatgtaaatcaacaaatttacgatagtcttttgcttttgcagcatagaggtcaagactcaacaggtatagcaacaatggaaaatactgtttttcatatacataaggttaaaggtcaggttaatactgcttatagaactagagatatgaggaatttaattggcaaaattggattgggtcatgttaggtatgcaacaaagggatcagcagaaagtgtagaagaagcacagcctttttatgttaatgctccttatggaattgttttgatacataatggaaatttgactaataccagagatttagaaaaacagttatttaatgttgacaagcggcatacaaattcttcaagtgatactgaaatgttgttaaatgtatttgcgacagaattacaagaacaaattaataatcaagaattagaacctgatattatttttaatgcggttaaatctttacataaaagaattcagggttcatatgcttcaattgcgttaatttcaggacatggtttattagcatttagagatccttttggtattaggcctttagtcatagggaaaagactttcattaaccacaaaaaaagaagaatggatggttgcaagcgaatctttagtacttgagaataatgattatgaagtagtgagagatgtagatccaggagaagctgtttttataaatcttgatggggagtttttctctaagcaatgttctgaaaatccaatgttatttccctgtgcttttgaatatgtttacttagctaggccagattcaattatgaatggaatttcagtctataaagctcgtttaaagatgggagattatttagcagaaacaataaaagaaacaatcaattctggagatattgatgtagttatgcctattcctgattcttctcgacccgcggcaatgcaagttgcaagacagttagggatagaatatagggaaggtttttttaaaaatagatatgttggcagaacattcataatgcctggtcagcagaaacgtaagaaatctgtaaggcaaaaattaaatgccatgagtgcagagtttaaaaataaaaatgtattaattgttgatgactcgatagtaagaggtactacttcaaaagaaattgtccagatggctaaagatgcaggagcaaataaagttttttttacatcagcagctcctcctgttcgttatcctcacgtttatggaattaatatgcctaatagagatgaattaatagctcataataggacaataagtgaaatcgccgataaacttgaaattgataaccttgtttatcaaagtgttgaaagtttgcgtaaatctataattggtgattctcctattaaaggtttagagatgagttgttttactggtgattatgtaactggaacagtaaatcaagaatacttaaattgggttgaaaatgaatataaatcttag

SEQ ID NO: 239080 - DNA, 1510 bp, Unknown
  Bacterial polypeptide expressing nucleotide sequence isolated from the Sargasso Sea
aatgtgcggtatagttgctgtttttggttctaataatgtcgttcatgacatatatgagtccttgactgttcttcagcatcgaggtcaggatgcatcgggtattttaacaaatcacaatggtaagattctactaagaaagtcgctaggtttagtgcgtgatggattcgacaggaagcatattgaccgattaagaggacatcttggtattggtcatgttagatatcctacagcaggccatgcagagagttctgctgaagcacaacctttttatgtcaactcaccttatggaattggtctagcacataacggtaatctaataaattctagtgaacttaaaataaatctgtttaatgaggataaaagacacattaatacgagatcagactctgagattcttttaaatatttttgcacatgaattagatttacatagcaaagatgaattttcaccagatgatgttttttatgctgttgctggagttcatcgaagagtcagaggtgcctatgcagttgtatcattaatatctgaaagagggatagtcgcttttagagatccaaatggcattagaccattatgctatggaactcgtacaacaggcggcaagcctgaagtaatgatagcgtcagaatcagtagcacttgattcttgtggatacgaattagtcagtgatattttacctggtgaggcaatatttatcgatatggatggaaatattcataaacgcatatgtgcggaaacaacaaattatacaccatgtatttttgagtatgtctattttgcgaggccagatactattatagatggtatttccgtatactcagcaagaatgaaaatgggtgaatcactagcagataaaatactccaggagtggaatgatcatgatatagatgtcgttataccaatcccggacaccagcagaatttctgcgctagaattatcaatgaaacttggcgttccttacagagaaggatttataaaaaataggtacattggaagaacatttattatgccagagcagtcacaaagaataaaatctgttaaaagaaaactcaacgcaattaatactgaatttgcaggtaaaaacgtattactagtagatgattcaattgtaagaggaaccacatctaagcaaattatagaaatggctagagaggctggcgcatcaagagtttatatggcatctgctgctccacctgtcaaacatgctaatgtttacggcattgatatgcctgcgagtaatgaatttgctgctgatgggagatcaaccaatgaaattgcggagttgattaatgcggataagttgttttatcaagatttggaagatttagtaaaatctgtatatcaggaaaattctgatattaaaaactttgattcttcttgtttcgatggaagatatgttactggtgacgtcactaaagaatatcttgaagaattggatgaacttaggaataatgcatcgaaacttagagaaaatataaccgagttaggtgatgatataatggtctattaa

SEQ ID NO: 239081 - DNA, 1429 bp, Unknown
  Bacterial polypeptide expressing nucleotide sequence isolated from the Sargasso Sea
attgaaagaagaatgtggtgtattcggtatttgtagtgctaaggatgctgctgcattaactgctcttggtcttcatgctttacaacacagaggacaagaaggatgtggaattgtttcatttgatggaaaaaaatattattcagaaaaaagatttgggttagttggtgacaactttaataaagaaaaagttcttaataatttaaagggtagttatgcaattggtcacaatcgttatagtacaactggtaataatactcttagaaatattcagcctttttttgctgacacaaatgcaggtggtattggtgtagctcataatggaaacttaacaaattcaatttcactcagaaataagttagttgaagatggagctattttttatactacttcagatactgaaacaattgtgcaactaattgctaaatctaaaagaccaaaaacaatagataaagttgttgatgctatatttcaaatacaaggcggttatgctttggtaatgttgactcagagctctttaattggagtaagagatccttatggaattagaccactggttataggtaaattaggaagtagctatgtattagcatctgaaacatgtgctttagatatcattggtgcaaagtttttaagagaagtagaaaatggagaaattgttttaatagaaaacaatgaattgaaaagtatcaagcccttcccccaaaaaaaagtcagaccatgtgtttttgaatatatttattttgctagaccagatagcctgatagataataaaactgcttatgaacacagaaaaaacttaggaaaagaacttgctaaagaaaatgatattaaagctgatataatagttccagtgccagactcaggaaatgctgcagctttaggatttgcacaaaatttaaatattaattttgaacatggtttaatcagaaatcactatgttggcagaacttttatcgaaccaagccaaaaaattagaagtttaggtgttaaacttaaattaaatgcgaatgaaactacaattaaaaataagaagataattcttattgatgactctcttgtgagaggaactacatcacacaagattgtaaaaatgttatatgatgctggagcaaaagaagttcatgtaagaatagcttgccctgaaataagatatccagatttttatggagttgatacacccacaaaaaaagaattacttgcagcaaataaatcgaatgatgaaataagagagtatatcggtgccaaatctctaaagtttttatcaatagatggtttgtatagagctattggttttgataaaagaaatgaaacttatccacaactaacagatcattattttacaggggattatccagtaaaaccagttgatgaattaggtgacagtaaaataacacaattatcattattaagcacagcatcaaacaactaa

SEQ ID NO: 239082 - DNA, 1150 bp, Unknown
  Bacterial polypeptide expressing nucleotide sequence isolated from the Sargasso Sea
aatgtgtggaatagtaggtatttctgctgagtcaaatgtagctgcagaaatatatgattctttacttatgttgcagcatagaggtcaagatgctgctggcatgaccgtatgtaataaagacgatagattaaatacaagaaagtctatgggttacgttcgagatgtatttcaacaagtccatatggataagcttatcggtaattatggtattggacatgttagatatcctacagcaggtggagctggcaaggaatttgctcagcccatgtatgtcaattctccatacggcataagtctagctcataatggaaaccttactaactcaaaacaattatctaatgagctatttcatgctgaaatgcgacatcttataactgattcagactcagaagttttattaaatatctttgcacatgaacttggtaagcaaagagaaatatatccctcagctgagcacatttttaaagctgtaactaaaactcatattagatgtgacggagcttatgcagtgcttgcgcttattactggtcatggaattctggcatttagggataataatggaataagacctttatcaattggaattagacaaggtgagtcgagagatgaatatattgttgcttctgaagattctctctttattccattgggttttaaaaagttaagagatattgatccgggagaggcagtatttattgataaagagggtaatttattttcacaacagtgttctgaaaatcctctaaaaagaccatgtatttttgaatatgtttatttctctagaccggattcaaagatagatgaaatatctgtgtataaagcaagaatgagaatgggatcaaaacttgctaatcaaattaaagaaatcaaccctaatcatgatatcgatgttgtgatacctattccagacagttctactactgcagcacaccaattagctgttgatcttggagtgccgtatcgagaaggatttgtaaaaaatagatatattggcagaacattcataatgccctatcaagaagaaagaaaaaaatctgtaagaaggaaattaaatattttagatttagagtttcaaggaaaaaatgttttattagttgatgactcaattgtaagaggaacgactagtaaaaaaattatcgaaatggcaagg

SEQ ID NO: 239083 - DNA, 1464 bp, Unknown
  Bacterial polypeptide expressing nucleotide sequence isolated from the Sargasso Sea
aagattttcctgataaaaaagaatatgaagaaactaaagaaaaagttcaagatatatgatcctaaaattaaggaagagtgtgcggtttttggaataagtaattctactgatgcttctacacttgcagctttaggtctgcatgccctacaacatagagggcaagaaggctgtggtattgtttcatacgatggagaaaaatatcattcagaaaaaagatttgggttagttggtgataactttaacgatgaaaaagttttaaaaaaacttcctggaaaatacgcaattggtcataatcgctactcaacgacaggtggaactgctttaaggaatgtgcaacctttttttgctgatacaaatgcaggtggtattggtgttgcacataatggtaatcttacaaatgctataactttaaggaataaattagttcaggatggtgctatattttatacaacttctgacactgaaaccattgttcaattaattgcaaaatcaaaaagaggaaaaacgatagataaaatcatagatgctatatttcaaattcaaggtggttatgcgcttgtaatgatgacacaaaatattctaataggtgtaagagatccctacggaattagaccgttagtaattggtaaattgaaaaactcatatgtatttgcctctgaaacatgtgcgtttgatattattggagcaaaatttgtaagagaagttgaaaatggagaaattgtttatattgaaaatgatgagttaaaaagtattaaaccatttccaccaaaaaagatcagaccttgtgtgtttgaatatatttatttctctaggccagatagtattttaaatggcaaaactgcttatgaatatagaaaaaactttggcttacagttagcgaaagaagataaaatagaagcagatctagttgtgcctgttccagactctgggaacgccgcagcattaggatatgctgaagaaaaaggtctaaaatttgatttaggtttaattagaaaccattatgttgggaggacttttattgaaccatctcaacaaattagaagtttaggagttaagttaaaattaaatccgaatatttctgtgattaaagataaaagaataattctagttgatgactcacttgttagaggcactacatcttcaaaaatagtgaagatgttatacgattctggagcaaaagaagttcatgtgagaatagcaagtcccgaaattaaatttcctgatttttatggtgttgatacaccaacaaaaaaagaacttttagcagcaaacaaatccacagctgaaatttgtgaattcataaaagcaaaatcactaaaattcttaagtttgaatggtttatatttaggaatgggatttgaaaaaagaaatgaaaattatcctcaattaactgatcatcacttcacaggtgaataccccgtgaagataattgatgagctaggtgaagataaagtaacccaactt

SEQ ID NO: 239084 - DNA, 1471 bp, Unknown
  Bacterial polypeptide expressing nucleotide sequence isolated from the Sargasso Sea
tatgaagaaactaaagaaaaagttcaagatatatgatcctaagataaaggaagagtgtgcggtatttggaataagtaattccactgatgcctctacccttgccgctttgggtcttcatgcacttcaacatagaggtcaagaaggttgtggtattgtttcatatgatggagaaaaatatcattcagaaaaaagatttggattagttggtgataattttaacgatgaaaaagttttaaaaaaacttcccggaaaatatgcaatcggtcataatcgctactcaacaacgggaggaactgctttaagaaatgtacaacccttttttgctgatacaaatgcaggcggtattggtgttgctcataatggtaatcttacaaacgctataacattaagaaacaagctagtacaggatggagcgatattttatacaacatcggatactgaaaccattgttcaattaattgctaaatcaaaaagaggaaaaacgatagataaaatcatagatgctatatttcaaattcaaggtggttatgcgcttgtgatgatgacacaaaatacactaataggtgtaagagatccgtacggaattagaccgttagtaattggtaaattaaaaaactcatatgtattggcctctgaaacatgtgcatttgatattataggagcaaaatttgtaagagaagttgaaaatggagaaattgtttatattgaaaacgatgagttaaaaagtattaaaccatttccaccaaaaaagataagaccttgtgtatttgaatacatttatttctctagaccagatagtattttaaatggtaagactgcatatgaatatagaaaaaactttggctcacagttagcaaaagaagatgaaatagaagctgatctagttgtgcctgtcccagactcagggaacgctgcagcactcggatatgctgaagaaaaaggtctaaaattcgacctgggtttaattcgaaaccattatgttggtaggacttttattgagccctctcaacaaattagaagtttgggagttaagttaaaattaaacccaaatatttctgtaattaaaaataaaagaataattctagttgatgactcgctcgttagaggaactacatcctcaaaaatagtgaagatgttatacgattctggagcaaaagaagttcatgtgagaatagcaagtcccgaaattaagtttcctgatttttatggagttgatacaccaacaaaaaaagagcttttagcagcaaacaaatctacagctgaaatatgtgaatttataaaggcaaaatcattaaagttcctaagtttgaatggtttatatttaggaatgggatttgaaaaaagaaatgaaaattatccacaattaacagatcatcattttactggggaataccctgtgaaaataatagatgagcttggcgaagataaagtaacccaactttctttattgagtacagcatcaaataattaa

SEQ ID NO: 239085 - DNA, 1453 bp, Unknown
  Bacterial polypeptide expressing nucleotide sequence isolated from the Sargasso Sea
aatggaatatattaatacttcagaagataagcttcatgaagaatgcggtgtattcggtatatttggaagcccagacgcttccacacttactgccttaggattgcatgccctacaacatcgtggtcaagaaggtgcaggaattgtttcatttgatggagaaaagtttcacggcgttagaagaccaggacttgttggagatcactttaataaacaagaggtaattgataggctaaagggcagcaatgctattggtcatgtaagatattcaacaactggagactcaattttaaaaaatattcagccattgtatgcagatttaatgtcaggcggctttgcatgtgcgcataatggaaacctcacaaatgcttcagctttaagagaaaaacttgttagtcgtggatcaatttttcaatctacatctgatactgaaacaattttgcaattagtagcgcagtctgagagaaagcaaatagttgataaacttatagatgctttatttcaaattcatggagcctattcacttgtaattcttacaaacaagaaacttattggtgtaagagatccttatggaataagacctttagttcttggtgaccttaatggggccccagttctagcttcagaaacatgtgctcttgatattattggtgcaaaatttgtcagagaaattgaaaatggagaaataataataatttcagaaaaagggatggaaagcattagacctttcccaaaagttgcagaaagaccatgtatttttgagagaatttatttttctcgacctgacagtatgttaggaggtaacacagtttattcttatagaaaaaatcttggaatagaattagcaaaagaacatcaagttgatgcagatatagttgtacctgttcctgactcaggggttccagccgctcttggctatgctcagcagtcaagcacgccatttgaacttggtataattagaaaccactatgttggaagaacatttattgagccatcccaaagtattagacaatttggcgtaaaactaaaacataatgctaatgtttcgtatattaaaaataaaaaagttattttaattgatgactcaattgtgagaggaactacagctaaaaaaattattaaaatgatttatgatgcaggtgcaaaagaagtacatttgggtatagcatgtcctccgataaaacatcctgatttctatggtatagatacacctgattataatgaacttattgcgtcaaaaaacagtattgaagagattaataaagctattggatctaaatctttatttttcttatcattagaaggcacttatcaagctatgggttatgactctagaaatcccgatcaacctcaatttactgatcattgttttacaggcgagtaccctacaagtttgattgatcgtgaaaagggcaatatatcaaaacagttttctcttttaacagaaaaaaactaa

SEQ ID NO: 239086 - DNA, 1489 bp, Unknown
  Bacterial polypeptide expressing nucleotide sequence isolated from the Sargasso Sea
atgaaaaatcgacaaaatttcctaaaaaaattcgaggtaaggcaatctcatgttcccagatttaatgaggagtgtggagtttttggaataagtggaactaaagatgctgcagccttaacagctcttggtttacatgccttacagcatcgtggtcaagaaggttgtggaattgtaagttatgatggtaactcttatcattcagaaagaaaatttggattggttggagataattttacaaaaaaacaatcactagaaaaattaaaaggaaaaattgcaatcgggcacaatcgttattcgacaacaggtggtgagactataagaaacatacaacctttttatgcggaccttcatggaggagcgattagtattgctcacaatggtaatttaacaaatgcacttttgcttcgtgagcaaatggtacgtgaaggggcaatatttcaaacaacatcagatactgaaactattgtccaacttgttgctcgttcaaaaaagaaagatattctaaataaaatcattgatgctttaatgcaaattcaaggtggttacgctttatcaattgttgctaatggtacactgattggcgcaagagatcctttaggtattcgcccacttgttttaggtaaatttaaaaatgcatttatccttgcttctgaaacttgcgctttagatattattggtgcaaaatttattcgcgaaattgaaaatggtgaagttgtaataattaaagataataaagttgagagcagaagaccattcccaaaaaaaaaaattaaaccatgtgtttttgaatatatttatttttcgcgaccagatagtattttaaaaaacaaaactgcctatgaatacagaaaaaatttaggaacgtacttagcaaaagaaactgatattaaacctgatgtagttgtaccagttccagactctggtgttcctgctgcacttggctttagtcaagaatctggtattccttttgagttaggattaattcgaaatcattatgtgggtaggacatttattgaaccaactcagcaaattagaagtttaggtgtaaagttaaaacttaatcctaaccaaagttctattaaaaataagaaagttgttttaattgacgactcactggttcgaggaacaacatccactaagataataaaaatgctctatgattttggagcaaaagaagtgcatatgcgtattgcttcaccagccattagatatcccgatttttacggagtcgatactccgacccaagaagaattattggcagcaaataaaaatgtagaggaaatgcgtaaatatattggagctaaatcattaaaatttttatcattagatggtttgtataaagctcttggatatgatggtagggataatgataatcctcaattcacagatcattatttcacaggagagtatcctattaggcctttagattacttgaacgacgaaagtttaaaaaaactatcatttttaagtcttgcttcaaataactaat

SEQ ID NO: 239087 - DNA, 1450 bp, Unknown
  Bacterial polypeptide expressing nucleotide sequence isolated from the Sargasso Sea
attgaagacttttgatccaaaattaaaagaagaatgtggggtatttgtatttagtaatgcaaaagacgcctctgctttaactgcacttggattacatgctttacaacatcgaggacaagaaggttgtggtattgttagttttgatggtgaaaaatattattctgaaaagcgatttggtttagttggagacaactttaataaagaaaaagttttaaataatttaaaaggtaattacgctataggtcataatcgatatagtacaactggtaataatactttacgaaatatccaacctttttttgctgatactaatgcaggaggaattggagtttcacacaatggaaatttaaccaattcaatttctttaagaaaaaaactagttgaggaaggagctattttttataccacttcagatactgaaactattgtgcaattaattgcaaaatcaaagagatcgaaaactatcgataaagtaattgatgcaatttttcaaatacaaggtggatatgctttagtaatgctcactcaaaactctcttattggggtaagagatccatatggcattagacctttgttaattggtaaattgggaagtagttatgtactagcgtcagaaacatgtgcattagatattattggtgcaaactttgttagagaagttgaaaatggcgaaattgttttaattgaaaataatcaactgactagcatcaagccctttcctcctaaaaaagtaaggccatgcgttttcgaatatatctactttgcaagacctgacagtttattagataataaaactgcttatgaacatcgaaaaaatttaggaaaagaacttgcaaaagaaaacgatattgatgctgatattgtagtaccagttccagactctggtaatgcagcagcgttaggattttcccaaaagcataaaatgaactttgaacatggtttgataagaaatcattacgtaggtcgaacttttattgaaccaagccaaaaaattagaagtttaggtgttaagcttaaattaaatgcaaaccaaactactattaaaaataaaaaaattattttaattgatgactcgcttgtcagaggaactacttctcataaaatagtaaaaatgttatatgatgcaggtgcaaaagaagttcatgttagaatagcttgtcctgaaattagatatcctgatttttatggcgtggatactccaactaaaaaagaattattggctgcaaataaaacgaatgatgaaatttgtgaatatattggcgctaaatcattaaaatttttgtctattgatggtttgtatagagctattggttttgataagcgaaatgatacttaccctcaattaaccgatcattattttacaggagattatcctgttaaaccagttgacgagctaggggatagtaaaataacacaattatctttgttaagcactgcctcgaacaactag

SEQ ID NO: 239088 - DNA, 1507 bp, Unknown
  Bacterial polypeptide expressing nucleotide sequence isolated from the Sargasso Sea
atgtgcgggatagtagctgtttacggaaccaacaatgtagttcgcgatatatatgaatcgttaactgtattgcaacatcgcggccaagatgcctcaggcatcctaacaaatcacgacggcaaaattactttacgaaaatcgttaggtttggttagagacggatttgatgctaaacatatcactagattaaaaggtaagctaggaattggacatgtgagatacccaactgctggacatgcagatagttctgcagaggctcagccattttatgttaattcaccatatgggattggtttagcacataatggaaatctcattaactcaactgatttaaagaaaaatttattttcagaagatcttagacatataaatacaaaatctgactcagaaatacttttaaacatatttgcacatgagctacatttacacagcaaagaatcatttactccggatgatgtcttttatgctgttgctggcgtacatagaagagtcaagggtgcatatgcagtggtaacactgatatctgacagaggtattgttgcattcagagatccaatgggaattagacctttatgttttggaacaagagttgttgatggaaagacagagacaatgattgcgtcagaatcagttgcgttagatacagctggttttaaacttgaacgagatatttcaccaggtgaggctatatttatagatatagatggtaaaatacatactagactttgcacagagaaatccggttactctccatgtatttttgagtttgtttattttgctagaccagacactattatagatggtatatctgtctattcagctagaatgaaaatgggacagaatctagcaaaaaaaataatgactcaatggaaagatcatgacatagatgttgtgataccaattccagatactagcaggatatctgcattagaattatccatctcactgaaagttccttatagagaaggttttattaaaaatagatatataggaagaacgtttatcatgccagaacaggaacagcgagaaaaatctgttaaaagaaaattaaatgcaattgcttcagagtttaaagacaagaatgttttattagttgatgattcaatagttagaggcacaacatctaagcaaattatagatatggctagagatgctggagctaaaagagtttatatggcatccgcagctcctcctgttaaataccctaatgtatatggaatagatatgccagcaagccatgaatttgctgctgatggtagaactgaaatagaaatatcaaagttaataggtgcggataagttattctatcaaaaccttgaagatttaatttcagcggtaaaagataaaaattcacctgttaaaacctttgattcgtcatgttttgatggaaattatgttacagggaatgttacagaagaatatttaaatgaacttgatgatcttagaaatgatgttgcaaaaaagaaagataatatggatgctcatgatgatgtaatggtgtattagc

SEQ ID NO: 239089 - DNA, 1528 bp, Unknown
  Bacterial polypeptide expressing nucleotide sequence isolated from the Sargasso Sea
atgtgtggtatcgttggaatagtcggaacgtctcctgtgaatcaggcgatatatgatggcttaactgttttgcagcatcgtgggcaagacgccgcgggaataattaccattgaaaataatacgtttagcttacgtaaagcaaacggcctagtgaaagatgtatttcacacacgtcacatgaagcgactacaaggtaccattggtattggccatgtacgttatccaacagcaggctcttctagttcatctgaggcacagcctttttatgtaaactcaccatttggtatcgcccttgcgcataatggaaaccttacaaatgctgaagaactaaaagaacagttattttcagaagcacgtcgacatgttaatacaacgtctgattctgagatattgctgaatattatggcacatgagcttagtcgctcagacaagttgcatctggaccctgaagatgtgtttacagccgttgctgaggtaaacaaaaaagtaacgggtggctatgcagccattgctatgattatcggtcacggtgttgtagcgtttcgtgatcctaacggtattcgccctcttgtttttggtaaacgcgagactgaaaaaggcacagagtacatgtttgcctcagaaagtgtggcactaaaacctgatggctttgagtttattcgcgatgtagccccaggtgaagctatttttgtgacggaagatggacagtttcactcattaaattgtgcagataaagtgtcttactcgccttgtatttttgaatttgtttattttgctcgtccagactcaacaatagacagaatgtcggtttatgcaacacgcgtaaacatgggtaccaaactgggtgaaaaaatagcacgtgagtgggcagataaagacattgatgttgtcattcctattccagaaacttcgtgtgatgtcgcgcttgaaattgctcgcgtacttgatttaccgtaccgccaaggctttgttaaaaaccgttacattggccgtacgtttattatgcctggtcaagaaatgcgtaaaaagtcagtgcgtcaaaagctaaacgcaattgatcgtgaatttaaaggtaaaaatgtattacttgttgacgattcaatagtgcgcggtaccacatcagcgcaaattgtggaaatggcgcgagagtctggtgctaaaaatgtatactttgcctcagcagctcctgaaatacgctttccaaatgtttatggtatagatatgccatcggcagctgaacttattgctcatggccgtgaggttgaagatataaacgcaagtattggttctgacggattgatttttcagtcattaacagatctaatggccgctgtaagccaagaaaatccagaaataactcaatttgaaacttctgtgtttgacgggcaatatataacaggcgacatagatcaaaactatttaaaccgaatagataaactgagaaatgatacagctaagagcacacgcgaaacagcgatgtcatcagggttagagatacataaccaagaagaaaacgagacagattaat

SEQ ID NO: 239090 - DNA, 1504 bp, Unknown
  Bacterial polypeptide expressing nucleotide sequence isolated from the Sargasso Sea
gatgtgcggcatcatcggaatagttggctctcctagcacccaggtagctacgtctgtgtatgatggtctaatcgttctccagcacagggggcaggatgctgctggaattgttaccagtgattctgagaacatttgccataggagggcgaacggactagtccgcgatgttttcctagataggcacatgaagaggctaaacggatcaatgggaatcgggcatgtcagatatccaacagcaggctctagctcttcggatgaggcacaaccgttctacaccaataccccgttcggagtcagcttggcccacaatgggaatctgaacaacaccccggatataatttcaggactactagagtatgatcatcggaggattaacacaagctcagactcagaggccctactcaatctattcgccgcagagattcagagatccgtaaacgggaggccaggagggatggcggcactgaacgaggacgacatcttcagagcagtagaaaggacccatttgagagcggaaggaagctacagtgtggtgtgcctaattactggttggggcatggtagccttcagggacccacatgggataaggcccctatttctcggaaagagggaggtcgacggattcacagagagactagtatcctcagaaagcgtagtctgccagtccataggtttcgagaacgacagggacatatctcccggagaagcagtaatagtgagaatggatggtgagacccatgcaaagaattgccactctgttgttaatcacacgccttgtgttttcgagcatgtgtactttgcaaggccagactcagtaatcgatggaatttcagtgcaccaggctagattgaggatgggggaggctctggctagtaggatcgagtcattatttccagaccatcggatagatgccgttattccggtgccggacagtggaaggatcgccgctctaggattatcaagcgcacttggagttccatacagggagggattcgtaaagaatcgatacataggtaggacgttcatcatgccagggcagaaaattcgtaaggactccgtcaggaagaaactgaatacgatatccgaggaattcaatggcaagactgtgttgatcgttgatgatagcatagtaaggggtaatacttccaggaggatagtccagatggccagggatgcgggggcatctcgagtcttgtttgcttcctcttccccccctattgtacatcctaatgtgtatgggatagacatgcctgctagggaggagtatgtggcttttggtaagaccaacgacgaaatctgccaggcaatcggagctgattggctgatataccaagatctggacgacttggtcgatgcctgcacaggaacgagcggtagccaaatcgaagaattcgattgctcatgcttcaatggaatttacgtcacaggcggaattactgaggagtacctgagtaggataagtagaactcgctccgactcaggaaaagagcaggcatcagtctga

SEQ ID NO: 239091 - DNA, 1438 bp, Unknown
  Bacterial polypeptide expressing nucleotide sequence isolated from the Sargasso Sea
gatggaagaggcctgcggggtctttggcgtgcttgctgcaggtcagcaggtttccagcctctgttatttcgggctctatgccttgcagcaccgaggtcaggaagccgctggcattgctgtgtttgaaggggatcgcgttcgtctccacaaagacatgggcctggtcagccaggtgtttgatcaagacgtcttggagcgcatgccaggccatctggctgtgggtcatacgcgttattccacaacgggcagttcgcgggtctgtaacgcccagcctttggttttgatgacccgcctgggtccttttgccttagcccacaacggcaatttggtgaatgcgatgcagctgcgtgatcagctgcagcagcagggatgtcaagccacaggcaccaccgatagtgagctgattgcttttgctcttcaggcccaggtggaatctgggctcgactgggatgaagcaatcaaagcggcagcccgccagtgccagggcgcgttcagcctcgtgattggaacgcccgatgcgttgtatggcctgcgtgatggccatggtttgcgccccttggtgtttggctccctaccggaagccgatgtggcctcatgggttctcagcagtgagacctgtggactcgacatcgttggttcccgtttcctcgacgatgtggctgctggggaattggtgcgttttcgcagcggcgaagaccaaccgttccgaagccgttggattgaagaaacccccaagctctgcgtctttgagctgatttatttcgctcggcccgatagccgcttttttggcgaatccctctacagctatcgcaagcgcattggtcagcgtctggctcaggaatcaccagtggaagctgatctggtgatcggtgtgcccgattccggtatcccagcggcgatcggtttttcccagaccagtggcatcccctttggtgatggtctgatcaaaaaccgctacgtgggccgcacgttcattcagcccaccaaggcgatgcgggaggcgggaattcgcgtcaagctcaaccccttgcctgatgttttggaaggacaacggatcgtcgttgtcgatgactccatcgtgcgcggcaccaccagccgcaagttggtgcaggcctttcgtgatgctggcgctcttgaagtgcacatgcgcatcagttcgccgccggtgacgcacccttgcttctacggcatcgataccgattcccaggatcagttgattgctgcgcggttggagcttgaggagatcgaagcccacctcggcgttgattcgttggcctatttgacccgcgaaggcatgctccactgcgctcaggagcaaagcgagcacttttgctcggcctgttttgacggcaactatccaatccctgtggaagacggcatgcgcaccagcaagctgatgctcgagcccgctggtgtagctgcgactcttcagccttag

SEQ ID NO: 239092 - DNA, 1483 bp, Unknown
  Bacterial polypeptide expressing nucleotide sequence isolated from the Sargasso Sea
aatgtgtggaatagtaggaatatattctgaaaatcacgtagcaagctcaatctatgattctttattaatgttgcaacacagaggtcaagatgcggcaggaatgtcagtttgcgaattaacaggaaaaatcaatactcgaaaatctatgggatatgttcgagatgcttttcaacaagtacacatgaacagattgctgggaaattacggcattggtcatgttcgatatccgacagcaggaggcggcggcaaggagtttgcgcaaccaatgtatgtcaattctccatacggaataagcattgcacataatggaaatttaacaaattccaaagatcttgctcgtgagttgtttcatgctgaaatgagacatatcaatacagattctgattcagaggtattacttaatatatttgcgcatgagcttggaaagcaaaaagcaattttaccctctaagaaacatttttttcaggccgttcgaaaaactcatgttagatgccaaggagcatacgcagtagtagctttaattactggatttggcttagttgcatttagagatcctagaggaataaggccattggtaattggagagaaagatggccctacaaaaaaggaatatatagttgcctctgaaaatgcttctttctcagccttaggatttaaaacgctcagagatgtagagcctggagaggcaatatatatagacgttgatggaaatttacatagcgagcaatgttcagatgggtcacaaccaactccatgcatatttgaatatgtttacctagcaagaccggattctactcttgatgaaatctctgtctataaagctagaatgagaatgggtcaaaagttagctaagaaaatacttagattaaatccaaatcatgatattgatgttgtaattccaatacccgatagctcaactacagctgcattgcaacttgcagctgcattgaagcttccgtatagacaaggatttgtaaaaaacagatatgttgggagaacttttatcatgcccaaccaagaggaaagaaaaaaatcagtaagacgcaagcttaatattttagatcttgaatttaaagataagaatgtcttattggtagatgattctattgttagaggtacaacaagcaaaagaattattgaaatggcaaaacaagctggagctaaaaaagtatatttttcatctgcagctccaccggttaaatttcaaaatttatatggaattgatatggcagcgactaatgaattaattgcctacggcaaaactgaagaagaggttgctgatgcaataggcgcagattggctaatttatcaagatctaaaagacttgattgattctgcaagggagggtaatcctgcaattgaaaattttgagatctctattttcgatggtaagtacccaacatccatcagctctgattatcttgaagatcttgaggtaacgagaggggatgaaacgaaggttgcaagagaaaaatctagctaa

SEQ ID NO: 239093 - DNA, 1471 bp, Unknown
  Bacterial polypeptide expressing nucleotide sequence isolated from the Sargasso Sea
tatgaagaaactaaagaaaaagttcaagatatatgatcctaaaattaaggaagagtgtgcagtttttgggataagtaattccactgatgcttctaccctagcagctttaggcctgcatgcccttcaacatagaggacaagaaggctgtggaattgtttcatacgatggggaaaaatatcattcagaaaaaagatttgggttagttggtgataactttaacgatgaaaaagttttaaaaaaacttcccggaaaatatgcaattggtcataatcgctactcaacgacaggtggaactgctttaaggaacgtgcaacctttttttgctgatacaaatgcaggtggtattggtgttgcacataatggtaatcttacaaacgctataacattaagaaacaagctagtgcaggatggagcgatattctatacaacttcggatactgaaacaattgttcaattaattgctaaatcgagaagggtaaaaacgatagataaaatcatagatgctatatttcaaattcaaggtggttatgcacttgtaatgatgacacaaaatacactaataggtgtaagagatccttacggaattagacctttagtaataggtaaattaaaaaactcatatgtatttgcctctgaaacttgtgcctttgatattattggagcaaaatttgtaagagaagttgaaaatggagaaattgtttatattgaaaatgatgagttaaaaagtattaaaccatttccaccaaaaaagatcagaccttgcgtatttgaatacatttatttctctagaccagatagtatcttaaacggtaaaactgcatacgaatacagaaagaattttggacaacaattggcaaaagaggacaaaatagaagctgacttagttgtgcctgtcccagactcagggaacgctgcagcactcggatatgctgaagaaaaaggtctaaaatttgacctgggtttaattcgaaaccattatgttggtaggacctttattgagccctctcaacaaattagaagtttgggggtaaaattaaaattgaatccaaatatctcagtaataaaaaataagaggattattttagttgatgactcattagtaagaggcactacatcttcaaaaatagtaaaaatgttatatgattctggagcaaaagaagttcacgtgagaatagcaagtcctgaaattaagtttcctgatttttatggagttgatacaccaacaaaaaaagaacttttagcagcaaacaaatctacagctgaaatatgtgaatttataaaggcaaaatcactaaaattcctaagtttgagtggtttatatttaggaatgggatttgaaaaaagaaacgaaaattatccacaattaacagatcatcactttactggggaataccctgtaaaaataatagatgagcttggcgaagataaagtaacacaactttctttattaagcacagcatcaaataattaa

SEQ ID NO: 239094 - DNA, 1483 bp, Unknown
  Bacterial polypeptide expressing nucleotide sequence isolated from the Sargasso Sea
atgaaaaaacatatcaagattctaaagaaaaaattaaagaactataatccaagattaaaagaggagtgtggggtttttggtatcagtaatgcaaaagatgcttcagctctcacagcactaggcctacatgctctacaacacagaggtcaagaaggctgtggtatagtcacctttgatggggaaaaatattattctgagaaaagatttggcttagttggtgataatttcaacaaagaaaaagtgcttaataatcttaagggaaattacgcgattggccataacagatatagtacaactggaaacaatatattaagaaacattcagcccttttttgctgacaccaatgcaggtggaattggagttgcacataatggaaatcttactaattcaatagctttgagaaataaactagttgaagatggagctatattctacactacttcagatactgaaacgattgttcaattaattgctaaatcaaaaagaccaaaaacaattgataaagtaattgatgcaatttttcaaattcaaggtggctatgcattagtaatgttaactcaaaactctttaattggagttagagatccttatggaattagaccactagtaataggtaagcttggtaatagttatgtcttagcttctgaaacttgtgcatttgatataattggtgcaaaatttgtaagagaagttgaaaatggtgagataattttaattgaaaataatgaactgaaaagtattaaacccttccctgctaaaaaagttagaccttgcgtatttgaatatatttatttttcaagaccagatagtctgattggaggaaaaacagcttatgagcatagaaaaaacataggtagagaactcgcaaaggaaaatgatactgatgctgatattgtggttcctgttccagactccggaaatgctgctgcaatgggttttgctcaagaattaaaaatgaattttgaacatgggttaataagaaatcattatgttggaagaactttcatcgagccaagccagaaaattagaagcttgggtgttaaattaaaattaaatgctaatcaaacaacaatcaaaaataaaaaaataattctaattgatgactctcttgttcgaggaacaacgtcctataaaattgttaaaatgctttatgaggctggggcaaaagaagttcatgttaaaattgcgtgccctgaaattagatatccagatttctatggtgtagacacacctacaaaaaaagaattgttagcagcaaataaaacaaatgatgaaatttgtgaatatattggagctaaatcattaaaatttttatcaattgaaggattgtataaagctattggttttgaaaaaagaaacgaaacatatccacaattaacagatcattatttcacaggtgaatatcctgttaaattagtggatgaattaggagataataaaataactcagttatctttactaagcactggatcaaataattaag

SEQ ID NO: 239095 - DNA, 904 bp, Unknown
  Bacterial polypeptide expressing nucleotide sequence isolated from the Sargasso Sea
aatggaaaaactagagaagaatatattatttcatccgaggacgcattatttacttccatgggctttgagaagttgcgagatatcgaacccggagaggctatatttattgataaaaaaggaaaacttcactcacaacaatgctcagaagaacctataaaaagaccatgtatttttgagtatgtatattttgctaggccagattcaaagattgatgaagtatcagtatacaaagcaagaatgcgtatgggttctaaactagctgaacaaattaagaaaacaaaaccagatcacgatatagatgtcgttatcccaataccagatagctctacaactgcagcccatgaattggcagttggtttaggcattccttacagagaggggtttgtaaaaaatcgctatataggcagaacatttatcatgccatatcaagaagaaagaaaaaaatctgtcagaagaaaattaaatattttagatttggagtttcaaggaaaaaatgttttgcttgtagatgattcaattgttagaggcacaactagtaaaaaaataattgaaatggcaagagcctcaggagcaaaaaaagtttattttgcttctgcagccccaccaattaagtaccaaaacttatatggcattgacatgccatcaacatcagaactgatagcatcaaacaaaactaatgatgaggttgcaaaagagatcgatgcagactggttaatttaccaaaccctagatgatttaattgatactgttcaagttggaaatccagaaattaacgaatttgaaacttctatatttactggtaaatatataacacctttggttgaaaattatcttgaagatttagagaattcaagaaaagatgaattaaagatgcaaagagaaaaatctaaggctaacggctaat

SEQ ID NO: 239096 - DNA, 1483 bp, Unknown
  Bacterial polypeptide expressing nucleotide sequence isolated from the Sargasso Sea
aatgaaaaaacatatcaagattctaaagaaaaaattaaagacctataatccaagattaaaggaagagtgtggagtttttggcataagcaatgcaaaagatgcttcagctttaacagcgcttggactgcatgctctacaacacagaggtcaagaaggctgtggtatagtcacttttgatggggaaaaatattattctgagaaaagatttggtttagttggagacaatttcaacaaagaaaaaatacttaacaatcttaagggaaattatgcaattggccataacagatatagtacaactggaaataatatattaagaaacatacagcctttttttgcagacactaatgcaggtggtattggagttgcccataacggaaatcttactaattcaatatcattaagaaaaaaattagtagaagagggagcaatattttatactacttcagatactgaaacaatcgttcaactaattgctaaatcaaaaagacccaaaacaattgataaagttattgatgcaatttttcaaattcaaggtggttatgctttggtaatgctaactcaaaactcattgattggggtacgagacccttatggaatcaggccactagtaattggtaaacttggaagtagttatgttcttgcatccgaaacttgtgcgttcgacattattggtgcaaaatttattagagaggttgagaacggtgaaatagtattaattgaaaaaaatgaattaaaaagtattaagccttttcctcttaaaaaagtaagaccatgtgtctttgaatatatttatttttctagacctgatagcttgattggaggcaaaacagcttatgagcacagaaaaaacctaggtagagaacttgcaaaagaaagtaaaatcgatgcagacattgtggttccagtgccagattctggaaatgctgctgctatgggttttgctcaagaattaaaaatgaattttgaacatggattaattagaaatcattatgttggaagaacttttattgaaccaagccagaaaataagaagcttaggtgttaaattaaaactaaatgctaatcaatcaactattaaaaataaaaaaataattctaattgatgactcacttgttagaggaacaacgtctcataaaattgtaaaaatgctttatgatggcggtgcaaaagaagttcatgttaagattgcatgtcctgaaataagatacccagatttctatggagtagatacgccaacaaaaaaagaattattggctgcaaacaaaactaatgatgaaatttgtaaatatatcggtgccaaatctctaagttttttatcaatagatggattatataaagcaataggttttgaaaacagaagcaaaatttatccacaattaacggatcattattttacaggtgattatccagtaaaattggttgatgagttgggagacaataaaattactcaattatcattattgagttcagcatcaaataattaa

SEQ ID NO: 239097 - DNA, 1270 bp, Unknown
  Bacterial polypeptide expressing nucleotide sequence isolated from the Sargasso Sea
aatgtgtggaatagttggaatttcagcagaaacaagtgtagcagctgaaatttacgattcacttttaatgcttcagcatagaggtcaagatgctgcaggcataagcgtatgcaatatagatgataagttaaatacgagaaaatctatgggatatgttcgcgatgtttttgtccaaaggcatatggacaaacttatcggtaattacggaataggccatgttagatatccaactgctggaggtgctggtaaagaatttgcccaaccttattatgttaattcaccatatggaataagtcttgcgcataacggaaatttaacaaatgcaaaacaacttgcaaacgaactttttcatgcagaaatgagacaccttacaacagattcagactcagaagtattattgaatatttttgctcatgagcttggcaaacaaagagaaatttatccatcagcagaaaatatatttacagctgttgctaagactcatattagatgtgatggagcttatgcagttttagcagtaataactggatatggtttattagcttttagagataataatggaataagacctctatcaattggtatcagaaaaggaaaaacaagggatgagtatatcattgcatctgaagacgctttgttttcatctcttggttttaagaaatttagagatgttgaacctggtgaagctgtttttatcgataaaaatggtgagtttttctcacaacaatgttcagatcagccaaaaaaaaggccttgtatatttgaatatgtttatttttcaagacctgattctaagattgatgagatatcagtttataaggcaagaatgagaatgggaacaaagctagcttcccaaattaaagacttaagacctgatcatggcattgatgtggtaattccaattccagatagttctgtaactgcagctcatcaactagctgttgatttagatgtgccatatagagagggttttgtaaaaaatagatatattggaagaacatttatcatgccatatcaagaggaaagaaaaaaatcagttagaaggaaattaaatatattggatttagaatttgatggtaaaaatgttttattagtagatgattcaattgttagaggaacaactagcaagaaaattattgaaatggcaagagaagctggagcaaaaaaagttttttttgcttctgcagctccagcaattaaatatcaaaatttatatggtattgatatgcctgcaacatcagaacttatagcatctaataggtccgataaa

SEQ ID NO: 239098 - DNA, 1459 bp, Unknown
  Bacterial polypeptide expressing nucleotide sequence isolated from the Sargasso Sea
aatgtgtggaattgttggagttgttcaggataaagattgttttactgagctctacgatgctctagtaatgcttcagcatagaggacaagatgcagcggggatcacgatatgtaatggtgaccacctaaattcgagaaaatcaaagggtcttgtgcgtgaagtttttaatcaaaatcattacgagagattaaaaggaaactatgggattggtcatgttagatacccaacagcaggaggtaatacaaaagaatatgctcagccaatgtatgttaattcgccatatggtatttccttggctcacaatggaaatttatctaatactcctggtttagctaaagagctatttcacagcgatttaagacatatttcgactgactcagattcagaagttttgcttaatattctcgctcatgaaatttctaaacataaagaaaaagatccaagtccggagatattctttgaagcaatttcaaatacttttcaaagatgcgaagggagtataagtgttgtttcaattattactgattacgggctacttgcctttagagataagttaggaataagacctttaattcttggttcaagggaaaatgaatctggaggtttggactatatggttgcttctgagagtgcagccttccactcaaatggtttcaagatcaaaagagatattgctccaggagaggcagtatttatcactttcgatggacagcttttttcaaatcaatgtgaagacgaatcaaaactcactccttgtttattcgaatttgtatattttgctagaccagattccattatcgatggagtaagcgtttatgaggctaggcaaaatatgggagaaagattggcaaaaaaaattaaagctgagattcctcttgatgatattgatgttgtcatgccaatacctgagagttcaatagtcagtgggacaaaagtagccgagtcacttgataagcaaattgcctacggttttgtaaaaaataggtatgtcggaagaacctttattatgcctgagcaaaatttaagaaaaacttctgtcaaaagaaaacttagtccaatctacagtgaatttaaagataaaaaaatccttttagttgatgattcaatagtgcggggaacaactatgaaagaaattgtaaagatgtgctattccgccggagctaagttagtttctgttgcctcggctgcagctcctgtaaaacatcccaatgtctatggtattgatatggcagcgaagggcgaattaatagcgagtactagagatattgaggagattaaaaaattcattggctgcgattatttgatttatcaagatttgaacgagcttgttgattctgtaacatctttgagcgataagattattgacgttgagaaatctatctttgatggtaaatatcccacaaatatcactcaagagtatttagaagttttggcgaagagaagaggctctaagatttaa

SEQ ID NO: 239099 - DNA, 1444 bp, Unknown
  Bacterial polypeptide expressing nucleotide sequence isolated from the Sargasso Sea
atgtataaccctaaattaaaagaggaatgtgccgtctttggtataagtaatacaccagaggcatcgaccttaaccgctttaggacttcatgcgttacagcatagaggacaagaaggttgtggaattgtatcatttgatggggaaaaatatcactctgaaaaaagatttggtttagttggtgacaactttaatgatgaaaaagttttaaaaaacttaccaggaaattatgcaataggtcacaatagatattctacaactggcggaactgctttaagaaatgtacaaccattctttgctgatactaattcaggcggaattggagttgcgcataatggaaatctaacaaatgcaataacacttagaaataaaatggttgaagaaggctcaatcttttacacaacatcagatactgaaaccattgtaaaactaatagcaaaatcaaaaagacccaagacaattgataaagttattgatgctctatttcaaattcaagggggatatgcattagttatgatgacacaaaatactcttattggagtaagagatccttatggaattagacctctagttattggaaaattaaaaaactcttatgtttttgcatctgagacatgtgcttttgatattatcggtgcaaaatttgttagagaagttgaaaatggtgaaattgtttatgtagaaaatgatgaattaaaaagtattaagccatttcctcaaaaaaaagtgagaccatgtgtttttgaatatatttatttttcacgaccagatagtattttaaatggtaaaactgcttatgaatatcgaaaaagatttggagctgaattagcaaaagaggacgatttagatgctgacttggttgtgcctgtaccggattccggaaatgcagctgcgttgggttatgctgaggaaaaaaaaataaactttgatttaggtctgatcagaaatcattatgttggtagaacttttatagaaccatcgcagcaaattagaagtttaggagttaaattaaaattgaacgcaaacgtttcagttataaaaaataaaaaaattattttggttgacgactctcttgttagaggaactacttcatcaaaaattgtaaaaatgttatacgataatggcgctaaagagatacatgtcaggatagcaagtccagaaataaaatacccagatttttatggagttgatacacctacaaaaaaagaactattagcagcaaataaatcagtagatgaaataaaagaattcattaaagcaaaatcacttaaatttttaactttagatggtttatatcgaggaatgggttttgaaaagagaaatgatgcttatcctcaattaaccgatcatcattttactggtgattatcctgtaaaaataattgatgaacttggagaagataaagttacacaattatcactattaagtactggttcgagtaattaat

SEQ ID NO: 239100 - DNA, 1516 bp, Unknown
  Bacterial polypeptide expressing nucleotide sequence isolated from the Sargasso Sea
catgtgtggtatcgtcggaatagttggccaatcatcggttaatcagaccatttatgatgcactgactgtgcttcaacacagaggtcaggatgcggcaggtattgtcaccgttgatcgtggtgctttcagactacgtaaagccaatggtctggtcaaagacgtatttgaagtcaaacacatgcagcgcttacagggcaatgcgggcattggtcatgtgcgttatcctactgctggcagttccagcgcgtcagaggcgcaacctttctatgttaactcgccatttgggatttcattagcccataacggtaacttaaccaacacgcttgaattggccgaaggcctgattaaaaagcgtcgccatgtgaataccacatccgactccgaagtgttgttaaacctgctcgccgatgagctacaaaaaaccacgagcttagcactgacggctgatgaagtgtttgacactatcgctaaagtgcatgagcaagcccgtggcgcttatgccgttgtggcgttgattgttggccaaggtttagtggcgtttcgcgatcctttcggcattcgccccttagtgctgggtaagcacgaaaccccaactggcactgaatatatggttgcctctgagagtgtggcactcgatgctgtcggctttgaagtgatgcgtgatgtcgcgccgggtgaagcgatttatatttccctcgacggtaatctttacactcgccaatgtgcaaaagagccaagctactcgccctgtatcttcgaatttgtgtattttgcgcgtccagattcgactatcgataatgtctcggtttacgccagccgcgtgaacatgggggctaagctcggtgaaaagatcaaaaaagaatggtacgaccatgatatcgacgtggtgatcccaattccggaaacctcatgcgatatcgcattagaaatcgcccgttgcatggacttaccttaccgccaaggttttgtgaaaaaccgttatatcggccgtacctttattatgcctggccaacaagagcgtaaaaaatcggtacgccgtaaactcaatgccatcaacactgagtttaaaggtaagaatgtcctgttagtcgatgactccattgtacgtggtactacttcggagcaaatcattgagatggcccgtgaagcaggggcgaagaaagtgtactttgcttcggctgcaccggaaattcgtttcccgaacgtgtacggtatcgacatgccaacctcgaatgagcttatcgcacacggtcgtgatgccgatgaaattgctaagcttatcggcgccgatggcattatcttccaaaatctgccggatctagtcgaagcggtgagaatggaaaacccagagataaaacgtttcgaaacgtcagtatttgatggtcactacatcaccaacgacgttgatcagtcctatctcgatcatttaacgcagcttcgtaacgatgatgccaaagctgaccgcaataaggatattggcactaaccttgagttacacaacgtctgccatccataa

SEQ ID NO: 239101 - DNA, 1525 bp, Unknown
  Bacterial polypeptide expressing nucleotide sequence isolated from the Sargasso Sea
atgtgcggagtcgttggcatcatcagcagtaggcccgtcaatcaagaaatatacgatgctttaacagtgctccaacaccgcgggcaagactcagcaggaatcatgacagacaacaagggcgtactctgcctaagaaaaagcaatggcttggtcaatgatgtattttctagtgagcacatgactagactgagaggcaacatgggcattggccatgtaagatatcccaccgcaggaacgcttagttcatcagaggctcaacctttttatgtgaactctccatttggaatttgtctcgcccacaatggaaaccttgtcaataatgatgagcttagaaagcatttaagcgaagtcgatcgaaggcatttgaataccgaatccgatacagaagccttattgaatctatttgcacatgagcttcaagaaaatttcgatggcaccctctcacccgaaactatttttaatgctgcgacgcagctatttgatagatgctctgggggttatgccgttgtttcaatgattctaaatgagggactggtggcaatgagagatccaaacgggatccgccccctaattttagggaaaagagaagttggtcaaggcacagagtatatgattgcctccgagagtgtggcattggatatcgccgattttgaaatcgtgagagacgtcagacctggagaggcgatttacatcaccaaggaaggagaattgttttcgaagcaatgcgtcaaaccaaaatcttacacgccttgtatatttgagtttgtatattttgcaagaccagattcaatcattgatggaatgtcagtctataagtctagactgagaatgggagagtatttggcccagaaaattataaaacagggcctccatcatgacgtggatgtggtgattccaattcctgacactagcagatcaaccgcacttcaggtggctcatcatcttggcgtcaagtatagagaaggcttcattaagaatagatacattgggcgaacattcattatgcctggacaggaaatcagaaaaaaatctgtaaaacagaaactcaatccaattgatctagaaatacgagataagaacgtattattgattgatgattcaattgtcagagggacaacttcaaagaaaataatacaaatggctcgaaacacaggcgctaaaaaagtattttttgcttcggcagcaccgccggttaagcatcccaatgtttatggaattgatatgccttcaacagccgagttattggcaagcaatagaacggaagaagagcttgccagatacattggcgcagattggttaatctaccaagagttggatgatctcatttcagcagttcagtttgatgaatctgatgccgaagcatttgatacgtcttgcttctccggtgaatacgtcactggagatgtaacatcaaattatcttgatttcattgagagcaaaagaaatgacgctgcaaaagcaaagaaagaaatagagcgcaagcagatcgatattcaggatcagtcgtcaatgactgtcagctaaa

SEQ ID NO: 239102 - DNA, 1387 bp, Unknown
  Bacterial polypeptide expressing nucleotide sequence isolated from the Sargasso Sea
atgtgtggtttagttggagttgttactaacgacgatgtgggagtctgtctttatgacactttgacagtgcttcagcatcgtggccaagatgcggcagggataatgacgagtgacaacggaaagctaaatcttcgcaaagataatggccttgtgaaagacgtgttcagaacgcgccatatgcgcaggcttatcggacaaatgggaatagggcatgtgaggtatcccacagcaggtagctcaagtcctgctctagctcaacccttttatgtaaattctccctatggtttatctctcgcccacaatggaaatcttacaaacactgctgaattgagtagggacttattcaaggaagaccttcgacatataaatactgattcagactctgaagtattgttgaatatatttgcgcacgagcttcagcagcagcaacaaattgaaccaacgccagatcatatattttcagctcttacaagggtttacgaccgttgcaggggcggatttgcagcaattgttatgattacgggctatgggattttaggttttagagataagcatggtattcggccattagtgtttggtagtagagagtcagaacgcggtaaggaatatatgattgcgtcagagagcgtcgcactcgattctcaaggattttctgtggaaagggatatcgccccaggcgaagcagtttacatagatgtgaacaacaacctgcatacaaaacagtgcacaccagcgggaaagcatactccttgtatttttgaacatgtctattttgcaagacctgattcgttaatggatagtatttcagtttataaagccaggttgagaatgggtgaaaggctcgcagacaaattactgaagcagagaccaaatcatgacatagatgttgttattccaatcccagatacaagtcgtccatcagcactagagcttgctaatcgtcttggaatcaagtttagagagggtttcgtaaaaaatagatatataggtagaacctttatcatgcccggtcagagtatgaggaaaaagtcagttaggcagaaattaaacgcaatcgaactagaatttaaaggtaaaaatgttctattagtcgatgattcaatcgttcgcggaactacctgcaagcagataattcagatggctcgagatgccggtgctaataaagtatatttcgcttctgcggctcctggagttaggtttccaaatgtttatgggatcgatatgccggccgcgtctgagctaattgctgccgggagaactgacgaggaagtccaggaattgataggagcagattggttaatttatcaaaacttagaagatttaattgcttcggcagctgatggaaacccggagattgcggattatgaatgctctgtttttaacggtg

SEQ ID NO: 239103 - DNA, 1021 bp, Unknown
  Bacterial polypeptide expressing nucleotide sequence isolated from the Sargasso Sea
atgaaaaaacatatcaagattctaaagaaaaaattaaagaactataatataagacttaaggaagaatgtggagtttttggtattagcaatgcaaaagatgcttcggctctaacagcacttggactacacgctctacaacacagaggtcaggaaggttgcggaatagttacttttgatggagaaaagtattattctgaaaaaagatttggtttagttggtgataatttcaataaagaaaaagtacttaataatcttaagggagattatgcgattggccataacagatacagtacaactggaaacaatatattaagaaatatacagcctttttttgctgacaccaatgcaggtggaattggagttgcacacaatggaaatcttactaattcaatagctttgagaaataaactcgttgaagatggagctatattttacactacttcagatacagaaacgattgttcaattaattgctaaatcaaaaagaccaaaaacaattgacaaagtaattgatgcgatttttcaaattcaaggtggctatgcattagtgatgttaacccaaaactctttaatcggagttagagacccttatggaattagaccactagtaattggtaggcttggtaatagttatgtattagcatctgaaacttgtgcatttgatataattggtgcaaaatttgtaagagaagttgaaaatggcgagatagttttaattgaaaacaatgaactgaaaagtattaagccatttcctgctaaaaaagtaagaccatgtgtatttgaatatatttatttttcaagaccagacagtttgattggaggaaaaacagcatatgagcatagaaaaaacatcggtaaagaacttgcaaaagaaaacgatactgatgcagatatagttgttccagtcccagattctggaaatgctgcggctatgggttttgctccagaattaaaaatgaattttgaacatggattaattagaaatcactatgttggaagaactttcatcggaccaagccaaa

SEQ ID NO: 239104 - DNA, 1195 bp, Unknown
  Bacterial polypeptide expressing nucleotide sequence isolated from the Sargasso Sea
caggaagaagtattccgcattgcacgccgccacatcaacaccacctcagattcagaattattgctaaacattcttgcgcatgaactgcagcaggtagcaggtttaagcgtaagtgccgaacacatttttgaagtggtaacgaaagttcataagaaaattcgtggtgcctacgcagttgttgcggccatcatcggccaaggtattgtagcgtttcgcgacccgcacggtattcgtcctctagcactcggtaagcgtatgagcgagctgggtgaggaatggatggtggcatctgaaagcgtggcgcttgatgctgttggcttccagtttgtacgcgatgtaatgccaggtgaagcggtattcattaccgaagagggtcaactgcacaccagacagtgtgccgagaatccagtaacctctccgtgtatctttgagtttgtttattttgctcgcccagatagcttcatagatggcatttcagtttatgcatcgcgtgtaaacatgggccgtaagctaggtgaaaaaattaagcgcgaatgggcagatctggatatcgacgtggttattcctattcctgaaacgtcgatggatgtggcgcttcaaatcgcaaacacactggatttgccatatcgccaaggcttcgttaaaaaccgctacattggacgtactttcattatgcctggccaaaccatgcgtaaaaaatcagtacgccgtaagctaaacgcaatctcatctgagttcaaaggtaagagtgtactacttgtcgatgactctatcgtgcgcggtactacatcaggtcaaatcattgagatggcgcgtgagtcaggtgcgaagaaagtatactttgcgtcagctgctccagaaattcgtttcccaaatgtgtatggtattgatatgccatcggcaaacgaactgattgcttatggtcgtgaaatagatcaaattgcagagcttatccaagcagatggccttatcttccaagacatttctgacttagtagatgccgttcgcgaagagaacgaaaccattcagcgttttgaaacgtctgtttttgatggtaactatattactgcggatatcgaccaagagtaccttgagcgaattgatatgtcgcgcggtgaagcgtcaagaaaagcgccagtggtgcaagcagagcttagcaaccttgatgtgcataatattgatgccgctgattaat

SEQ ID NO: 239105 - DNA, 1414 bp, Unknown
  Bacterial polypeptide expressing nucleotide sequence isolated from the Sargasso Sea
tggggtatttggtattagtaataattcagacgcttcaacattaacagcgttaggtctgcatgccctccaacacagaggtcaggaaggctgtggaatagtttcttttgatggaaaaaaatatcattcagaaaaaagatttgggttggttggtgataactttaataaagaaaaagtattaaaaaaactgcctggaaaatttgctatcggtcataatagatattcgacaactggtggaacagctttaagaaatgtccaaccattttttgcagatactaatgctggtggaattggagtggctcataatggaaatttaactaacgcaataactataagaaataaactggttgaagaaggagccatattttacacaacatctgatacagaagtgatagttcaattgatagcaaaatccaaaagatcaaaaactattgataaaatcgttgatgcaatatttcatatccagggaggatatgctttggttatgatgacaaagaatacacttataggattaagagatccctatggaattagaccacttgtaattggtaagttaaaaaattcatatgtatttgcatctgaaacttgcgctttagatattataggtgcaaaatttgtaagagaagtagaaaatggagagattgtatatatagaagatgatgagcttaaaagtttaaaacctttttctccacaaaaaattagaccctgtatttttgaatatatttatttttcgaggccagatagtattttgggtgggaaaactgcttatgaacatagaaaaaattatggagcacaattagcaaaagaagatgatttagaagcagatatagttgttcctgtgcctgattcaggtaatgctgcagctttgggatatgctcaagagaaaaatattccatttgatttaggattgataagaaatcattatgttggaagaacttttatcgaaccttctcaaaaaattagaagtctaggtgtaaaattaaaattaaatgcgaatttgtcagtcattaaagacaaaaaaataattttgattgatgactctttggttagaggaactacatctcataaaattgtaaagatgttatataacgcaggagctaaagaaatacatgtaagaattgccagtccagaaataaaatatcctgatttttatggtgttgatatgccaactaaaaaagagcttttggcttcggataaatctgtaaaagaaatatgcgattttattaatgcaaaatccttaaaatatttaacaattgatggtctttataaggctatggggtttgataaaagaaataatacatatccacaattgacagatcattattttactggagaatatcctgtaaaaataattgacgaactaggagaagaaaaagttacacaactttcacttttgagcaccggttctaataactag

SEQ ID NO: 239106 - DNA, 847 bp, Unknown
  Bacterial polypeptide expressing nucleotide sequence isolated from the Sargasso Sea
atgggttttgaaaagttgcgagatatcgagcctggagaagctatttttattgataaacaaggaaaacttcattcacaacaatgcgcagaagaacctataaaaagaccatgtatttttgagtatgtatattttgctaggccagattcaaagattgatgaagtatcagtatataaagctagaatgcgaatgggttctaagctagctaaacaaattaaggaaataaaaccagatcacgatatagatgtcgttatcccaataccagacagctctacaactgcagcccatgaattggcagttggtttaggcattccttatagagaggggtttgtaaaaaatcgttatataggcagaacatttataatgccatatcaagaagaaagacaaaaatcagtaagaagaaaattaaatattttagatttggagtttcaaggaaaaaatgttttgcttgtagatgattcaattgttaggggcacaactagtaaaaaaataattgaaatggcaagagcctcaggagcaaaaaaagtttattttgcttctgcagccccaccaattaagtaccaaaacttatatggcattgacatgccatcaacatcagaactgatagcatccaataaaaccaatgatgaggttgcaaaagagattgatgcagattggttaatttaccaaactcttgatgatttaattgatactgttcaagcaggcaatccagaaattaacgaatttgaaacttctatatttactggtaaatatataacacctttggttgaaaattatcttgaagatttagagaattcaagaaaagatgaattaaagctgcaaagagaaaaatctaaggctaagggctaat

SEQ ID NO: 239107 - DNA, 1471 bp, Unknown
  Bacterial polypeptide expressing nucleotide sequence isolated from the Sargasso Sea
atgaaaaaacaaaagataaagttcaagaattataatccaaaaataaaagaagagtgtggagtgtttgggattagtaatactaaagatgcttcaacacttgctgctttgggtttgcatgctttacaacatagaggccaagaaggttgtggtatagtttcttttgatggaaagcactaccactcagaaaaaagatttggcttagtaggtgataattttaataaggaaaaaatactaaagaaacttcctggaaattttgctatcggtcacaacaggtatagtacaactgggggaacaactttaagaaatgtacaacctttttttgctgatactaatgcaggtggaatagttgttgcgcataatggaaatttaactaatgcaataactttaaggcaaaaattagttagggatggtgcaattttttatagtacttctgataccgaaactatagtccagctaattgcaaaatcaaaaagaaataaaaaaattgataaaattatcgatgcactttttcaaattcaaggtgcttatgcgcttgtttttttaacacaagatactttaataggagtaagagatccttatggtataagacctttagtaataggaaaattaaataactcatatatattagcatctgaaacttgtgcattagatattataggagcaaaatttattagagaagttgagaatggagagatcgtaattattgataataacaaattaaaaagtattaaacctttcccttcaaaaaaacaaaggccatgtgtgtttgaatatatttattttgcaaggcctgacagtatattaaatggtaagtgtgcatacgaatatagaaaaaattttggtaaagagctggctaaagagtcaagcattgatgtagatttggtagttccagtgcctgactctggaaatgctgctgccatcggttatagtcaatatacaggtaataatttcgacttaggtttaattagaaatcactatgttggtcgaacctttattgaacctgttcaaaaaattagaagtttaggagttaaacttaaattaaatgcaaataaatcaactattaaaaataaaaaaatagttcttattgatgactctcttgttaggggaacaacgtgttttaaaattgttaaaatgttatatgatgctggagccaaggaagttcacgtaagaatagcctcgccagaaataaagtaccccgacttttatggtattgatacgccaacaaaaagcgagctattagcagccaacaaaagtaataaagaaatttgcaaatatataaatgcaaaatctttaaaatttttaacaataaatggagtttataaagcaatgggatttgaaaaaagaaatcaatcttatcctcaacttacagaccattacttcactggggattatcctgttaaaccaatagacaatctaggggatgataaagttacccagctttcattattaagcgtagcttcaaataactagc

SEQ ID NO: 239108 - DNA, 1477 bp, Unknown
  Bacterial polypeptide expressing nucleotide sequence isolated from the Sargasso Sea
ttgaaaacgaatagaaaatcaccttttattaaagatgataaattacatgaagaatgtggagtttttggtgtatacaaccatgaagattcagctgcactaactgccttagggcttcatgctttacagcatcgcggtcaagaagctgcaggaatagtaacttttgatggaacaaagtttatatctgaaagacatccagggttagtaagtgataactttacaaaaatgtctgtaataaatcgattagtaggtaatagcgctgttggacataacagatattcaacaacaggtgctacaattcaaagaaatattcaacctttttttgctgatttatggggtggaggatttgcaatagctcataatggaaatattacaaacgcactatcgctaagagacgagctcataagaaaagggtctatcttccaatcaacctctgacacagaaacaattttacaattggtagctagatctgatgcagatagaacattagatcgcttagttgatgcgttgatgcaaatttcaggagcatgggcattagtagttttaactaacaaaaaattaattggcgctagagacccttttggaataagacccctcgtcttaggggaattagacggagcaaaaatattagcttcagaaacatgtgcgcttgatattattggtgcaaaatttgtaagagaaattgaacctggtgaaatcattgtaattacagaagatggcgaggagagtattaaaccttttccaaacgcaagattgcgtccttgcatatttgagtacatatatttttctagacccgattccatgctagatggaaaatctgtttatgaatgtagaaaatcatttggaaaaaatctagctaaggaatgtccagctaacgccgatattgttgttccagttcctgactcaggcgttccagcagctttaggatactctgaagaatcaaaaataccttttgaattatcaataataagaaatcattatgtaggaagaacatttattctgccaacacagtcaaatagacaatcatctgtaaaacttaaacataatcctgataaaagctcaatagaaggcaaaagagtagttttagtcgatgatagcgtagtaagaggaacaacttcagtcaaaattgttgaattaataagagaggctggagcatctgagatacatatgagaatagcctgtcctccgataaaatatccagatttttatggaatagatactccagagactgagcaattattagcttcaaataaaagtttagatgaaatgtgtaaacatattggcgccgactctttaggctttctttcattagatggtttatatcaatctatgggatataaaaaaggaagaaacaatgatagtccagaatatactgaccattgttttacaggagactaccctacaaaccttagcgattacaaaaacgaaaaaactcaagaacaactttcattattatctgaaaatgaaagccaaaattaat

SEQ ID NO: 239109 - DNA, 916 bp, Unknown
  Bacterial polypeptide expressing nucleotide sequence isolated from the Sargasso Sea
ataggtataagagaagggaaaaccagagaagaatatattatttcatccgaggatgcattgtttacttccttgggctttgaaaagttacgagatatcgagcctggagaagctatttttattgataaaaaaggaaaactacattcacaacagtgtgcagaagagtctataaaaagaccatgtatttttgagtatgtatatttcgctaggccagattcaaagattgatgaagtatcagtatacaaagctagaatgcgaatgggctctaagttagctgaacaaattaagaaaacaaaaccagatcacgatattgatgtagttataccaataccagatagttctacaactgcagcccatgaattagcagtaggtttagacattccttatagagaagggtttgtaaaaaatcgatatataggcagaacatttattatgccttatcaagaagaaagaaaaaaatctgtaagaagaaaattaaatattttagatttggaatttcaaggaaagaatgttttgcttgtagatgattcaattgttagaggtacaacaagtaaaaaaataattgaaatggcaagagcctcaggagcaaaaaaagtttactttgcatctgcagccccgccaattaagtaccaaaacttatatggtatagatatgccatcaacatcagaactaatagcatcaaataaaactaatgatgaggtcgcaaaagagattgatgcagactggttaatttatcaaactcttgatgatttaattgaaactgttcaagtaggaaatccagaaattaatgaatttgaaacttctatatttactggtaaatatataacgcctttagttgaaaattatcttgaagatttagagaattcaagaaaagatgaattaaagatgcaaagagaaaaatctaaggctaacggttaat

SEQ ID NO: 239110 - DNA, 1453 bp, Unknown
  Bacterial polypeptide expressing nucleotide sequence isolated from the Sargasso Sea
atgatccaaatagatacttctgaagataaacttcatgaagagtgtggtgtatttggtatattcggaagtccagacgcatcaactttaacagctctagggttgcatgcactacaacatagaggtcaagaaggtgcgggtattgtcacttttgatggagaaaaatttcatggagttagaagacctggcttagttggtgaccactttaataaaacagaagttatagacagactcttaggtagcaacgctataggtcatgtaagatattccacaactggcaactcaatactaaaaaatatccagccactatatgcagatctatcctcaggcggttttgcatgtgcgcataatggaaatttaacaaatgcatctattttgagggactctcttgttaaagatggtgctatatttcagtcaacatctgacacagaaacaattcttcagcttgtagctaaatcaagtaggcagcaaacagttgataaattaatagatgctttattcaaaatacaaggggcttattcactagtaatattaacaaataagaaattaattggagtaagggatccttatggtattcgccctcttgttcttggtgatcttaatggagcgcccgtgctgacatcagaaacttgcgcactagatattataggcgctaaatatgtcagagatgttgagcatggtgaaataattattatatctgaagatggaatggaaagtataaagccattccccaaagttcaagagaggccatgtatttttgagagaatatatttctcaagacctgatagtatagtagggggcaaaactgtttacacttatagaaaaaatctaggtcaagagcttgcaaaagaaaaccacattgatgctgatgtcattattcctgtacctgattctggagtaccggcagcgcttggatactctcaagagtctaaaataccatttgaattaggcattataagaaatcattatgtaggccgtacatttatagagccgtcacaatctattaggcaatttggggtaaagttaaaacataatgcaaactcttcttatataaaaaataagaaagttatactgattgacgattcaatagtaagaggcacaacagcaaaaaaaattataaagatggtctatgacgctggagctaaagaagtccatcttggaattgcatgccctcctattaaacatccagatttttatggaattgatacgccggattacaatgagctaatagctgcaaaatcctcattagaggaaatcaataatatcattggttctaaatcaatattctttctttctttagagggaacttataaagcgatgggttatgaaaaaagagataatgaaacaccccaatttacagatcattgtttcacaggtgattatccaactagtcttttagatagagaacagggaacagtatcaaaacaattttcacttttgtctgagaagaattaaa

SEQ ID NO: 239111 - DNA, 1516 bp, Unknown
  Bacterial polypeptide expressing nucleotide sequence isolated from the Sargasso Sea
catgtgtggtatcgtcggaatagttggccaatcatcggttaatcagaccatttatgacgcactgaccgtgcttcaacacagaggtcaggatgcggcaggtattgtgaccgttgatcgtggtgctttcagactacgtaaagccaatggtctggtcaaagatgtatttgaagtcaaacacatgcagcgcctacagggcaatgcaggtattggccacgtacgttatcctactgcaggcagttccagcgcgtcagaagcgcagcctttctatgttaactcgccatttgggatttcattagcccataacggtaacttaaccaacacggttgaattagctgaaggcctgatcaaaaaacgtcgccatgtgaacaccacatccgactcagaagtattattaaacctgctggccgatgagctgcaaaaaaccactagcttaatgctgacgcctgacgaagtgttcgacactatcgccaaagtgcacgagcaagcccgtggcgcctatgcggttgtggccatgattatcggccaaggtctggtggcatttcgcgatcctttcggtattcgtccactggtattaggtaagcacgaaaccccaactggtactgagtacatggtggcctctgagagcgtggcgctcgatgccgtgggttttgaagtgatgcgcgatgtggcaccaggcgaagcgatttatatctctctcgatggtcagctttacactcgccaatgcgcaaaagagccaagctactcaccttgtatctttgaattcgtgtattttgcccgtcctgattcgactatcgacaacgtctctgtttacgccagccgcgtgaacatgggtgccaagctcggtgaaaagatcaaaaaagaatggtacgaccatgatattgacgtggtgatccctattcctgaaacctcatgcgatatcgcattagaaatcgcccgttgcatggacttaccttaccgccaaggttttgtgaagaaccgttatatcggtcgtacctttattatgcctggtcaacaggagcgtaaaaaatcggtacgccgtaaactcaatgccatcaacactgagtttaaaggtaagaacgttttgttagtcgatgactctatcgtgcgtggtaccacgtcggagcaaatcattgaaatggcgcgtgaagcgggtgcgaagaaagtgtactttgcctcggcggcaccggaaattcgtttcccgaacgtttacggtatcgatatgccaacctcgaatgagttgattgcccacggtcgtgatgccgatgaaattgctaagctgattggtgccgatgggattatcttccaaaatctgccggatctggttgaagcggtaagaatggaaaacccagagatcaaacgtttcgaaacctcagtgttcgacggtcactacatcacgaacgatgttgaccaatcttacctcgatcacttaactcagctacgtaacgacgatgccaaggccgaccgtaacaaagacattggcactaacttagagttacacaacgtttgccatccataa

SEQ ID NO: 239112 - DNA, 1157 bp, Unknown
  Bacterial polypeptide expressing nucleotide sequence isolated from the Sargasso Sea
tatgtgtggaatcgtcggcgtcgtcagtcctgcgcccgtcaatcagctgatctatgacgctttgctgctcttgcagcatcgtggccaggatgctgctggcatcgtgacccagcagggccgcaaattcttcatgcacaaggccaagggcatggtgcgcgacgtttttcgcacgcgcaacatgcgtgctctgccgggcaatgtgggcctgggccaggtgcgctaccccaccgccggcaacgcctacagcgaagaagaggcacagccgttttacgtcaacgccccgttcggtatcgtgctggtgcacaacggcaatctgaccaacgcgcgcgaactccgcaccgagctgttccagacagaccaccgccacacgaatacggaaagtgactcggaagtcctgctgaacgtgtttgcgcacgaactcgaacgagccacgcgcggcgtgcctctgcagcccgaggatgttttcacggccgtgcgtgcggttcacaagcgcatcaagggctcctatgccgtcatcgcgctgatcgcaggccacggcctgttggccttccgtgacccccacggcattcgcccccttgctatgggccgcagccaggacggcaccgtgatggtgggcagcgagtcggtggcgctggaaggcacctcccatgtgttcgagcgcaatatcaaccccggcgaagcgattttcatcacgctcgatggccaggttcacgccagccaatgcgcagagaatccgcagctcaatccatgcatctttgagtttgtgtacctcgcgcggcctgattcggtgctggacggcatctcggtctatcaggcgcgtctgaatctgggtgaagccttggccaagcgcgtggtgtccacggtgccgcccaatgagatcgatgtgattattcccatccccgagtccagccgccccagcgccacgcaactggcgcatctgctcggcgtcccgtaccgcgaaggcttcgtcaagaaccgttacgtgggtcgtaccttcatcatgccggggcagggcgtgcgcaagaagtcggtgcgccaaaagctcaacgtgatcggcagcgagttcaagggccgcaacgtgttgctggtggatgattccatcgtgcgcggcaccaccagccgcgagatcgtgcagatggcacgcgacgcgggtgccc

SEQ ID NO: 239113 - DNA, 1462 bp, Unknown
  Bacterial polypeptide expressing nucleotide sequence isolated from the Sargasso Sea
aatgtgtgggattgttgggatagttcaaaaagataattgttttactgagctttatgacgctttaattatgttgcagcatagaggtcaagatgctgctggcattactatatgtgaaggtgaaagtttacattcaagaaaatcaaaaggtttcgtaagggaagtatttactcaaagacattttgaaagattaaaaggtaattgcggtatagggcatgtccgatatcccactgcaggtggaaattctaaagagtatgcacaaccaatgtatgtaaactcaccgtatggtatatcgttagctcataatggcaatctatctaataccaaggcattggcagcagaattattcagcagcgatttaagacatatatctactgattctgattcagaggttctgctcaatattcttgctcatgaaatatctaaaaacaatgaaaaaaaaccaactccagaaactttatttaaagcagtggaatctacctttaagagatgtgaagggagcataaatgtagtctctataattactggacatggactcttagcatttagagatcgatatggtattaggcctttaagtttaggctcaagaactaatgcagatggcaaaaaagaatatatgatatcctcagaaagcgcagcattttcatcttctaattacgatcttgagcgggatcttattcctggagaagcaatattcataagtaatactggagaaatgcatacacagatttgctctgatagcactactcttactccctgtttgtttgaatatgtgtactttgctagaccagattcagtaattgatggggtaagtgtttatcaagcaagacaaaatatggggataaagcttgctgaaaaaattaaaaaaaatataccagatggtgacattgatgttgttataccaataccggaaagctcaattactagtggaacaaaagtagctgaatgtttaaataaagaagttatctatggttttgtaaaaaatagatatattggtaggactttcataatgcctgagcaagatatgagaagacgttcagtgagaagaaaattaaatccaattaatgatgaatttaaggacaaaaatgttctgttggtcgatgattctattgttagaggaacaaccatgaaagaaattgttgctatgtgctataaagctggtgcaaaaaaagtttctgtagcgtcatcatctgcagaagtcagatttcctaatgtttacggaattgatatgcctgctaaaagtgaattgattgctagtgatagatctttagaagagataaaagattttataggttgtgataatttagtttatcaagacttatctgatctggttgattcagttacagagcttaactcggaattagatggtgtcgaaaattctatttttactggagcctacccaacagatataacagacgagtatttaaaatatcttgagggtaaaagaaaatctattagttcttaa

SEQ ID NO: 239114 - DNA, 1483 bp, Unknown
  Bacterial polypeptide expressing nucleotide sequence isolated from the Sargasso Sea
atgaaaaaacatatcaagattctaaagaaaaaattaaagaactttgatccaaaactaagagaagaatgtggtgtttttggcgtaagtaatgcaacagatgcatcagctttagcagcacttgggcttcatgctttacaacatcgtggacaagaaggttgtggaattgttacattcgatggtgaaaaatactattcagaaaaaagatttggattagttggagataattttaataaagaaaaagtacttaaaaaacttaaaggaaattatgcaattggacataatagatacagtacaactggagaaaatactttaagaaatattcaacctttctttgctgatactaatgcaggtggaataggtgtagcacataatgggaatttaactaactcaatatctttaagaaataaattagtagaagatggtgctattttttacacaacttcagatacagaaacaattgttcaattaattgcaaaatcaaaaagacctaaaacaattgataaggttgttgatgctatatttcaaattcaaggtggctatgcattagtgatgctaactcaaaattctttaattggggttagagacccttatggaataagacctcttgtgattggaaaattaggtaaaagttatgtattaacttcagagacatgtgcgttagatattattggagcaaaatttgtaagggatgttgaaaacggagagatagttttaattgaaaatgatgaacttaaaagtatcaagcccttccctcctaaaaaagttagaccttgtgtgtttgaatatatttattttgcaagaccggatagtatactcgatagtaaaactgcttacgaacatagaaaaaatataggtatagagcttgcgaaagaaaatgatatcgatgcagatatagtggtgcctgttccagatagtggaaatgcagcggcacttggttttgctcaatatttaaaaattaattacgagcacggtttaattagaaatcactatgttggaagaactttcattgaaccaagtcaacaaattcgaagtctaggtgtaaagttaaaattaaatgctaaccaaactactatcaaagataaaaagattatattaattgacgattctttagttagaggaacaacatcacataaaatagttaagatgctgtatgatgctggtgcaaaagaagtgcatgttaaaattgcctgtcctgaaataagacacccagacttttatggtgtggatactccgactaaaaaagagcttttagctgctaataaaaccaatgatgaaatttgtaaatatattggagcaaaatcattaaaatttttatctatagaaggattatataaggcggttggttttgataaaagaaatgaaacttatcctcaactaacagatcattattttacaggtgattatcccgttaaaccgattgatgagcttggagatagtaaggttactcaattatctttattaagcactgcatctaataactaaa

SEQ ID NO: 239115 - DNA, 1534 bp, Unknown
  Bacterial polypeptide expressing nucleotide sequence isolated from the Sargasso Sea
atgtgcggcatcgtaggcgttatctcccaatcccccgtcaaccagctgatctatgacagcctgttgctgctgcagcatcgcggtcaggacgcggcgggcatcgcgacggcggacggcagcaatttccacatgtacaaggcgaacggcatggtgcgcgacgtgttccgcacgcgcaacatgcgcagcctgcccggcacctacggcatcggccaggtgcgctacccgaccgccggctcggcgtcgagcgaagccgaggcgcagccgttctacgtgaacgcgccgttcgggatcatcctcgcgcacaacggcaacctgacgaactggcagcaactgaaggacgagatgttccggatcgaccgccggcacatcaacaccaattccgacagcgaagtgctgctcaacgtgttcgcacacgagctgcaactgtcgaccacgggcctcgagctcgatccggcatcggtgttcaaggccgtctcgggcgtgcatcgccggctgcagggctcgtacgcgatcgtgtcgctgatcgccggctacggcctgctcgcgttccgcgatccgttcggcattcgcccgctgtgcatcggcaagctcgagaccgagcacggcaccgagtggatggtcgcgtcggagtcggtggcggtcgaaggcatcggtttcgaattcgtgcgtgacctggagccgggcgaagcgatcttcatcgacaaggccggcaatttccacagccagcagtgcgcggagaacccgacgctgaatccgtgcatgttcgaatacgtgtatctggcccgtccggattcatgcctcgacggcgtgccggtctacaacgtgcgcctgcgcatgggcgactatcttgccgagaagatcaagcgcgagctgccgaacgtgccgatcgacgtcgtgatgccgattcccgattcgtcgcgcccggccgcaatgcaggtcgccgcgaagctcggcgtcgagtatcgcgaaggcttcttcaagaaccgctacgtcggccgtaccttcatcatgccgggccaggccgtgcgcaagaagtcggtgcgccagaagctcaatgcgatgagcatcgagttcaaggacaagaacgtgctgatcgtcgacgattcgatcgtgcgcggcacgacctcgcatgaaatcgtgcagatggcgcgcgatgcgggcgcgaagtcggtgatcttcgcgtcggctgcgccgcccgtgaagttcccgaacgtgtacggcatcgacatgccgacgcgcggcgagctcgtcgcgcatggtcgcaccgacgaagaagtcgcgaagatcatcggcgccgaccacctgatctatcaggacgtcgacgatctgcgccgcgcggtgcgcgacatcaacccgaagctcgaacgcttcgaggcgtcgtgcttcgacggcaactacatcaccggcgccgtgacgcccgagtacctcgatgcgatcgagcgtgcacgtctcgcaccggcatcgcaggccgatcgcgacacggcgggcgacaccgaacgctcgcagatgaacctgcagctgtcggtcgagtgac

SEQ ID NO: 239116 - DNA, 1414 bp, Unknown
  Bacterial polypeptide expressing nucleotide sequence isolated from the Sargasso Sea
aatgtattgtaaaactacagacaaacttagagaagaatgtggtgtttttggtatattcggcactgatgaagcatctgttttaacaacattaggattgcattcacttcaacatagaggacaagaaggtgcaggaatagtaagttatgatgggatttcttttcactcagtacgtaaacaaggtttggtaggagataatttcaataataaaagtattttatctcaacttcctggtaaaacagccataggccacgtaagatactctaccacaggagaatctaagcctgaaaatcttcaaccgctatttgcaaatttagctattggaggctttgcatgcgcacataatggaaatctaacaaatacttcttcaataaaaaaccatttagttaagagtggttcaatttttcaaacttcatctgatactgaaattatccttcaattagttgctcgatcacaaaagaaaaaaatagttgataaactaattgacactctccaacaaataaaaggggcatattcacttgtaattttaacaaataaaaaacttattggagtaagagatccttttggaattcgacccttagttcttggagataaagatggttcccctgttttagcatcagaaacttgtgctctagatatgatcggcgcaaaatatattcgtgatattgaaaatggtgagatagttgtaataactgaaagtggtatagaatctattaaacccttcaataaaatttctgaaagaccttgtatatttgaaagaatttatttcgcaagtccagatagtatagtaggaaataaaacagtttatacttatagaaaagctcttggtgaacagctagctattgaaaataatataattgcagatgtagttgtcccaatacccgattcaggagtttcagcggctattggattttcacaaaattcaaaaatcccatttgaacttggtataattagaagtcactatgttggtcgtacttttatagagccctcccaaaccattagacaatttggagtaaaacttaaacatagtgtgaatagatcatgtattcaaaataaaaaagttattttaattgatgactcaatagttagaggaactacagcaagcaaaattgtaaaaatggtttacgaagctggagcaaaggaagttcatttaggaatctcatgccctccaattatacacccagatttttatggtattgacacacctaactataatcaattgattgcttctcaatctggtttaaaagaaatgacaaaattagttggagctaaatccttatttttcctttcattaaatggcacctataaagcaatggggtgtgaaaaaagaaactctaagacacctcaatttactgatcactgttttacaggtgaatacccaatagatgtaactgaaattctgaaacttaatagataa

SEQ ID NO: 239117 - DNA, 743 bp, Unknown
  Bacterial polypeptide expressing nucleotide sequence isolated from the Sargasso Sea
aaaaatttgttcagataacactacacttacaccttgcttatttgagtatgtatattttgctagaccagattcagttattgatggagttagtgtttatcaggcaagacaaaatatgggagctaagcttgctgaaaaaattaaaaaacatatacctgacgaagatattgatgtagttattccgataccagagagctcaattactagtggaacaaaagtagcggagtgtttaaacaaagaagttatctatggattcgtaaaaaacagatatattggcagaaccttcataatgcctgaacaagatatgagaagaagatcagtgcgaagaaaattaaacccgataaatgatgaatttaagaacaaaaatgtcttattagttgatgattcaatagttagaggaaccactatgaaagaaattgttgctatgtgttataaatctggagctaaaaaagtttctgttgcttcttcatcttcagaagtaaagttccccaatgtgtatggaattgatatgccagctaagagtgaattaatcgcaagcaatagatctctagaagaaataaaggaatttataggttgcgataatttagtttatcaggatttgtctgatctaattgattcagttacagaacttaattcagaactaaatgatgttgaaaagtctattttcactggtgtctatccaacaaatattacagatggatatttagaggatcttgaaaaaaagagacaagctattaattcttgat

SEQ ID NO: 239118 - DNA, 1040 bp, Unknown
  Bacterial polypeptide expressing nucleotide sequence isolated from the Sargasso Sea
aatgtgtggaatagttgggatttctgctgaaactaatgtagcagctgaaatatacgattctctcttaatgcttcagcatagaggtcaagatgctgcgggtatggtcgtttgtgatacagaagatcaactgaatagccgaaaatctatgggatatgttagagatgtgtttgagcaaaaacatatgaataatcttattggcaactacggcattggtcatgtaaggtacccaactgctggtggatctggatcagaatttgcacaaccaatgtatgtaaattcgccatatggtattagccttgcacataatggaaatttgacaaattctaaacaactttcagccgaacttttccatgctgaaatgcggcatctaaaaacagattctgattctgaggtattgcttaatatttttgcacatgaactagctaaacaaaaagaaatatacccttcagcggaacatatctttaaagcggtttctaaaacccattttagatgtgatggagcttatgcagttcttgcactaatcacagggcatggcattttagctttcagagacaacaatgcaattagacctttatctataggtataagaaatggaaaaactagagaagaatatattatttcatctgaggacgcactatttacttccatgggttttgataagctgcgagatatcgaacccggcgaagctatttttattgataagaatggaaaacttcactcacaacaatgtgcggaagagcctataaaaagaccatgtatatttgagtatgtatattttgctagaccagattcaaagattgatgaagtatcagtatataaagcaagaatgcgtatgggctctaagttagctgaacaaattaagaaatcaaaaccagatcatgatattgatgttgttatcccaataccagatagctctacaactgcggcacatgaattagcagttggtttaggtattccttatagagagggatttgtaaaaaatcgttatataggcagaacatttatcatgtctttatcaagaggaaaagaaaaaaatccgt

SEQ ID NO: 239119 - DNA, 1075 bp, Unknown
  Bacterial polypeptide expressing nucleotide sequence isolated from the Sargasso Sea
catgtgtggcatagttggtatttctgctgaaaaaaatgttgctgaagatatttatgaagctctgctaatgctgcaacatcgcggtcaggatgctgctggtatggttgtatgtgaaccttcagggaaactaaatagcaggaaatccatgggctatgttagggatgtattcagacaaagacatatgtctgctctctccggtaaatacggaattgggcatgttcgttatcctactgctggtggtgctggaaaagaattcgctcaaccaatgtatgtaaataccccatatgggattagtcttgctcacaatggtaacttaaccaactcaacaaatcttgcatcagaattatttcatgcagagaaaagacacatcaatactaattctgattccgaagttctacttaatatatttgcattggaactttctaaacaagatgcagttttcccgcaagcacaagatttctttgctgccgtacaaaagacacatatgaggataaatggtgcttatgctgttattacagtcattgcaggacatggcttgcttgcatttcgtgaccctctgggaataagaccattgataattggagaaaggcagggaaaacaacgcaaagaatatgtgattgcttctgaaaacgctttatttacttcacttggttttaaaactgttcgcaatgttttaccaggtgaagcaatctttattgataatgacggaaatcttcattcgcagcaatgttttgataaagtgcaaaattcaccctgtatttttgaatatgtttaccttgcaagacccgactctactattgatgaaatttctgtgtataaatccagaatgcgaatgggattaaagctagcatctaaaattaggaaactaaaaattgataaggatattgatgtagtaatacccattccagacagctcaacaacagcagctttacaacttgctgcagacttaaaaaaaccttataggcaaggttttgtcaaaaatagatacattggaagaacttttatcatgccttttcaagaagaaagaaaaaaatctgttcgcagaaaattaaacattcttgatttagaaatttaa

SEQ ID NO: 239120 - DNA, 934 bp, Unknown
  Bacterial polypeptide expressing nucleotide sequence isolated from the Sargasso Sea
attgaagaactttaatcctaaattaaaagaagagtgtggtgtatttggtataagcaatgctaaagacgcttcggtattaactgcacttggacttcatgctttacagcatagaggtcaagaaggttgtgggattgttacctttgatggtaaacaatatttttctgaaaaaagatttggattagttggtgataatttcaataaagaaaaggtgattaaaaaccttaagggtgattatgctataggacataatcgatatagcacgacaggcgaaaacactctaagaaatatacagcctttttttgctgacacaaatgccggtggtattggtgtagctcataatggaaacttaacaaattcaatttcattaagaaaaaagttagtggaagatggcgcaatatttcacacaacatctgatactgaaactattgttcaattaattgcaaaatctaagagagcaaaaaaaatagataaaattgtagatgctatttttcaaatacaaggaggttatgctttagtaatgcttactcaaacttcgctaattggagtaagagatccatatgggattagaccattagtattaggaaagttgaaaaatagttatgttttggcctcagagacatgtgctttagatataataggtgcaaagtttataagagaagttgaaaatggagaaattgttttgattgaaaatgatgaattaaaaagtattaaacctttccctcttaaaaaaataagaccttgtgtttttgaatatatttactttgcaagaccagatagtatcttaaacggcaagacagcatatgaatatagaaaaaatcttggagcagaacttgcaaaagaaaataatttagatgcagatattattgttcctgtcccagattctggtaacgcagcagcattaggatttgctcagtattttggaaaaaattttgaa

SEQ ID NO: 239121 - DNA, 1293 bp, Unknown
  Bacterial polypeptide expressing nucleotide sequence isolated from the Sargasso Sea
attgaaaatatttaaacaaaaaaaaattagagaagagtgtggtgtttttggtattcatgattttaatgatgcctcaacaattacagcgttaggtcttcatgctttacagcatagaggacaagaaggttgtggaattgtatcatttgatggaaaaaattttcactcagaaaaaagacatggtttagtaggagataattttactaataatgaaattttaaaaaaattacctggtaaatcagcaattggtcacaatcgctattcaacgactggtgaaacatctcttagaaatattcagcctttttttgctgatatttttagcgggggcataagcgttgcccataacggaaactttactaatgctttgaaacttagagataagttagtcagagacggcgcaatattcaggactacgtctgatactgaaactgttgtacaattaattgccaagtcaaagagacctaaaatgatagataaaattatagatacacttttccaagtgcagggtggttatgcattggtcatgatgagtaataagaaattgattggtgctcgtgatccattaggaattcgtcctttagttttaggtaaaataaaaaattcatatgttttagcatctgagacatgtgcttttgacataattggagcaaaatttattagagaaattgaaaatggggaaattgttgtaatagaaaataataatcttaaaagtataaagccttttaccaaaaagagagctaggccgtgtgtttttgagtatgtatatttttcaagaccagatagttatctgcaaggtaaatgcgcttatgaatatagaaaagagtttggttacgaattagcaaaagagtctgataatgtgggtgatatagtagttccagttcctgactcgggtgtgcctgcagctattggatatagtcaatataaaaaaatgcggtttgaacttggattaataagaaatcattacgttggaagaacttttattgaaccaaaacaaaatattagaagttttggagtaaaattgaaacttagttcaaataaatcatctataaagaataaatcaattatattaattgatgactctatagttagaggtacaacctgctcaaaaattgtcaaaatgttatatgacggtggagcaaaagaggttcatgtaagaatagcatctcctccaattaaatatccagatttttatggaatagacatgccttcaagaaaggaattgatagcagcaaacaaaaatttaaaagaaatgtgcaaacatattcaggctagttcactaaaatttttaagtattga

SEQ ID NO: 239122 - DNA, 1351 bp, Unknown
  Bacterial polypeptide expressing nucleotide sequence isolated from the Sargasso Sea
gaagtcaaacacatgcagcgcctacagggcaatgcaggtattggccacgtacgttatcctactgcaggcagttccagcgcgtcagaagcgcagcctttctatgttaactcgccatttgggatttcattagcccataacggtaacttaaccaacacggttgaattagctgaaggcctgatcaaaaaacgtcgccatgtgaacaccacatccgactcagaagtattattaaacctgctggccgatgagctgcaaaaaaccactagcttaatgctgacacctgacgaagtgttcgacactatcgctaaagtgcacgagcaagcccgtggcgcctatgcggttgtggccatgattatcggtcaaggtctggtggcatttcgcgacccattcggtattcgtccactggtattaggtaaacacgaaaccccaaccggtactgagtacatggtggcctctgagagcgtggcgctcgatgccgtcggttttgaagtaatgcgcgatgtggcaccaggcgaagcgatttatatctctctcgatggccagctttacactcgccaatgcgcgaaagagccaagctactcaccttgtatcttcgaattcgtgtattttgcgcgtcctgattcgactatcgacaacgtctctgtttatgccagccgcgtaaacatgggtgccaagctcggtgaaaagatcaaaaaagaatggtacgaccatgacattgacgtggtcattcctattcctgaaacctcatgcgatatcgcattagaaatcgcccgttgcatggacttaccttaccgccaaggttttgtgaaaaaccgttatatcggccgtacctttattatgcctggtcaacaggagcgtaaaaaatcggtacgccgtaaactcaatgccatcaacactgagtttaagggtaagaacgttctgttagtcgatgactctatcgtgcgtggtaccacgtcagagcaaatcattgagatggcgcgtgaagcgggtgccaagaaagtgtactttgcctcggcggcaccggaaattcgtttcccgaacgtttacggtatcgatatgccaacctcgaatgagctgattgcccacggtcgtgatgccgatgaaattgctaagctgattggcgccgatggcattatcttccaaaatctgccggatctggttgaagcggtgagaatggaaaacccagagatcaaacgtttcgaaacctctgtgttcgatggtcactacatcacgaacgatgttgaccaatcttacctcgaccacttgactcagttacgtaacgacgatgctaaagccgaccgtaataaagacattggcactaacttagagttacacaacgtttgccatccataag

SEQ ID NO: 239123 - DNA, 1492 bp, Unknown
  Bacterial polypeptide expressing nucleotide sequence isolated from the Sargasso Sea
atgtgtggaatagttgggatttcggctgaaacaaacgtagctgctgaaatctatgattctcttttaatgcttcagcatagaggtcaagatgctgcagggatatctgtttgcaatagtgatgatcaattaaactctagaaaatcaatgggatatgttcgcgatgtttttcaacaaaggcatatggacaaacttaccggaaattacggaatagggcacgtaagatatcctacagctggtggtgctggtaaagaatttgcgcaacctatgtatgtaaattcaccatatggtattagtcttgcgcacaatgggaatttgactaattccaagcagttaggaactcaattatttcatgcagaaatgaggcatctcagaacagacagtgactcagaagttttattaaatatatttgctcatgagcttggtaaacaaagagagatatatccatcggaaaaaaatatttttaaggcagtaactaagacgcacataagatgtgatggggcatatgcagttattgctcttataactggatatggtttggttgcttttcgagacaacaacggaataagacctctatcaattggagtaaggaaaggaaaagaaagagaggaatacattgtttcgtctgaagatgctctttttacacctcttggttttgaaaagctcagagatatagatcctggtgaagctatatttattgataaaagtggaaaattattttctcaacaatgtgctgaaaatcctcagaagcgaccatgtatatttgaatatgtttatttttcaagaccagactcaaagattgatgaaatttcagtctataaagcaagaatgagaatgggaacaaagctcgctgagcaaatcaagaaaaccagacccgatcacgatatcgatgttgtgatacctattccagatagctcagtaactgctgcacatcaattagctgttgacttgaatgttccctatagagaaggctttgtaaagaatagatatattggaagaacttttattatgccttatcaagaagagaggaagaaatcggtaagaagaaagttaaatattcttgacttagaatttgaaggaaaaaatgttttacttgttgatgactcaattgtaagaggaacaaccagcaaaaaaattatagaaatggccagagaagctggagcaaaaaaagtttattttgcatccgctgctcctgcaataaagtatcaaaatttatatggaattgatatgcctgcaacagctgagctaatagcatcaaataaatcaaatgacgaagttgcctctgaaattaatgcggattggctaatatatcaaacgttagaagacttaatagattctgtgagggagggtaataaggaaataagtgaatttgaaacttcaatttttacaggtgagtacttcactcctcttgttgaaaattatcttgaagaattagaaatttctagaaaagacgagcttaaaatgcaaagggaaaaatctaaagctaagagctaac

SEQ ID NO: 239124 - DNA, 1531 bp, Unknown
  Bacterial polypeptide expressing nucleotide sequence isolated from the Sargasso Sea
tatgtgtggaattgttggaatagtcggacaagaggctgttaatcagccactctatgatgctttgagtagtctccagcataggggccaggatgccgctggaatcatgaccgaggataatggcaatctgcatctgcgaaagactaatggactggttcgtgatgtttttcaagagcagcatatgatgcgtttgactggtaatgttggaataggacatgtgaggtacccaacagctggtagttcaagtatgtctgaggcccaaccgttctatgttaattctccgtatggaattgcacttgctcataatggaaatttggtaaatacagatgagcttaagcgattagtcactgaaagtgatcaccgtcatctaaatactgactcagatacagaagtgttgctcaatgtgtttgctcatgagttaggaaaggggtctgcaaaggcattaactccaaccgcaatccttagtgcagtaggcgaagtccatagacggtgctcaggcgcatatgctgttgttgcaatgattattggttacggaattgtggctttccgtgatccaaacggtatacgacctttagtggtgggatcaagaaaaacgggtgccggactggagagaattatcgcttctgaaagtgtagcgcttgatgcacttggatttgtattagatcgtgacatattgccgggagaggcagtttttattgataagagtggtaagctccatagtagagaaatcgttaaggagcaatcctattctccttgtattttcgaattcgtttattttgctcgtcccgattcaatcattgataaattatcggtatataaagcccgattacgtatgggcgaaaagcttgcagaaaaaattctttacttacgacctgatcatgatatcgatgtggttgttccggtgccagatacctctcgcactgccgcggttcaggttgcccatgagctaggggtaaagtatcgagagggtttcattaagaatcgctatattggtagaacatttatcatgccagggcaagcagagcggcaggcctccgtgcgtcgaaagcttaacgctatcgatcttgagtttcgtggaaaaaatgttcttctcgttgatgattcaattgttcgaggtacgacatctaaacagattataaatatggctcgtgagtcgggagctaacaaggtttactttgcttcagccgctccaccggttcgttatcctaacgtttatggaatcgatatgccggcagcaagtgaacttgtggctaatggtcgaactatagaggatatccaaacaataattggagcggattggcttatataccagaaccttgaggatcttgagcaggcggtttatcacgaagaggcggatatagatttttttgatacatcttgtttctcaggaaagtatgtagcaggtgatataagccctacatatttaaatcaactagaggttatgcgttcagatgctgcgaaagctgaacgaaacgccatgattagagacaaagaggatagtgaggattttccacaatctacaagcattgtttag

SEQ ID NO: 239125 - DNA, 1450 bp, Unknown
  Bacterial polypeptide expressing nucleotide sequence isolated from the Sargasso Sea
attgaagaattataatccaaaacttaaagaggaatgtggggtatttggaatctacaataataatgatgcttcaactttaactgcacttggattgcatgccttgcaacatagaggtcaggaaggttgtggaattatttcttatgatggaacgaattatcattcggaaaaaagatttggattagttggtgataattttaataaagaaaaagttttaaaaaaattatcaggatcccatgcaattggccataatagatatagtacaacaggaggcaccactttaagaaatgtccagcctttttttgctgataccaatgcaggtggaattgccgttgcacataatggaaacctcacaaatgcaattactttaagaaaaaagttagtagaagatggtgcaatattttatagtacttcagatactgaaactattattcaacttattgcgaaatcgaaaagagaaaaaaaaattgataaaattattgatgctctttttcagattcaaggggcatatgctttagtttttctaacacaaaatactttgattggtgtaagagacccatacggaataagacctttggtaataggaaaattggataattcatatatattttcttctgaaacttgtgccttggacatcataggagcaaaatttgtaagagaagttgaaaatggagaaattgtttttattgaaaacaataaattaaaaagcattaaaccttttcctttgaaaaaacaaagaccatgtgtttttgaatatatttattttagcagacctgacagtgtattaaatggaaagtgtgcttacgagtacagaaaaaattttggacaagaattggcaaaggaagcagatgttgaagcagatttaatagttcctgttccagattcaggaaacgcagctgctataggttatagtcagttcttaggaagaaaatttgatctaggtttaataagaaatcattatgttggaagaacatttattgagcctgttcaaaaaattagaagcctcggagtaaagttaaaacttaatgcaaacaaatcaactattaaaaataaaaaaatagttctcattgatgattcccttgtaagaggtactacttgttataagatagttaaaatgctttatgatgctggggccaaagaagtacatgtgagaattgcttcaccggaaattaaatttccagatttttatggcatagatactccaacaaaaaaagaactcttagcagctaataaaaataatgaagagatctgcaaatatataaacgcaaaatctttgaaatttttatctatagatggaatgtataaagctatggggtttgaaaaaagaaataataattatccacagcttacagatcattattttactggggattaccccgttaaaccaattgataatcttggggatgataaaattacccaattatcattattgagtactgcatctaataactaa

SEQ ID NO: 239126 - DNA, 1480 bp, Unknown
  Bacterial polypeptide expressing nucleotide sequence isolated from the Sargasso Sea
atgtgcggaattatagggatttctgcagaaaataatgtagctgaagagatttatgaatctctattgatgctccagcatagggggcaagatgcagccggaatggttgtttgtgaacctagcggtaaacttaatagtcgaaaatcaaagggctacgtgagggatgtctttcagcaaaaccatatgaataatctccaaggtaatcttggtatagggcatgttcgatatccaacagcaggtggaataggtaaggaatttgctcaacctatgtatgtgaatacaccttatggtataagtctagctcataatgggaatttaactaactcaaaaaaattagctgctgaactatttcatgctgagagacgtcatataaatacagattctgattcagaagttttacttaacatttttgcattagagctttccaaacaggaagctgtatttccaaaaccaaaagatttcttttcagctgttgagaagacacacttgagaattaatggtgcatatgcagttgtagccttgattacaggatatggaattctagcatttagagatcctcttggaataaggcctttatcaattggaatcagaaaaggaaaaaacagaaatgaatatgttgtatcttctgaaactgcacttttctcatcaacaggttttaaatttttaagagatgttgagcctggtgaggctgtatttattgataatgcagggaaaatcttcactcagcaatgctcaacttcttcgcaaaaaaggccatgcatatttgagtacgtttatctcgcaagacccgattcaacaatcgatgagatatcagtttataaatcgagaatgagaatgggtcttaagctggcagaaagaataagaagtcttaatttagttgatgaaattgatgtagtaatacctattcctgatagctcaacaactgccgccttacaacttgctgcagatttaaataaaccttacaggcaagggtttgtaaaaaacagatatattggtagaacatttatcatgcctcttcaagaagaaaggaaaaagtcggttagaagaaaactaaatattcttgatctagagtttaaagataaaaacgttttacttgttgatgattcaattgttagagggacaacaagcaaacaaattattgaaatggttagagaagcaggagcaaaaaaagttttattcgcatctgcagctcctcctgttaagtttcaaaatctatatggtattgatatggctgctacgaaagaattagttgctcataataagtcagaatcagaaattgctgagattattggagcagatgaattgatttatcaaactcttaacgatcttattagttctgttcaagaaggaaatccggaaattaaagagtttgagacttcgattttcactggcaagtatcctacagagatagatgatggatatcttgaaaaccttgaagaagagagaagcgacattgtcaaaatgtcaaaaacaaaaaattaat

SEQ ID NO: 239127 - DNA, 1471 bp, Unknown
  Bacterial polypeptide expressing nucleotide sequence isolated from the Sargasso Sea
tatgaagaaactaaagaaaaagttcaagatatatgatcctaaattaaaagaggagtgtgctgtttttggaataagtaataatgaagacgcagcaacccttacggctttaggacttcacgctcttcagcatagagggcaggaaggttgtggaattgtttcttttgatggactcaaatatcactctgaaaaaagatttgggcttgtaggagataacttcaatgatgaaaaagttttaaaaaatttgccaggtaaatttgcaattggacacaatagatattcaactacagggggcacagcattgagaaatgttcagccattttttgctgacactaactcaggaggcattggggttgcacataacggtaatttaacaaatgcaattactttaagaaataaaatggtccaagatggatcgattttttatactacctcagacactgaaacaatagttaaactgattgccaaatctaaaagagtaaaaacaatagataaaattattgatgctatatttcaaattcaaggtggctatgcacttgtgatgatgacgcaaaatacccttataggagtacgagatccttacggaattagaccattagtgattggcaaattaaaaaactcatatgtatttgcctctgagacatgtgcctttgatataataggagctaaatttgttagagaagttgaaaatggcgagatcgtttatattgaaaatgatgaactgaaaagcattaaaccatttccaccaaaaaaagtcagaccttgtgtttttgaatatatttacttttcaagaccagacagtattttgaatggaaaaacagcctacgaatatagaaaaaactttggagcacaacttgctaatgaggacaatataaatgctgatttagttgtgcctgtaccagactcaggaaatgcagcggcattaggctacgctgaaaaaaaaggcttaaaatttgacttaggtttaataagaaatcattatgttggtagaacttttattgaaccatctcaacaaattagaagtttaggagtaaaattaaaattaaatccaaatatatctgtaattaaagataaaagaataattctagttgatgactcacttgttagagggactacgtcatcaaaaattgtgaagatgctatacgattctggagcaaaagaagtgcacgtaagaatagctagcccagaaataaaatttcccgacttttatggtgttgatacaccaacaaaaaaagagcttttagctgctaataaatctacaaatgaaatatgtgaattcataaaggcaaaatcgttaaaattcttaagtttaagtggtttatatttaggaatgggctttgataaaagaaatgataattatccacaattaactgaccaccactttactggtgaatatccagtgaaaataatcgatgagcttggtgaggataaagtaactcaactttcattactaagtacggcttcaaataattaa

SEQ ID NO: 239128 - DNA, 1246 bp, Unknown
  Bacterial polypeptide expressing nucleotide sequence isolated from the Sargasso Sea
gatgcaaaagaaaaagttcaagagttataatcccaaattaaaagaagaatgtggtgtgtttggaataagcaattttgaagatgcttctgcattaacagccctaggtcttcatgcattacaacacagaggtcaagaaggttgtgggattgtatcttttgatggaaacaattactactcagaaaaaaaatttggtttagttggtgataattttaataatgaaaaagtattaaagagtttgccaggaaattttgcaatcggtcataatagatacagcacaactgggggaacaacattaagaaatatccaacctttttttgcagatacacatgcaggaggtattggagttgctcataatggaaaccttacaaatgctttaacattaagacaaaaactcgttaaaggtggtgcaattttttactctacatctgatactgaggtaattattcaattaattgccaaatcaaaaagatctacaacagtagaaaaaataactgatgcaatttttcaaattcaaggtggttatgcactcgtaatgcttgcccaaaataaacttataggagtaagagatcctttgggaataagacctcttattataggaaagttaaaaaattcttatgtattatcatctgaaacatgtgctttagatataattggtgctaaatttttaagagaagttgaaaatggagagatagtagtaatagaaaatgatcaacttcaaagtataaaaccttttcctgataaaaaatctagaccttgtgtttttgaatatatttatttttcaagacctgacagtattttaaatggaaaaactacttatgagtttagaaaaaaatttggggaacaattagcaaatgaggataatattaaagctgatcttgtagttccagttccagactcaggaaatgctgcagctctcggatatagtcaaataactaaaattaattttgatcttggcttaataagaaatcattatgtaggtaggacatttattgaacctgcacaaaaaattagaagtcttggggttaaattaaaattaaatgcaaataaaagctctataaaagataaaaaaataatattaattgatgactctcttgttagaggaacaacatcacataaaattgttaagatgctttacgacgccggtgcaaaagaaatacatgtaagaattgcaagtccagaaattaaattccctgatttttatggagttgatatgccaacaaaagatgaattgttagctgcaaataaa

SEQ ID NO: 239129 - DNA, 1157 bp, Unknown
  Bacterial polypeptide expressing nucleotide sequence isolated from the Sargasso Sea
aatgataaagacgaactctattaaaattagagaagagtgtggtgtttttggtatctcaaatataaatgatgcttcagctttagcagctttaggtttgcatgccctacagcatagagggcaagaaggttgtggtatagtttcttatgatggtaaaaactattattccgaaaaaagatttgggctcgttggagataattttaataatgaagatacaattaagaaattacctggctcttttgcaattgggcacaatagatacagcacaacgggtggtaaaatattaagaaatgttcaacctttttttgcagatactaatgctggaggcataggtgtctctcataacggtaattttacgaacgcaattacacttagaaaaaaactagttgaagatggtgcgattttttatacaacttctgactcagaaacaattgttcagctcatagcaagatcaaaaaaagaaaaaaatattgataaaattatagaggctatctcacaaatccaaggcggatatgctttagtgatgcttactaaaaatattttaattggtgcaagagatatttatggcatcagacctttggttataggtaaattaaatgaatcctatgtcctagcttctgaaacatgtgcactagatattattggtgccgaatttgtaagagaagttggaaatggagaaatagtttacgttgaagataatgaattacatagtctaaaaccatttggaaatcatactcctagaccttgtgtttttgagtatatttatttttcacgaccagatagtattttgaaaggaaagactgcttatgaatatagaaaaaatttaggaaaagagttagcaagagaagacaatgtagatgcagaattagttgtgcctgtgccggactcgggaaatgcggcagctatcggatacagtcaacaaaaaaaaattaattttgatttgggtttaataagaaatcattatgttggtagaacttttattgagccaggtcaacaaattagaagtttaggagtcaaattaaagttaaatgctaataaaagttcaattgaaaataagaaaataatcttagtagatgactcgttagttcgtggaacaacttcctataagattgtaaaaatgctctatgatgctggagccaaagaagttcatttaagaatag

SEQ ID NO: 239130 - DNA, 1516 bp, Unknown
  Bacterial polypeptide expressing nucleotide sequence isolated from the Sargasso Sea
gatgtgtggtattgttggaatcgtaggtaagtatccggtcaatcaggcgttgtacgacggtttaactgtgttgcagcaccgtggtcaggatgccgccggcatagtgacagtagacaacaaaaccttacgcttacgcaaagccaatggcttagtgaaagacgtatttgaagcccgccatatgcagcgtttgtctggcaatatgggcataggccacgtgcgttacccaacagcgggttcagccagtacggccgaagctcagccattttataccaatagtccatttggtatagccctggcgcacaacggcaacctgacgaactctgaagaattaaaagacgagttattccgtaccgctcgtcgtcatgttaataccaactcagactcagaagcgctgttaaacgcttttgcccatgagctggatattcatgccgatatgcatgtaaaccctgaccatatttttggtgcagtcactaatttacatcgtaaaatccgtggtggttatgcggtggtggcagtcgtgattggccatggtttagtggcatttcgtgatccaaacggtatccgtcctctggtgatggggaaacgcgaaactgcgcttggcactgagtatatggtggcttcagaaagcgtggctttagatgcggacggttttactgtgctgcgtgatgtagcgcctggtgaagctgtgtatatcaccgaagatggcgagttgtttagccagcaatgtgctgaaaacccaagttatgccccatgtatttttgaatacgtgtattttgcccgtccggactccaccatagacaatgtgtctgtgtatgcatcccgcgtggctatgggtaaaaagctgggtgagaaaatcaaaaaagaatgggcgcatttagatattgatgtggtcattccaattcctgaaaccagtaacgatgctgcgttgcaaattgcgcatgagttaggtttgccataccgtcagggttatgtgaaaaaccgttacattggccgtacttttattatgccgggtcaaggggagcgtagaaagtcagtcaaacgcaaactgaacgcgatttggcaggaattcaaaggcaaaaacgtcttgctggtggatgactctatagtgcgtggaacaacttcagagcaaatcattgatatggcgcgtgaagccggtgcaaagaaagtgtatttcgcctctgcggctccggaaattcgtttcccgaacgtctacggtattgatatgccatcggccaacgagctgattgctcatggtcacgatgttgaaagcatctgcaaaattattggtgcagatggtttgattttccagtcactggaagatttagtggacgcagtgcgttcacaaaatcctgaactgaagcgttttgaaacttcagtgtttgatggtgtttatgtgactaacgacattgatcaggcttacctgaaccgtttggatgcacaacgtaatgaagcctccaaacgcaaaaaagaagccgagttatccgcaagtttagatttgcataacgaaggcaactga

SEQ ID NO: 239131 - DNA, 1465 bp, Unknown
  Bacterial polypeptide expressing nucleotide sequence isolated from the Sargasso Sea
gatgctaaagaaaaagttcaagagttataatccgaaacttaaagaagaatgcggagtgtttggcataagtaataatagcgatgcttcagcccttactgctttaggactgcatgctcttcagcacagaggccaggaaggttgtggaattgtaactttcgatggtgatcaatatcattctgagaaaagatttggtttggttggagacaattttaataaagaaaaagtactaaaaaatttaactggaaaatatgctattggtcataatagatacagcactactggaggtacaacattaagaaacattcagccattttttgcagatacaaacgcgggaggaataagtatttcgcacaatggaaacttaacaaatgcaataaaattgagatcaaaattagttaaagaaggtgctattttttatactacatctgatactgaaactattgttcagctaattgctaaatcaaaaagaactaaaactatagataagattgtagaagcattatttcaaatacaaggaggttatgccctagtcatgctaactcaaaaaaaattgataggagttagggaccctttcggaataagaccgctagttattggaaagttaaagaattcatatgtattagcatcagaaacttgtgctttagatataataggtgcaaaatatttaagagaagttgaaaatggagaaattgttttgattgaggatgataagattgaaagtattaaaccatttccaaaacaaaaagttcggccatgtgtgtttgaatatatttatttctcaaggccagatagtattttaaatggcaaaactgcttatgaatataggaaaaatttaggtattgagcttgcaaaagaagatgatgttgaaggagatgttgttgtaccagttcctgattcagggaatgcagcagccctgggttatagtcaacaaaataaaaaaaatttcgaattaggattaattagaaatcattatgttggaagaacttttattgaaccctcacaaaaaattagaagtcttggagttaaactaaaattaaatcctaataaaacatcaataaaagataagagaattattttagttgatgattcactagtgagaggaacaacaagttataaaattgtaaaaatgttatatgatgctggggctaaggaagttcatgtaagaatagcgagtcctgagattagataccctgatttttatggagttgatacacctacaaaaaaagaacttttagcagcaaataaaaataatgatgaaatatgtaagtacattggggcaaaaagtttaaaatatttgtcaataaatggtctctataaagcaattggatttgaaagtagaaataaagactaccctcaattaacagatcattattttaccggagaatatccagttaaaccaatagataatttaggtgatgataaaattacacaactttctttattaagcactggatcaaataattag

SEQ ID NO: 239132 - DNA, 1178 bp, Unknown
  Bacterial polypeptide expressing nucleotide sequence isolated from the Sargasso Sea
aatgtgtggaatagtaggtatttctgctgaatctaacgtagctgcagaaatatacgactctttgctcatgttgcagcatagaggccaagatgcagcaggcatgactgtttgtgatcaaaacgataaattaacaacaagaaaatctatgggttatgttcgtgatgtctttcagcaaatgcatatggataaactcataggcaattatgggattgggcatgttagatatccaacagctggaggaaatggtaaagagtttgctcagccaatgtatgttaattctccttatggcattagtctgtctcataatggaaatcttacaaactcaagtcagctctctaatgagttatttcatgctgaaatgagacatcttttaactgattcagattcagaggttcttttaaatgtttttgctcacgaacttggaaaacaaagagaaatatatccttcagctgaacacatttttaaagcagtcacaaaaacccatacaagatgcgagggtgcatatgcggttcttgcactaataacagggcatgggattttggcgtttcgtgatgaaaatggaataagaccactttctataggcataagaaaaggtaaatcaagagatgaatatattattgcgtctgaggactcattatttataccacttgggtttaaaaagttgagagatattgagccaggcgaagcgatttttattgataaggatggtaatttattttctgaacaatgttctaagatgccccggaagagtccatgtatttttgaatatgtttatttttctagaccagattccaagattgacgaaatatcagtttataaagcaagaatgagaatgggatcaaaactagcagatcaaataaaagaaatcagaccaaatcatgatatagatgtggtcatacccattcctgatagctccactactgcagctcatcaactcgcagtggatcttggtgtgccatacagggaagggtttgtaaaaaatagatatattggtagaacttttataatgccataccaagaagaaagaaaaaaatcagtaagacggaaactaaatatcttagatttagagtttcatggaaagaatgttttacttgttgatgattcaattgtaagaggcacaacaagtaaaaagataattgagatggctagagaggccggtgctaaaaaagtttatttgc

SEQ ID NO: 239133 - DNA, 1486 bp, Unknown
  Bacterial polypeptide expressing nucleotide sequence isolated from the Sargasso Sea
aatgaaagcattgaaaccgaataaaaatttaatatttaatgaagatgataaattgcacgaagaatgtggtgttttcggtatatacaatcaccaagattctgctgcattgactgctttaggtcttcatgcactgcaacatcgaggtcaagaagcagcaggaattgttacttttgatggtacaaaatttatatctgaaaggcaccctggattagtaagtgataatttcactaaaacatcagtaataaatcgtttagtaggtaatagtgctgttgggcataatagatactcaacaacaggagctactatacagagaaatatacaacctttctttgcagatttatggggtggcggatttgcaatagctcacaatggaaatattaccaacgccctttcactaagggatgacctcattagaaaaggatcaatattccagtctacctctgacacagaaacaattttacaactagtagcaagatctgatgctgatagaaccttaaatcgccttgtcgatgcattaatgcaaatttccggagcatgggctttagttgttttaactaataaaaaattaataggcgccagagatccttatggtattaggcctctggttttaggagagctagatggagcaaaaatattagcatcagaaacatgtgcattagatattattggagcaaaatttattagggaaattgaacctggagaagtaattgtaattacagaagatggtgaagagagtattaaaccttttccaaacgcgagagcacgtccctgcatttttgagtatatttatttttctagacccgattcaatgttagatggaaaatctgtttatgagtgtagaaaatcatttggcaaaaatttagcaagagaatgtccttctgatgctgatattgtggtgcccgtccctgattcaggcgttccagctgcattgggatattcagaagagtcaaaaataccatttgaattgtctattattcgaaaccactatgttggaagaacatttatacttcctacgcaatcaaatagacaatcatcagtaaaacttaaacataatcctgatagaagctctatcaaaggtaaaagcgtagtgcttgttgatgatagtattgtgagagggacaacctcagtgaagatagtcgaattaatgagagaagctggtgcctcagaaattcacatgagaatagcctgccctccaataaaatatccagatttctatggaatagatacaccggaaacagaacaattattggcatctaataaaagcttagaagaaatgtgtaaatatattggcgcagataccttaggatttctctcattagatggtttatatcaatcaatggggtgcagtgaaggaagaaataacgataaccctgaatatacagatcattgctttactggtgattatccaacaaaccttaacgactataaaagcgagaaaattcaagaacaactctctcttttatctgaaaatgaaagtcaaaattaa

SEQ ID NO: 239134 - DNA, 1445 bp, Unknown
  Bacterial polypeptide expressing nucleotide sequence isolated from the Sargasso Sea
aatctatgattctcttttaatgcttcagcatagaggtcaagatgctgctggcatttctgtttgcaataatgatgatcaattaaactctagaaaatcaatggggtatgtccgagatgtttttcaacaaagacatatggataagcttgtcggaaattatggaatagggcacgtgagatatccaacggctggtggtgctggtaaagaatttgcgcaacccatgtatgtgaattcaccttatggcataagtcttgcgcacaatgggaatctgactaattcaaagcagttaggaaatcaattatttcatgcagaaatgagacatctcagaacagatagcgactccgaggttttattaaatatatttgctcatgaacttggtaaacaaagagagatatatccatcagaaaaaaatatttttaaggcagtaactaaaactcacataagatgtgatggagcatatgcagttattgctctcataaccggatacggtttggttgcttttcgagataataatggaataagacctttatctataggagtaagacagggaaaagaaagagaggaatatattgtttcttctgaagatgctctttttacacctcttggttttaaaaagcttagagatatagatcctggtgaagctatatttattgataaaaatggaaaattattttctcaacaatgtgctgataatcctcaaaagcgaccatgtatatttgaatatgtttatttttcaagaccagattcaaagattgatgaaatttcagtttacaaagcgagaatgagaatgggaacaaagcttgctggacaaatcaagagaattagacctgatcatgatattgatgttgtgatacccattccagatagctcagtaaccgcagcacatcaacttgctgttgatttgaatgtcgcctacagagaaggctttgtaaagaatagatacattggaagaacttttattatgccatatcaagaagagaggaagaaatcagtaagaagaaagttaaatattcttgatttagaatttgaaggaaaaaatgttttacttgttgatgactcaattgtaagaggaacaactagtaaaaaaattatagaaatggccagagaagctggagcaaaaaaagtttattttgcatccgctgctcctgctattaagtatcaaaatttatatggaattgatatgcctgcaacagctgagctaatagcatcaaataaatcaaatgatgaagtcgcatctgaaattaacgcagattggttaatctatcaaacactagaagacttaatagattcagtgagagagggtaatccagaaataagtgaatttgaaacttcaatttttaccggcgagtacttcactcctctagttgaaaattatcttgaagaattagaaatttcaagaaaagacgaacttaaaatgcaaagggaaaaatctaaagctaagagctaac

SEQ ID NO: 239135 - DNA, 1222 bp, Unknown
  Bacterial polypeptide expressing nucleotide sequence isolated from the Sargasso Sea
aaagtttgctattggacataatagatactcaacaacggggggaacagctttaagaaatgttcaaccattttttgcagataccaatgctggtggaattggtgtagcccataatggaaatttaactaacgcaataactataagaaataaattagttgaagaaggagctatattttacacaacatctgatacagaagttatagttcagttaatagcaaaatcaaaaagatcaaaaactattgataaaattgtcgatgcaatatttcatattcaaggtggatatgccttggtaatgatgacaaagaatacgcttataggattaagagatccttatggtattaggccacttgtaataggtaaattaaaaaattcatatgtatttgcatctgaaacatgtgctttagatattataggtgcaaaatttgttagagaagttgaaaatggagaaattgtttatgttgaagatgatgaactaaaaagtttaaaacctttttctccacaaaaagtaagaccttgtgtctttgaatatatatatttctcaagacctgatagtattttaaatggaaaaactgcttacgaatacagaaaaaattttggagcccaattagcaaaggaagatgatttagaagcagatatagttgttcctgttccagactctggaaatgcagcagccttgggctatgctcaagagaaaaatattccatttgatttaggattaataagaaatcattatgttggtaggacttttattgaaccttctcaaaaaattagaagtttgggtgtaaaattaaaattaaatgcaaatttatctgttattaaagacaaaaaaataattttaattgatgactctttagtaagaggaactacgtctcataaaattgtaaaaatgctttataatgctggagctaaagaaatacatgtaaggattgctagcccagaaataaaatatccagatttttatggcgtagatatgccaactaaaaaagaacttttggcatcagacaaatctattaaagaaatatgcgattttatcaatgcaaaatcattaaaatatttatcgattgatggcctttaccaagctatgggttttgataaaagaaataatacatatccacaattgacagatcattattttactggagaatacccagtaaaaataattgatgaactgggagaagaaaaagttacacaactttcacttttgagcactggttctaataactag

SEQ ID NO: 239136 - DNA, 1402 bp, Unknown
  Bacterial polypeptide expressing nucleotide sequence isolated from the Sargasso Sea
aataagtaatctatcagatgcctctactcttactgctctaggtttgcacgctttacaacatagaggacaagaaggttgcgggattgtttcatatgatgggaaaaattatcattcagaaaaaagatttggattggttggtgataattttaataaagaaaaagtattaaaaaaattaccaggtaattatgccattggtcataatagatatagcaccacaggtggaaccactttaagaaatgttcaaccattcttcgctgatacaaacgcaggtggaatagcagttgcgcacaatggaaacctaacaaatgcaataactttaagaaaaaaattagttaaagatggtgctattttttacagtacttctgatactgaaactattgttcaattgatagcaaaatctaaacgagagaaaaaaattgataaaataatagacgctctttttcaaatccaaggagcttatgctcttgttatgctaacaaaaaatactcttataggagttagagatccttatggaataagacctttagttataggaaaattaaaaaattcatatattttagcttctgaaacttgcgcactagacattattggagcaaaatttgtaagagaagttgaaaatggagagattgtttgtatagaaaataatgaattaaaaagttttaaaccttttcccaaaaaaaaacaaagaccgtgtgtttttgaatatatttattttgcaagaccagacagtatattaaatggcaagtgtgcttatgaatatagaaaggattttggtaaagagcttgctaaagaatctgatataaatgtagacttaattgtcccggttccagactcaggaaatgctgctgctataggttatagtcaacatgtaaaaaaaaaatttgatctaggtttaataagaaatcattatgttggtagaacttttattgagccagcgcaaaaaattagaagtttaggagttaaactaaaattgaatgcaaacaaatcaactataaaaaataaaaaaatagttcttattgacgattctcttgtaagaggtactacctgctataaaatagtaaaaatgctttatgattctggtgcaaaagaagttcatgttagaattgcatctccagaaataaaatttcctgatttctacggaatagatacacctacaaaaaaagaacttttggcagctaataaaaataatgatgaaatttgcaaatatataaatgcaaaatcattaaagtttttatctatagatggaatatatagagctatgggttatgaaaaaagaagtaacacatatccacaacttaccgatcattattttactggagactatccaataaaacctatggataatcttggagatgataaagtgacacagttatctttattaagcacatcttctaataattaa

SEQ ID NO: 239137 - DNA, 577 bp, Unknown
  Bacterial polypeptide expressing nucleotide sequence isolated from the Sargasso Sea
atgaataaaacaaacccattgatattagctttgcctaaaggaagagtatataaagactttataccgcttcttgaaaaaacccaattcgctattaaagatgatgcagagaaatcaagaaagatgttacttgatacgaaccaccctagtgtaaaagtattaattatcagaggatgggatgtccctacgtacattacttctggggctgctcatataggtattgttggaaaagatatccttatggaaaaggaagaggaggagtttattgagctagcagatcttgggcttggtaagtgtagattatccttagcaggttatgaagatgttttatcaggttctgtaagattaaaaatagctacaaaatatcctaagatctcaactaaattcatgaactctattggtatacagccagagataatttatcttaatggcgcacaagaaatagctcccatgcttggtttgtcagatgccattatagatttagtagatactggtaaaactcttactgctaatggtctcacagagattaaaaccattgaagatatttctatgagattaatcgccaacaaagcttccatga

SEQ ID NO: 239138 - DNA, 556 bp, Unknown
  Bacterial polypeptide expressing nucleotide sequence isolated from the Sargasso Sea
aaagcttaccaatgtaaaaattatttatttacatgctagagaatgtattgaacaattatcattaggaaatattgatattggtttttcaggctacgatttgttcaaagaaagtcaaattaatacacaaaaaaaaatattaatcagtaaaaaatatgactttggcaatgccaatttagtattggctataccagacttatggattgatgttcaaactttattggatttagacgaagttgcagatgaattcaaaaaaaggaaaaaaagacttttaagaatagcaacaaaatatccaaatttaactagacaatttttatattcaaaaggagtaacgcaatttcaattagtcaaaagtctcggaagcaccgaagtagctccatttacaggcacgacagaaattatatcagacataactagcactggagcgacattaaaagctaacaatttgagaattttaaaagatggagaaattttaaaatcacaagcttgtttaatgatgtcaaaactttctttaaaaaaaacaggaataaaaaagattataaacttgcttagcagataa

SEQ ID NO: 239139 - DNA, 535 bp, Unknown
  Bacterial polypeptide expressing nucleotide sequence isolated from the Sargasso Sea
agtttaagaaacaaaaaaattgctacttcctatcctaatgtattaaaaaaatacctcaaagataatagtatagaagctacggttattaatattcatggttcagtagaacttactccgtatattggtatgtcggattgtatatgtgatcttgtttcatctggtgcgacactagaagaaaataatttaaaagaaattaaagtgatacttaattctcaagcagttttaattaaaaataaattacttgataaaaataaatttaatatagctgagatggtcatatcacgaatgaagggtgttattaatgcatttgaaagcaaatatgtcatgttaaatgctgattcaaataatattgaatcaatatgtaaactacttcctggttcagagtctccaacaataattccattagagaaaaaaaacaaggttgctattcatgctttatgcaaagaacctgtattttgggaaacaatggaaaaattaaaggcaaaaggcgcgtcttctattttggttatgccagtagaaaaaatattaaattaga

SEQ ID NO: 239140 - DNA, 373 bp, Unknown
  Bacterial polypeptide expressing nucleotide sequence isolated from the Sargasso Sea
tttggtggttgtcatatgtcgttggcggttaaaaaaaatagcaattattcaaaaccaactgatcttccagcgaattgtaaagtagcaagtaaatttattaaaacagcaagatcttattttgaagaattaaatattcctgtagaaatagttcaattgacaggatcagtcgagcttggtcctattacaggtatggcagaggcaatagttgatttggttgcaaccggaaagactcttaaagagaatggtttaattaaaatagatgatctttattattcgactgcaaggctaattggaaatcctttatctatgaggttagatgataatcatctcagagatactattttatcaatagaatcaactaatgctttataga

SEQ ID NO: 239141 - DNA, 418 bp, Unknown
  Bacterial polypeptide expressing nucleotide sequence isolated from the Sargasso Sea
atggaagacaaacaagatacattgatattggctttacctaaaggaagagtttataaagaggtcattccttttttgcaaaaaagtagatttaagttaaaggatgatccaaaaaagactagaaagttagttttagacacaaaaattgaccaatttaagatacttctagttagagggtgggacatacctgcgtacgttaatgcaggggctgcccatttagggattgtaggtaaggatatattgctagaaaaggaatctgaagaatttattgagctaaaggatttgggaataggaaaatgtagattgtctttggcaggtaaggaagatttgttaggttctgctaggatgagaatagctactaaatatcctaaaagttctgtaaagtttatggaatccataggaatacagtcagaaattatta

SEQ ID NO: 239142 - DNA, 691 bp, Unknown
  Bacterial polypeptide expressing nucleotide sequence isolated from the Sargasso Sea
atgactaaaaatattattaatatcggacttccatcgaagggaagactaaagcatgacacaattaacatattcaaaaaaaataaattgaaaatttactctgaaagaggagagagagatttatttggatacgttaaaaaactcccaaacattaaagttatttatttacatgcgagagagtgcattgaacaattgtcatttggaaacattgatattggtttttcaggatacgatttatttaaagaaagtgaaattaatatgcaaaataaaattttgataaataaaagatataattttggtaatgcaaatttagttttagctattccggacttatggatagatgttcaaactttgttagatttagatgaagttgctgatgaattcaaaaagaaaaagaaaaaacttttaagaattgcaacaaaatatccaaatttaactaggcaatttttatattcaaaaggagtaacgcaatttcaactagttaaaagtttaggaagtacagaagttgctccatttacaggtacagcagaagcaatttcagatataaccagtacaggagcaacattaaaagcaaataatctaagagtgttaaaagacggtgaaattctgaaatcgcaagcctgtttaatgttatcaaagcttagtttaaaaaagtcaggaataaaaaaaattataaacttgctaagtaagtaat

SEQ ID NO: 239143 - DNA, 409 bp, Unknown
  Bacterial polypeptide expressing nucleotide sequence isolated from the Sargasso Sea
aaagttgctaagttgcttgatttagagtttgggggatgtcacatgtcacttgccgtaaagaatggtagtaattattcaaaacctacggatcttccggctaattgtaaagtggcaagtaaattcacaaaaactgcaagagcctattttgataatttaaatataccagttgagatcgttcatttaacgggctcggtagagcttggtcctattactggaatggcagaagctatagtagatttggtagcaacaggcaagactcttaaagaaaacggtttaagcaaaattgacgatcttttttattcaactgcaaggttaatagctaatcctctctctcttagattagatagcaaccctctcagagatgtgattttatcaatagaatcttcaaaggatatattagatatttaaa

SEQ ID NO: 239144 - DNA, 409 bp, Unknown
  Bacterial polypeptide expressing nucleotide sequence isolated from the Sargasso Sea
tctgaattaaaagtcgcaaagttattagatttaggatttggtggttgtcatatgtcgttggcggttaagaaaaatagcaattattcaaaaccaactgatcttccagcgaattgtaaagtagcaagtaaatttattaaaactgcaagatcttattttgaagaattaaatattcctgtagaaatagttcatttgacaggatcagtcgagcttggtcctattacaggtatggcagaggcaatagttgatttggttgcaaccggaaagactcttaaagagaatggtttaattaaaatagatgatctttattactcgactgcaagactaattggaaatcctttatctatgaggttagataataatcatctcagagatactattttatcaatagaatcaactaatgctttataga

SEQ ID NO: 239145 - DNA, 688 bp, Unknown
  Bacterial polypeptide expressing nucleotide sequence isolated from the Sargasso Sea
ttacaagaagagcaacagaagaaaattaatttagaaaacgcaagaaatcagttagaaattgaaaaaagaaacggaaattgggaaaaagctggtgaactttcatatcaaataattccaaatttagaaaaaaatatttctaaaattgaaaatacagataatcttttaaattcaaccgtttctgaagaagatgtggcttccgttgtatctaaatggacaggaattccaattgaaaaaatgatggagtatgaacgtataaaattactaaaaataaaaggggagttaaaaaaatcaattgtaggccaagatcatgtgttatcagcaatttctaaaacaatcattcgttctagagcaggcttaagtgatccatctagtcctttaggtacttttatgtttttaggatctactgggattggcaaaacggaaactgctaaatctttagctcaatttttatttaatgaaacagactctatgataagaattgatatgtcagaatatatggaaagacattctatatctagattgattggcgctcctcctggttatattggctatgatgaaggaggaagcttaactgaagcagttaggcgtagaccttatagagtgatactttttgatgaaattgaaaaagcgcatttagatgttttaaacttacttttacaggtcatggatgatggcagattaacagaca

SEQ ID NO: 239146 - DNA, 649 bp, Unknown
  Bacterial polypeptide expressing nucleotide sequence isolated from the Sargasso Sea
tatgagcaaaatagtcattgcggtgcctagaggtagaataacgacagaatgtaaaaacttgttacttaaaaccagttttgctcctgatccattattatttgataaaaatactagaaaattaacttttaaatcaaaaaaaagaaatattgaatacattaaagttagagcttttgatgcatgcacttttgtagcattcggagcagcacaaataggtatagctggtgaagatgtgattaatgaatttgattattcagaaatatatgctcctttagatttaaatattggtcattgtcgtatttctgtagcagctttaaaatcattattaaaaaaagaggatccagaaacctggagtaatataagaattgctagcaaatatccaaatattaccaagaaatttttttataataagggtatccaagttgaaattataaaattaagtggctcaatggaattagcaccttcattaaatatgtgcaggagaattgtagatctagtttctaccggaaaaacattgaaggaaaatggtttaactgaaattgaagaaataatgaaaattcaatctaaattaatcgttaatagatctgcttataaaacaaatatgaaagaggtttcaaaaattatttctgaaataggtacttttgtaaaatga

SEQ ID NO: 239147 - DNA, 372 bp, Unknown
  Bacterial polypeptide expressing nucleotide sequence isolated from the Sargasso Sea
ttgggggttgtcatatgtcattggcagttagagaaaatagtcattattccaaaccaactgatctccccgctaattgtaaagtcgcaagtaaatttacaaaaacagcaagatcttatttcgatgaattaaatatacctgtagaaatagttcatttgacaggatctgtcgagcttggtcctattacaggtatggctgaggcaatagttgatttggttgcgactgggaagactcttaaagagaatggtttaattaagatagatgatcttttttactcaactgcaagattgattggaaatcccttatcaatgaggttagatgataatcatctcagagatacgattttatcaatagaatctactaatgcaccataga

SEQ ID NO: 239148 - DNA, 550 bp, Unknown
  Bacterial polypeptide expressing nucleotide sequence isolated from the Sargasso Sea
atgtttactatagctttaccaaaaggagctttgttaaaagattcaatttcaacttttaaaagagctgggttagatttctctgatgcgttggacggaaataatagatcattaacctttgaatctaattgcaaacgggcaaaagctttattagtaagaaatggagatgtgcctgtttatgtaagttatggtcaggctgatttgggtattgttgggtatgacgttttacgagaatctgaattaaaagtcgcaaagttattagatttagggtttggtggttgtcatatgtcgttggcggttaagaaaaatagcaattattcaaaaccaactgatcttccagcaaattgtaaagtagcaagtaaatttataaaaacagcaagatcttattttgaagaattaaatattcctgtagaaatagttcatttgacagggtcagtcgagcttggtcctattacaggtatggcagaggcaatagttgatttggtggcaaatggaaagactcttaaagagaatggtttaattaaaatagatgatctttactattcgactgcaa

SEQ ID NO: 239149 - DNA, 346 bp, Unknown
  Bacterial polypeptide expressing nucleotide sequence isolated from the Sargasso Sea
ggttaagaaaaatagcaattatataaaaccaactgatctgcctgcgaattgtaaagtagcaagtaaattcacaaaaacagcaagatcttattttgatgaattaaatttacctgtagaaatagtccatttgacaggatcagtagagcttggtcctattacaggtatggcagaggcaatagttgatttggtcgcaaccggaaagactcttaaagagaatggtttaattaaaatagacgatcttttctactcgacggcaagactaattggaaatcctttatctatgaggttagatgataatgatctcagagatacgattttatcaatagaatcaactaatgctttatag

SEQ ID NO: 239150 - DNA, 228 bp, Unknown
  Bacterial polypeptide expressing nucleotide sequence isolated from the Sargasso Sea
aaaaaaacaaatacatattgctgaatgttcccaacaccaaaatcgaagaaataagcaacatctttccagtacttaaaagcccaaccatactaccactggcagaagaaggctggagctccttacactctgtaatagaagaaaataaattctgggaggtcatagatgagcttaaagacgcaggcgcagaagatattttaattgttccaatagataaaatggtacgctaat

SEQ ID NO: 239151 - DNA, 640 bp, Unknown
  Bacterial polypeptide expressing nucleotide sequence isolated from the Sargasso Sea
tatgtttactatagctttaccaaaaggagctctgttaaaagattcaatttcaacttttaaaagagctgggttagatttctcagatgcgttagacgaaaataatagatcattaacctttgaatcaaattgcaaacgggcaaaagctttattagtaagaaatggagatgtgcctgtttatgtaagttatggtcaggctgatttgggtattgttgggtatgacgttttacgagaatctgaattaaaagttgcaaagttattagatttaggatttggtggttgtcatatgtcgttggcggttaagaaaaatagcaattattcaaaaccaactgatcttccggcgaattgtaaagtagcaagtaaatttataaaaacagcaagattttattttgaagaattaaatattcctgtagaaatagttcatttgacaggatcagtcgagcttggtcctattacaggtatggcagaggcaatagttgatttggtggcaaccggaaagactcttaaagagaatggtttaattaaaatagatgatctttattactcgactgcaagactaattggaaatcctttatctatgaggttagatgataatcatctcagagatactattttatcaatagaatcaactaatgctttatag

SEQ ID NO: 239152 - DNA, 337 bp, Unknown
  Bacterial polypeptide expressing nucleotide sequence isolated from the Sargasso Sea
aaatagcaattattcaaaaccaactgatcttccagcgaattgtaaagtagcaagtaaatttattaaaacagcaagagcttattttgaagaattaaatattcctgtagaaatagttcatttgacaggatcagtcgagcttggtcctattacaggtatggcggaggcaatagttgatttagttgcaaccggaaagactcttaaagagaatggtttaattaaaatagatgatctttattactcgactgcaagactgattggaaatcctttatctatgaggttagatgataatcatctcagagatactattttatcaatagaatcatcaaatgatttatag

SEQ ID NO: 239153 - DNA, 358 bp, Unknown
  Bacterial polypeptide expressing nucleotide sequence isolated from the Sargasso Sea
tatgtctttggctgttaagaaaaatagtaattattcaaaaccaacggatcttccagcgaattgtaaagttgcaagtaaatttataaaaacagcgagatcttattttgaagaattaaatattccagtagaaatagttcatttgacaggatcagtggagcttggacctattacaggtatggcagaggcaatagtagatttagtggcaaccggaaagacacttaaagagaatggtttaattaaaatagatgatcttttctactcgactgcaagactaattgcaaatcctttatctatgagattagatgataattttctcagagatatgattttatcaatagaatcgaataatgctttatag

SEQ ID NO: 239154 - DNA, 367 bp, Unknown
  Bacterial polypeptide expressing nucleotide sequence isolated from the Sargasso Sea
atgggacaagaaatctatccagagggaattctacaggccctgaaagaaatccacaggcgatttccgggccttgaaattatgatcactgaaaatgggatagccgatcgcttggatgaaaaaaggggctcattcatgatcgatcatctcagccatgttcatgaagcgattaacctaggcatccctgtgcgaaattattgccactggtctcttctcgataattttgagtggatggaaggatttgcccctcgctttggcctttatgaagtcgattataaaacgcaaaagcgcacacctcgagcaagtgcggagctttataaaagaatcgccacctccaacgagcttccttcaaacaacccgcatttttaat

SEQ ID NO: 239155 - DNA, 553 bp, Unknown
  Bacterial polypeptide expressing nucleotide sequence isolated from the Sargasso Sea
ttggatgaaaataatagatcattaacctttgaatcaaattgcaaacgggctaaagcacttctcgtaagaaatggagatgtccctgtttatgtaagttatggtcaggcagatttgggtattgttgggtatgacgttttacgagaatctgaattaaaagttgcaaagttattagatttaggatttgggggttgtcatatgtctttagctgttaagaaaaatagcaattattcaaaaccaactgatcttccagcgaattgcaaagtagcaagtaaatttataaaaacagctagatcttattttgaagaattaaatattcctgtagaaatagttcatttgacaggatctgtcgagcttggtcctattacaggtatggcagaggcaatagtcgatttggtggcaaccggaaagactcttaaagagaatggtttaattaaaatagatgatcttttctactcgactgcaagacttattggaaatcctttgtctatgaggttagatgataatcatctcagagatactattttatcaatagaatcaaccaatgctttataga

SEQ ID NO: 239156 - DNA, 652 bp, Unknown
  Bacterial polypeptide expressing nucleotide sequence isolated from the Sargasso Sea
tatgaataaaaatataattaatattggtataccatctaaaggtagattgaaaaatgatactttaaatatttttaagataaaaaagcttaaaatttattccgagagaggagaaagggatttatttggttatataaaaaactcaaatgtaaaaattatatatctccatgctagagaatgtatagaacaattatctttgggaaatattgatgttggtttttctggtatagatttattaaaagaaagtgaaataaatattcaaaataaaattaaagttataaaaaaatatgaatttggaaaagcggatcttgttcttgcaatacccgacctatggatcgatgtacaaaccttactagatttggatgaggttgcggatgattttaaaaaaaagaaaaaaaaacttttaaggatcgcaacaaaatatcctaatttaactagacaatttttgtattcaaaaggtgtaacacaattccaacttgttaaaagtcttggaagtacagaggtagctccgtttacaggtactgctgaaattatatcagatataacaagcacaggagcaacattaaaagcaaataatttaagagtattaaaagatggtgaaattttaaaatcacaagcatgcttaatgatttctaagttatcttttagaaaaatc

SEQ ID NO: 239157 - DNA, 649 bp, Unknown
  Bacterial polypeptide expressing nucleotide sequence isolated from the Sargasso Sea
atgactaaaactataatagcaatacctagaggaagaataattaatgaatgtaaaagcattctaaataaaactagttttgctccagacccattattatttgatgaaaattctaggaaattaagttttaaatcagctaataaagaaatagattacattaaagtaaggtcatttgatgtttgtacatttgttgcatttggagctgctcaaataggaattgcaggcgatgatgtgattaaagaatttaattattcagaagtttatgctcctttgaatttgaatataggtaaatgtcgagtttcaattgcagctctaaaaagtttgttggaaaaggaagatccacaaacatggagcaatataagagtagcaactaaatatccaaatatcacaaaaaacttttttcaaagcaaaggaattcaagttgaagtaattaaacttaatggttctatggaattggctccatcattaaaaatgtgtagaagaattgtggaccttgtatcaacaggcaaaactttaaaagaaaatggtctagaagaaattgaaaaaattatgcaagttgaatctaagttaattataaacagatctgcttttaaaacaaaaatagagactgttcaaaaaattactgaagaatttagaaatattattaaatgaa

SEQ ID NO: 239158 - DNA, 595 bp, Unknown
  Bacterial polypeptide expressing nucleotide sequence isolated from the Sargasso Sea
atgggaacacttaaactagcaattcaaaaaagtggaagactttttgataattcacaaaaccttatacaatcttccggaatagaaattgtatctaaaaatgttgcgctgaaaaccaaagcaaaaaactacccattagaaatatattatttacgcaactctgacattccaaaatatataaacaatggagtcgttgatataggtatagtaggtcaaaatttactttttgaaagaaataatgacctggaagtgattcaaaagctaggtttctcaaaatgcagattatctcttgcagttccccaaaatataaaatatgaatctttacaattttttgatggaaaaaaaattgcaacctcatatcctaattctttaaaaaaatttctgaatcaacataagataaatgctaaaatacatcaaatttcaggatcggtagaaatttctccaggaattggacttgctgatggtgtctgcgatttagtaagtacaggattcaccttaagccaaaaccgcttgaaagaagttgaaataattatgaattcagaagctgtaatcgctagatcttcaaatattaagcctgaaattcaatctatcattgacg

SEQ ID NO: 239159 - DNA, 625 bp, Unknown
  Bacterial polypeptide expressing nucleotide sequence isolated from the Sargasso Sea
aatgtctgataaaataacaattgcggtttcaaaaggcaggattttcgatgaagctcttccgttgcttgctaaaattgatgttattccaaaggatgatcctcagaactcgcgaaaattaatattagaaacaaataaaaataacgttcaaatacttgttataagggcaacagatgttccaacttatgttgagcgtggagcagcagaattaggtattgccggtaaagatgttttactcgagtaccagggcgatggtttttatgaacctattgatctcggtatcgctaagtgcaaaatgatgttagctggtttaaaaggcgtaaaaaaagaaattaccaggccaaggatcgcgacaaaatatacaaatataacccagaattatttttcaaattttggtaagcaggttgaaataattaaactatatggttcaatggaattggctccaattttaggtttagcagatcaaattgttgatttagttgatactggtaaaactttagaagcaaatggattagttccttatgagcgcatagcggatatcagttcaagattaatagtaaataaagcatcaatgaaactaaaaagcaccgcaataaaatcttttatagaaaaattatctgatgtaatt

SEQ ID NO: 239160 - DNA, 550 bp, Unknown
  Bacterial polypeptide expressing nucleotide sequence isolated from the Sargasso Sea
agagaactctggatacatttaaaggaagataaaagaaaattaatttttggttcctcagaaaagaatattcagttttctattcttcgaggttgggacattcctaagttcgtaagttatggagcagttgatatcggaatcgttggaaaagatgttcttttggaaacggaggaagaaaatttttttgaagtcctagatctagagattgggaaatgcagattgtctttggctgctaaagaaaaaaaggtcagtgaattagctggatctactatagcctcaaaatttcccaaagaaacaaataattttctatcagaaaactttatagatgctgaaataattgaattgaaaggatctattgaaattgctcccattttgggaatatcggacttcattgttgacttagttaatacaggcaatactctgaaagaaaacggattgaaggaacttaaaattataaaggagatttcgactaggctaattgtcaataaatcaaaatttagaacgaaaaataaagaaattaaaaaatttattcaaaggattaagagtgattaaa

SEQ ID NO: 239161 - DNA, 677 bp, Unknown
  Bacterial polypeptide expressing nucleotide sequence isolated from the Sargasso Sea
aatggaaagtagagtaaaaattgcaatacagaaaaatggcagattgtcggctgaatcattatcaattttaaaaaaatgtggtattgagtttagtgattccaataataagctctttattaaatcaaccaatatgcttatagatctacttatggttagagatgatgatattccaaggcttgtaagccaaaatattgctgacttaggtatagttggtgaaaatgtagtgtcagaaaaacaattatctgattcatctttaaaatcaaaaactattctaaagcttggtttctcaaaatgtaggctatcttttgcaaaaccaaaagaaatgaatcttgataacataagtaataaaaaaattgcaacttcctaccctgctatagtaaaagattatttagaaaaaaaagatatcagtgctgaaataattgaaatacatggatcagtagaattaactccatttgttgaaatatcagatattattgctgatcttgtatcaactggatcaaccttagaatcaaataatcttaccgagttagattccataatggattcacaggcaatattaatccagtctaattcaattacatcaaaaaaattgcccttaattgataaagttgtgtcgagaatcaattctgttattaaggctaaagatagtaaatatataatgttcaatgctgatacag

SEQ ID NO: 239162 - DNA, 644 bp, Unknown
  Bacterial polypeptide expressing nucleotide sequence isolated from the Sargasso Sea
catgataactattgctttatctaaaggaagaattttcgatgaaacaatgcccattcttaatgcggcaggtatcgtttgtgctgaaaatccagaaatctcacgaaaattagtttttaagactagtaataaagatgtgaaaattatcattgtcagggcttctgatgtccccacttatgtcgaaagaggaggcgcagatattggtattgctggaaaagatatcttagatgaatattcaggtacaggtctttattacccagttgatttaaatattgctaaatgcaaaatgatggtggctgcaaaaaaaaattttgattacgaaaaagttattaagaataaaagaaggttgaaagttgctacaaaatatccaaatactgctagaagttttttttcatcaaaaggaattcatattgatttgataaagctttatggatcaatggaattagcacctatagttgggctttcagatgtaattgttgaccttgttagttcaggtaaaactttgcaggctaataatttgaaacctgttgagttaatatcattaatttcttccagattaattgtaaataaggcagcattaaaattagatataagtaaaattaaaccacttttaaataaatttcaggaggtggttgacgatgctgatt

SEQ ID NO: 239163 - DNA, 823 bp, Unknown
  Bacterial polypeptide expressing nucleotide sequence isolated from the Sargasso Sea
atgaaaaatagactaactattgccatccaaaaaaaaggcagactgtttaatcaaagcgcagacttaattaaaaaatcaggtattaatttttcaattaaaacagataatctcttggcaaaagctaataatatgcctattgatatattatttgtaaggagtgatgacattccttccttagtatctaatggagatgcagatctagcgatagttggagaaaacatattactagaaaaatctttatttaaaaaaacatctattgaaaaagttttaagcttaggtttttctaaatgcaggttgtcatttgcttgtcctgaaaatattaatattagaagtttcaaaaataaaaaaatagcaacttcatatccaaatactgtgaaaaaatatttaagagatagaaaaatagatgcttctattatcaatattcatggatcagtagaattaactccttatattggaatgtctgatttgatatgtgatcttgtatcgtctggtgcaacattagaagcaaataacttaaaagaagttgaaacaatcatggagtctgaagctgttcttattaaaaataaaaatttatcagtttcaaaaaataaaattgctgaaaaaataattagtagaatgcaaggtgttgttaatgctactgaaagtaaatacgttatgttgaatgtggatgcatcaaaggttaaagagatttgtaaattacttcctgggtcagaatcaccaacagtaatacctctagagaatgaaaataaagttgcaattcatgctttataccaagaaccaatattttgggagactatgaaaaacttaaaccaaaggggctcct

SEQ ID NO: 239164 - DNA, 454 bp, Unknown
  Bacterial polypeptide expressing nucleotide sequence isolated from the Sargasso Sea
gtaattaaaattaatggctcagttgaattaaccccctatgttggtatagcagactgtatctgtgacttagtttcatctggagctacattggaggcaaataatctcgttgaattcaaagaattattaacctctcaggcagtgcttatagcaaactcaacaacatccatacttaaacaaaaaagaattttacaactcaaagaaagatttaaaggtgttattgatgctagagaaagtaaatatgtaatgttgaattgcgatctctcggattcagaaaaaatttgtaatttgttaccaggagctgatgctccaacaattcttcctttaaaagataaaaataaagttgcaattcatgccttatgtcaagagcctgtgttttgggaaaccatggaaaatttaaaaaagactggtgcttcttccatcttagtgatgccagttgaaaaggtattgaattgat

SEQ ID NO: 239165 - DNA, 586 bp, Unknown
  Bacterial polypeptide expressing nucleotide sequence isolated from the Sargasso Sea
tatgtttactatagctttaccaaaaggagctctgttaaaagattcaatttcaacttttaaaagagctgggttggatttctctgacgcgttggacgaaaataatagatcattaacatttgaatcaaattgcaaacgtgctaaagctttattagtaagaaatggagatgttcctgtttatgtaagttatggtcaggctgatttgggtattgttgggtatgacgttttacaagaatctgaattaaaagtcgcaaagttattagatttaggatttgggggttgttatatgtctttggcggtaaagaaaaatagcaattattcaaaaccaactgatcttccagcgaattgtaaagtagcaagtaaatttataaaaacagcaagattttattttgaagaattaaatattcctgtagaaatagttcatttgacaggatcagtcgagcttggtcctattacaggcatggcagaggcaatagttgatttagtggcgacgggaaagactctcaaagagaatggtttaattaaaatagatgatctctattattcgagtgccagactaattggaaatcctttatctatgaggttagat

SEQ ID NO: 239166 - DNA, 607 bp, Unknown
  Bacterial polypeptide expressing nucleotide sequence isolated from the Sargasso Sea
ttgataatagctttgcctaagggaagagtgtatgaagacttcataccattgctagaaaaaactcggttcgccataaaggatgatgtaaagaaatcaagaaagatgttgctggatacgaaacatcctagtgtaaaagtattgatcataagaggatgggatgtacccacatacattacttctggcgctgcccacataggcattgttgggaaagatatcctcatggaaaaggaagaagaggagtttgtggaattggcggatcttggtcttggtaagtgcagattatctttggcaggttatgaagacgttctcacaggttctgcaagattaaaaatagctactaaatatccaaagagctcaacgaaatttatgaattctattggaatacaacctgaaataatttatctaaatggcgcacaagaaatagctcctgtacttggtttgtcagatgcaattattgacttagtggatactggcaaaactcttactgctaatggtcttaaagaaattaaaatcattgcagatatttctactagattaattgccaacaaagcttcaattaaaacaaaagctacaattattaatgagattatggaagcactgaaataat

SEQ ID NO: 239167 - DNA, 382 bp, Unknown
  Bacterial polypeptide expressing nucleotide sequence isolated from the Sargasso Sea
atgaaaaatagactaaagattgcaattcaaaaaaatggaagattgtctaatgaatcgttgtcaattttaaaaaaatgtggcattgagtttagtgattctagtaataagctctttattaaatcaactaatatgcttatagatctccttatggttagagatgatgatattccaaggcttgtaagtcaaaatattgctgacttaggtatagttggtgaaaatgtagtatttgaaaaacaactatctgatacatctttaaaattaaaaactacactcaagcttggtttctcaagatgcaggctatcttttgcaaaaccaaaaaaaatgaatcttgataatattaataacaaaaaaattgctacttcctaccctagtatagtaaaaa

SEQ ID NO: 239168 - DNA, 478 bp, Unknown
  Bacterial polypeptide expressing nucleotide sequence isolated from the Sargasso Sea
tatgaaagataaagattcatttattttggcgctacccaaaggtagggtttacgaggattttattccgactcttcaaaagacaaaatttgctctaagagatgatccaaaaaaatcaagaaaaatgctgcttgatacagaacatcctgaagtgaaagtactgataatcagaggatgggatgttcctacctatataacctcaggagctgctcatgcaggggtggttggaaaagatatactgatggaaaaagaagaagaagagtttgttgaattgaccgatctatctttagggaaatgcagattgtctttagctggtcgcaatgatgttctctctggttcaagcagattgaagatagctacaaaataccctaagagttctacaaaatatatgaattccttgggtatacaagccgaagtaatttatataaacggtgctcaagagatagcacctatacttggactgtcagatgcaatcatagat

SEQ ID NO: 239169 - DNA, 640 bp, Unknown
  Bacterial polypeptide expressing nucleotide sequence isolated from the Sargasso Sea
atgtttactatagctttaccaaaaggagctctgttaaaagattcaatttcaacttttaaaagagctgggttggatttctctgacgcgttggacgaagataatagatcattaacctttgaatcaaattgtaagcgggctagagctttattagtgagaaatggagatgttcctgtttatgtaagttatggtcaagctgatttgggtattgttgggtatgacgttttacgagaatctgaattaaaagtcgcaaagttattggatttaggatttgggggttgccatatgtcattggcggttaagaaaaatagtaattattcaaaaccaactgatcttccagcgaattgtaaagtggcaagtaaatttataaaaacagcaagatcttattttgaagaattaaatattcctgcagaaatagttcatttgacaggatcagtcgagcttggtcctattacaggtatggcagaggcaatagttgatttggtcgcaactggaaagactcttaaagagaatggtttaattaaaatagatgatcttttctactcgactgcaagactaattggaaatcctctatctatgaggttagatgataattatctcagagaaactattttatcaatagaatctattaatgctttataga

SEQ ID NO: 239170 - DNA, 640 bp, Unknown
  Bacterial polypeptide expressing nucleotide sequence isolated from the Sargasso Sea
atgtttactatagctttaccaaaaggagctctgttaaaagattcaatttcaacttttaaacgagctgggttagatttttctaacgcgttggacaaaaataatagatcattaacctttgaatcaaattgcaaacgtgctaaagctttattagttaggaatggggacgttcctgtttatgtaagttatggtcaggctgatttaggtattgttgggtatgatgttttacgcgaatctgaattaaaagttgcaaagttattagacttaggatttgggggttgtcatatgtcgttggcagttaagaataatagtaattattcaaaacctactgatcttcctccaaactgtaaagtagcaagtaaattcataaaaacagcaagatcttactttgatgaattaaatattcctgtggaactagttcatttgacaggatcagtcgaacttggccccataacaggtatggcagaggcaatagttgatttggtggcaacaggaaaaactttaaaggagaatggtttaattaaaatagatgatcttttctactctactgcaagacttattggaaatcctttatctatgaggttggatgataatcatctcagagatacgattttattaatagaatctattaaccatacataaa

SEQ ID NO: 239171 - DNA, 625 bp, Unknown
  Bacterial polypeptide expressing nucleotide sequence isolated from the Sargasso Sea
atgaataaatctaactctttgatattagctttgcccaaggggagagtatatgaagactttatacctctgttagaaaaaactcagttcgccattgaggatgatgtaaagaaatccagaaagatgttgcttgatacgaaacatcctagtgtaaaagtattaattatcagaggatgggatgtacccacatacattacttctggcgctgcccacataggtattgttggaaaagatatcctcatggaaaaggaagaggaggagtttgttgagttagcggatcttggtcttggtaagtgcagattatctttggcaggttatgaagacgctctaacaggttctacaagattaaaaatagctaccaaatatcctaagagctccacgaaatttatgaatgctattggaatacagcctgaaataatttatctaaatggcgcacaagaaattgctcctgtacttggtttgtcagatgcgattatagatttagtagatactggtaaaactcttactgccaatggtcttacagaaattaaaaccattgcagatatttctacgagattaattgccaacaaagcttcaattaaaacaaaatctacaattattaatgagattatggaagcacttaaataat

SEQ ID NO: 239172 - DNA, 646 bp, Unknown
  Bacterial polypeptide expressing nucleotide sequence isolated from the Sargasso Sea
ttgatctatgtttactatagcttaccaaaaggagctctgttaaaagattcaatttcaacttttaaaagagctgggttagatttctcagatgcgttggacgaaaataatagatcattaacctttgaatcaaattgcaaacgggcaaaagctctattagtaagaaatggagatgtgcctgtttatgtaagttatggtcaggctgatttgggtattgttgggtatgacgttttacgagaatctgaattaaaagtcgcaaagttattagatttaggatttggtggttgtcatatgtcgttggcggttaagaaaaatagtaattatttaaaaccaactgatcttccagcgaattgtaaagtagcaagtaaatttataaaaacagcaagatcttattttgaagaattaaatattcctgtagaaatagttcatttgacaggatcagtcgagcttggtcctattacaggtatggcagaggcaatagttgatttggtggcaacaggaaagactctcaaagagaatggtttaattaaaatagatgatctttattactcgactgcaagactaattggaaatcctttatctatgaggttagatgataatcatctcagagatacaattttatcaatagaatcaactaatgctttataga

SEQ ID NO: 239173 - DNA, 646 bp, Unknown
  Bacterial polypeptide expressing nucleotide sequence isolated from the Sargasso Sea
aaccttttgatagaaaaagatttaaaagttccaatcttagaaaaattagattttgcaaaatgtagagtctcaattgcggttccaaaggagtttaaatatagaaaaatacgtgacttaaatggaataaaaattgcaacttcttatcctaataccattaaatcttttttggtcaaaaataatattaaggccagtcttcatataattaatggttcagttgaaattgcacccaatattggtctctcagatgctatatgtgacctggtttcaagtggaagtactttgtttaaaaataatcttaaagaaataattaagataaatacctcagaagcagtattagtgaaatcttccatcttgaataaatcaaaaatagatataattgaaaaacttagatttagaataagatccgttttaaaagccaaaaaatcaagatatattttattaaacgctcctaataatagaattaaatctatttccaatattcttcctgtgttaaaaagtccaactgttctcccattggagaaagatggatggagctcacttcactctgtaataaatgaagataaattttgggaagtaattgataaattaaaggaagaaggtgcagaagatattttagtttgtccaattgaaaaaatggttctatgat

SEQ ID NO: 239174 - DNA, 640 bp, Unknown
  Bacterial polypeptide expressing nucleotide sequence isolated from the Sargasso Sea
atgtttactatagctttaccaaaaggagctctgttaaaagattcaatttcaacttttaaaagagctgggttagatttttctgatgcgttgaacgaaaataatagatcattaacttttgaatcaaattgcaagcgggctagagctttattagtaagaaatggagatgttcctgtttatgtaagttatggtcaggctgatttgggtattgttggagatgacgttttacgcgaatccgaattgaaagttgcaaagttattagatttaggctttgggggttgttatatgtcgttggcagttaagaacaatagcaattattccaaaccaactgatcttccagcgaattgtaaggttgcgagtaaatttacaaaaacagcaagatcttattttgatgaattaaatatacctgcagaaatagttcatttgacaggatctgtcgagcttggtcctattacaggaatggcagaggcaatagtagatttggtggcgaccggaaagactcttaaggagaatggtttaactaaaattgatgatcttttttattcaactgcaaaactaattggcaatcccttatcaatgaggttagatgataatcatctcaaagatacgattttatcaatagaatcaactaatgctttataga

SEQ ID NO: 239175 - DNA, 586 bp, Unknown
  Bacterial polypeptide expressing nucleotide sequence isolated from the Sargasso Sea
tttaaaaaagctgggttagatttctctaatgcgttggaagaaaataatagatcattaacctttgaatcaaattgcaaacgtgcaaaagctctattagtaagaaatggagatgtgcctgtttatgtaagttatggtcaggctgatttgggtattgttgggtatgacgttttacgagaatctgaattaaaagtcgcaaaattattagatttaggatttgggggttgtcatatgtccttggcggttaagaaaaatagcaattatttaaaaccaaccgatcttccagcgaattgtaaagtggcaagtaaatttacaaaaacagcaagatcttattttgaagaattaaatattcctgtagaaatagttcatttgactggatcagtcgagcttggtcctattacaggtatggcagaggcaatagttgatttggtggcaaccggaaagactctcaaagagaatggtttaattaaaatagatgatctttattactcgactgcaagactaattggaaatcctttatctatgaggttagatgataatcatctcagagatacaattttatcaatagaatcaactaatgctttataga

SEQ ID NO: 239176 - DNA, 655 bp, Unknown
  Bacterial polypeptide expressing nucleotide sequence isolated from the Sargasso Sea
catgatcaccgtcgcgttggccaaaggagcgctgcttaaggattccgtggctcggttcgcggcagcaggcctggatttctcagctgtgctggacaaggacaaccgtcagctgatgctgcccaccccctgcggtcgagcccgggcgctgctggtgcgcaacggtgatgtgcccacctatgtggcctacggccaggcccagctgggggtggtcggctacgacgtgttgaaggagcaccaactgccggtggcccagctggtggacctgggtttcggtggctgccggatggccgtggccgtcaaggccagcagtggctacgaacgggcggcggatcttcctccccactgccgggtagcgagcaagttcacccactgcgcccgcgaatatttcgaccagctcgacctaccggtggagctggtgcatctgaacggctccgtcgagctcggccccatcacggggatgtccgaggcgattgtggatctggtggcgaccgggcgcaccctgcgggagaacggattggtggccatcgaggatctgttccacaccacggcccgcctggtgggtcaccctctttcgatgcgactggataatggatctctgagcagcatcgttgaagcggtgcgcacagtgtccaacgcagctggtgccgctgcatga

SEQ ID NO: 239177 - DNA, 640 bp, Unknown
  Bacterial polypeptide expressing nucleotide sequence isolated from the Sargasso Sea
atgtttactatagctttaccaaaaggagctctgttaaaagattcaatttcaacttttaaaagagctgggttagatttctctgatgcattggagaaaaatagtagatcattaactttcgaatcaaattgcaaacgggctaaagctttattggtaagaaatggagatgttcctgtttatgtaagttatggccaggctgatttgggtattgttgggtatgacgttttacgagaatctgaattaaaagttgcaaagttattagatttaggatttgggggctgtcatatgtcgttagcggttaagaaaaatagcaattattcaaaaccaactgatctcccagcgaattgtaaagtagcaagtaaatttataaaaacagcaagatcttattttgaagaattaaatattcctgtagaaattgttcatttgacaggatcagtggagcttggtcctattacaggtatggcagaggcaattgttgatttggtggcaaccggaaagactcttaaagagaatggtttaattaaaatagataatcttttctactcgactgcgagactaattggaaatcctttatctatgaggttggatgataatcatctcagagatacgattttatcaatagaatctactaacgttacataaa

SEQ ID NO: 239178 - DNA, 577 bp, Unknown
  Bacterial polypeptide expressing nucleotide sequence isolated from the Sargasso Sea
atgtttactatagctttaccaaaaggagctctgttaaaagattcaatttcaacttttaaaaaagctgggttagatttctctaatgcgttggaagaaaataatagatcattaacctttgaatcaaattgcaaacgggcaaaagctctattagtaagaaatggagatgtgcctgtttatgtaagttatggtcaggctgatttgggtattgttgggtatgacgttttacgagaatctgaattaaaagttgcaaagttattagatttaggatttggtggttgtcatatgtcgttggcggttaagaaaaatagcaattattcaaaaccaactgatcttccggcgaattgtaaagtagcaagtaaatttataaaaacagcaagattttattttgaagaattaaatattcctgtagaaatagttcatttgacaggatcagtcgagcttggtcctattacaggtatggcagaggcaatagttgatttggtggcaaccggaaagactcttaaagagaatggtttaattaaaatagatgatctttattactcgactgcaagactaattggaaatcctttatctatga

SEQ ID NO: 239179 - DNA, 583 bp, Unknown
  Bacterial polypeptide expressing nucleotide sequence isolated from the Sargasso Sea
aggaagaatctataatgaaataaggcagttactagagaactctggaatacacttaaaggaagataaaagaaaattaatttttggttcctcagaaaagaatattcagttttctattcttcgaggttgggacattcctaagttcgtaagttatggagcagttgatattggaatcgttggaaaagatgttcttttggaaacggaggaagaaaatttttttgaagtcctagatctagagattgggaaatgtagattatctttggctgctaaagaaaaaaaggtcagtgaattagctggatctactatagcctcaaaattttccaaagaaacaaataattttctatcagaaaactttatagatgccgaaataattgaattgaaaggatctattgaaattgctcccatcttgggaatatcggactacattgttgacttagttaatacaggcaatactctgaaagaaaacggattgaaggaacttaaagttataaaggagatttcgactagactgattgtcaataaatcaaaatttagaacgaaaaataaagaaattaaaaaatttattcaaaggattaagagtgattaa

SEQ ID NO: 239180 - DNA, 139 bp, Unknown
  Bacterial polypeptide expressing nucleotide sequence isolated from the Sargasso Sea
aactggaaatactcttaaagagaatggattacatgaaattcaagtaattagagaaatttctactaggttgattgtcaataaagctgctttaaaaactaaatcagccttaattaatgaaatcttagaaatttttaaataa

SEQ ID NO: 239181 - DNA, 266 bp, Unknown
  Bacterial polypeptide expressing nucleotide sequence isolated from the Sargasso Sea
tccaaatatcgcaaaaaaatattttgagaatattggtttccagtgttcaattttagagctgtatggctcaattgaattagctcctgttttgggcttatctgattttattgttgatatcgtagagactggaaagacgctaaaggaaaacggattaagagtgcatgatacaataacaaaggtttcgtctttattaattgcaaatagggtttcctacaaaattaaaagaaaagaaattaactcatttgttgataggataaaattatgaa

SEQ ID NO: 239182 - DNA, 604 bp, Unknown
  Bacterial polypeptide expressing nucleotide sequence isolated from the Sargasso Sea
ttgattattgccctgactaaagggcgaatacttgaagaaactctccctttgtttgagcgggcagggattgttccaagcgagagtttaaagaaaagtcgcaaattattatttgaaaccaacatcaagaatgttcaattcatgctgttaagaggttcggatgttgctacttatgtcgaattcggcagcgctgatatgggagtagtgggtaaagatttaattctggaacatggttcagatggtttttatgagccacttgatctcggtattgcgcaatgtcggcttatgacagctgtgcgtagtgatcgaaagatagtttctggccgcatcgtggtagcgacaaaatacatcaatattgctaaggagtacttcgcagatcaaggcaaacagatcgaattaattaagttaaatggggcattagaattagctcctgctctgggcttggcggatgctattgtcgatatagttgatacaggtaaaaccctcaaagcgaacggactggtaccgcaagatctcatagcagacatctcctctcgtgtcatcgtgaataaagcctctatgaaaattaagcataaaatagttagtgaaataatcggactacttaata

SEQ ID NO: 239183 - DNA, 428 bp, Unknown
  Bacterial polypeptide expressing nucleotide sequence isolated from the Sargasso Sea
catgagccagaccctgaccattgccctgtccaaggggcgcatccttgacgataccttgccactgctcaaagaggccggtatcgagctgaccgaggatctggaaaagagccgcaagctgatttttccgaccactgacccgactgttcgcctgctgattgtgcgcgccacggatgtaccgacctacgtggagcacggcgccgccgacctgggggtggccggcaaggacgtgctgctggaatacggcagccaggggctgtacgagccgctggatctgaaaattgccaactgcaagctgatgaccgcgggcccggtggatgcgccggagccgaccggtcgcctgaaggtcgcgaccaagttcgtcaacgttgcgcgtcgctattatgccgaacagggccgtcaggttgatgtgatcaaactgtacgggtcga

SEQ ID NO: 239184 - DNA, 631 bp, Unknown
  Bacterial polypeptide expressing nucleotide sequence isolated from the Sargasso Sea
gcagtaccaagaggcagaataatagaagaatgtaaacaaattctaaataaaacatcttttgctcctgacccttcattatataatccttcaacaaggaagcttacatttaattcaaaagatcctttgataaattttataaaagtaagagcatttgatgtttgcacttttgttgcatttggtgctgcacaaataggtatagctggggaagatgttattagagaatttgattactctgaagtttatgccccttgcgatctaaatataggacattgtagactttcagtagccgctccatcaaagcttataaaaaaagaagagccatctacttggagtaacataagaatagcaacaaaatatcccaatattactaaaaatttttttgcaaaaaagggagtgcaagttgaaacaattaaattaaatggatccatggaattagctccatcattatcaatgtgtagaagaatagttgatttagtttctacaggaaaaacattaaaagaaaatggattaaaagaagtagaacaaatattaaaagttcaatcaaaattaattgtaaatagatcagcttacaaaaccaaaacatcaaagattgaatttattattaagcaaattgataaaattgttttatgaa

SEQ ID NO: 239185 - DNA, 568 bp, Unknown
  Bacterial polypeptide expressing nucleotide sequence isolated from the Sargasso Sea
cctgatcctctactattttgataaagatacaagaaagttaacgttcaaatctaaaaaaagaaacattgagtatattaaagtaagagcctttgatgcatgtacatttgttgcatttggagctgcacaaataggaatagctggtgaggatgtaattaatgaatttgattactcagaaatatatgctccacttgatttaaatattggtcattgtcgaatttctgtagctgctctgaaatctttattaaaaaaagaggatccagaaacctggagtaatattagaattgctactaaatacccaaatataactaaaaaatttttttataataagggaatacaagtagaaattataaaactaagtggatcaatggaattagccccttctttaaatatgtgtaggagaattgtagatttagtttctacaggaaaaacattaaaagaaaatggtttgactgaaattgaagaaataatgaaaattcaatctaaattaattgtcaatagatcagcttataagacaaatatgaatgaggtttcaaaaattatttctgaaataggtacttttataaaatga

SEQ ID NO: 239186 - DNA, 753 bp, Unknown
  Bacterial polypeptide expressing nucleotide sequence isolated from the Sargasso Sea
aatgaacgaacgaattaaaatagccattcagaaatccggtagattaacagagcacagcactaccctgctccaaaaatgtgggcttatcatcagtcataccaaagaccaattgataggatatggagaaaacatgcctttcgatattatgtttgtaagggacgacgatattccaggattgattcaagaaaatctttgtgaaatagggattgttggtgcgaatgtcgctattgaaaaacagctttcatacgagtcaagtcaattgccttctcaatttgttcttgaatcatcgcttgattttggtcactgcaagctctcttttgcatacccagagacatcaagcattcgatcggtcaatgatcttgaaggcaaaacaatagcaaccagctatccatttacagtaaaaaactacttcgctgagaatcagattaatgcaactgtcacagaattttctggtgctgtagagttggcaccaagtttgggtaaggcggaagcaatttgcgatcttgtctcatcaggaaacactataaaggcgcataatttagtgcttggagaaacaatattagaaagcgttgcaaccgttcttaaatccaattcaaatcagtcagcttttaaacaaatgtggatcgataaaatcattgaacgaatcaatggtgttctccaagtaaatgaaagcaaatacatcatgatgcatgctccaaaagatgcaataaatgagatcactaccctttctgcctggaacagagtcaccaacgg

SEQ ID NO: 239187 - DNA, 231 bp, Unknown
  Bacterial polypeptide expressing nucleotide sequence isolated from the Sargasso Sea
gactatgcgagcgccgtgcgccagggcgcgcgcctgcgcgtcgcgacgaagtacgtcgaaaccgcacgcgaacactttgccgcgaagggcgtgcacgtcgacctgatcaagctgtacggctcgatggagcttgcaccgctggtcgggctggccgacgcgatcgtcgacctcgtcagctcgggcggcacgctgaaggcgaacaatctggtcgaggtcgaggagatcatggcg

SEQ ID NO: 239188 - DNA, 367 bp, Unknown
  Bacterial polypeptide expressing nucleotide sequence isolated from the Sargasso Sea
aatggccttgtagaaaaagacgttattttccgcagtaaagcagtgttaataaagcgtgcggatggcgagctaagcgatgaaaaagaaacgctggttaaccgccttatgccgcgtgttgacggtgtacttttagcaaaagaaagcaagtacattatgcttcacgcccctaaagcttacttagagcaagtgaagagccttcttccgggtgctgaaaacccgacggtgcttcctcttgctggtaatgaagagcaagttgctatccacgttgtttctacagaaaccttattctgggaaaccatggagaaacttaaagcccttggttgtagctctattcttgtaatgccaatcgaaaaaatgatgggctaaa

SEQ ID NO: 239189 - DNA, 211 bp, Unknown
  Bacterial polypeptide expressing nucleotide sequence isolated from the Sargasso Sea
tatgagtccggcaacagaatcaaaacgtttacgcattgccatgcagaaatccggccgtttatcggtcgactcccaagccctgctaaccagctgcggtttaaaaattaacctgcgcgaacagcgcctcattgcccatgtcgaaaatatggatatcgatatcctgcgcgtacgcgatgacgatattccgggtttggtgatggatggtgtttgt

SEQ ID NO: 239190 - DNA, 538 bp, Unknown
  Bacterial polypeptide expressing nucleotide sequence isolated from the Sargasso Sea
catgattagattagctatatccaaaggaagaatcttagagcaagcactagagacacttgaaaaagtgaatatatcgtgccaagttaatccctttaattctcgtaagttaattattccaacgaatttagaaaatttagagataattattatcaaggcttctgatgtaccactatatattgattctgggaaaattgatcttgggattgttggtgtagacactttaatggaagatgataagaacaatcattttcgcttatgcgatatgaccatctcaaaatgtaaactagttgtagcggggaaggctaaaactaaatatttcaacaacatgaaggttgccacgaaatatccaaaagttgcaaaaaaatatttcgagaatattggtttccaatgttcaattttagaactatacggctctattgaattagcccctgttttgggtttatctgatttcatcgttgatatagtagagactggtaaaactctgaaagaaaatggactgagagaacatgatataatagctaatgtctcatctttataa

SEQ ID NO: 239191 - DNA, 649 bp, Unknown
  Bacterial polypeptide expressing nucleotide sequence isolated from the Sargasso Sea
atgaataaaaaaataatcattgcagtaccccgtggtagaattacagatgagtgcaaaagcattctaaaaaaaacatctttttcacctgatcctttgttgtttagtgaaaaatcaagaaaattaacttttaaatccaaaaattctaaaataaattatataaaagttagagcttttgatgtctgtagttttgtagcttttggtgcggctcaaataggaattgcaggggatgatgttataaaagaatttgattattcagaagtttatgctccaataaacttgaaagttggctattgtagactttcggtagcagctccaaaaaaaatgttaaaagatgaagatccttctacatggagtagtataagaattgcaacaaagtatccttatttaaccaaacaattttttgcaaataaaggagttcaagttgaagctataaaattaaatggatcaatggaattagctccctcactaaatatgtgcagaagaattgtagatttggtttcaacaggaaaaactttaaaagaaaatggattaaaggaagttgaaaaaattattgatgtgcaatcaaaattaattgttaatagatctgcttataagactcaaaataaagaaatagaaaaaattattaatgaaattaaaaacaatatataat

SEQ ID NO: 239192 - DNA, 604 bp, Unknown
  Bacterial polypeptide expressing nucleotide sequence isolated from the Sargasso Sea
atgtatttagctatttcaaaaggaagaatcttagaagaatctctgaaattactcgaacgtctaaatattaaatgcgaagaatcaccattggattctcgtaaattaatttttagaaccaatgacaaaaatttgaagataataattgtaagagcaagcgatgttcctacttatgtagagtcaggaaaagtagatatgggcattgttggcaaggatactctattggaaaaaaatagtaatgatttattgagacttaaagatctaaaaattgcaagatgtagattagtaatcgcgggtaaaaaaggagtgagtctagttagtaatatgaagatcgcaactaaatatccaacaattacccaaaaatattttcagtctcaaggtctaccttgtacgattcttaagttatacggttcaattgagcttgctgctgttcttgggatgaccgatgctgtggttgatctcgttgagactggtaacactctaaaagaaaatggtttatctgaggttaagataattgaaaatatatcttcatacttagttgtaaataagacatcgtatagattcaataaagagtatgtcgataaattcattagtaaaatttcgtaat

SEQ ID NO: 239193 - DNA, 592 bp, Unknown
  Bacterial polypeptide expressing nucleotide sequence isolated from the Sargasso Sea
tttgttacttaaaacaagttttgctcctgaccctttactatttgataaagatacaagaaagttaacttttaaatctaaaaaaagaaacattgagtatattaaagtaagagcctttgatgcatgtacatttgttgcatttggagctgcgcaaataggaatagctggtgaagatgtaattaatgaatttgattactcagaaatatatgctcctcttgatttaaatattggtcattgtcgaatttctgtagctgctctgaaatccttattaaaaaaagaggatccagaaacttggagcaatattagaattgctactaaatacccaaatattactaaaaaatttttctataataagggaatacaagtagaaattataaaactaagtggatcaatggaattagccccttctttaaatatgtgtagaagaattgtagatttagtttctacaggaaaaacattaaaagaaaatggtttgactgaaattgaagaaataatgaaaattcaatctaaattaattgtcaatagatcagcttataagacaaatatgaatgaggtttcaaaaattatttctgaaataggtacttttgttaaatga

SEQ ID NO: 239194 - DNA, 283 bp, Unknown
  Bacterial polypeptide expressing nucleotide sequence isolated from the Sargasso Sea
atgagccagagtctgaccattgccctgtccaagggacgtattctcgacgacaccctgccgctgctgaaagcggcgggcatcgaactgaccgaggatctggaaaaaagccgaaagctgatcttcccgaccaccgatccgaacgtgcgcctgctgatcgtgcgcgcgaccgacgtaccgacctacgttgagcacggtgctgccgatgtcggcgtggcgggcaaggacgtgttgatggagtacggcagtcagggcctgtatgagccgctcgatctgaaaatcgccc

SEQ ID NO: 239195 - DNA, 610 bp, Unknown
  Bacterial polypeptide expressing nucleotide sequence isolated from the Sargasso Sea
catgagcggtaatgtattaaaactaggaattccaaaaggcagtctagaagaagccacggtcaagctttttgctcgggcaggttacaatattaggattcaaagccgatcctatttccccagcattgatgatgtagaaattgaatgcatgttgatacgtgctcaagaaattgctcgttatgtagctgacggcgttctcgatgcaggtcttaccggtaaagactggattatggaaaatcgtgccgatgtagaagaaattgcaccgctggtttattcaaaagtttcagcaagacccgtccgatgggttctggcagtacctaacgactcttctatacaaagtgcaaaagacttacagggaaaacgaattgcaacggaggtcgttaacctgacaacagattggttaaaagggcacggagtaaccgccaatgtagaattttcttggggtgctaccgaagttaaggctcctaagttagttgatgccattgttgaagtgacagaaaccgggtcttcccttaaggcaaacaatctaaggattgttgacacattaatggaatctacaacccgctttataatgaataaaactgcaagtaaagacaactggaaacgcaaataa

SEQ ID NO: 239196 - DNA, 766 bp, Unknown
  Bacterial polypeptide expressing nucleotide sequence isolated from the Sargasso Sea
catgccattcgatatcatgtttgtaagggacgacgatattccaggattgattcaagaaaatctttgtgaaatagggattgttggtgcgaatgtcgctattgaaaaacagctttcatacgagtcaagtcaattgccttctcaatttgttcttgaatcatcgcttgattttggtcactgcaagctctcttttgcatacccagagacatcaagcattcgatcggtcaatgatcttgaaggcaaaacaatagcaaccagctatccatttacagtaaaaaactacttcgctgagaatcagattaatgcaagagtcacagaattttctggtgctgtagagttggcgccaagtttgggtaaagccgaagcaatttgcgatctcgtttcatcaggaaacactataaaggcgcataatttagtgcttggagaaacaatattagaaagcgttgcaaccgttcttaaatccaattcaaatcagtcagcttttaaacaaatgtggatcgataaaatcattgaacgaatcaatggtgttctccaagtaaatgaaagcaaatacatcatgatgcatgctccgaaagatgcaattaatgagatcactacccttctgcctggaacagagtcgccaacggtgattccattggatggcatcagtgacacagttgcagttcatgttgtttgtaaagagacggtattttgggagactttagaggagctcaaagaagtgggcgcgtcatccatattagtggtgcccgttgagaaaatgttgatgtag

SEQ ID NO: 239197 - DNA, 706 bp, Unknown
  Bacterial polypeptide expressing nucleotide sequence isolated from the Sargasso Sea
aatgaacgaacgaattaaaatagccattcagaaatccggtagattaacagagcacagcactaccctgctccaaaaatgtggccttatcatcagtcataccaaagaccaattgataggatatggagaaaacatgccattcgatatcatgtttgtaagggacgacgatattccaggattgattcaagaaaatctttgtgaaatagggattgttggtgcgaatgtcgctattgaaaaacagctttcatacgagtcaagtcaattgccttctcaatttgttcttgaatcatcgcttgattttggtcactgcaagctctcttttgcatacccagagacatcaagcattcgatcggtcaatgatcttgaaggcaaaacaatagcaaccagctatccatttacagtaaaaaactacttcgctgagaatcagattaatgcaagagtcacagaattttctggtgctgtagagttggcgccaagtttgggtaaagccgaagcaatttgcgatctcgtttcatcaggaaacactataaaggcgcataatttagtgcttggagaaacaatattagaaagcgttgcaaccgttcttaaatccaattcaaatcagtcagcttttaaacaaatgtggatcgataaaatcattgaacgaatcaatggtgttctccaagtaaatgaaagcaaatacatcatgatgcatgctccgaaaagatgc

SEQ ID NO: 239198 - DNA, 505 bp, Unknown
  Bacterial polypeptide expressing nucleotide sequence isolated from the Sargasso Sea
tataaattatattaaagttagatcgtttgatgtctgtacttttgttgcttttggagctgctcaagtaggtatagctggagatgatgttattcaagaatttgattattcagaggtatatgcacctttagaattaaaaatcggtcattgccgattatctgttgctgctttggaaacattaattgataaagaagatccaagtacttggagtaatatcagaatagcaacgaaatatcctaatattgcgagaaacttttatgcaaataaaggagtgcaagtagaagcaatcaagctaaatggatctattgaattagctccagttttacaaatgtgtaaaagggttgttgatttagtatctactggacgaacccttaaagaaaatggtttagtagaagtagaaaaaataattgatgttcaaagtaaattaataataaatagatcagcttataagactaaaacaaaagaaatagaatctataattaataatataagaaaaattataaagtga

SEQ ID NO: 239199 - DNA, 649 bp, Unknown
  Bacterial polypeptide expressing nucleotide sequence isolated from the Sargasso Sea
tatgagcaaaatagttatagcagtacccaggggtagaattacaaaagaatgtaaaagtttattacttaaaacaagttttgctccagatcctttactatttgataaagatacaaggaaattaacttttaaatcaaaaaaaagaaatattgaatatattaaagttagagcttttgatgcatgtacatttgttgcatttggagcagcacaaatcggcatagctggtgaagacgtaattaatgaatttgattattctgaaatatatgctccactagatttaaatattggtcattgtagaatttctatagctgcccttaaatctttattaaaaaaggaggatccagaaacatggagtaacataagaattgctactaaatacccaaatattactaaaaaatttttctataataagggaatccaagttgaaattattaaattaagtggctcaatggaattagctccttccttaaaaatgtgtagaagaattgtagatttagtttctacaggaaaaacattgaaggagaatggtttgattgaaattgaagaaataatgaaaattcaatctaaattaattgttaatagatcagcttttaaaacaagtaaggatgaagtctcaaatattatttcagaaatagatacatttgtaaaatga

SEQ ID NO: 239200 - DNA, 619 bp, Unknown
  Bacterial polypeptide expressing nucleotide sequence isolated from the Sargasso Sea
atgattagattagctatttccaagggaagaatattagaacaagcgattgagattcttcgtaatataaatattaattgtgaattagatcctttagattctagaaaattaatcatacctacaaatatgaagaatcttgagattgttgttattaaggctagtgatgttcctatttatattgattcaggcagagtagatttaggaatcgtgggtattgatactcttttggaagatactatcgctaatcattatcgtctcttagatctccaaatatctaaatgtaaacttgtagttgcgggtaagccaaatactgcatatttcaataatatgaaaattgcaacaaagtatccaaatgctgcaaaaaaatattttgaagagatagggcttcagtgttctattcttaagctttatggatcaatcgaacttgctccagttctctcgctttctgattttatagttgatatagtcgagtcaggtaaaaccctaaaggaaaatggattaaaagaatttgataaaatttttgatatatcgtcattattaatcgcaaataaagtttcatataaaatcaaaaaagaagaaataaattcattcatagacagggttagaactcatgataaataaa

SEQ ID NO: 239201 - DNA, 895 bp, Unknown
  Bacterial polypeptide expressing nucleotide sequence isolated from the Sargasso Sea
aatgaacgaacgaattaaaatagccattcagaaatccggtagattaacagagcacagcactaccctgctccaaaaatgtggccttatcatcagtcataccaaagaccaattgataggatatggagaaaacatgcctttcgatatcatgtttgtaagggacgacgatattccaggattgattcaagaaaatctttgtgaaatagggattgttggtgcgaatgtcgctattgaaaaacagctttcatacgagtcaagtcaattgccttctcaatttgttcttgaatcatcgcttgattttggtcactgcaagctctcttttgcatacccagagacatcaagcattcgatcggtcaatgatcttgaaggcaaaacaatagcaaccagctatccatttacagtaaaaaactacttcgctgagaatcagattaatgcaaaagtcacagaattttctggtgctgtagagttggcgccaagtttgggtaaagcagaagcaatttgcgatctcgtctcatcaggaaacactataaaggcgcataatttagtgcttggagaaacaatattagaaagcgttgcaaccgttcttaaatccaattcaaatcagtcagcttttaaacaaatgtggatcgataaaatcattgaacgaatcaatggtgttctccaagtaaatgaaagcaaatacatcatgatgcatgctccaaaagatgcaattaatgagatcactacccttctgcctggaacagagtcaccaacggtgattccattggatggcatcagtgacacagttgcagttcatgttgtttgtaaagagacggtattttgggagactttagaggagctcaaagaagtgggcgcgtcatccatattagtggtgcctgttgagaaaatgttgatgtag

SEQ ID NO: 239202 - DNA, 290 bp, Unknown
  Bacterial polypeptide expressing nucleotide sequence isolated from the Sargasso Sea
aattgctactaaatacccaaatattactaaaaaatttttttacaataagggaatacaagtagaaattataaaactaagtggatcaatggaattagccccttctttaaatatgtgtagaagaattgtagatttagtttctacaggaaaaacattgaaagaaaatggtttgactgaaattgaagaaataatgaaaattcaatctaaattaattgtcaatagatcagcttataagacaaatatgaatgaggttacaaaaattatttctgaaataggtactttcgttaaatgaa

SEQ ID NO: 239203 - DNA, 517 bp, Unknown
  Bacterial polypeptide expressing nucleotide sequence isolated from the Sargasso Sea
aatggattctcgtaagttaatttttagaactaatgacaaaaatatgaagataataattgtgagagcaagcgatgttcctacttatgtagagtcaggaaaagtagatatgggtattgtcggcaaggatactctgttggaaaaaaatagtaatgatttattgagacttaaagatctgcaaattgcaaaatgtagattagtaattgcgggcaaaaaaggagtgagtttagtaagcaatatgaagatagcgactaaatatccaacaattactcagaaatattttcaatctcaaggcttgccttgtacgattcttaaactatacggatctattgagcttgctgccgtacttgggatgaccgatgctgtcgttgatcttgttgagactggtaatactctaaaagaaaatggtttatctgaacttaagataattgagaatatatcatcatacttagttgtaaataagacatcatataggttcaataaagagtatgtcgataaatttattagcaaaatttcgtaa

SEQ ID NO: 239204 - DNA, 340 bp, Unknown
  Bacterial polypeptide expressing nucleotide sequence isolated from the Sargasso Sea
tctgaaatctttattaaaaaaagaggatccagaaacctggagtaatattagaattgctactaaatacccaaatattactaaaaaatttttttataataagggaatacaagtagaaattataaaactaagtggatcaatggaattagccccttctttaaatatgtgtaggagaattgtagatttagtttctacaggaaaaacattgaaagaaaatggtttgactgaaattgaagaaataatgaaaattcaatctaaattaattgtcaatagatcagcttataagacaaatatgaatgaggtttcaaaaattatttctgaaataggtacttttgtaaaatga

SEQ ID NO: 239205 - DNA, 895 bp, Unknown
  Bacterial polypeptide expressing nucleotide sequence isolated from the Sargasso Sea
aatgaaagaaagaattaaaattgcagttcagaaatctggtaggttgacagaacacagcattaccctactccagaaatgtggtcttatcatcagtcatacaaaagatcagttgattggatatggtgaaaatatgccatttgatatcatgtttgtcagggacgatgatatccctggactgattcaggaaaacctttgtgaaattggcattgttggtgcaaatgtcgcaagagagaagcagctttcgtatgagtcgagtcgatcatcctctaactttgaccttgagtcatcgcttgattttggacactgtaaactatcatttgcatatcctgagtcatcgagcattcggtctgttaatgaccttgatggcaaaacaattgcaacgagctatccgtttacagtaaaaaactactttactaagaattcaattgatgcaaatgtcactgaattctcaggtgctgtagagttggcaccaagtcttggtaaggcagacgcaatatgtgatctcgtatcaacaggtaatacccttagagctcataatctaatggcaggagaaacgatcttagagagcgttgcaacggtacttaagtcaaaatcagagcagtcagaatttaaaagcatgtggattgaaaagatcattgaaagaatcaatggtgttctccaagtgaatgagagtaaatacatcatgatgcatgcacctaaaaatgcgatcaatgagatcactaagcttcttcctggaacagaatcaccgactgtcattcctttagatggtgtcaatgatacagtagcagttcatgttgtttgtaaagaaacggtcttctgggagacattggaagagctgaaggacgtaggagcatcatctatcttggtggtgccagttgaaaaaatgttgatgtaa

SEQ ID NO: 239206 - DNA, 628 bp, Unknown
  Bacterial polypeptide expressing nucleotide sequence isolated from the Sargasso Sea
catggaagacgctcaagattcattaatactggctttacccaaaggaagggtttttgaagatatcatccctatgctcaagggtagcgaattagaactatttgatgatccaaataaaacaagaaaattactcttagatacaaagaatagtaagtttaaaatattattagtaagaggctgggatgtaccaacgtacgtaactgcaggagctgcgcatttaggaattgtaggaaaagatatattaattgaaaaagaatctgaggaatttattgaattaaaggatctagagataggtaaatgcagactatctttagcaggtaagaaggacttactgcttggctcaactaggatgaaaatagctactaagtaccccaaaagttctattaaatttatggagtcaatagggatacaatcagaaatcatttatttacatggagctcaagaaattgctccatcattgggtttatcagatgcaattattgatctagtcgaaagcggaaataccctaaaggacaatgggttacatgaaatacaagtgattagagaaatttctacaagattgattgtcaacagagctgctttgaagacaaaatctggattaattaatgaacttttagaagtatttagttag

SEQ ID NO: 239207 - DNA, 868 bp, Unknown
  Bacterial polypeptide expressing nucleotide sequence isolated from the Sargasso Sea
atgataaataaaattactattgctattcagcgcaaaggtaggctttttgatagcagcaaagatttattaattaaatctgggataaatttttctactagcggtgataaattattagctcggtcctcaaatatgaatatagatatattactagtaagggatgacgatataccctctctagtatctaaaggggtagctgatctggggattgtaggtcagaatgtattggctgaacaagtcgcttcaaataaaaaaattacagctaaatcagttttaaatttgggattttccaaatgtagactagcttttgctaaaccagtgaattctaagctgagatcattaaagaataaaatcattgctacttcttatccaggtttagtaaagaaattcctgaaagctaaaaatattagtgctgaagtaattaaaattaatggttctgttgaacttactccatatataggaattgctgattgtatttgcgaccttgtttcatcaggggcaacacttgaagcaaataatttaaccgagtttaaaactctactaaactcggaagcagtacttattgcgtcaagctcatatgtaaagataaaagataaaaacattcttgatttaatcaaaagatttgagggtgtaattaatgctgcagaaagcaaatatgtaatgctaaatgcggaaacaaaatcaatcgataaaatatgtaaattacttccaggcgcagactcgccaaccattattcccttacagcaggaaaataaggttgcaattcatgcgctttgtagtgagcctgttttttgggagacgatggaaaaacttaaatctaatggcgcatcttcaatcttagttatgcctgttgaaaaaattcttaattaaa

SEQ ID NO: 239208 - DNA, 430 bp, Unknown
  Bacterial polypeptide expressing nucleotide sequence isolated from the Sargasso Sea
tcaggtgcagctcacttaggagtagttggaaaagatatattaatagaaaaagaatctgaagaatttatcgagttaagagatctaggaactgggaaatgtagactatcgctagcaggaaaaaaagatttattactaggttctacaagaatgaagatagctactaaatatcccaagagttcaatccggttcatggaatctataggtatacaatcagaaattatatacctacacggagcacaagagattgcccctttgctggggttatctgatgcaataattgatcttgtagaaactggaaatactcttaaagagaatggattacatgaaattcaagtaattagagaaatttctactaggttgattgccaataaagctgctttaaaaactaaatcagccttaattaatgaaattttagaaatttttaaataaa

SEQ ID NO: 239209 - DNA, 361 bp, Unknown
  Bacterial polypeptide expressing nucleotide sequence isolated from the Sargasso Sea
aatgttagacaacacccgtttacgcatagctatgcagaaatctggccgtttaagcgatgattcacgcgaattgctggcccgttgtggcattaaaattaatcttcacacccagcgcctgattgcaatggcagagaatatgcctatcgatattctgcgcgtacgtgatgacgatatcccgggtctggtgatggatggcgttgttgacctcggcatcatcggggaaaatgttctggaagaggaactgctcaaccgccgggcacagggtgaagaccctcgctattttaccctgcgtcgtctggacttcggcggctgccgtctttcgcaggcaaccccggttgatgaagcctgggatggcccggca

SEQ ID NO: 239210 - DNA, 263 bp, Unknown
  Bacterial polypeptide expressing nucleotide sequence isolated from the Sargasso Sea
aatgtccgccaacactgaaagcaaaagattacgtattgccatccaaaaatcaggtcgtttatcacaggattcacaggcgctgctcaccagctgcggcctgaaaattaatctgcgggaacaacgactgattgcccatgtggaaaatatggccattgatttgctcagagtgcgcgacgacgacattccgggtttagtgatggatggcgtctgtgatttaggtattatcggcgagaacgtgctggaagaaatgtcactgcagcgcc

SEQ ID NO: 239211 - DNA, 695 bp, Unknown
  Bacterial polypeptide expressing nucleotide sequence isolated from the Sargasso Sea
aatgagtaacagcaaaagacttcgaattgccgtacagaaatcaggccgcttgagcgatgacagcattgcattattaaaggcaatcggcattaaactcaatattcgtgatcgtctgctgatagcgcattctacaaacgaacctattgatttgctgcgcgtgcgtgatgacgatattccaggtttagtcatggacggtgtggttgacctaggctttattggcgagaacgagttagaagaaaagtcccttgagcgaaaagctgcaggaaagccttttgagtacgaaactcttcgccgtctagactatggtggctgtcgcttatccatcgcggtacctaatgagatggattacgatggtgttcaatctcttgacggcaaagaagtggcaacaacctatccataccttcttgaacgttatttcgaagaacaaggtatcaactcaaaagccgtcatgcttacgggttctgtagaagttgctcctcgcgctggcgttgcagacgctatttgtgacctagtgtctaccggcgccacgttagaagctaatggattagttgaaaaagaagaaatcttccgctctaaagcggtattgattaagcgcgttggcggcgatatgagcaatgagaaacaagcattaatcaatcgcatgatgcctcgagtagacggtgttctgttagcaaaagaaagtaagtacatcatgc

SEQ ID NO: 239212 - DNA, 452 bp, Unknown
  Bacterial polypeptide expressing nucleotide sequence isolated from the Sargasso Sea
catgctgaccatcgccctgtccaaaggccgcattctcgatgacaccctgccgttgctggcggcggcgggtatcgagccgaccgagaacccggacaagagccgcaagctgatcatcccgactactcaggatgacgtgcgcctgctgatcgtgcgtgctaccgacgtgccgacctatgtcgagcatggcgcggccgacctcggtgtcgccggcaaggacgtactgatggagtacggcggccagggcatctacgagccgctggatctgcagatcgccaagtgcaaactgatgaccgctggcaaggtcggtgcgccggagccgaaagggcgcctgcgcgtggccaccaagttcgtcaacgtcgccaagcgctactacgccgagcagggccgtcaggtcgacatcatcaagttgtacggttcgatggaactggcgccgctggtgggcctggctgaca

SEQ ID NO: 239213 - DNA, 343 bp, Unknown
  Bacterial polypeptide expressing nucleotide sequence isolated from the Sargasso Sea
gaatgatctaccgctcaaagcctgcctgattcagcgcgacggcgaaatgaccgaagccaagcaacaactgatcgacaaactgctgacccgtattcagggcgttattcaggctcgtgaatccaaatacattatgatgcacgcgccgagcgagcgtctggacgaagttatcgccctgctgcctggcgctgagcgtccgaccattctcccgctggccggcgaccagcagcgtgttgccatgcacatggtcagcagcgaaaccctgttctgggaaacaatggaaaaactgaaagcgctcggtgccagctcaattctggtgctgccaattgagaagatgatggagtga

SEQ ID NO: 239214 - DNA, 523 bp, Unknown
  Bacterial polypeptide expressing nucleotide sequence isolated from the Sargasso Sea
catgctgaccatcgccctgtccaaaggccgcattctcgatgacaccctgccgttgctggcggcggcgggtatcgagccgaccgagaacccggacaagagccgcaagctgatcatcccgaccactcaggatgacgtgcgcctgctgatcgtgcgtgctaccgacgtgccgacctatgtcgagcatggcgcggccgacctcggtgtcgccggcaaggacgtactgatggaatacggcggccagggcatctacgagccgctggatctgcagatcgccaagtgcaagctgatgacggctggcaaggtcggtgcgccggagccgaaagggcgcctgcgcgtggccaccaagttcgtcaacgtcgccaagcgctactacgccgagcagggccgtcaggtcgacatcatcaagctgtacggctcgatggaactggcgccgctggtgggcctggctgacaagatcatcgatgtggtcgacaccggcaacaccctgcgtgccaacggcctggaaccgcaggagctgatcgcc

SEQ ID NO: 239215 - DNA, 454 bp, Unknown
  Bacterial polypeptide expressing nucleotide sequence isolated from the Sargasso Sea
catgttaacgggctctgttgaagtcgcaccgcgtgctggtttggctgatgcaatttgtgacctagtgtctactggtgcaacgttagaagcaaacggcttaatgcaaggcgacaccatcttagaatcaaatgcatgtttaattcaaaacaaagaccttactgatcaaagcaaacttgatttaatcaacacgttaatgccgcgtctacgtggtgtacgccaagcaaaagaaagtaaatacatcatgctacacgcaccaaaagcaaagcttgatgaagtgtgcgacttactaccgggtactggccaaccaactttactatcgcttgctggtagcgacgattatgttgcactacacatggttagcagcgaaacccttttctgggaaacaatggaacagttaaaagcactgggtgccaactcaattcttgttatgccaattgaaaaaatgatggagtaa

SEQ ID NO: 239216 - DNA, 718 bp, Unknown
  Bacterial polypeptide expressing nucleotide sequence isolated from the Sargasso Sea
tatgacagttacaaccaacagattacgtatcgccattcagaagtcaggtcgcctgtcgcaagactctcaggcacttttaaccagctgcggtttaaaaatcaacttacgcgaacagcgcctgattgcccatgtcgaaaacatggatatcgatttacttcgggtgcgggatgacgatatcccaggcctggtgatggacggtgtttgtgatttaggttttgttggcgaaaacgtgctggaagaagtgtccttacagcgccagttggataacgaaacctacgattacactgtgctggcccgtttagattttggtggctgccgcttatccatcgcagtaccacaggaagaagattataagtctgttaaagatttagaaggccgcaccattgcgaccacctacccacgtttactgaatcgctatttaaaacaaaacggcgtcaattgccgtatcgtcaacttaaaaggctcagtggaagtggcgccgcgtgctggtttagccgatgcaatctgtgatttagtctccactggtgcgactttagaagccaatggcttaaaagaagtggaagtgatttaccgctccaaagctgtgcttattcagcgccgcgatttagccgatgaaaaacaactgaaactgatcaaaaagctaatgccacgtattcagggtgtgatgcaagccaatgaaagcaaatacattatgttgcacgcgccacgagctcgcttg

SEQ ID NO: 239217 - DNA, 904 bp, Unknown
  Bacterial polypeptide expressing nucleotide sequence isolated from the Sargasso Sea
catgacagtcactactaacagattacgtatcgccattcagaagtcaggccgcctgtcgcaagactctcaggcacttttaaccagctgtggtttaaaaatcaacttacgtgaacagcgcctgatcgcccatgttgaaaatatggatatcgacttgctgcgagtgcgggatgatgatattccgggtttagtaatggacggtgtctgcgatttaggttttgttggcgaaaacgtgctggaagaagagtcgctgcaacgtcagatggacaatgaaagctatgattacactgtgttggcccgtttagactttggtggctgccgcttatctatagctgtgccacaggaagaagattatcaatccgtcaaagatttagaaggccgcactattgccaccacttacccacgtttactgaatcgctatttaaaacaaaacggcgtcaattgccgtatcgttaatttaaaaggttcggttgaagtggcaccacgagctggtttagccgacgccatttgtgacttagtctccacaggcgccactttagaagccaatggtttaaaagaagtggaagtgatttaccgctccaaagccgtgctgatccagcgccgcgatttagcggatgaaaaacaactgaaactgattaaaaaactgatgcctcgtattcagggcgtgatgcaggccaatgaaagcaaatacattatgttgcacgcaccacgggctcgtttacaggaagtgatagcgctgctgccaggtgcggaaaatccaactttattgccattggctggcaacgacgatttagtggccttgcacgtggtcagcagcgaaactttgttctgggaaaccatggagcaactgaaaggtttaggtgccagctccattttagtactacccattgaaaagatgatggagtga

SEQ ID NO: 239218 - DNA, 982 bp, Unknown
  Bacterial polypeptide expressing nucleotide sequence isolated from the Sargasso Sea
actggcggtgccgataaaccagttaaagcgtgaaacgaaagaatatcattttgaatttgttaactttgagcgagataaaattatgactgaatcaaaccgtttacgtattgccattcaaaaatcgggtcgcctatcgaccgactctcagcaattactcaagagctgcggtgttaagttttccattaacgaacaacgtcttatcgcacacgcagataacatgcctatcgatttactcagagtacgtgacgatgatattccaggactggttatggatggcgtggtcgatttaggcattattggtgagaacgtgctcgaagaagagcaaattgagcgtcaaaccctaaataagccagctgaatatgtaaaattacgccaattagattttggcgcctgccgtctctcgttagccgtaccaaccgaatttagctatgccaatgcctcatccctagaaggcttgagaattgccacctcctaccccaatctattgcgccgttttatgcaacaaaaaggcataaattatcgcgactgtatgttaaaaggctcggttgaagttgcgccgcgtgcagggcttgccgatggcatttgtgacttagtctccactggcgcaacccttgaagccaatggtttatacgagactgaagtcatataccgctccatggcctgcattattcaatcaacccaaacccaaacgccgagcaaacaagccttaatcgatcgcattttatcccgcgtaaacggcgtgatccgcgcccgtgaaagtaaatatattttgctgcacgcgcccactgaaactttagatcaaattgtcgccctgctgcccggtgccgaaaatcctactgtattgccattaaacgacgatactaatcgagtggccattcacgccgtcagtaccgaagatttattctgggacaccatggaagaactcaccgcgctcggtgccagctcaatcctcgtcatgccaattgaaaaaatgatggggtga

SEQ ID NO: 239219 - DNA, 1000 bp, Unknown
  Bacterial polypeptide expressing nucleotide sequence isolated from the Sargasso Sea
tatgttagctagaccaataccggcaagacatagaaaccagttaaaccatgcgacaaaagaatatcattttgaatttgttaactttgagcgagacaagactatgactgaatcaaaccgtttacgcatcgccatccaaaaatctggccgtttatccaccgactctcagcaattactcaagagctgcggcgttaagttttccattaatgaacaacgtcttatcgcacacgcagacaacatgcccatcgatttactcagagtgcgtgacgatgatattccaggactggtgatggatggcgtggtcgatttaggcattattggtgagaacgtgcttgaagaagagcagattgagcgtcaaaccttaaataaacccgccgagtttgtgaagttacgccagttggattttggtgcctgccgcctgtcattagcagtaccaagcgaatttagctatgccgatgcctcatccttggaaggcttgagaattgccacctcctaccccaatctactccgccgttttatgcaacaaaaaggcataagttatcgcgactgtatgttgaaaggctcggttgaagtcgcgccgcgtgcaggacttgccgatggcatttgtgacttagtctccaccggtgccacccttgaggccaacggtttatacgagaccgaagtcatctaccgctccatggcctgtattattcaatcgacccaaacccaaacgccgagcaaacaagcgctaatcgacagaattttatcccgcgtaaacggcgtgatccgcgcccgtgaaagtaaatatattttgctacacgcacccacagaaaccttagatcaaattgtcgccctgctgcccggcgccgaaaaccccacggtgctgccattaaacgacgatactaatcgagtggccatccacgccgtcagtactgaagatttattctgggacaccatggagcagctcaccgcgctcggcgccagctctatcctcgtaatgccaattgaaaaaatgatggggtga

SEQ ID NO: 239220 - DNA, 901 bp, Unknown
  Bacterial polypeptide expressing nucleotide sequence isolated from the Sargasso Sea
aatgagtaacacaaatcgtctacgtatcgccatccaaaaaggcggtcgcctgtctaaagattgtcaagatttactaaagcaactaggtgtaaaattaaacctacgtgagcaacgcttaattgcacactcaaccaatatgccaattgacgtacttcgtgtgcgcgatgacgatattccgggcttagtaatggacggtgtttgtgatttaggtattgttggcgaaaacgtactagtagaagtacaagccgaacgtgaacgccaaggtgtaccaagcgaagttagcaaactagcaaaactagattttggttactgccgccttgcacttgcatggccacaagagcttggcccacgtgataaaagctggtttgaaggcaaacgtattgcaacaacctacccagaaatattaacgcagtggttaaagcgcgaaggcattaatgcaagcactgtaatgcttacaggctcagtagaagtagccccacgtgcaggtctttctgatgcaatttgtgatttagtttcaaccggtgcaacgctagaagcgaacggcttgattcaaggtgatacaattttagaatcaaacgcatgtttaattcaaaataaagacctgcaagatgaagacaaactagcgctaatcaataagcttatgccacgccttcgcggtgttaaacaagctaaagaaagcaaatacattatgctacacgcgccaaaaactaaacttgatgaaatttgcgaaattttaccaggctcaggtcaacctactctacttgcacttgctggtaatgaagagtacgtagcgcttcacatggtaagcagcgaaacattattttgggaaacaatggagcagcttaaagccctaggcgctaactctattttagtaatgccaattgaaaaaatgatggagtaa

SEQ ID NO: 239221 - DNA, 898 bp, Unknown
  Bacterial polypeptide expressing nucleotide sequence isolated from the Sargasso Sea
aatggaaacacaacgtctgcgcatcgccatgcaaaaatccggtcgcctgagccaggactcccaggccctgttcaagagctgcggcctcaagatcaacctgcgcgaacagcgcctcatcgcccatgtcgagaacatgcccatcgacatcctgcgggtacgcgatgacgacatcccggggctggtgatggaaggggtggtcgaccttggcatcatcggtgagaacgtgctggaagaggtgcagctcatccgcgcctcccaaggccagccctttgcagtcaaaaccctcaagcagctcgacttcggcggctgccgcctctccctggcggtgccggacgacgtcaactacaccgggccacagagcctcgccggcaaacgcatcgccacctcctacccggggctgctcaagcgcttcttcgacgaaaaagggcttagcttcaagagcgtgatgctgggcggctccgtggaagtggccccccgcgcgggcctggccgatgccatctgcgatctggtctccaccggcgctaccctggaggccaatggcctcaaagaggtggaagtgatctaccgctccaaggcggtgctggtgcaggcgcccaaccccttgtccgattccaagcagaagatcatcgacaccctgctgccccgtattcaggggatgcagcaggcgcgcgagagcaagtacatcatgctgcacgcgcccaaggacaagctcgatgccatcaccgatctgctgccgggcgccgagcgtcccaccatcatgcagctggcgggcgagaccaaccaggtggcgctgcacgtcgtctccagcgagaccctgttctgggagaccatggaacagctcaaggcgctgggtgccagctccattctggtgctgcccatcgaaaaaatgatggaataa

SEQ ID NO: 239222 - DNA, 700 bp, Unknown
  Bacterial polypeptide expressing nucleotide sequence isolated from the Sargasso Sea
catgagttcgatgccgcaaacgtcgtcgtcgccggccgtgagcgcgccgcttacgctggctttgtcgaaagggcgtatcttcgaagagacgctgccgctgctcgccgcagccggcattgaagtcgccgaagatccggagacctcgcgcaagctgattctgcccaccacggacgcgaatgtgcgcgtgatcatcgtgcgcgcgacagatgttccgacctacgtcgaatacggcgcggccgatttcggcgtggcaggcaaagacgtcctgctcgagcacggtggcagcgggctgtatcagccggtcgacctggatatcgcgcggtgccgtatgtcggtggcggtggcggccggattcgactacgcgaacgcggtgcgccagggcgcacgcctgcgcgtggcgaccaagtacgttgagaccgcacgtgagcattttgccgccaagggtgtgcacgtcgacctgatcaagctgtacggttcgatggagctggcgccgctggtcggtctcgctgacgcgatcgtcgacctggtgagttcgggcaacaccttgcgcgccaacaatcttgtcgaggtggaggagatcatgcagatttcgtcgcgcctcgttgtgaatcaggcggcgctgaagctcaagcgcgccgcgctgcgaccgatcctcgacgcattcgaacgcgcgtcgaaggccggcaccgcagccgcctga

SEQ ID NO: 239223 - DNA, 655 bp, Unknown
  Bacterial polypeptide expressing nucleotide sequence isolated from the Sargasso Sea
catgaccgcgccgctgacccttgccctgtcgaagggccggattttcgaggaaaccctgccgctgctggccgcggccggcgtgcaggtgaccgaggatccggaaacgtcgcgcaagctgatcctgccgacgacgaaccccgacctgcgcgtgatcatcgtgcgcgcgagcgacgtgccgacctatgtcgaatacggtgcggccgatttcggcgtggccggcaaggacgtgctggtcgagcacggcggctcgggcctgtaccagccgatcgatctgaacattgcgcgctgccggatgtcggtggccgtgtcggccggtttcgactatgcgagcgccgtgcgccagggcgcgcgcctgcgcgtcgcgacgaagtacgtcgaaaccgcacgcgaacactttgccgcgaagggcgtgcacgtcgacctgatcaagctgtacggctcgatggagcttgcaccgctggtcgggctggccgacgcgatcgtcgacctcgtcagctcgggcggcacgctgaaggcgaacaatctggtcgaggtcgaggagatcatggcgatctcgtcgcgcctcgtcgtgaaccaggctgcgctgaagttgaagcgcacggcgctcaagccgattctcgacgcgttcgaacgcgcgtcgcagaatggcggttga

SEQ ID NO: 239224 - DNA, 796 bp, Unknown
  Bacterial polypeptide expressing nucleotide sequence isolated from the Sargasso Sea
aatgagtaatgaagatccctttaaacccataatctctaaaatttcaaaaggaaaaacacttacatcaagcgatgccgatactgcattctcattaataatgagcggttcagttacaaatgctcaaatcggtgcttttttgatgggattgagccttaatggtgaaacttcagatattattgcttcaggcgcaaatatgttaagacaaaatgcaattaaaattaaatctgacagtaatacaattgatactgtaggcactggtggtgacggggctcatacattaaatatttcaagtgcagctgcatttgttgttgctggggctggagttaaagttgcaaaacatggtagccgttcactctcaagtaaatcaggtgctgcagacgttctatctgaactgggaataaatctagattgctctttttctcttgttcaagaggctttagataagattgggatttgctttctaatggctccaaggcaccatgtggcaatgaagcatgttggcccatctagagttgagcttggcataaggacaatttttaatttgttaggccccctttcaaatcctgcatttgtaaaaaggcaaatggttggtgttttcgataaaagatggcttttgccttttgcagaggccctgaaaaaaatgggatctacgaatgcttggattattcatggcagagatgggttggatgaagtgtctataagcgagattactgacgttgttgaattaaaaaaaggaaaaatcaatgagttttctctagacccttcattgtatggttttgagaaaacaagatcttga

SEQ ID NO: 239225 - DNA, 913 bp, Unknown
  Bacterial polypeptide expressing nucleotide sequence isolated from the Sargasso Sea
tatgaattatgatttgaattttaaaaacattttaaaaatgtttactgatgaaaaagaattaagttatcaattaagcaaatcagcatttgaaataattatgactggaaaagcaactgacgctcaaatttcatcttttttgacagctatcaaaatgcaaaaccataacccaactgttattgcagcaggcgcagaaattctcagagataaatgttcaaaaattaaatgcaaagaaaatacaattgatgttgtaggaactggaggagacaatttaggtacattaaatatatcaactgctgtttcatttgtattagcaggaactaatatccctgtagcaaaacacggaaactactctgccacctctaagtcaggggctgcaaatgttttgaaatctctttcagttaatattgattgtgagcttaatatcgtagaaagatgtttggatgaaattggtatttgttttcttcttgcgccaaaacatcatattgcaatgaaatatgttggtaaaataagacaagaaatgggcataagaactatttttaatctattaggacctttatccaacccagctttagtgaagagacaattattaggtgtttatgacaaatctcttattttaccatttgcggagtcattaaaaactcttggatccactcatgcatggatagtccatgggagtgatgggttagatgaagtaacaataaccggtgagacatattgcgctgaacttaaaaatggaaaaataaaagaattttcaataaatccatccgatattgatcttcctactgctaaaatatctgatattgttggcggagaaccagaggaaaatgctaaagaaatcattgaattgtttaatggcaaaaaaagtaagttcagagatgtagttattttaaactctgcttctgctttagttgca

SEQ ID NO: 239226 - DNA, 698 bp, Unknown
  Bacterial polypeptide expressing nucleotide sequence isolated from the Sargasso Sea
ccgtagtaatacaagaaaaagtgggagtgctgaagcactagaagctttaggagtcaaaataaatttggaagtagatgaagttgaaagatgtcttcgagatttgaatatttgtttttgctacgcgatcaatcatcatccagcaatgcgctttgccggaccaattcgcaaggatcttggggtacccactgtatttaatcttcttggccctttaacgaatcctgcaggtgctaaaagtcaattgattggagttccgaatgttggacttacttcgaaaattgctcaggtacttaagcggttaggtagcgaacgagtaatggtggttcatggatatgatggtttatgtgaacttacagtcacttcccctacacatgtggcagaacttagagaaggtaaaatcagagaatatgaaataactcctgaggagcttggtctcaagacgggaaaattggaggagataggcatagattctcctgaagaaagtgccaggataatgaaaagtatattttctggagatgagcaaggtactgcacgtgagattgctctggcaaatgctgccggagcgttagtcgttgcaggtcaggttgagaatttggcggaaggtgtagttctagcaactaagacagttgacaatggaaaagcagcagaaaaacttaatgatttaatcaacttttcatgggcaaaccataaggcaaattaaa

SEQ ID NO: 239227 - DNA, 262 bp, Unknown
  Bacterial polypeptide expressing nucleotide sequence isolated from the Sargasso Sea
aatggaaaagtacttagaaaaaattaaaaataaacaaaacttgtcctttaatgaaagtaaagcggcatttgaaattttgatgaacggcgaagcaaaagatcaagaaatatttgattttttgacattattatcagttaagggagaatcttccaatgaattggctggaggtgtttatgttttgagagacaaatctaaaagagttaatgtagataattgtattgatacatgtggtactggaggagatggaatgaatactcttaat

SEQ ID NO: 239228 - DNA, 352 bp, Unknown
  Bacterial polypeptide expressing nucleotide sequence isolated from the Sargasso Sea
tatgattcttaaagatataaaagataaaatttttaaatcagaagatctcacagtagaagaaactgtttttatatttaatttaataatgagtggaaagttaaatgatattgaaattgctgctgtgttaattgctttaaaaactaaagtggaatctaaaaatgaaattttaggtgcagctaaatgcatgagagaaaaatcaaaaaaaattacttcttctgaagaaactgtagatacctgtggaactggtggagatatgagtggaacacttaatatttcaacatctgcagcaattgttgcagctagcgcaggtgccaaaatagcaaaacatggaaatcgttcgattagttcaaaa

SEQ ID NO: 239229 - DNA, 276 bp, Unknown
  Bacterial polypeptide expressing nucleotide sequence isolated from the Sargasso Sea
aatgaaaatttacttagataaacttaacaataaagaaaacctgacatttgaagaaagtaaatcggccttcaatatattaatgaacggtaaagctagtgaagatgaaatatttaattttcttactttgttatcacttaaaggagaggtttcttctgaaatagccgggggtgtttatgtcctaagagaaaaatcaaaaagagtaaattatggtgaatgtatagatacatgtggaactgggggggatggaatgaatactctgaacatatctactgcttc

SEQ ID NO: 239230 - DNA, 922 bp, Unknown
  Bacterial polypeptide expressing nucleotide sequence isolated from the Sargasso Sea
aatggagaccgctcaccagtgaagaaaaccaacgctgtctttgacgcaatagatagcagtgatctgaatgcattctccttttttgataaagagggagctcttacccgagcgggacaagctgatgtatcgcttcccctaggtggggttcctatcggggtaaaagaactccacaatgtcaaaggttggcctgacacgagtgcttctctggtgttcgctgatcggatttcgcaatttgatggcacgatgattcaacgtcttaaatcagcgggagcaaatctgatcggtctgacaactgcaagcgagttcggaggtctcaactgctcgaccaccaaactaaatggcatcacccataatccatggaataaagatttaacacctgggggttcttctggtggaagtgctgccgctgttgcaggtgggatcgtgacgcttggaactggtggtgatgggggaggatcgatacgtatccctgctgggttttgtggtcttgtcggtatgaaaggtacggcgggccgtattcctcgaggaccccataccggcatcggcccgatgactgtggtgagcggatgtttatcgaggtcagtaagagatactgcacgctggtatgacatctgcgcaggttttgacccccgcgacccctacagcctccccaaggaacacgggtgggaggcacagctcggcaccacagacttctcaggtgctcgtgtcgttgtttcacctgatttggggtcggcgatgatcagcggccccgttcgtgccctcatcatcgaaacagctgaggagattaccaaggttgccggtttgcaacgcgttgatgtggatattgatcttccgccgattgactgggaatgggccatcgccaaccagtcaggcctctacaaagaactcggtgatctatggcccgactgtgaagaccagagac

SEQ ID NO: 239231 - DNA, 809 bp, Unknown
  Bacterial polypeptide expressing nucleotide sequence isolated from the Sargasso Sea
attgggcattccccaatcgatcgttcatcagatacttgagcatcaggatttaacggaatctgatgctcatgatgtcgccatgaccttcctatctggggaagcttctacggatgatatggtgacggtattatccgccctacacaaaaaaggggaatccgtcagtgaaattcttggctttattcgagccatgcgcacccacatgaccccattatcatttactgaatcccccatcatggatatttgtgggactggaggaagcctacccaaccgatttaatgtctccacctgtgccgccatggtactaggggccatgggacactctgtcgctaaacatggaaaccgtggctctaaaaaaccaaatggcagttttgattttttagatgcacttggtattgcctatgagttaaccccagatggacaccaggaaatgatgactcgtcatggcgccacatttttatttgcgcgacaatatcatcccgccgttcgccatgttgttaatgcccgaaaacaattaacatcaccaagcatatttaatttaattggaccgttttgcaatcctgcatccccaagcattcaagtgattggagcaccgtctaaacgattggctaaaaaactggccatggttggagacgcattgtcatatgatacatttgctgtcattaccagtgatattggattggatgaatgctcgacggttggcaaatctcatattgagggcaatcgcaatggccaagcattccaacttgaactggatccaacaacacttggaatacatcatcaattaagtgatattaccatctcccccacgg

SEQ ID NO: 239232 - DNA, 754 bp, Unknown
  Bacterial polypeptide expressing nucleotide sequence isolated from the Sargasso Sea
aatgagtagtgaagatccctttaaacccataatctctaaaatttcaaaaggaaaaactcttacatcaagcgatgccgatactgcattctcattaataatgagcggttcagttacaaatgctcaaatcggtgcttttttgatgggattgagccttaatggtgaaacttcagatattattgcttcaggcgcgaatatgttaagacaaaatgcaattaaaattaaatctgacagtaatacaattgatactgtaggcactggtggtgacggggctcatacattaaatatttcaagtgcagctgcatttgttgttgctggagcaggagttaaagttgcaaaacatggtagccgctcactttcaagtaaatcaggcgctgcagacgttctatctgagctaggaataaatcttgattgctctttttctattgttcaagaggctttagataagattgggatttgctttctcatggctccaaggcaccacgttgcaatgaaacatgttggtccatcaagagtcgagcttggaataaggacaatttttaatttgttaggtcctttatcaaatcctgcatttgtaaaaaggcaaatggttggtgttttcgataaaagatggcttttgccttttgcagaggccctgaaaaaaatgggatctacgaatgcttggattattcatggcagagacgggttggatgaagtgtcaataagcgagattactgacgttgttgaattaaaaaaaggaaaaatcagtgagtttctt

SEQ ID NO: 239233 - DNA, 295 bp, Unknown
  Bacterial polypeptide expressing nucleotide sequence isolated from the Sargasso Sea
catgactagaagtttaagtgaaataacaaaagatataattaattttaaaaagattagttttgaagaaatgaaatatgttttttcaactataatggatggaaatgctagtgatgttgaaatatcaagtttacttgtttctcttaatatgcgtggagaaacagaggaagatattgctgctggcgcaacaattttaagagaaaaatcactcaaaattgatgcgcctttaaatgctatagatattgttggaactggaggtgataaattaggaacatataatatttcaacggcatcagcc

SEQ ID NO: 239234 - DNA, 185 bp, Unknown
  Bacterial polypeptide expressing nucleotide sequence isolated from the Sargasso Sea
tatgttggaaaaattatcatataaaattttagataatcctagtgaaattgaaaaatcttttaaaaaaaataatttttgttttttatttgctcaatatcaccacttagctatgaaaaatgttgggaatgtaagaaaattacttggaacaagaacgatttttaatctcttggggcctttaacaaatc

SEQ ID NO: 239235 - DNA, 642 bp, Unknown
  Bacterial polypeptide expressing nucleotide sequence isolated from the Sargasso Sea
tacaatgcctaggggttaatatcgatgcccctttaagaacaattgaacgatgcattgaggaagttgggatagggtttctttttgcaccattaatgcataaggccatgaagcatgcagtgggtgttagaaaagctttagggtttaggacttttttcaatctcttgggaccccttacgaatcctgcaaatgcaaattcgcaaattctgggagtctttgattcaaaatgggtaaatcctctcgctgaagtgctgcgggatttgggaagtaaacacgctatggttgttcatggttttgatgggttagatgagataacgctgacatcagaaacccaaatttcagaattacgaaatgggaatataaccaattatactcttaatccaaaaaagtttggctattcgctttgttcttcggaggatttgaggggaggagcccctgagataaatgcaaagataattcgtgatattttaaagggtgaaaaaggttgcaaaacagatatcattttgctgaatgctggcgccgcaatatacgtggccgggaaggctgaaaccattgagcaggggattgtgatcgcagccaagtcaattagttcgggtgaggcaaataaaaaacttgaagaattatgccaggcatccaattcgtaaa

SEQ ID NO: 239236 - DNA, 312 bp, Unknown
  Bacterial polypeptide expressing nucleotide sequence isolated from the Sargasso Sea
aatggatcaatttttagaaaaactaagaaacaaaacaaatttaaattttgatgaaagtaaaaatgcatttaagattttaatgaatggtgaggctacagatcaacaaatttacgattttctaactttattatctgacaaaggtgaggtttcagatgaaatagctggaggtgtatatatattaagagataagtcaaaaagagtaaaagttaaaaattgcattgatacttgtggtactggaggagatggaaaagatactcttaatatttcaactgcatcagcgctgttgttagcaagtatgggtattaaagtagc

SEQ ID NO: 239237 - DNA, 256 bp, Unknown
  Bacterial polypeptide expressing nucleotide sequence isolated from the Sargasso Sea
aatgaaagcattcaatttaatcatgaatggttcagttagtgacattcaaataagttcatttttatctatacttcaaaaatctggtgtaagagctgatcatatgattggtgcaattgaagtgatgagatctaaaatggtcacagtcgctgccccagaaaattcaatggatacatgtggaactggcggagatggaaaaaatagccttaacatatctacagctacagcatttgttttggcttcacatggcatacctatt

SEQ ID NO: 239238 - DNA, 310 bp, Unknown
  Bacterial polypeptide expressing nucleotide sequence isolated from the Sargasso Sea
atgagacaattcatagaaaaaattaagattaaggaagatttaacttttgaagaaagtaaatcagcttttcaattattaatggagggtaaagctaaagaccaagaaatatttgattttttgacacttttatcggctaaaggtgaatcttcagatgaaatagctggtggagtttttgttcttagagacaagtctaaaagagtaaatgtaaaaaattgtgtcgatacatgtggtactggtggagatggtatgaatacacttaatatatcaactgcatctgcgatattgcttgcaagtatgggcgttaaggtgc

SEQ ID NO: 239239 - DNA, 921 bp, Unknown
  Bacterial polypeptide expressing nucleotide sequence isolated from the Sargasso Sea
cgtgggaaagtccggacctgtgaaaaggatcaggttcgaatagcgatcgactttctcgtcgctgaggaggtggacccctcggttaaagtcgatttcctcgaagccttcgcccaaaaaggtgagcgcgccgaagaacttgaggagttcgtatcctgcttccgcgggctggccagggacccgcacttagaagagatcgctccccatgccatcgacctttgcggaacgggtggggacaaggcaggcagttttaacgtctccaccttcgtttccttcgttgttgccgcggcgggcgtcccggtcatcaagcacggcaacagatcgatcagttccagttgtggaagcgccgatcttctggaagcgatcggcattcctctcgatcccgaactcgacctcatcagggaaggtctcgataaactgggctttgcctttttgttcgcaccgtccttccatcccgccttcaaacacatcgcgcccgtgcgtaaggagcttgccggtcgtgggatcatcacggtcttcaacttacttggccccatgatcaacccggcccagccagcctatcaggttctgggggtctacgaccctcgccacatcgagaagatgggcaaagcgctccgagggaatggacttaagggagcagtcgtggtccacggaaagatcgatgaccccgtgatctctggtgtggacgaaatcacttcttgcggggagaacttggttttcggtttcggaccaatctcgaccgatggcgtcgaaagctggtcgccccgcaactgggggatgcaagaccaaccctttgaacacctcgcaggaggcgacttggatgaaaacctcagaatcatgaagctcctgctcgaggggaaggctcccgaaggattgcgaactacggtcatcatgaacgccgcgaccgccttccttactgtcgca

SEQ ID NO: 239240 - DNA, 312 bp, Unknown
  Bacterial polypeptide expressing nucleotide sequence isolated from the Sargasso Sea
tatgattacagaagctataaataaacttatgtcccttgaatcactagatttcaacgagtcaactgaagtaatgactaagattatgaccggagaagtgagcgaagttcaactttcagcatttctaacatctcttcaaatgaaaggtgctacatccgacgaaattgcaggaatggctacgattatgcgagaaaaatcaaatcaaattactttagattatgatcttgttgacacctgcggaacaggaggagatggtcaaaacctttttaatatatcaactgcatgtatatttgtcgcagcagctatgggtttaaa

SEQ ID NO: 239241 - DNA, 283 bp, Unknown
  Bacterial polypeptide expressing nucleotide sequence isolated from the Sargasso Sea
aatgaaacaattcatagacaaaataggagcaaaacaagatttaactttttcagaaagtaaagaagcttttaaaatattaatggaaggaaaagctaatgataaagagatatttgattttttaactctgttatcaaataaaggtgagtcttctgatgaaatagctgggggtgtttacatattaagggaaaaatcaaaaagggtaaatgtagaagattgtattgatacatgtggtacgggtggagatgggatgaacactttaaatatatctaccgccatccagctt

SEQ ID NO: 239242 - DNA, 322 bp, Unknown
  Bacterial polypeptide expressing nucleotide sequence isolated from the Sargasso Sea
aatgaaaatttacttagataaacttaagaataaagaaaatctaacatttgaagaaagtaaatcagccttcaatatattaatgaacggtaaagctagcgaagatgaaatatttaattttcttactttgttgtcacttaaaggagaggtttcttctgagatagccgggggtgtttatgtcctaagagaaaaatcaaaaagagtaaataatgatgaatgtatagatacatgtggaactgggggggatggaatgaatactctgaacatatctactgcttctgcggtattattggctagcattggtataaaggttgctaaacacggg

SEQ ID NO: 239243 - DNA, 306 bp, Unknown
  Bacterial polypeptide expressing nucleotide sequence isolated from the Sargasso Sea
aatgaaacaattcattgacaaaataaaaaataaagaaaatctttctttcgaagaaagtaaagcagcatttgagttattaatggaaggtaaagcaaatgaccaggaaatatttgattttttaacgcttttatcagccaagggtgaagcttcaaatgaaatagctggtggcgtttatgttctaagagacaaatccaaaagagttaatgttgatgattgtgtagatacgtgtggtactggtggagatggtatgaatacacttaatatatcaacagcttctgcactattacttgcaagtatgggtgtaaa

SEQ ID NO: 239244 - DNA, 265 bp, Unknown
  Bacterial polypeptide expressing nucleotide sequence isolated from the Sargasso Sea
aatggatgaaattattaaaaaactaaaaaataaacaaaacctaagctttgaagagagcaaatctgcttttgaagatatgatgacaggtaaggtaaaagaggatcaaattcatgattttttaactttttcctccacgaaaggagaaacttccgaagaaattgctggaggagtttatattttgcgagataaagcaactaaagtaaatgtaccagaaaacactatagatacatgtggcactggaggagatggaaaaaatacattaaat

SEQ ID NO: 239245 - DNA, 700 bp, Unknown
  Bacterial polypeptide expressing nucleotide sequence isolated from the Sargasso Sea
ggtaacaaaacatggcaataaaagtatttctagtaagactggcagtgcccattttcttttagaagcaggagcagatattgctcatgacaggagtttgctagagagtatttttgaacaaactggctttatattcctatttgccccattgcatcattcatcaatgcgatatgtaatgccagcgagacagaaaattggaaagaaaactatatttaatcttttaggaccacacactaatccttgctctgctagaaaacagctaatcggagtttataaaagatcgctagttgaaactttctcaagtgtagccaaagaacttgaaatggaacatgtaattgttgtccatggcaatgatggattagatgagatctcaattactgatgattcttttataagcgaacttaaggaaggaaaaataaaaaactacgatgtatcacccaaagattttggccttagttatggaaactttgaatccattaaggcttcatctccacaggaaagctttgaaaaagtatctttagcatttgcaggcaaagaaggctctgtgcaagatatgattgctatcaattcagcagctgcattaaaactttcaggcattgttaagtctatgaaagacggtgttgagctttctaaatcagcaatgaacgagggactggctcaatcaaaactcgaaagttatgtgaaaatgtctaataacttatga

SEQ ID NO: 239246 - DNA, 288 bp, Unknown
  Bacterial polypeptide expressing nucleotide sequence isolated from the Sargasso Sea
tatggaacactttttagataaattaagaaataaagaaaatttaaattttgaggaaagcaaaaatgcatttgagattttaatgaatggtaaggcaaatgataaacaaatttttgactttttaactttattgtcagaaaaaggggaagtttcagatgagatagctggtggtgtttatatattgagagaaaaatcaaaaagagtgagagttaatgattgcattgatacttgtggcacaggtggagatggaaaggatacattaaatatttcaactgcttcagctctattatt

SEQ ID NO: 239247 - DNA, 526 bp, Unknown
  Bacterial polypeptide expressing nucleotide sequence isolated from the Sargasso Sea
catgattgataacgaattacaaaaactaaaaggaaaaattgatttaagcaggcaagaaatgctcgatgtgatggatttaattatgtctggtagcttacaagataatgaaatagaagaatttcttatagcgatgaatgaaaaaggtgcatccattagtgaaatatcttctgcagcttcagtgatgagagataagtcacttaaatttaatattggggatgggactcatatcgatacatgtgggacaggaggaaccggacttcatattttcaactgctcaacagcatcagcttttgttgctgctgcatgtggggcaaaggtcacaaaacatggcaataaaagtatttcaagtaaaaccgggagcgccgactttcttctagaagcaggagcagatatttctcatgatagaagtttattagagagtatttttagaaaaactggctttatattcctttttgctcctttgcatcattcgtcaatgcgatatgtaatgccagcgagacagaaaattggaaaagaaactatattt

SEQ ID NO: 239248 - DNA, 637 bp, Unknown
  Bacterial polypeptide expressing nucleotide sequence isolated from the Sargasso Sea
tgctggagctaacatcaatcacgatcgcaatcatctaaaagaaattcttaacgaagtagggtttatatttttatttgctcccttacatcatcaagcaatgaaattcgttatgccagccagacaacgtattggcaagaaaactatcttcaacttattaggtcctcacaccaatccttgcaatgctaaaaggcaaatattaggtgtttacgataaagggcttttaaaaacttttggcaatgtttcaaatttactgaagatggatcacgtgttggtagtccatgggaatgacggtttggatgaaatatccattaccgacaagacatttgtaactgaacttaaggacggaaatcttaatcaatttgtaattcagccagaagattttggattgagtagagcaaacataacagcccttaaagcagagacacccgaggaaagcttggaattaattaatgctgcttttgaaggcaaagaatcacctgttcaggacatgatatctcttaacgcaggagcatctttgtatctaagttcagcatcaaactcaataaaagatggtgtcagtcttgccaaagagttattaaataatggtaaagcgaaacaaacctttagttcctatattgaaatgacaaattcgctatga

SEQ ID NO: 239249 - DNA, 289 bp, Unknown
  Bacterial polypeptide expressing nucleotide sequence isolated from the Sargasso Sea
gatgaaggatttcgttgataaaataagggctaaacaagatttatcatttgatgaaagtaaggccgctttcgaaattttgatggaaggtaaggcaaatgatcaagaaatatttgattttttaacgttactatctgaaaaaggcgagacctctaatgaaattgctgggggtgtatatattttaagagaaaaatctaagagagttaatgtgaacaattgtattgatacttgtggaactggtggagacggtatgaatacacttaatatatcaactgcttcagcattattatta

SEQ ID NO: 239250 - DNA, 361 bp, Unknown
  Bacterial polypeptide expressing nucleotide sequence isolated from the Sargasso Sea
aatgaaacaattcatagataaaattagagataaggaagacctctcttttgaggaaagtaagacagcttttgaattattaatggagggtaaggcaaatgaacaggaaatatttgattttttaacacttttatccgctaaaggtgaagtatcaaatgagattgcaggaggtgtttacgttcttagaaataaatcaaaaagagttaatgtgcaaaattgtgtcgatacatgtggtactggtggtgatggaatgaacacactcaatatttcaacagcttccgcattattacttgcgagtatgggtgttaaaatagcaaaacatggaaataaagcagtatcttctaaatgtggatctggcgatgtt

SEQ ID NO: 239251 - DNA, 586 bp, Unknown
  Bacterial polypeptide expressing nucleotide sequence isolated from the Sargasso Sea
gcgccaaagtttcaccctcgctatgaaaaatgtggcaccagcaagaaaaataattggtaagagaactgcgtttaatctattaggaccattatgcaatcctgctaaagtaagacatcaaatgataggggtatttgcagataattatattgaaagaattgctaagattatgcaaaagaatttttcagatactgtactaacagtaaggtctgatgatggaatggatgaattatcaacaacatcaaaaaataaagcatgtctattaaaaaatgaagagataacagaattcattattgatccaagtaagtataatttagaaaaaggggatttggcagatattcagatttcaacaaaaaaagaagccatagattcatttgttaaagtattgaataatacatcaaacaaaactatgaaagaaattacaattctaaatgcagcaggagggttattggtaggaggatttagtaataaatttgaagaatgtgtagagttagctaaacagacagtaaataatggaaaagcatttgaaaaattaaaacaatttgcaaaagaaaataatgcattagataaattagaggagtttaactga

SEQ ID NO: 239252 - DNA, 749 bp, Unknown
  Bacterial polypeptide expressing nucleotide sequence isolated from the Sargasso Sea
cttaaatatctcacgggcaacagcttttgttttagcggcctctggtataccaatagctaaacatggaaatcgagcgcttacttcaaaatgtggttcagctgatgttttaaaagcattgaatataaatgtcgatatggaaacttctaaaatagaagattgtctcaaaaatacaggaatatgttttatgtttgccccaaatcaccatcccgccatgaaatacgttgctcaagtgagacaattacttggattccgcacaatatttaatatgttgggtcctttgctaaatccagcaaatgttagaaatcaattagttggtgtttactctaaagaagtttttaatatttataaggacgtttttgaaaaagaagataaaaatgtttgcttaattgctggtcatgatgggaacgatgaaatatctcttagtggtattaatttaatattcacaaataaaaatggaattatgcagtttgatcctaaaatacttgactgtccaaaaatgatatatgatgaaataaaaggaagtgacgcaatatttaatgctgatcgtataattgaaatttttagaggtaaaaaagatactttttataatactgtttgcgctaatgcagcatttggtgttctcattaataaatctgaagatttcaatgaaaaaaatattttaaaagcttttaatgaagttcaattaataattaaaagtggagaacctttgagaattattgatcagttatctaaatttacaaatctataat

SEQ ID NO: 239253 - DNA, 613 bp, Unknown
  Bacterial polypeptide expressing nucleotide sequence isolated from the Sargasso Sea
tcgcaatcatctaaaagaaattctcaacgaagtagggtttatatttttatttgctcctttacatcatcaagcaatgaaattcgtcatgccagccagacaacgtattggcaagaaaactatcttcaacttattaggtcctcacaccaatccttgcaatgctaaaaggcaaatattaggtgtttacgataaaggacttttaaaaacttttggcaatgtttcaaatttactgaagatgcatcacgtgttggtagttcatgggaatgacggtttggatgaaatatccattaccgataagacattcgtaactgaacttaaggacggaaatcttaatcaatttgagattcagccagaagactttggattgagtagagcaaacataacagcccttaaagcagagacgcccgaggaaagcttggaattaattaatgctgcttttgaaggcaaagaatcacctgttcaggacatgatatctcttaacgcaggagcatctttgtatctaagttcagcatcaaactcaataaaagatggtgtcagtcttgccaaagagttattaaataatggtaaagcgaaacaaacctttagttcctatattgaaatgacaaattcgctatga

SEQ ID NO: 239254 - DNA, 199 bp, Unknown
  Bacterial polypeptide expressing nucleotide sequence isolated from the Sargasso Sea
atgaaaaacgccgccgaggggatacaaagtctgcttaataaagtcgctattggtcaaactcttagcgaacatgaagcagaaaatgcctttgatattattatgtccggtgacgcaacccctgcacaaataggtgggtttttgatggcgttaagagttcgcggagaaaccgtagaagaaattactggtgccgcccggatca

SEQ ID NO: 239255 - DNA, 313 bp, Unknown
  Bacterial polypeptide expressing nucleotide sequence isolated from the Sargasso Sea
aatgataacaactgaagattttaagaaaaaaattgagatcttatcaaatggcaaatatttgacatatgatgaaggaatgtctgcatttgagtatataatgaccggtaatgctactgatatattaatttcatcatttctaacatccttaaaaataatatttatcaatagtggtatttctcatgagcttattgcagctggtgcagatattatgcgagaaaaagcgattaaaattaatgcaccagatgataccattgatatagtaggaactggtggagatggtcataatactttaaatatttctactgcaacagca

SEQ ID NO: 239256 - DNA, 599 bp, Unknown
  Bacterial polypeptide expressing nucleotide sequence isolated from the Sargasso Sea
cactgaatcaaaatcggatattaaaaatcataatttagggtttatgtttgctccttcttatcacccagctatgaaatatgccatgaatgtaagaagtgatctaaaactcaaaactgttttcaacattcttggaccattatgcaaccctgctctagtcaaatctcaagcaatgggaacttttgataaaaatttaaccgaaattcaagctaaagtattaaaaaatttgggctcaaaaaacgtaatgactttttgtagtgatgagggactagatgaattaacaactacaggtaaaactaaagtgacacattttatgaatggaggaaaaataagaagttttgaatttgagcctgaaaatataggattgaaaagatctaatattaatgacttaaagggcggaactcctgatcagaatgcaaaaattattattgaaatactaaaaggagctgaggggccaaagacagacatagtattgttaaatgcagctgcaggaataatcgttggaggaaaggctgaaaattttcaagacgcctttaaaatagctaagctatccatagaaaatggaaatgccatcaaagtacttgaggggctaaaatcatgaa

SEQ ID NO: 239257 - DNA, 695 bp, Unknown
  Bacterial polypeptide expressing nucleotide sequence isolated from the Sargasso Sea
aaaaattgctaaacatggtaatagatccgtttcgagtaaagttggtagtgcagatttaatagaaaaacttggattatctatggatgtcgatttgaatgaatcattaagctcaattaaaaatacaaatttttcttttcttttcgctcccaattttcataaatcaatgaaaaatgtttctcatataaggaaagatttaaaaatgaggacaatctttaatattttaggtccattagtaaatccactaaggccaaagtctcaaataatgggtgtatatgatatggaattagtccctattatggctaaagttcttcaaaaacagggagtaaaaaacgcattggtggttcatgggttcgatggtatggacgagatatcaatctgtagtaaaacttttatagcagaggtaaatggtaaagaaatattagaatatgaatttaatcctgaggattacggtttcaagctgtcatctagtgaatcattagtgattgaatcttcagatcaatcaaaagaaatcactgacggaatatttaataataaaataaaagattctcgaagagatatatgtatactaaatgcgggtgcgggtttatatatctctggaaatgcagaatcattagaggatgcttttgtcttggttgaatcaaaattagactctggtgaaataaacgcttctttccaagagattttagcaaaataat

SEQ ID NO: 239258 - DNA, 325 bp, Unknown
  Bacterial polypeptide expressing nucleotide sequence isolated from the Sargasso Sea
atgaataatttagaaaaactaatcagtaatatttctgctggtaaaaatcttacttttgaagaaagtaaaacaattttccttaatattatgagtggcaatatgactgaagatttaattcataatttcttaataaatttatcaaataaaggtgaaactgcagaagaaatagcaggaggagttcatgtcttaagagaaaaagctttaaaggttagagcatcagaagatattgtagatacttgtggcactggaggagatggaaaaagtactcttaacatatctacagcctcttctcttctattagctagcatgggaattaaagtggcaa

SEQ ID NO: 239259 - DNA, 535 bp, Unknown
  Bacterial polypeptide expressing nucleotide sequence isolated from the Sargasso Sea
taccaacaatattttaatattttaggacctcttacaaatccagctggtgcctctaaccaattgataggaatatctagttatgagtctgctgaaaaagttgcagaagcattaaaaatattgggcactaaaaattctattgttgttaatggccataataatttagatgaaattagcgttgaaggaaatacaaatatttggcaggttgataaagaaaaagtaaagagaagaagggcaagaatatcagattttggtctgccagagtctaaattagataatttaattgttgatagcgtagaagaaagtgtttctaccattaaagatatttttgatggccaaggtgctgaccctttagaaaaaagtaatatatcttcaaggagaaatgcagtcataattaatgccgctgctgctttagtagcttcaggaaaaactaatagttttcaagatgcttctgaaatggctaaaacttccctcgattctggggcagcacaatcaaagttaatcgaacttattgaattatcaaataagatggactaga

SEQ ID NO: 239260 - DNA, 492 bp, Unknown
  Bacterial polypeptide expressing nucleotide sequence isolated from the Sargasso Sea
tatgaactttaatcaatattttcaaaaagtttttgataaaaaaaaccttttaaaaaaggaagctgaggatgcttttaaattaataatgtcagctaaagtatcaaatattgaaatttcaagttttttagtggctttatcattaaaaggtattgcccataatgagttattgtctgctgtaaaggtattaagggctaagagtattaaaattaataccaagggaacaatagtagatacttgtggtactggaggagataagaaacagactctaaacatatcaactgcaacggccattttagcagctgctagtggagttaaagttgcaaaacatggtaataaatcagtatcatcgaactctggctcttcagacgtcttagaaaaactaggagtaaatattagtgctcctaaaaataaagtggaaaagtgtttagaaagttcaaagttatgctttctaatggcccctctttatcataaggcaatgaaaaatgtatctga

SEQ ID NO: 239261 - DNA, 481 bp, Unknown
  Bacterial polypeptide expressing nucleotide sequence isolated from the Sargasso Sea
atgattgataacgaattacaaaaactaaaaggaaaaattgatttaagcaggcaagaaatgctcgatgtgatggatttgataatgtctggtagtttacaagatattgaaatagaagaatttcttatagcgatgaatgaaaagggtgcatccattaatgaaatatcttctgcagcttcagtgatgagagataagtctcttaaatttaatattggagatgggactcatatcgatacatgcgggacaggaggaactggacttcatattttcaactgctcaacagcatcggcttttgttgctgctgcatgtggggcaaaggtcacaaaacacggcaataaaagtatttcaagtaaaactgggagcgccgactttcttttagaggcaggagcagatatttctcatgacaggggtttattagagagtatttttagaaaaactggctttatattcctttttgctcctttgcatcattcgtcaatgcgat

SEQ ID NO: 239262 - DNA, 475 bp, Unknown
  Bacterial polypeptide expressing nucleotide sequence isolated from the Sargasso Sea
atgaatccttttagtaaaataatgccaaaacttctaaataatttggatttatctataaatgaatctgaagaagtttttgcatacataatttctggaaatgctactgaaattgaaatggctgcatttctcgctacactatcaattaaaggcccctgctctaatgaactaattggggctgttaactcattaaaacctcatgtaataaacccattatcacttaatattgatactattgatattgttggtacaggcggagatggtttaaaaacttataatatctctacagcagttgcatttatagtcgcatcatcaggtttatatgttgctaaacatggtagtactgctgtttcatcaaagtcaggtgcatccgatgttctaacagaactagggataaatataagtgtagataataatattttaaataaatgtttgaaagaagcaaatatttgttttttgtttgctccaaaattttaat

SEQ ID NO: 239263 - DNA, 290 bp, Unknown
  Bacterial polypeptide expressing nucleotide sequence isolated from the Sargasso Sea
tatgaatcaaaacttaaaatcatttgtgccccttgcctataataacaagttagataaaaatttaacttctgaggcttttaatataatcatgtctggtgaggctacagatggtcaaattgcagcctttttaacagctcttcagaaaaataatgtaaacaaagaccatgtcataggggcgttggaagtcatgcaggataagatgatccctgtaaatgttcccaaaaatgctattgatacctgtgggactggtggagacggtattggttcactcaatgtgtcaactgcaactt

SEQ ID NO: 239264 - DNA, 607 bp, Unknown
  Bacterial polypeptide expressing nucleotide sequence isolated from the Sargasso Sea
atagggtttatgatggctccactatatcacaaagcaatgaaaaatgttgctccaacaagacttgagttaggtacaagaactatttttaatcttttaggtccactttcaaacccagcagatgcaaaatttcagttagttggtgtttacgattcaaaatgggcagagcctatggctgaagtgttgaagaaactcggttctaaacgtgtatggatagtgcatggttcagatggtcttgatgagatcactactactggaccaactgaggttgttgagctaaatgatggtgtaattaaacgttttagtttagcgcctgaagatgtcggcttcagtcgttctgaattatctgaccttaagggaggaagcagtgctgaaaatgctcagttgatgaaaggtttattagcaggaaaaaaagaccctataagagatattgtacttttaaatgcgggtgctatgattttcattggaggtggggtagcaagcctaagagatggggtaaaacttgctgcagaaagtatagattctggcaaagcaaaagaaaaattagatgctttaataaacgtttcaaatagttcgaggaaaattattagtgaaaaacattctatctgaa

SEQ ID NO: 239265 - DNA, 186 bp, Unknown
  Bacterial polypeptide expressing nucleotide sequence isolated from the Sargasso Sea
tccaagtcagcacagtgttttgaagcacgtaataggaccaagaaaagaaatagctcacaaaagtatattcaacatattaggccctttaactaatccagcttctacactaaaccaagttatgggcgtctatgatgaaaaagggttaaagccagtagctaaagttcatcaatacctgggaaggaaaaa

SEQ ID NO: 239266 - DNA, 775 bp, Unknown
  Bacterial polypeptide expressing nucleotide sequence isolated from the Sargasso Sea
cgatacatgtggtacaggtggtgatggaatgaacacactaaatatttcaacagcttctgcattattgctcgcaagtatgggtgttaaaatagcaaaacatggaaataaagcagtatcttctaaatgtggatctggcgatgttttagaggcattaaatatagaaattaatttagaaccaaatgatattgagtcacaaattaaaaaaaataattttggttttatgtttgcaccaaattaccatagtgcaatgaaatatgttggacccacaagaaaaaaaattggtaaaagaacaatttttaatatgattggtcctttgagtagtccagctttagttaaaagacaagtcgttggtgtctttgaaaaaaagttattaaaaacatttgctaacgctttaaaaagtttagatattaaatttgcatgggtcgtcaatagtgaagatggtttagatgaaatttcaccctttgctagaacaaatgttattcaattaaaaaacaatgttatatctgaaattgttattgatccaaaaaaattagatattaatgcagataaatttgaaaatcttgttggtgatgatgcaaaatttaatgctaataaaatgcttgaaatatttaaaggtgaagataatgatttttctaaagcggtatgcttaaatgctgcagcaggattgattgttaatgaaactcatgaagagtttagcgaagcatataaaaatgcaagagagcatattttatcaagcgaagttattaaacatttagagacaattcaaaatgcctga

SEQ ID NO: 239267 - DNA, 831 bp, Unknown
  Bacterial polypeptide expressing nucleotide sequence isolated from the Sargasso Sea
ctcaatatcttaaatctagatgtaaaaaaattaatgtgaatggtgattttatggatacatgtggaactggaggagataaaaaaggaagctttaatctttctacagcaacatctatattgctatctacattcgatataaaaatttccaagcatggtaataggagtgttacatcaaaatcaggaagttttgacgttctagaggcattaaatattaaaattagaaaagaacaaaatcatcataaaaaaaatttaaaaaagaataatatttgtttcttatttgcaccttattttcatgaaattctcaaaaacgtagctgatataagaaaatctcttccattcaggacaatttttaatttattaggtcctttattaaatcctatagacttaaaatttcaattaatgggagtaagtgacaaaatcaatttagaaacacatgctagatgcttaagtaaacttaacttaaaaaaagcttgggttgtctataatgaaaaaggttacgacgaattaaccacaacttcaaaaaactattttattgagataaaaaaagataaagtaagtaaaattaatatcctagaacctcaaaaacttggttttaaaattagaaaagaacaagaacttaaaggcggcacacctcaagaaaatggctttataatgaaaagattatttgagggagaaagcggagctattagagataatgtgatactaaattcagcagcagggttgatgatatgcaataaagcaaaacatattgaggacggtatcaaaatggcttctaccaacttagataacggatctggtcttaaaaaacttaacgacttaataaactcttaat

SEQ ID NO: 239268 - DNA, 547 bp, Unknown
  Bacterial polypeptide expressing nucleotide sequence isolated from the Sargasso Sea
ccggtgcgtaatgcgctaaaaagccggacgctgtttaacctgctcggcccactggtgaaccctgcagcacctgactatcagttactcggcgtatacgatcctaagttgtgccgtgttatggcacaggcattaaagcagcttggcctgactcgtgcgtgggtggtgcatggcagtggttgtgatgaagtagcgctgcatggcaccacctatgtctgtgagctaaaagatggcgtaattaccgagtttagcctgacaccggacgactttggcgtaagcttaatgcctttaagtgctcttgccggtggtgagccgggcgagaacgccgcagcaacgctggcgatattaacaggccaaggccaggctgcgcacaatgcggcggtggcaatcaatgtcgcagccatgctgaaaattgccggcttgggtgatgatttaaaagtgaatacccgcgccgtactggagctgctgcaatccggccgggcttacaatacccttagccagtttatcgcactgagtcagtcagccgcgaaggaggcccaacatggctgag

SEQ ID NO: 239269 - DNA, 562 bp, Unknown
  Bacterial polypeptide expressing nucleotide sequence isolated from the Sargasso Sea
tatgtttgctcaagatttccacacagctatgaaatttgtaagcaaagttagaaaaaatctaggtacacgaacaatttttaatctattaggccctcttttaaatcctgctaatacaaaaaaacaattaataggagtttatgacaaaaaatgggtcaatattcatataaatgttttaaaaaagttagaatctgaacatgtacttgttgttcatggacaagatgggctagatgaaatttcattatcgaataaatcatatatctctgaattaaaaaataataaaattaacgaatacatatttaatccagaagatataggatatgaattaattgatattaatgaaattaaaggtggggactcagagtacaacgctaaacaaattatgaaaatgttaagtggtgaattttctaattttcaaaaaattgtagaaattaatgcgggagctgtgatttatttatcaggaaaagcaaacaatttgaaagatggtgcaattttagcaaaaaaatgcattaatgatggactagctaagtcttatataaattctttaattaactatttaaaataa

SEQ ID NO: 239270 - DNA, 1456 bp, Unknown
  Bacterial polypeptide expressing nucleotide sequence isolated from the Sargasso Sea
aatgagtctgaacgtcgtcacgctgctttatctggtcgcgtcggtctgtttcattcaggcgctcaaggggctgtcgaatccgaagacggcgcgcacgggcaatacgttcggcatggtcgggatggcgattgcgatcctcacgaccatcgcgctgatcgtcaaacaggcgaacgcgctcggctcgaatcttggcctcgggctcggcctgctgctggtcgcgctggtgatcggcggcgcgattggcgcgttcgtcgcggcgcgcgtcgagatgaccaagatgccggaactggttgcggcgatgcactcgctgatcggccttgcggccgtgtgtattgcgtatgcggtggtgtcggagccggcggccttcggtctggtcgatccggagaatacgctgccaggtttcctgccttacggtaaccggatcgaactgtttatcggcacgttcgtcggcgcaatcaccttctcgggatcggtgatcgcgttcggcaagctgtcgggcaagtacaagttccggctgttccagggcgcaccggtggtctacgccgggcagcacctgatcaacctgttccttgcgatcgggatgctcggcttcggcgtgatcttctttctcacgcagtcgtggctgccgttcatcatcatgacgttgatcgcgttcgtgctcggcgtgctgatcatcatcccgatcggcggcgcggatatgccggtggtggtgtcgatgctgaactcgtattcgggctgggcggcggcaggcatcggcttctcgctgaacaatccgatgctgatcatcgcgggctcgctggtgggctcgtcaggtgcgatcctgtcgtacatcatgtgccgcgcgatgaaccgctcgttcttcaacgtgattctcggcggcttcggcaacgaggcgggcgcggcggcggcgggcggctcggctgagcagcgtccggtgaaatccggttcggccgacgatgcgtcgttcatgctcggcaatgccgaaaccgtggtgatcgtgccgggttacggcctcgccgtggcgcgtgcgcagcatgcgttgaaggaactcaccgacaagctggtcgagaagggcatcgaggtgaagtacgcgattcacccggtggccgggcgcatgccggggcacatgaacgtgctgctcgcggaagccgaagtgccgtacgacatggtctacgaaatggacgacatcaacggcgagttcggtcaggtggacgtggtgctggtgctcggtgcgaacgacgtggtgaatccggctgccaagaacgatccgaagtcgccgatcgcgggcatgccgatcatcgaggcgtacaaggcgcgcacggtgatcgtgaacaagcgttcgatggcagcgggttacgccggtctcgacaacgacctgttctacatggacaagacgatgatggtgttcggcgacgcgaagaaggtgatcgaagatatggtgaaggcggtggaataa

SEQ ID NO: 239271 - DNA, 307 bp, Unknown
  Bacterial polypeptide expressing nucleotide sequence isolated from the Sargasso Sea
atggatcaatttttagaaaagctcagaaacaaaataaatttaaattttgatgaaagtaaaaatgcatttaagattttaatgaatggtgaggctagcgatcaacaaatttatgattttttaactttattatcagacaaaggtgaggtttcagatgaaatagctggaggtgtatatatattaagagataaatcaaaaagagtaaaagttgaaaattgcattgatacctgtggtactggaggagatggaaaagatactcttaatatttcaactgcatcagcgcttgttgttagcaagtatgggtgttaaa

SEQ ID NO: 239272 - DNA, 367 bp, Unknown
  Bacterial polypeptide expressing nucleotide sequence isolated from the Sargasso Sea
atgaaagagatattaaaaaaattgaaaaataaaaaaaatctcacttttgatgagagtaaaactgctttttcagaaataatgtcaggtaaagttaacgaggaaataattcatgattttttaactttttcatctgctaaaggtgaaacatcttacgaaatagctggtggtgtttatgttttgcgagacaaagctacaaaagttaatgtttcagatgatacggttgatacttgcggtactggaggtgacggaaaaaatactttgaatatatccactgcagcagcgcttttattatcgagtttcggtgtgaaagtagcacaacatggcaataaatctgtttcgtcaagtgtgggtctgctgatgttctaga

SEQ ID NO: 239273 - DNA, 913 bp, Unknown
  Bacterial polypeptide expressing nucleotide sequence isolated from the Sargasso Sea
catgattgataacgaattacaaaaactaagaggaaaatttgatttaagcaggcaagaaatgctcgaggtgatggatttaattatgtctggtagcttacaagaaaatgaaatagaagaatttcttatagccatgaatgaaaagggcgcatccattaatgaaatatcttctgcagcttcagtgatgagagataagtcacttaaatttaatattggagacgggactcatatcgatacatgcgggacaggaggaactggacttcatattttcaactgctcaacagcatcggcttttgttgctgctgcatgtggggcaaaggtcacaaaacatggcaataaaagtatttcaagtaaaactgggagcgccgactttcttctagaagcaggagcagatatttctcatgatagaagtttattagagagtatttttagaaaaactggctttatattcctttttgctcctttgcatcattcgtcaatgcgatatgtaatgccagcgagacagaaaatcggaaagaaaactatatttaatcttttagggccacataccaatccttgctctgctcggaaacagctaatcggagtttacaagagatcactggttgaaactttctcaagcgtagctaaggaacttgaaatggagcatgtaattgtggtccatgggaatgacggattagatgagatctcaattactgatgattcttttataagcgaactcaaggatggaaaaataaaaaactaccaggtatcacctaaagattttggcctaagttatggaaattttgaatccattaaggctttatctcctcaagaaagctttgaaaaagtatctctagcatttgcaggcaaagaaggttctgttcaagatatgatagctatcaattcagcagccgcattaaaactttcaggcattgtt

SEQ ID NO: 239274 - DNA, 768 bp, Unknown
  Bacterial polypeptide expressing nucleotide sequence isolated from the Sargasso Sea
atggagctaatacattcaatatttcaactgcagttgcatttgtaagtgcatcttgtggggtaaaaattgcaaaacacggaaataaaagtgctagtggaaaagttggctctgctgatgttttgttgaatcttggtttgaatttagattgctcattagaaaaagtaatcgatgccgtaagtgaaatcggaataacttttttgttcgcacctgtttggcataaatctttaataaaacttgctccattaagaaagacccttggaataaggacagtatttaaccaacttggaccattggtaaatcctttaagacccaatgctcaagttttaggtgttgcttctgaggatcttttaaaacctatgggaagcgcgcttttaaaaatgggtatgaatagatcaatagtcgttcatggttctggaggcctcgatgaagcttctcttcaaggagaaaataaattagtatttgttgataatggtgaattacgtttttcagaaataaatatttcagactttaaccatgaaaatatctctaatgaaaagcttgtggtttcagattctgagtctaacgaggaaatattaaaggctgttttaaatggttctggacaaaaatctcatattgatgtagttgccttgaactctgctttagtgctttgggctgcaggcattgaggatgatttaaatgaagggtttaaaaaagctttattttcgataaatcaaggagatccttggaaaaagtttttacttttaaaaaattatttagatacaaattaat

SEQ ID NO: 239275 - DNA, 651 bp, Unknown
  Bacterial polypeptide expressing nucleotide sequence isolated from the Sargasso Sea
catgatttataacgaattacaaaaactaaaaggaaaaattgatttaagcaggcaagaaatgctcgatgttatggatttaattatgtctggtagcttacaagataatgaaatagaagaatttcttatagcgatgaatgaaaagggtgcatccattaatgaaatatcttctgcagcttcagtgatgagagataagtctcttaaatttaatattggagatgggactcatatcgatacatgcggaacaggaggaaccggacttcatattttcaactgctcaacagcatcggcttttgttgctgctgcatgtggggcaaaggtcacaaaacacggcaataaaagtatttcaagtaaaactgggagcgccgactttcttttagaagcaggagcagatatttctcatgacagaagtttattagagagtatttatagaaaaactggctttatatttctttttgctcctttgcatcattcgtcaatgcgatatgtaatgccagctagacagaaaattggaaagaaaactatatttaatcttttagggccacatactaatccgtgctctgctaggaaacagctgattggagtttacaagagaccactggttgaaactttctcaagcgtagctaaggaacttgaaatggagcatgtaattgt

SEQ ID NO: 239276 - DNA, 938 bp, Unknown
  Bacterial polypeptide expressing nucleotide sequence isolated from the Sargasso Sea
aaaacaagatttaacttttgaagaaagtaaatcagctttcaatatattaatgaatggtgaagctactgaagacgagatatatgattttcttacccttttatcaatcaaaggtgaggtttctgatgaaattgctggtggcgtatatgtgttaagaaaaaaatcaaagagagtaaatattcaaaattgtgttgatacatgcggtactggtggtgatggaatgaatacactgaatatttcaacggcttcagctttattattatccagtatgggtgttaaggttgctaaacatggtaataaggctgtttcatcaaaatgtggttctggcgatgtccttgaggcattgaatattaatattaacttagaaccgaaagatatagaaaatcaaataaatacaaattattttggttttatgtttgcaccaaattatcataatgcaatgaaatttgtaggacctactagaaaaaaaattggaaaaagaactatatttaatatgattggtccattaagtagtccagctctagttgaaagacaagttgtaggtgtttttgacaaaaaattattaaaaatttttgcaagtgcgctttataatcttaatattaaatgtgcctggattgttaacagtgaagatggactagatgaaatttctccttatgcaaaaactaatgtagttcagctaaaagataataaaatatctgaaataacaattgatccaaacgaattaaatatagatgcaaataaatttgaagatttagtcggtgatgatgcaaaatttaatgcaaataaaattattaatatattcgaaggtgaagataatgatttttctaaagcagtttgcttaaatgctgcagccgggcttatagttatggaaaaattttcaaactttaaagatgcatacaatataacaagagaacatattttatcaggaataacttcttaac

SEQ ID NO: 239277 - DNA, 873 bp, Unknown
  Bacterial polypeptide expressing nucleotide sequence isolated from the Sargasso Sea
agtcaggtgtaaaatcacatcatgtaattgctgctatagaagtaatgagaacaaaaatgctctcaattaatacgccattaaatacaatggatacatgtggtacgggaggagacggaaaaaacagcttaaatatctcaacggcaacagcttttgttttagctgcctctggtattcctatagctaaacatggaaatcgagcactaacatcgaaatgtggttcagctgatgttttaaaagcattaaatataaatatcgatatggaaacttctaaattagaagattgtcttagaaatacaggaatatgctttatgtttgcaccaaatcaccaccctgccatgaaacacgttgctcaagtgagacagttacttgggttccgcaccatatttaacatgttgggtccgctattaaatccagcaaatgttagaaatcaaatagttggcgtttattctaaagaagtttttaatatttataaggaggtttttgaaaaagaagataaaaatgtttgcttaattgctggtcatgatgggaacgatgaaatatctctaagtggtattaatttaatttttacaaataagaatggcattatgcagtttgatcctaaaatacttgaatgtccaaaaataatagatgatgaaattaaaggaagtgacgcaatatttaatgctgatcgtataattgaaatttttaaaggtaaaaaagatactttttataacactgtttgtgcaaacgcagcatttgggatcctcataaatcaatctaaagatttcaatgaaataaatattttaaaatcttttaatgaagttcaattaattattgaaagtggtgaacctttgagaattattgatcagttatccaaatttacaaatttataat

SEQ ID NO: 239278 - DNA, 646 bp, Unknown
  Bacterial polypeptide expressing nucleotide sequence isolated from the Sargasso Sea
tatggatcaaattttagaaaaattaaataataaacaaaacttaacttttgaagaaagtaagtctgcatttgaaattttaatgacaggaaaagccagtgatgaacaaatttttaactttttaacactgttatctgaaaaaggtgaagttgcagacgaaatagctggtggtgtttttgtgttaagagataaatcaaaaagagtgaatgtaagtgattgtattgatacatgtggaacaggtggtgacggaatgaacacacttaatatttctacagcttctgcactacttttagctagtatggatattaaagtagctaaacatggaaataaagctgtttcttcaaagtgtgggtctggtgatgttttggaagctctcaaaattaaaattgatttagaacctgaggatattgaaaaagaaatttataccaataattttggttttatgtttgcgccaaattatcatagtgcaatgagatttgttggtcctgttagaaagaaaattggaaaaaggaccatttttaatatgattggtccattaagtaatccagctcttgtagagagacaagttgtaggtgtttttgataaaaaattattaaaaatttttgcagagggactcaaaaatttaaatttaaaatttgcttggatagta

SEQ ID NO: 239279 - DNA, 835 bp, Unknown
  Bacterial polypeptide expressing nucleotide sequence isolated from the Sargasso Sea
gctggtggtgttccatgttttaagaaacaaatcaaaaagagttaatgttttagattgtgttgatacttgtggaacaggtggtgatggcaaaaacactctaaatatatcaacagcttcagccatattattggcaagtatgggtgtaaaagtagcaaagcatggtaataaagccgtatcttcaaaatgtggatctggtgatgttttggaaactttaaatattaatataaatttagaacctaaacaaatagaagatcaaattaataaaaataactttggttttatgtttgcaccaaactatcatagagccatgaaatatgtggggccaacaagaaaaaaaattgccaaaagaacaatatttaatatgattgggcctttaagcagtcctgctcttgttgataaacaagttgtgggtgtttttgataaaaaattacttaaaatttttgcaaatgcattaaaaaatttaaatattaaatttgcatggattgtaaatagtgaagatggtttagatgaaatttctccatatgcaaaaactaatgtggttcaactgaaagaggataaaattaccgaaataacaatagatccaattgatttaaatattgatgcgcaaaattttaaaaatttgcttggtgatgatgcaaaatttaatgcggataaaatgatcaatatatttaaaggtgaagataatgacttttctaaagctgtttgcttaaatgctgcagctggactgatagtcacagaaaaattttcaaattttaaagaagcatataataattcaagagaacatattttgtcaggaagttcttttaaacatttagaaaaaatacaaagtgtctga

SEQ ID NO: 239280 - DNA, 463 bp, Unknown
  Bacterial polypeptide expressing nucleotide sequence isolated from the Sargasso Sea
aatgaggcaaatcatagaaaaaattagaaacaaaggaaacttgtcctttaatgaaagtaaacgtgcttttgaaattttaatgagtggtaaagctcaagatcaggaaatatttgattttttaacatcactatctgataaaggagaaacatctgaagaaatagctggaggagtttatattttaagagaaaagtctaaaagagttgagataaataactgtattgatacatgcgggactggtggagacggtatgaacacgttaaatatatctacagcatcagctttgttattagctagcatgggtgttaaagttgcaaaacacggaaataaggcagtttcatcaaaatgtggatctggagatgtcttggatgaattaaatataaatattaatttagaaccagaacaaatcaaagatcaaataattaaacataattttggttttatgtttgcaccaaaattatcatag

SEQ ID NO: 239281 - DNA, 617 bp, Unknown
  Bacterial polypeptide expressing nucleotide sequence isolated from the Sargasso Sea
aatggaacaaattttagaaaaattaagaaacaaaaatgatctttcttttgaggaaagtaaatctgcctttgaattacttatgactggtcaggcaaatgaagatcaaatttatgattttttaactttattatcagataaaggtgaagtgtcagacgaaattgctgggggtgtttatgtgctaagagaaaagtcaaaaagggtgaaagtcaaaaattgtgttgatacctgcggaactggaggggatggcatgaatactctaaatatatcaactgcctctgctttacttttagctagtatgggaactaaggtcgctaaacatggtaataaagcagtttcttctaattgtggttcaggagatgttcttgaggctcttaatatcaaaatagatcttgaaccaagtgatatagaaaaagagatcaatgataacaactttggttttatgtttgctcctaactaccatagtgcaatgagatttgttgggccagtaagaaaaaaaataggtaaaagaacaatatttaatatgatcggtccattaagcagccctgctttagttacaagacaagtagttggagtatttgataaaaaattactcaagatttttgctgaaagtcttaaaa

SEQ ID NO: 239282 - DNA, 805 bp, Unknown
  Bacterial polypeptide expressing nucleotide sequence isolated from the Sargasso Sea
tcaaaaagagtaaaagttaaagactgtgttgatacatgtggaactgggggtgatggcatgaataccttaaatatttcaacggcatcagctttacttttagctagtatggggactaaggttgctaaacatggtaataaagcagtctcttcaaagtgtggttcaggagatgttttagaagcactaaaaattaaaatcaatcttgaaccaactgatatagaaaaagagatcaataataataactttggctttatgtttgctcctaattatcatagtgcaatgagatttgtcgggccagtaagaaaaaaaataggtaaaaggacaatatttaatatgattggtccactaagtaaccctgctttagtagatagacaagttgttggtgtttttgataaaaaattacttaagatttttgccgaagggcttaaaaatttaaatattaaatttgcatggattgtaaatagtgaggatggcctagatgaaatttcaccttatgctaagacaaatgttatacaattaaaaaacggaaaaatatctgaaattataattgatcctacagtgttaaatattaatgctgaaaaatttgataatttagttggtgatgacgcaaactataatgcaagtaagatgattgaaatttttaaaggtaaagacaatgatttttcaaaagcagtttgtctaaatgctgcagcaggtttaattgtaaatgaaaaatattcagaatttttagatgcttacaattatagtagagaatttattttatcaggaaaaccgtatattcatttagaaaaaatacaaaatgtctaaa

SEQ ID NO: 239283 - DNA, 467 bp, Unknown
  Bacterial polypeptide expressing nucleotide sequence isolated from the Sargasso Sea
aatggatatctcctctgccctagaaaaaataatctctagagaaaatttaaacatcgagcaaacccgcgatttatttctacgcattatgtcgggccacgccaccgaagcccaaattgctgctattttgatcgcgctccgagtcaaaggcgaatgtcccgaagaactggcgggcgcggctctggtcatgagggaattgtcgactaaagtagaagtcgacttgccaaatctaatagacacttgtggcactggtggaagtggcagcaagttattcaacatttcaacggcttccactttcgtatgtgcaggcgcgggcgcacatattgcgaaacacggcaatcgaaaaatgacaagcagctgtgggagcgcggatgtacttgaagcagcaggtgtaaacctaagtttgaacgcggaacagatcgcttcatgcattaaaacagcaggagtaggttttctgtttgccccccaac

SEQ ID NO: 239284 - DNA, 355 bp, Unknown
  Bacterial polypeptide expressing nucleotide sequence isolated from the Sargasso Sea
tatgagtcaagattttagaaaatatatacaaatggcttatgaaaatgatctaaatttagcctcaacaaaagaagttttctccttgattatgaacggtgatgtggatgaaatacagataagttcttttctttctttgcttcaaaaatcaaaaataaagcctcatcacataataggcgctatagaggttatgaagtcaaaaatgttaaaagttaattcagactttaaactaatggatacatgtggaacaggtggagatggaaaaaatagtcttaacatttcaactgctacagcttttgtattgacggcaatgggcataaaaatagcaaagcatggaaatcgtgctctaacttcctaa

SEQ ID NO: 239285 - DNA, 403 bp, Unknown
  Bacterial polypeptide expressing nucleotide sequence isolated from the Sargasso Sea
aatgaaacaattcatagaaaaaattaaaactaaagaaaatttatcttttgaagaaagtaaagcagcttttgaattgttaatggagggcaaagctgcagaccatgaaatatttgattttttaacacttttatcagcgaaaggtgaagcttctgacgaaatagctggtggagtttttgtgcttagaagtaagtccaaaagagtaaatgtggaaaattgtgttgatacatgtggtactggtggagatggtatgaatacgcttaacatatcaacagcttctgcattgttgcttgcaagtatgggtattaaagtagccaaacatggtaataaagcagtttcatctaaatgtggatctggtgatgtattagaggctttaaatataaaaattgatttagaaccaaatgat

SEQ ID NO: 239286 - DNA, 462 bp, Unknown
  Bacterial polypeptide expressing nucleotide sequence isolated from the Sargasso Sea
aatggaaaatattttagaaaaattaaaaaaaaaagaaaatttgacttttgaagaaagcaaagctgcgtttagcaaattaatggagggtgaagcttcagataacgaaatttatcagtttttaactttgttatcagataaaggtgaagttgccgaagaattagctggaggtgtatacgtattaagaaacaaatcaaaaagagttaatattcaaaattgtgtggatacgtgcggaactggtggtgacggtaaaaatacgttaaatatttcaacagcttcagcaatattgttatcaagtatgggaattaaagttgccaaacatggcaataaggctgtttcttctaaatgtggatcgggagatgttttggaagaattaaatataaatattaatttagaaccatacgaaattgaagaacaaattaataaaaataattttggttttatgtatgcaccaaattatcatag

SEQ ID NO: 239287 - DNA, 559 bp, Unknown
  Bacterial polypeptide expressing nucleotide sequence isolated from the Sargasso Sea
atgaaaaattttatagaaaaattaaaaaacagagaagatttaagttttgatgagagcaaaattgctttcgaaatattaatggaaggtaaagcttctgagcaagaaatatatgactttttaactcaactatcttcaaaaggagaagtttctgatgagatagctggaggagtgcatgttttaagaaataaatcaaaaagagttaacatcaaaaattgtgttgatacttgtggaactggtggagatggcaaaaatactttaaatatatcaactgcttcagcattattgttagcaagcatgggtgtaaaagtggctaaacatggaaataaagctgtatcatcgaaatgtggttctggagatgttttagaagcattaaatattaaaattaatttagaacctgctgaaatagaagaacaaataagtaaaaaaaattttggttttatgtttgcgccaaactatcacagtgcaatgaaacatgtggggccaacaagaaaaaaaattggaaaaagaacaatatttaatatgataggtccattaagtagccctgcccttgtagaaaatc

SEQ ID NO: 239288 - DNA, 507 bp, Unknown
  Bacterial polypeptide expressing nucleotide sequence isolated from the Sargasso Sea
aatgaatatttatttagataagcttaacaaaagacaagacttgacatttgatgaaagcaaagcagcttttgaaataataatggaaggcaaagctagtgatcaagaaatatttgattttttaacacttttatcgtctaagggcgaagtttctgatgaaatagctggcggtgtttatgtcctcagacacaaatccaaaagagttaaggtaaaaaattgtgttgatacatgtggtactggtggagatggtatgaatacacttaatatatctacagcttctgcaataatgcttgcaagtatggacattaaagtagccaaacatggtaataaagcggtttcatctaaatgtgggtctggagatgttttagaagccttaaatatcaaaataaatctagaaccaaatgaaattgaaaatcaaattaataaaaataattttggctttatgtttgcgcccaattatcatagcgcaatgaagtttgttgggccaaccagaaaaaaaattggaaaaag

SEQ ID NO: 239289 - DNA, 479 bp, Unknown
  Bacterial polypeptide expressing nucleotide sequence isolated from the Sargasso Sea
aatgaaacaattcatagaaaaaattaaaaataaagaagatttgtcctttaatgaaagtaaagcagcttttgaattattaatggatggtaaggctgaagatcaggaaatatttgattttttgacacttttgtcagaaaaaggagaggcttcaaatgaaatagctggtggagttttcgtacttagaaaaaaatctaaaagagttagtgtagaaaattgtgttgatacatgtggtacaggtggagatggtatgaatacattaaatatatcaacagcgtctgcattactacttgcaagtatgggtattaaagtggctaaacatggaaataaagcagtttcgtcaaaatgtggatcaggtgatgttttagaagccttaaaaataaaaattgatttagagccaaatgatattgagacccaaattgataaaaataattttggttttatgtttgcgcctaattatcataatgcgatgaagtttgttg

SEQ ID NO: 239290 - DNA, 513 bp, Unknown
  Bacterial polypeptide expressing nucleotide sequence isolated from the Sargasso Sea
aatggaaaaatttttaaacaaattaagcaacagacaaaatttgacttttgaggattctaaagaagcttttgaaattctaatgaatggtaaagcttcagataaagaaatatatgattttcttacatttctttcatcaaaaggtgaagtttctgatgaaatagctggtggtgtatatgttttaagagaaaaatctaagagagttaacgttaaagattgtgttgatacatgcggcacaggaggagatggaaaaaatacattaaatatatctactgcttcagcgttattattatcaagcatgggaattaaagttgcgaaacatggaaataaggctgtgtcttcaaagtgtggttctggagatgttttggaagctttaaatattaaaataaatttagaacctaaagatattgaaaatcagattaataaaaataactttggttttatgtttgcaccaaattatcatagtgcgatgaaatatgttggccctactagaaaaaaaataggcaaaagaactat

SEQ ID NO: 239291 - DNA, 430 bp, Unknown
  Bacterial polypeptide expressing nucleotide sequence isolated from the Sargasso Sea
atgaaacaattcatagaaaaaattaagagtagagaaaatttatcttttgaagaaagtaaagcagcttttgaattattaatggaaggtaaagctgaagaccaagaaatatttgattttttaacacttttatcagcaaaaggtgaagcttcagatgaaatagcaggtggagtttttgttcttagaaataagtctaaaagagtaaatgtagaaaattgtgttgatacgtgcggaactggtggagatggcatgaatacacttaatatatctacagcatctgcattattacttgcaagtatgagtgttaaagttgcaaaacatggaaataaagcagtatcatctaaatgtggatctggtgatgtgttggaagctttaaatatcaaaataaaccttgaaccaaataatattgaaaatcaaataaataaaaataact

SEQ ID NO: 239292 - DNA, 337 bp, Unknown
  Bacterial polypeptide expressing nucleotide sequence isolated from the Sargasso Sea
tatgtctgatgcaataactaaactaaaacaaggtcaaaacctttcattggaagaaagtaagtctctattttctgatctaatggaaggcaaacatgaggaaggtcaaattattgaaattcttgaagctttaataaaaaaaggtgaaacaaaagatgaattggcaggaggtatctttattttaagaaataaggcaacaaaagtttcagcagatccaaatactattgatacttgtggaactggtggggatggtcaaaactctttaaatatttcaactgcagctgcaatagttttagcgagcatgggtattaaggttgctaaacatggaaataaagccgtt

SEQ ID NO: 239293 - DNA, 673 bp, Unknown
  Bacterial polypeptide expressing nucleotide sequence isolated from the Sargasso Sea
aatggaaaaatttttatcaaaattaaaacttaagcaagatttgtcttttgaagaaagtaaaactgcatttgaagtattaatgaatggaaaagcatcagaagcagaaatatttgattttcttacatttctttctgcaaaaggtgaagtttctgatgaaattgctggtggtgtttatgttttaagaaataaggccaaaagagttaatgtagaaaactgtgtggatacctgtggtactggaggtgatgggaaaaataccctaaatatatccactgcctcagcgttattgttagcaagtatgggaattaaagtagcaaaacatggaaataaagcagtttcttctaaatgtggttctggagatgtattggaagcattgaatattaaaattgatttagaaccaaaaaaaatagaagaacaaataaataaaaataattttggttttatgtttgctccaaattatcataatgcaatgaagtatgttggtccaacaagaaaaaaaattggaaaaagaacgatttttaatatgattggccctttaagcagtccagcattagtaaaaagacaagttgttggtgttttcgataaaaagttgcttaaaatttttgcacaagctttaaaaaatttaaatttaaaaaaagcgttaataataaatagccaggatggtcttgatgaaatt

SEQ ID NO: 239294 - DNA, 391 bp, Unknown
  Bacterial polypeptide expressing nucleotide sequence isolated from the Sargasso Sea
aatgtgcgaaaaagtaaaagagttattatcagatgcagcgcaaggacctatatcttttaaaaatgctgaaattgtttttgaaaatatcatggatggcaatctatcagaggttgaaatatcttcatttctaacctctttaaaggtacgcggcgaaagcatagatgagcttacggcggctgcctctattatgaagaaaaaatctctcaaagttttaaatggtgaggattctatagatattgtaggaacgggtggagacggcatgaatacgttaaatatttcgacagcgagctccctaactgttgcttccactgggatgcgagttgccaaacatggaaatagaaaaatatcttcactcgctggagcttctgatacccttgagatacttgggata

SEQ ID NO: 239295 - DNA, 548 bp, Unknown
  Bacterial polypeptide expressing nucleotide sequence isolated from the Sargasso Sea
aatgaaacaattcatacaaaaaattaagaacaaagaaaacctttcatttgaagaaagtaaaaaagcgttcagattattaatggagggaaaagcagaggaccaagacatatttgattttttaacacttttatcagttaagggtgaaacttcagatgaaatagccgggggagtttttgtgctgagagataagtctaaaagagtaagtgtagaaggttgtattgatacctgtggaactggtggagatggtatgaatacacttaatatttctacggcatcagcattactgctttctagtatgggtattaaagtggcaaaacatggaaataaagctgtatcctcaaagtgtggttctggggatgttttagaagccttgaatattaaaattgatttggaaccgaatgatattgaaacacaaataaataagaataactttggtttcatgtttgcacctaattatcatagtgcaatgaaatttgtaggtccaacaagaaaaaaaattggaaaaagaactatatttaatttgataggcccattaagtagtcctgctt

SEQ ID NO: 239296 - DNA, 418 bp, Unknown
  Bacterial polypeptide expressing nucleotide sequence isolated from the Sargasso Sea
atggaaattaatactattaaaaacaaactttttgcacagcaagatttaacagtaaacgagtcagttgatctttttgaattaataatgaatggaaaattaagtgaaatcgatatttcagctattttaattgctcttaaacttaaaggagaatctaaaaatgaaatattgggagctgcaaaaataatgcgttcaaaatctatgaaaatttcatccccagacaacactgttgatacttgtggaacaggtggggatatgtccaataccttaaatatatcgactgcggcttctttggttgctgcaagttgtggagtcaaaatagcaaagcatggaaataaatctgttagctcaaaatctggttctgcagatatgcttgaacatattgggtacaaattttctgataatcctaaaaatttagaaa

SEQ ID NO: 239297 - DNA, 739 bp, Unknown
  Bacterial polypeptide expressing nucleotide sequence isolated from the Sargasso Sea
atgaataattttttaacaaagttgaataaaaatgaaaatttaacatttgaagaaagtaaaaatgcttttaatacattaatggaaggaaaagcttctgataatgaaatatatgatttcttaacgttattatctaaaaaaggtgaagttgctgatgaaattgctggtggagtttatgttttaagagaaaaatctaaaagagttaatgttgaaaattgcgttgatacatgtggaacaggtggagatggaatgaatacacttaacatctctactgcatcagcattgcttttatctagtatgggtgtgaaggtagctaaacatggaaacaaagctgtatcttcaaaatgtggatcgggcgatgtattagaggcattaaatattaaaattaacttagaacctaatgatattgaatatcaaataaaaaaaaataattttggttttatgtttgcgccaaattatcatagtgctatgagatttgtaggtccaactagaaaaaaaattggaaaaagaactatttttaacatgataggaccattgagtagccctgcgctagttaaaaggcaagttgttggggtctttgataaaaaattattaaaaatatttgcaaatgcattatataatttagataataaatttgcatggattgtaaacagtgaagatggtttagatgagatatcaccatatgcaaaaactaatatagtccaattaaaagataaaaaaatttctgaaattacgatagacc

SEQ ID NO: 239298 - DNA, 352 bp, Unknown
  Bacterial polypeptide expressing nucleotide sequence isolated from the Sargasso Sea
gcctccgcctccgcggcggtggacctacgcgtcgtgatcgagcgcctgtgcgacggcgagaacctgagcgcgtcggaggcggaggcgtcgatggatgcgctgttggacgcggaccccgcccagatcgcggcgttcctcgtccttctccgcgccaagggcgagacgggcgaggagatggcgggcctggcgcgcgcgatgaaggcccgcggcgtccccgtccacgccggcgacgacgtcctcgacatcgtcggcaccggcggcgacgacgcgggcacggtgaacatctccacgggctcgtgcatcctcgcggcgagcgcgggcgccaaggtggccaagcacgggaaccgatccg

SEQ ID NO: 239299 - DNA, 367 bp, Unknown
  Bacterial polypeptide expressing nucleotide sequence isolated from the Sargasso Sea
atgaaacaattcatagataaaataaaaaacaaggaaaacctgacttttgaagaaagtaaaacagcttttcaaatattaatggagggtaaagcaaatgatcaagaaatatttgattttttaacacttttatctgctaaaagtgaaacatcagacgaagtagcgggtggcgtttatgttttgagggacaaatcaaaaagagtaaatgtagaaaattgtgttgatacatgtggcacaggcggagatggtatgaatactcttaacatatcaacggcctctgctttattgctttcaagtatgggtgtaaaagtagcaaaacatgggaacaaagcagtatcatctaagtgtggatctggtgatgttttagaag

SEQ ID NO: 239300 - DNA, 880 bp, Unknown
  Bacterial polypeptide expressing nucleotide sequence isolated from the Sargasso Sea
tttatagataaaataaatgctaagcaagatttatcatttgatgaaagcaaagctgcttttgaaattttgatggaaggtagagcaaatgataatgaaatatttgattttttgacattaatgtcagccaaaggtgagtcttctgaggaaatagctggaggcgtatatgttttaagaggtaagtcaaaaagagttaatatagataattgcgttgatacctgtggaactggtggagatggaatgaacactctcaatatttctacagcctcagctttattgctatcaagtatggaagttaaggtggcaaaacatggaaataaggccgtttcttcaaaatgtggatctggagatgttttagaagcattaaatatcaaaattaatttagaaccagcagatattgaagcgcaaataaataaaaataattttggatttatgttcgccccaaattatcatagtgctatgagatttgttggacctactagaaaaaaaatcggcaaaagaactatctttaatatgattggaccactaagcagccctgccttagttaaacgtcaagtagtaggtgtatttgatagaaaactattaaatatatttgcaaatgctttaaataatttagatattaaatttgcttggattgttaatagcgaagatggtttagatgaaatttcaccttacgcaaaaactaacgttgttcaattaaaagataataagatttctgaaattattatcgatccaaaaaaatttaatgtgaatgccgataaatttgaaaatcttattggtgatgatgcaaaattcaatgcagataaaatgattaatatatttaaaggcgaagataatgatttttcaaaagcttgtatgtttaaatgcagctgcgggtttgatt

SEQ ID NO: 239301 - DNA, 653 bp, Unknown
  Bacterial polypeptide expressing nucleotide sequence isolated from the Sargasso Sea
ttgtggttcagctgatgtattagaagcattaaaaattaatattaatctaaagccaaatgaggtggaagaaagtattaaaaatttgaattttgcttttatgtttgcgccaaattaccactcagcaatgaaacatgttggtcctgctagaaaaaaaatgggcaaaaaaactattttcaatttaattggtcctttaagcagtccggctcaagttaaaagacaagttgttggtgtttttgataaaaaatggatgaaaccatttgctgaagctttaaaagaaaacaatgttgttcatgcctatattgttcatagcgatgatggcatggatgagatttcaccttttgcaaaaactaatgttgtagaattgaaagatggtaaaataaatgaatttataattgatcctaaggagcttggtttaaattcaggaaataaagaaaatttaaaaggaaaaaatgcagaatacaattctgaaaaaattatagaaatatacaaaggaacttctaatgagttttcacagtctgttgctttaaatactgctgctggattaattgttgcaggaaaggaaaatgattttaaaaatgcctttaaaaaagcttcagaacacataaattctggtaaagtatttgaacatattagaaaattacaatcaaaataat

SEQ ID NO: 239302 - DNA, 598 bp, Unknown
  Bacterial polypeptide expressing nucleotide sequence isolated from the Sargasso Sea
aatgaaacaattcatagaaaagattaaaaataaagaaaacctatcttttgaagaaagtaagaaagcttttgaattattaatggagggtaaggcaaatgaacaggaaatatttgattttttaacacttttatcaactaaaggtgaagtttcaaatgagattgctgggggtgtttacgttctaagaaataaatcaaaaagagttaatgtacaaaattgcgtcgatacatgtggcactggtggtgatggaatgaatacactcaatatttcaacagcttctgcattattacttgccagtatgggtgttaaagtggcaaaacatggaaataaagcagtatcttccaaatgtggatctggcgatgttttagaggccttaaatatagaaattaatttagaaccaaatgatattgagtcacaaattgaaaaaaataattttggttttatgtttgcaccaaattaccatagtgcaatgaaatacgttggacctacaagaaaaaaaattggaaaaagaacaatttttaatatgattggtcctttgagtagtccagctttagttaaaaggcaagttgttggtgttttgaaaaaaagttataaaaatatt

SEQ ID NO: 239303 - DNA, 790 bp, Unknown
  Bacterial polypeptide expressing nucleotide sequence isolated from the Sargasso Sea
aatggatcaaattttagtaaaattaagaagtaaaaaaaatctttcttttgaggagagtaaatctgcctttgaattacttatgaccggaaaagctaatgaggatcaaatttatgattttttaaccttattatcagagaaaggtgaagtatcaaacgaaattgctggaggtgtttatgtgcttcgggaaaaatcaaaaagagtagaagttgcagattgtgttgatacttgtggaactggaggtgatggcatgaatacactaaatatttcaacggcatctgctttacttttagctagtatgggcaccaaagtcgctaaacacggtaacaaggcagtctcttccaagtgtggttcgggagatgttttagaagcacttaaagttaaaataaatcttgaaccaattgatatagaaaaacagattaatgataacaactttggatttatgtttgctcctaattatcatagtgcaatgaggtttgttgggccagtaagaaaaaaaataggtaaaaggacaatatttaatatgattggtccattaagtaaccctgctttagtagatagacaagttgtcggtgtttttgataaaaaattactcaagatttttgctgaagggcttaaaaatttagatattaaatttgcatggattgtaaacagtgaagatggtctagatgaaatttcaccttatgctaagacaaatgttatacaattaaaaaaaggagaaatatctgaaattgtaattgatcctcaagttttaaatattgacgctgaaaaatttgataattttaattggtga

SEQ ID NO: 239304 - DNA, 697 bp, Unknown
  Bacterial polypeptide expressing nucleotide sequence isolated from the Sargasso Sea
atgaaaaaaattctcgaaaaattaacaaataaagaaaatttgacttttgaagaaagtaaagattcttttgaaattttaatggaagggaaagcttcagatcaagagatctttgattttttaacattgctttcagctaaaggtgaagtttctgatgaaattgcaggtggtgttcatgtgttaagagataaatcaaaaagagttaatgttgaaaacgccttagatacatgtggaacaggtggtgatggtaaaaatacactaaacatatcaacagcatcagcaatattattgtccagcatgggcgtaaaagtggcaaaacatggaaataaggcagtatcttcaaagtgtgggtctggagatgttttggaagctttaaatattaatattaatcaagagcctaaacaaatagaagagcaaataagcgaaaataattttggttttatgtttgcaccaaactatcatagtgcaatgaaatacgttggtccaacaagaaaaaaaattggaaaacgaaccatatttaacatgataggaccattgagtagccctgcccttgtagagaggcaagttgttggagtttttgataaaaaattacttaaaatttttgcaaatgctttaaaaaatttaaatattaaatttgcttggattgtaaatagcgaagacggattagatgaaatttctccatattctaaaaaccaatata

SEQ ID NO: 239305 - DNA, 634 bp, Unknown
  Bacterial polypeptide expressing nucleotide sequence isolated from the Sargasso Sea
aatgaaaacttttttagaaaaacttaaaaaaaaacaggacttatcctttgaagaaagtaagttggcttttaattttttgatgaatggtgaagctaatgagtcagaaatatttgattttctaactctcttatctcttaaaggtgaagtttctgaagaaattgcaggcggagtttatatactaagagaaaagtcaaaaagagtaaatgttcagaattgtgttgatacatgtggaaccggaggtgatggaatgaatagtttaaatatttcaactgcttctgccctattattggctagcatggatattaaagtagcaaaacatgggaataaagctgtttcatcaaaatgtggctctggcgatgtactagaagcattaaatattaaaatcaatttagaacctaaggaaatagaagatcaaataaatacaaataattttggatttatgtttgcacctaattaccatagtgcaatgaaatttgttggacctacgagaaaaaaaattggaaaaagaactatatttaatatgattggtccgttaagtagtcctgctttggttgaaagacaagttgttggtgtttttgataaaaaattatcaaaaatttttgcaaatggcttaaaaaacttaaaaattaaattt

SEQ ID NO: 239306 - DNA, 913 bp, Unknown
  Bacterial polypeptide expressing nucleotide sequence isolated from the Sargasso Sea
atggaaaaagctactgatgatgaaatgtttgattttcttacacttttgtctctaaaaggtgaagtttcagatgaaattgctgggggtgtatatgttttaagagataaatcaaaaagagtgaatgttcaaaattgtgttgatacatgcggaacaggaggagatggaatgaatacattaaacatttcaacagcttcagcacttttattagctagcatgggaatcaaagtggcaaaacatggaaataaggctgtttcatcaaaatgtggttcgggagatgttttggaagaattaaatataaatattaacttagaaccaaatgaaatagaagatcaaattaataaaaataattttggttttatgtttgctcctaactatcatagtgctatgagatttgttggaccaaccagaaaaaaaattggaaaaagaactatatttaatatgattggtccattaagtagtccggctctagtcgaaagacaagtcgtgggtgtatttgataagaaattattaaaagtttttccaaatgcactaaataatcttaaaattaaatttgcttgggttgttaacagtgaagatggattagatgaaatttctccttatgcaaaaactaatgtagttcaactaaaagataataaaatttctgaaataacaattgatccaaacgaattaaatatagatgcaaataaatttgaagatttaattggtgatgatgcaaaatttaacgcagataaaatgattaatatatttaaaggtgaagataatgatttttctaaagcagtttgtttaaatgctgcagctggtttaattgttggagaaaaattctcagaatttactgatgcatataataatgcaagagaatttattctttctggaaaaacgtttacacacctggaaaaaatacgaaatgtctgaa

SEQ ID NO: 239307 - DNA, 715 bp, Unknown
  Bacterial polypeptide expressing nucleotide sequence isolated from the Sargasso Sea
aatgaaagattttgataaaataatatcaaaaatttcctctaaggatggactaacagacgatgagagctacttttcttttagttatattttagaaggaaatgcgaacgaagatcaaatagaaaaatttctccttggtttaagggagagaggtgaaaaaattgaagaaataacttctgcgacaaaagttatgagagagaaatcctcaaaagttattgctcctgaaaatgcaattgatacctgcggaactggtggtagtggatccggtaaatacaatatatctacagctgcatcattggtagctgctggagcaggttcaattatagcgaaacacggtaacagaacttctttatcgtcaaaatcgggttcttcacaagtgcttgaagagctgggtgttaaattagatatagatgcgaaaaaaattactgagtgtatggaaaaatctaatatagggtttatgtttgcaccaaatcatcacccagcaatgaagtatgttgggccagtaaggcaaaagcttaaaataagaacaatttttaatatccttgggccactatcaaatcctgcaaatgtaaaaaaacaattactaggtgtttttgataaaaaatggattagaccaatggctgaaacactaaaaaatcttggttcacacagggccttgcttgtaaatggatcagatggttttgatgaattaacaactaccggcatttcatatgttgct

SEQ ID NO: 239308 - DNA, 718 bp, Unknown
  Bacterial polypeptide expressing nucleotide sequence isolated from the Sargasso Sea
agctctgttgttagcaagtatgggtgttaaagtagcaaagcatgggaataaagcagtttcgtcaaaatgtggttcggctgacgttcttgaagccttaaaaataaatatcaacttagaaccaaatcaaatcgaagagcaaattaaaaataagaattttggctttatgttcgctccaaattaccacacggctatgaaatatgttggtccaacaagaaaaaaaataggaaaaagaactatttttaatatgataggtccattaagtagcccagcactagtagaaagacaggtaattggtgtttttgataataaacttctaaaaatttttgctaatgctctaaaagacctaaatttaaaatttgcatggattgtaaatagtgaggatggtctagatgaaatatcgccttacgctaaaactaatgttgtacaattgaaaaataatgaaatctctgaatttataattgatccaaatgaattaaatgtaaatgcagataaatttgaaaatttagtcggagatgatgctaaatttaattctgataaaattttaaaaatatttcaaggtgaagataatgatttttcaaaagctgtatgtttaaatgctgcagcagggttaatgatatctgaaaaatacgatgattttaaaattgcttataattataccaaaggttttattaagtctggagcagctttcaaatatataaaaattttacaaaatgtctga

SEQ ID NO: 239309 - DNA, 517 bp, Unknown
  Bacterial polypeptide expressing nucleotide sequence isolated from the Sargasso Sea
aatggaaagttctctaaaaaaattaaaagataaaattgaccttagtttcgatgaaacaaaagagatatttacaaaaataatggaaggagaagcttcagaaattgaaatgtatgacttcttaaccttattgtcgaataaaggcgaagtatctaacgaaattgctgcaggcgtttacgtgttaagagaaaaatcatcaagagtaaacgtagaaaacgcaattgatacttgtggtacaggtggagacgggaaaaatactcttaatatttcaacagcatctgcccttttattagcttctatgggaattaaagtagccaaacatggaaacaaagccatttcatctaaatgtggctctggtgatgtattagaaaaattaaacataaatattaatttggatgctaagtcagttgagaataatataaataaacttaattttggtttcatgtttgcaccaaactttcattcagcgatgaaacatgtaagtcctattagaaaaaaaatcgcaaaagactatttttaa

SEQ ID NO: 239310 - DNA, 757 bp, Unknown
  Bacterial polypeptide expressing nucleotide sequence isolated from the Sargasso Sea
aatgaaacaatacatagataaaataaaggataaacaagacttaacatttgatgaaagtaaagcagcatttgaaatattgatgggaggtaaagccagtgatcaagaaatatatgattttttaacactactatctgctaagggtgaagcttctgatgaaatagccggaggtgtttatgttttaagaaataaatcaaagagagttaatgtagataattgtattgatacatgtggtactggtggagatggaatgaatacacttaatatttcaacagcatctgctctgttattatcaagtatgggtgttaaggtagcaaaacatggaaataaagctgtatcatcaaaatgtggatctggtgatgttttagaagctttaaatatcaaaataaatctggaacctaatgaaattgaagatcaaattaaaaagaataactttggttttatgttcgcaccaaattatcatagtgcaatgcgatttgtcggaccaactagaaaaaaaattggaaaaagaactatatttaatatgatcggaccgttaagcagtcccgctttagtaaaaaaacaagtaatcggtgtctttgataaaaaacttttaaatatatttgcaaatgctttaaataatttggatattaagtttgcgtggattgtaaatagcgaagatggtttagatgaaatttcaccttatgcaaaaactaatattattcaattaaaagataataaaatttctgaaattgttattgatccaaaagaattaacataa

SEQ ID NO: 239311 - DNA, 439 bp, Unknown
  Bacterial polypeptide expressing nucleotide sequence isolated from the Sargasso Sea
atgtcttcaaatttatccaaccctgaaatcctaaatattttattagagggtaaggatcttgatgattttagtgcaagatccttaatgaaaagatggcttaatgatgaaatatctgatgttcaaactggagcttttttgagtgctttaagagctaagggttgtacaggtattgaattatgttctatggctgaagaactcttaaatgtttgtgaattacctttagcaagaccaaatctgtatatggttgatacttgcggaactggaggtgatggtgctaatacatttaacatttctactgctgttgcatttgtggcttcatcttgtggagttaaaattgcaaaacatggaaataaaagtgccagtggaaaagttggttctgctgatgttttgtctagtcttggtttaaatttaaattgtccattagaaaaagtaatatcag

SEQ ID NO: 239312 - DNA, 775 bp, Unknown
  Bacterial polypeptide expressing nucleotide sequence isolated from the Sargasso Sea
atgagactattcatagacaaaatcaaaaaacaaaaagacctttcttttgatgaaagtaaagcagcttttgaattattaatggagggtaaagcgaatgaccaagaaatatttgattttttaacacttttatcaactaaaggtgaggcagctaatgaaatagctggtggtgtttatgtactgagagataaatcaaaaagagttaatgtggataattgtgtcgatacatgtggtactgggggtgatggaatgaatacacttaatatttctacagctgctgcattattacttgcaagtatgggtattaaagtagcaaaacatggaaacaaagcggtctcatctaaatgtgggtctggagatgttttagaagctttaaatattaaaattaatttagaaccgaaagatattgaggatcaaattaataaaaataattttggttttatgtttgctcctaattatcataccgcaatgaaatatgttgggcctatcagaaaaaaaattggtaagagaacaattttcaatatgattggacccttaagtagccctgctttagtaaaaagacaagtagttggtgtctttgaaaaaaaattactagaaatatttgcttatgctttaaaaaatttaaatatagaatttgcatggattgttaatagtgaagatggattagatgaaatttcaccttacgcaaaaacaaatgttattcaattaaaagaaaacaaaatttctaaaattataattgatccaaaagaattagatataaatgctgaaaaaatttgaa

SEQ ID NO: 239313 - DNA, 954 bp, Unknown
  Bacterial polypeptide expressing nucleotide sequence isolated from the Sargasso Sea
ggataaagctttgaaaaccattttagaagaagctattacacagagtttgtctgataaaaaggccaagctgctttttaaaagaataatgtctggcgtattttctgaggtacagttaagcgcaatccttgcagcattaagggcaagaggtgaaactattgaagaaatcatcggtgcaaccaaagcgatgagggagcacagcaaaaaaatagctggagaccttaatgcaatcgatattgtgggaacaggtggagatgggaaaggcacattaaacatatctactgccagcgcaatagtggtctcaggtgcgggtataaaagtggcaaaacacggtaataagaatatttcttcaaagtcaggagcagctaatgtgttggagtctcttggcgtaaatataatgatgacacctgagatggctcaaagttgcctggaggagattgggatatgctttatgatggcacctattttccacccagcaatgaaaaatgtaatgccagtacgtaatgatttagggattagaaccctatttaatattttgggacctatgacgaatcctgctggagtaaaaaaacaacttactggaaccttcagtgagaagctattagagccaatggcgaaaacactgctatctctgggtaccaaatcagcttggctagttcacggcaaggatggaacagatgaaatctcatcatctgatttaacacaagtggtagagatcagaaatggtacaatcaaaaagtttacatttaatccagtagaatacggatttaaatttcaaccttttgaggagctaattgggggtgatccagtatttaatgcctctcgattggagcaccttttagagggaaagccgggagcttacagggactcagttttgctaaattccgcagcggctatatatatctcaggagccactaatgatattgaggaagcgattaattttgctataagatctat

SEQ ID NO: 239314 - DNA, 642 bp, Unknown
  Bacterial polypeptide expressing nucleotide sequence isolated from the Sargasso Sea
cagacatgctagaaaatataggttacagattttcagatgatccaaaaattatcgaagatcaattaaaaagaaataatttttgttttatgtttgctcaataccatcattcagctatgaagtatgtaattaatgtaaggaaaacattaggaacaagaacaatttttaatctcttaggtccactaacaaatccagcaaatgccaccaatcaacttttgggtgtatacgataaaaaatggcttaatactcattgtgaagttcttaaagagttgggatcaaataatgttatggtggttcatggggttgatggtttagatgaaataacacttagtcaaaacacgcatatttgtgaattaaaagatcaaactatacataattatattttagatcctcgtgaaattggctatgattacatttctctagaagaaattaaaggcggagatccacaatacaatgccaaatgttttcttaaaatgattgatggtaattttaatcagtttcaacatattgtagaactaaatgctggcgcagctatttatctagctggaaaatgctcaaatataaaagaaggtgctttaattgctaataaaacaatttctgaaggaaaaacaaaagaatttataacaaaaattactaatgagtaat

SEQ ID NO: 239315 - DNA, 541 bp, Unknown
  Bacterial polypeptide expressing nucleotide sequence isolated from the Sargasso Sea
aatgaacataacttcagctatttcaaagataacttcaggattaaaccttaaagaaaatgaaatgtctgatgtaatgttggatttactagaaggcaggactacggatgcacagataggtgcatttttgatagctttaaatatgaaaggggaaaccgttgaagaggttttgggtgcagctaaaatcatgaggaaactttcagctaaagttgaagttaataaagataaattagtagatacctgtggaaccggtggttcaggcataggaatatttaatgtttcgactacagctgcatttgttgcttgtgcttgtggagctagagttgcgaaacacggcaataggtcagcaaccagaaaaagtggaagtgcagatttattagaggtagcaggagtctctctggaactaaatccttcccaagtatcagactgtatagagaacgttggtctaggttttatgtttgctccaggccatcatagcgccatgaaacatgtaataggaccaagaaaagaaatagcacataagagtatttttaatatattagga

SEQ ID NO: 239316 - DNA, 568 bp, Unknown
  Bacterial polypeptide expressing nucleotide sequence isolated from the Sargasso Sea
tagctttctattcgcgccaaactttcatcctgctatgaaacatattgcacctatcaggcaagctttgaagataagaactgtttttaatatccttgggccacttacaaacccagccaaaccatctttttatctgctcggtgcatttagctctgaaatggcatcactgatggcatccagtttgagtggaatggacatgaaccgtgcatttgtagtgcacggattaaatggttgggatgagccaacaccggcgtctaattttgaactattcgatgtgagagagggttcaatttctcacacaatcattgatccgtctgaatacggaattaagaaatgcaaagaggaggatctgaagggggggacatccgaagtgaatgccaaggcactgttaaaagtttttgagggcaaagacaaaagcgctcatgaagacgcattgattttaaatgccggtttagctcttcaagtttcaggtgaagcaaaagagctgagagatggcatagaaattgctaaagaaacaattaagaacggcaaagcagaagactttctatcaagcttgaggaacgatgagtaa

SEQ ID NO: 239317 - DNA, 766 bp, Unknown
  Bacterial polypeptide expressing nucleotide sequence isolated from the Sargasso Sea
cttctaacacttttatatataaagggagaaacttatgaagaaattaaggcgttttcattctacctaaaatctaaagctaagaattttaaaatcaaagatgaattaatggacacgtgtggaacgggtggagataataaaaatagttttaatttttcaactgcaacctctattgttttatcttcttttaatataaaaattgctaaacatggcaataggtcagttacatcaaaatcaggcagttttgacgttttagaggctttaggaataaaattaagtagtaaaataaatgtaattaagtcttattatgaaaaaaatggaatttgttttttatttgctccattctatcacccgattcttggaaatgtatcagatgtgagaaagtcactttttttcagaactatctttaatttactgggccctcttttaaatccagttaaattaagttatcaattattaggtgtcagcaatgaggaaaatttaaacactcatgcaaagtgtttaaaagatttaaatgttaaaacaggttgggttgtacataaccttatgggatatgacgaacttacgaccacatctaaaaataaattcatagaaattaaaaatgataaaatttcaaagatcaaaatacttgatcctaaagattttggttttaaaagaaataaagaagctgatttaaggggtggaacggcaaaggaaaatgcctttttaatgaaaaatgcctttaagggagaaacaggtccaataagagataatattgttttaaactctg

SEQ ID NO: 239318 - DNA, 565 bp, Unknown
  Bacterial polypeptide expressing nucleotide sequence isolated from the Sargasso Sea
aatgaaacaatttttagaaaaacttaaaatcaaacaagatttgtcatttgaagaaagtaagtcagctttcaatatattgatgaatggagaggccaatgatgaagaaatatttgattttcttactctcttatctcaaaagggggaagtatcagatgaaattgctggtggtgtatatgttttaagggagaagtccaaaagagtaaatgttcaaaattgtgtagatacatgcggtacaggaggagatgggatgaatacacttaacatttcaacagcttctgccttattattagccagcatgggcattaaagttgctaaacatggaaataaggctgtttcatcaaaatgtggatctggtgatgtattagaggcattaaacattaaaattaaccttgagcctaatgaaatagaagaacaaataaatacaaataattttggttttatgtttgctccaaattatcatagtgcaatgaaatttgttgggcctacaagaaaaaaaataggtaaaagaactatatttaatatgattggtccattaagtaatcctgctttagttcaagacaagtag

SEQ ID NO: 239319 - DNA, 759 bp, Unknown
  Bacterial polypeptide expressing nucleotide sequence isolated from the Sargasso Sea
agtgctttgagagctaagagctctacaggtgtcgaacttagttctatggctaaggagcttttaaatgtttgcgaattgccagtagcaaggccaaatttatatttggtagatacttgtggaactggaggagatggagctaatacatttaatatttcaactgcagtagcatttgtagccgcatcttgtggggtaaaaattgcaaagcacggaaataaaagtgcaagtgggaaagttggctctgctgatgttttgttaaatcttggtttgaatttaaattgttcattagaaaaagtaatcaatgccgtaagtgagattggaataacttttttgttcgcacctgtttggcataaatctttaataaaacttgctccattaagaaagacccttggtataaggacaatatttaaccaactaggaccattagtaaatcctttaaggcctaatgcgcaagttttgggggttgcttctgaagatcttctaaaacctatgggaagtgcccttttaaatatgggtatgaatagagcaatagtcgtttacggttctggcggccttgatgaagcttcgcttcagggtaaaaataaattagtgtttgttgaaaatggtgaattacgtttttcagaaataaatatttcagattttaaccatgaaaatattgataacgaaaaccttgtagtttccgatcttgactctaacgaggaaatattaaagtctgttttaaatggttctggacacaaatctcatattgatgttgttgcgttg

SEQ ID NO: 239320 - DNA, 556 bp, Unknown
  Bacterial polypeptide expressing nucleotide sequence isolated from the Sargasso Sea
atgaaacaattcatagaaaaaattaaaaataaagaaaatttatcttttgaggaaagtaaagcagcttttgatttactgatggatggtaaagccaaagaacaagaaatatttgattttttgtcacttttatccacaaaaggtgaaacttcagatgaaatagcgggtggagttttcgttctaagaaataaatctaaaagagtaaatgtggaaaattgtattgatacttgtggaactggtggagatggaatgaatacacttaatatatctacagcttctgcattacttcttgcaagtatgggtgttaaagtagcaaaacatggaaataaagcagtttcatccaaatgtggatctggtgatgtattagaggctttaaatataaaaattgatttagaaccaaatgatatagaaactcaaatcaataagaacaattttggttttatgtttgcacctaattatcatagtgctatgagatttgtaggtccaactagaaaaaaaattggtaaaagaacaatatttaatatgatcggaccattaagcagccctgccttagtaaaaa

SEQ ID NO: 239321 - DNA, 682 bp, Unknown
  Bacterial polypeptide expressing nucleotide sequence isolated from the Sargasso Sea
acaggtggtgatggaaaggatacactaaacatatccactgcttccgccttattactttcaagcataggtattaaggtagcaaaacatggtaataaagcagtttcatcaaaatgtggatctgcagacgttttggaagctttaaatataaatatcaacttggagcccaaagatattgaaaatcaaattaaaaataatcattttggatttatgtatgctccaaattatcatagcgcaatgaaatatgttggtccaaccagaaaaaaaattgggaagagaacaatttttaatatgattggtcctttgagcagtccagcaaatgttgaaaaacaagttgtaggagtttttgacaaaaaacttctagatatatttgctaatgctttaaaagatttaaatattaaatttgcttggattgttaacagcaatgatggtttagatgaaatatcaccatatgataaaactattgttaaacaattaagaaatggggaaattaacgaaatgattattgatcctaaagaattgaaagtaaatgctgaaggtttcgataagatagttggaaatgacgcaaaatataattcacaaaaaattattgatgtatttaaaggtaaagatgatgacttttcaaaagcagtatcattaaatgcagcagaaggtttaataatatctgaaagagaagagaatttta

SEQ ID NO: 239322 - DNA, 703 bp, Unknown
  Bacterial polypeptide expressing nucleotide sequence isolated from the Sargasso Sea
agcatggatgtaaaagttgcaaaacacggaaataaagcagtttcctcaaaatgtgggtctgctgacgttcttgaagccttaaatataaatattaacttagagccaaatcaaattgaagagcaaattaaaaataacaattttggcttcatgttcgctccaaattatcactcagcaatgaaatatgttggtccaacaagaaaaaaaataggaaaaagaactatttttaatatgataggtccattaagcagcccagctcttgttgaaagacaggtaattggtgtttttgataataagcttctaaaagtttttgcaaatgcactaaaaaatctaaatttaaaatttgcatggattgtaaatagtgaggatggtctagatgaaatatcgccttacgctaaaactaatgttgtgcaactgaaaaataatgaaatatctgagtttataattgatccaaatgagttaaatgttaatgctgataaatttgaaaatttagtaggagatgatgctaaatttaattctgataaaattttaaatatttttcaaggggaagataatgatttttcaaaagcagtatgtctaaatgctgcagcaggattaatagtttctgaaaaatatgatgattttaaaattgcttataattataccagaggatttattaaatctggagctgcattcaaatatgtaaaaaatatacagaatgtctgaa

SEQ ID NO: 239323 - DNA, 388 bp, Unknown
  Bacterial polypeptide expressing nucleotide sequence isolated from the Sargasso Sea
aatgaacataactgcagctatttcaaagataacttcaggattaagccttaatgaaagtgaaatgtctgatgtaatgttggatttactagaaggaagggctacggatgcacagataggtgcatttttgatagctttagatatgaaaggcgaaaccgttgaggaggttttgggtgcagctaagatcatgaggaaactttcagccaaagttgaagttaataaagataagttagtagatacatgtggtactggtggttcgggtataggaatatttaatgtttcgacaacagcagcatttgttgcttgtgcctgcggagctagagttgcaaaacacggcaataggtctgctaccagaaaaagtggaagcgcagacttattagaggcagcagga

SEQ ID NO: 239324 - DNA, 943 bp, Unknown
  Bacterial polypeptide expressing nucleotide sequence isolated from the Sargasso Sea
cttaaaaaaaaacaagatttgtcatttgaagaaagcaaattagccttcaacgtattgatgaatggtcaagcaactgatgacgaaatatttgattttcttactcttttatctctaaaaggcgaagtttcagatgaaattgctggtggtgtatatgttttaagggataaatcaaaaagagtaaatgttcagaattgtgtggatacatgtggaacaggaggagatggaatgaacacattgaatatatcaacggcttcagcacttttattatctagcatgtcaatcaaagtagcaaaacatggtaataaagccgtctcctcaaaatgtggttctggtgatgttttagaagcattaaatattaatatcaacttagaacctaaagaaatagaagatcaaattaataaaaataattttggttttatgtttgcaccgaattatcataatgctatgaaatttgttggaccaacaagaaaaaaaattggaaaaagaacaatatttaatatgattggaccgttaagtagccctgctctagttgaaaggcaagttattggtgtatttgataaaaaattattaaaaatttttgctatggctctaagtaatcttaatattaaatttgcttggattgttaatagtgaagatgggctggatgaaatttctccttatgcaaaaactaatgttgttcaactaaaaaataataatatttctgaaataacgattgatccaaaagatttaaaaataaacgcaaataaatttgaagatttagtcggtgacgatgcactgtttaattcgaataaaataatagaaatatttaaaggtgaagataacgatttttctaaagccgtttgtttaaacgctgcagctggattaatcgtttctgaaaaatataaagattttaatttagcttataattatgcgaggggttttataaaatctggaagagcatata

SEQ ID NO: 239325 - DNA, 457 bp, Unknown
  Bacterial polypeptide expressing nucleotide sequence isolated from the Sargasso Sea
aatgaaagcattacttcaagaattattaaaaggaaagcgtttacgtttcgatgaagcaaaacaagcattgttggatatcggaaaaggaaattgcaataactcgattatctcttcctttttgactgtatttatgatgagaggtattgagggggaagaattagaagggttccggtctgcaatgcttgagttgtgtaaccccattgacttaggcagtgtgaaaacgattgatatgtgtggtaccgggggagacgggaagaatacgtttaatatttcaacaacatcatcatttgttgttgcagcagcaggaattaaagtagccaagcacggaaattatggcgtttcttcgggtgtaggatcatcaaatgtaatcgagtatttggggtatgcatttaaaggagatgaagcatccctgaagtcagaaattgaacatgttgggattactttttttcacgctccg

SEQ ID NO: 239326 - DNA, 517 bp, Unknown
  Bacterial polypeptide expressing nucleotide sequence isolated from the Sargasso Sea
aatgaaagaattactgcaaaaattgctggcttcagaagctctaagctttgaagaagcacgagaaatgattttatggattatgagtgaagaagctgtgactgtccaggcagcagcacttttagctttgctacaggccaaaggggttactgttgaagaaatggctggtgctgctttggcgatgagggaacgagcttctggaataaaggcaccggcaaatgctatagacacctgcagcacaggaggaaatggaatcagcacattcaacatttctacatgtgctgcaataatagcagcaggtgcaggcgctatagtagcaaaacacggcaaccgtagtaacacaagaaaaagcgggagtgctgaagcactagaagcgttaggagtgaaaataaatttggaagtagatgaagttgaaagatgtcttcgagatttgaatatttgtttttgctacgcgatcaatcaccatccagcaatgcgatttgctggaccaatacgcaaggatcttgggggttcgactgta

SEQ ID NO: 239327 - DNA, 736 bp, Unknown
  Bacterial polypeptide expressing nucleotide sequence isolated from the Sargasso Sea
taatatttcaactgcatcagcgctgttgttagcaagtatgggcgttaaagtagcaaagcatggaaataaagcagtttcatcaaaatgtgggtcagctgacgttcttgaggcattaaatataaatatcaacttagaaccaaaacaaatagaggaacagattaaaaataacaattttggcttcatgtttgcaccaaattaccactcggcaatgaaatatgttggtccaacaagaaaaaaaataggaaaaaggacaatttttaatatgataggtccattaagcagcccggcacttgttgagaggcaggtaattggtgtttttgataacaaacttctaaaaatttttgcgaatgctctaaaaaacttaaatttaaaatttgcttggattctaaatagtgaagatggtctagatgaaatatcaccttacgccaaaactaacattgtgcagttaaaaaataatgaaatatctgagtttataattgacccaaatgaattaaatattaatgctgataaattcgaaaatttaattggagatgacgctaaatttaattctgataaaattttaaatatttttgaaggtgaagataatgatttttcaaaagctgtatgtttaaatgctgcagcagggttaatgatatctgagaaatatgatgattttaaaattgcttttaattatactagaggttttattaagtctggagcagcattcaaatatataaaaagtttacaaaatgtctga

SEQ ID NO: 239328 - DNA, 535 bp, Unknown
  Bacterial polypeptide expressing nucleotide sequence isolated from the Sargasso Sea
atggataaatttttattaaaactaaaaaacggagaaaatttatcttttgaagaaagtaaaaaatcttttgagattattatggaaggaaatgcttcagatgaagagatttatagttttttaactctactttctaaaaaaggtgaaacatccgatgaaattgcaggtggagtgtatattttaagaaataaatcaaagagagttaatataaaagatgctattgatacttgtggaaccggaggtgacggaaaaaatacattaaatatatcaactgcttctgcattgctgctagcaagcatggggataaaagttgcaaaacatggaaataaagctgtctcatcaaaatgtggatctggagatgttttagaggctttaaacgttaaaatcgatttagatcctaaaaatatagagactcaaatatctaaaaataactttggattcatgtttgcacctaattaccatagcgcaatgaaatatgttggaccaacaagaaagaaaattggaaagagaacaatatttaatatgattggtcctttaa

SEQ ID NO: 239329 - DNA, 698 bp, Unknown
  Bacterial polypeptide expressing nucleotide sequence isolated from the Sargasso Sea
gggtattaaagtgcaaaaacatggaaataaagctttaagttcaaagtgtggttctgcagatgttttggagagattaaaaattaatattaatttacagccagatggtgtagcaaaaagtatagaaaaaaataattttggttttatgtttgcaccaaactaccatttgacaatgagatatgtagcacccataagaaaaaaaattggtcaaagaacaatttttaatttgttaggaccacttagtagtccagctaacgtaaaaaagcaggtgattggtgtatttgcaaaaaagtggttggtacctttcgctaacgcattaaaaaatttagagtcaaagcatgcctggattgttcatagtgaagatggtatggatgaaatttcaccatttactgtaactaatgtagtagagttaaaaaataatgaaattaatgaaattataattgatccaaaaaaaattggagtaaattttaataatcctgataacttaaaaggtaaagatgctgactataatgctaacaaaataatagatgtttttagcggagataaaaatgaattttctgaagctatatgcttgaattctgctgcagctttaattgtatgtaataaatttaatgtgtatgaagaagcatatgaattttctaaaaaacatcttgaatctgataaagttttaacgcatttgaaaaaaatccaaactttttaaa

SEQ ID NO: 239330 - DNA, 362 bp, Unknown
  Bacterial polypeptide expressing nucleotide sequence isolated from the Sargasso Sea
aatgaacgaaatactaaaaaaactcaaaaataaaaaaaatctcacttttgaagagagtaaaactgctttttcagacataatgtcgggtaaagttaatgaggaaataatttatgattttttaactttttcatctgccaaaggtgaaacatctgatgaaatagctggtggggtttatgttttacgcgataaagctaccaaagttaatgttccggatgatacgattgatacttgcggtactggaggtgacggaaaaaatactttgaatatatcaactgcagcagcgcttttattatcgagtttcggtgtgaaagttgcaaaacacggcaataaatctgtttcgtcaaagtgtggatctgctgatg

SEQ ID NO: 239331 - DNA, 506 bp, Unknown
  Bacterial polypeptide expressing nucleotide sequence isolated from the Sargasso Sea
aatgagagaatacattgaaaaaatcagaaataaattaaatctatcttttgaagaaagcaaatccgctttcgaaatattgatggagggtaaagccactgatcaagaaatatttgatttcttaacacttttgtcaaccaaaggtgaaacctctgaagaaatagctggtggtgtttatgtacttagagataaatctaaaagagttaatacggaaaattgtattgatacatgtggaactgggggtgatggaaagaatacccttaatatatcaacagcatctgcattattacttgccagcatgggtgttaaagtagcaaagcatggaaataaagctgtatcatctaaatgtggatctggcgatgttttggaagcgttaaatgtaaaaattaatctagacccaaaggatatagagaaacaaattgatattaataactttggttttatgtttgcacctaattatcatagcgcgatgagatttgttggtcctactaggaaaaaaataggtaaga

SEQ ID NO: 239332 - DNA, 323 bp, Unknown
  Bacterial polypeptide expressing nucleotide sequence isolated from the Sargasso Sea
tatgacagaaattgttgaaatattaaaaaatggtcaagacctatcttttgaacaaagcaaaactcttttttctgatttaatggaaggcaaacattcagatgactcaattatagaaatattagaatctttaataagaaaaggtgaaacaaaagacgaaattgcaggcggtatctatgtattaaggaacaaagctaacaaagttaaaactactccagatacaatagatacatgtggaactggtggtgatggacaaaactctcttaacatatcgacggctgcagctattgtgcttgccagtatgggtgtaaaagttgctaaacatg

SEQ ID NO: 239333 - DNA, 355 bp, Unknown
  Bacterial polypeptide expressing nucleotide sequence isolated from the Sargasso Sea
atggatcaatttttagaaaagctcagaaacaaaataaatttaaattttgatgaaagtaaaaatgcatttaagattttaatgaatggtgaggctagcgatcaacaaatttatgattttttaactttattatcagacaagggtgaggtttcagatgaaatagctggaggtgtatatatattgagagataaatcaaaaagagtaaaagttgaaaattgcattgatacctgtggtactggaggagacggaaaagatactcttaatatttcaactgcatcagcactgttgttagcaagtatgggtattaaagtagcaaagcatggaaataaagcagtttcatcaaaatgtggatcagctg

SEQ ID NO: 239334 - DNA, 560 bp, Unknown
  Bacterial polypeptide expressing nucleotide sequence isolated from the Sargasso Sea
catgaaacattttatagaaaaaataaagaataatgaaaatttgtcttttgaggagagtaaagcagcttttaaattattaatggaaggtaaagtaaatgagcaagatatttttgactttctaacatttttatcagcaaaaggcgaggcctcagatgaaattgcaggtggtgtttacattctacgagaaaaatccaaaagagttaatgttgataattgtattgatacttgtggaactggtggtgatggcatgaacacactaaatatatcaacagcatctgcattattgctagcaagtatgggaattaaagttgcaaaacatggtaataaagctgtgtcctctaaatgtggatcaggagatgttttggaggcattaaatataaacataaattttgatacagaagatattgaaactcaaataaatgaaaataattttgggttcatgttcgcacctaattatcatagtgcaatgaggtttgtagggccaactagaaaaaaaataggtaaaaggactatatttaatatgattggtcctttaagcagccctgctttagtaaaaagac

SEQ ID NO: 239335 - DNA, 852 bp, Unknown
  Bacterial polypeptide expressing nucleotide sequence isolated from the Sargasso Sea
aatgaaacaatacatagataaaattaaaaacaaacaaaatctctcatttgaggaaagtaaggcagcttttgaattattaatggaggggaatgcaaatgaagaagaaatatacaattttttaacaattctatcagcaaaaggtgagtcatcagatgaaatagcagggggtgtttacgtacttagaaataaatccaaaagagttaatgttgaggattgtattgatacatgtggaaccggtggtgacggtatgaatacacttaatgtatcaactgcatcagctatattactttcaagtatgggaataaaagtagctaagcacggaaataaggctgtatcatcgaagtgtgggtctggagacgtcttagaggcattgaagataaatataaatctagaaccaaatgagattgaaaatcaaattaataaaaataattttggttttatgtttgccccaaattatcatagtgcaatgaggtttgttggtccaacaaggaaaaaaattggaaaaagaacaatctttaatatgattgggccattgagtagccctgcctttgttaataaacaagttgttggtgtttttgataaaaaattacttaaaacttttgctaatgctttaaaaaatttagatattaaatctgcatggatagtgaatagtgaagatggtttagatgaaatatcaccatatgctaaaactaatgtgattcaattaaaaaacaaagttatatcagaaataactatcgatccaattcaattaaatattaatgctgaaaaatttgagaatctaattggaaacgacgctcaatttaatgcgagtaaaatgattgatatatttaaaggtgaagataatgatttttc

SEQ ID NO: 239336 - DNA, 838 bp, Unknown
  Bacterial polypeptide expressing nucleotide sequence isolated from the Sargasso Sea
aatggaaaaaattttaaataagttaaaaaataaagaaaatttaactctagatgaaagcaaatttgcttttatgaacataatggaaggcaaatcatcagaagatcaaatatatggttttttaacatatctatcagacaaaggtgaaacatcagacgaaatagccggcggcgtctatgtattgagggaaaaatccaaaagggtaaacgttcaaaattgcattgatacatgtggtactggtggagatggtaaaaatactttaaatatttctactgcttcagctttacttttatcaagtatgggaattaaagttgctaaacatggtaacaaagctgtgtcctcaaaatgtggatctggtgatgtattagaagaattaaatattgatatcaatttagaaccaaatcaaattgaaaattctattaataaaaataattttggatttatgtttgcaccaaattatcatagcgcaatgaaacatgttggaccaactagaaaaaaaattggtaaaagaacaatatttaatatgattggaccattaagtagtcctgctttagttgaaaggcaagtagttggggttttcgattcaaaccttttagaaatttttgcaaatgctttaaaaaatttaaaaatcaagtttgcttggattgttaatagtgaagatggactagatgaaatttccccttatgcaaaaactaatatagttgaactaaaaaataatcaaattacgaagaaaattattgatcctaaggaattaaatataaatgcaaataattttaaaaatattttaggaggtgatagtaaatataatgcagaaaaaatgacaaatatattaaaggagaag

SEQ ID NO: 239337 - DNA, 416 bp, Unknown
  Bacterial polypeptide expressing nucleotide sequence isolated from the Sargasso Sea
aatgagagaaattataaaaaaacttgaagagcgcattgatcttgataatcaaattatgacagatgctgtaagtcaaatcatgagtggtgaagttgaggatcccatgattgaagattttcttatcaagcttaatgcaaagggtataactgaaagtgagataagttcagctgctcaagtaatgcgaagcaagtctctttcaatcgatttaggcaacggggctcatgttgatacatgtggcaccggaggaacaggcctaaatatttttaattgttcaactgctgcatcttttgtagcagctgctgggggagctcaaattactaagcacggcaacaaaggagtttccagcaagtcaggcagcgcagatttattaatgattgctggagctaacatcaatcacgatcgcaatcatctaaaag

SEQ ID NO: 239338 - DNA, 856 bp, Unknown
  Bacterial polypeptide expressing nucleotide sequence isolated from the Sargasso Sea
ggtgaagtttcagacgaaattgcaggtggcgtttatgtactcagagaaaagtcaaaaagagtaacagttactggctgtgttgatacttgtggaactggaggtgatggtatgaataccttaaatatttcaaccgcatcagctttacttttagctagtatgggcactaaagttgctaaacatggtaataaggcagtctcttctaagtgtggttcaggggatgttttagaggcacttaaagttaaaataaatcttgaaccaggtgacatagaaaaagagatcaatgataacaactttggctttatgtttgctcctaattatcatagtgcaatgagatttgttggacctgtgagaaaaaaaataggtaaaagaacaatatttaatatgattggtccattaagtaaccctgctttagtagatagacaagttgtcggtgtttttgataaaaaattacttaagatatttgctgaaggacttaaaaacttaaatattaaatttgcatggattgtaaacagtgaagatggcctagatgaaatttcaccttatgctaagacaaatgttatacaattaaaaaatggagaaatatctgaaattgtaattgatcctttagtattaaatattaacgctgaaaaatttgataatttagttggtgatgacgcaaactataatgcaaataagataattgaaatttttaaaggtatagataatgatttttcaaaagcggtttgtttaaacgctgcggcaggtttaattgtaaatgaaaaatattcaaaatttttagatgcttacaattatagtagagaatttattttatcaggaaaaccatatattcatttagaaaaaatgcaaaatgtctaaa

SEQ ID NO: 239339 - DNA, 335 bp, Unknown
  Bacterial polypeptide expressing nucleotide sequence isolated from the Sargasso Sea
tatggatcaaattttagaaaaacttaaaaacaaacaagatttaacctttgaagaaagtaaaactgcttttgaaatattaatgactggaaaagctagtgatgatgaaatttttaactttttaactttgctatctgaaaagggtgaagtttcagatgaaatagcgggtggagtttttgttcttagagaaaagtcaaaaagagtaaatgtaagtgattgtattgatacttgcggtactggtggtgatggaatgaatacccttaacattttcactgcttctgccctacttttagctagcatgggcacgaaagttgctaaacacgggaataaagctgttt

SEQ ID NO: 239340 - DNA, 811 bp, Unknown
  Bacterial polypeptide expressing nucleotide sequence isolated from the Sargasso Sea
aatgaccggtaaagcttcagatgaacaaatttttacttttttaactctgttatctgaaaaaggtgaagtttcagaggaaatagctggtggtgtttttgtattaagagaaaaatcaaaaagagttaatatagaaaattgtgtagatacttgtggtacaggtggtgatggtatgaatacactgaatatatcaacagcttctgcattattactctcaagtatgggtgttaaagttgcaaaacatggaaataaagctgtgtcttctaaatgtggatctggagatgttttagaagccttagatatcaaaataaatcttgaaccaaaagatattgaagcccaaatcaataaaaaaaattttggttttatgtttgcaccgaattatcatagtgcaatgagatttgttggacctacaagaaaaaaaattggaaaaagaactatatttaatatgataggaccattaagtagccctgctttagtaaatcgtcaagtagttggagtctttgataaaaaactcttaaagatattcgcaaatgcattaagtaatttagatataaaatttgcatggatagttaacagtgaagatggtttggatgaaatttcaccatatgcaaaaacaaatgttattcaattaaaaaataaagaaatttctgaaattgtaattgatccaaaagaactaaatataaatgctgataaatttgaaaatcttgtaggtgataacgcaaaatttaatgcaaataaaatgattgatatatttaaaggtgaggataatgatttttctaaagctgtttgcttaaacgctgcagcaggattaata

SEQ ID NO: 239341 - DNA, 586 bp, Unknown
  Bacterial polypeptide expressing nucleotide sequence isolated from the Sargasso Sea
atggatcaaattttaaaaaaactaaagaataaaaaagatttaacttttgaggaaagtaaatctgcgtttgaaattttaatgactggaaaagcaagtgatgaacaaattttcaattttttaacgcttttatctgaaaaaggtgaggtttctgaagaaatagctggtggtgtttttgtgttaagagaaaaatcaaaaagagtaagtgtcagtgattgtattgatacttgcggaactggtggtgatggtatgaatacgcttaatatttcaacagcatcagcacttcttttagcaagtatgggtacaaaagtggctaaacatggaaataaggctgtttcctcaaaatgtggatctggagatgttttggaagcgcttagaattaaaattgatttagaacctggagatattgaaaaagaaattaataccaataattttggttttatgtttgcaccaaattatcatagtgcaatgagatttgtgggacccgtaagaaagaaaattggaaaaagaacaatttttaatatgattggtccattaagtaatccggctctagtacagagacaagttgtaggcgtatttgataaaaaat

SEQ ID NO: 239342 - DNA, 424 bp, Unknown
  Bacterial polypeptide expressing nucleotide sequence isolated from the Sargasso Sea
tatggatcacattttagaaaaattaaaaaataaacaaaatttaacttttgaagaaagtaagtctgcatttgaaattttaatgactggaaaagccagtgatgaacatatttttagctttctaacactattatctgagaaaggtgaagttgccgatgaaatagcaggaggagtttttgttcttagagaaaagtcaaaaagagtgaatataagtgattgtattgatacttgtggtactgggggtgatggtatgaatacacttaatatttcaactgcttctgccctacttttagctagcatgggtacaaaagttgctaaacatggcaataaagctgtttcttcaaaatgtggatcaggtgatgttttagaagctcttaaaattaaaattgatttagaaccagaaaatattgaaaaagaaattaatacc

SEQ ID NO: 239343 - DNA, 355 bp, Unknown
  Bacterial polypeptide expressing nucleotide sequence isolated from the Sargasso Sea
atgactactgattttaaagaatttatccaattagcttacgaagatagtttagatttaaactctactaagaaggcctttatgcaaatcatgaatggtgaaataagtgagatacaaataagctcctttatttcattgctccaaaagtctggtgttaaatcacatcatgtaattgcagctttagaagtaatgagaaaaaaaatgctctcgatcaatgtgccatcaaatacaatggatacatgcggtacaggaggagatggaaaaaatagcttaaatatctcaacggcgacagcttttgttttggcggcctctggtatcccagtagctaaacatggaaatcgagcactaacatcaaaat

SEQ ID NO: 239344 - DNA, 310 bp, Unknown
  Bacterial polypeptide expressing nucleotide sequence isolated from the Sargasso Sea
aatgtcttctaatctatcaaactctgaaatcctgaataatctgttggagggaagggaccttgatgaattaacttctagatctttaatgcaaaaatggcttaatgatgaaatttcagatgttgaaacaggagcttttttgagtgcttttagagcaaagagttctacaggtgtcgaattaagttctatggctgaggaactcttaaatgtttgcgaattgccagtagcaagaccaaatttgtatttggtagatacttgtggaacaggaggtgatggagctaatacatttaatatctcaactgcagttgcattt

SEQ ID NO: 239345 - DNA, 466 bp, Unknown
  Bacterial polypeptide expressing nucleotide sequence isolated from the Sargasso Sea
ttaatggaaggcaaagcaaaagatcaggaaatatttgattttttaacattattatctgccaagggagaaacatccgatgaaatagctggtggtgtttatgttttaagggataagtcaaaaagagtaaatgtagataattgtattgatacatgtgggactggtggagatggtatgaatacacttaatatatctacagcatctgcattattactttcaagtatgggtgtgaaagtagcaaaacatgggaataaagcagtttcttctaaatgtggatctggggacgttttagaggctttaaatatcaaaataaacctagaacctaatgatattgaaggtcaaattaatataaataattttggtttcatatttgcacctaattatcatagtgcaatgaggtttgttggcccaacaagaaaaaaaattgggaaaaggacaatatttaatatgattggcccattaagtagcc

SEQ ID NO: 239346 - DNA, 580 bp, Unknown
  Bacterial polypeptide expressing nucleotide sequence isolated from the Sargasso Sea
gatgaaaatatttttagaaaaattatctaataaacaagatttaacattcgaagaaagtaaagctgcttttgaaattttaatgaatggcaaagctacagatgacgaaatatttaactttttaactcttctatcttctaaaggtgaagggtcagatgaaatagctggaggagtatatgttctaagaaataaatctaaaagagttagtgttgataattgcatagatacctgtggaaccggtggagatggtaaaaatactttgaatatttccactgcatcagctttgttgctagctagcatgggtattaaagttgctaagcatggaaacaaggctgtatcgtctaagtgtggatctggagatgttctagaaagtttaaaaataaaaataaatttagaacccgctgatgtagaaaagcaaataaataaatataattttggttttatgtttgctcctatttatcacagcgcaatgaaatatgttggacctacaagaaaaaaaataggaaaaagaaccatatttaatatgattggacctttaagtagtcctgctctagttcaaagacaagtttgtaggtgtttttga

SEQ ID NO: 239347 - DNA, 403 bp, Unknown
  Bacterial polypeptide expressing nucleotide sequence isolated from the Sargasso Sea
aatggatgaaattataaaaaagctaaaaaataaaaaaaacttaaattttgaagaaagcaaatctgcttttgaaaatatgatgtcaggtaaggttaatgaagaacagatttatgattttttaactttttcatccgcaaaaggagaaacttcagatgaaattgcaggcggtgtttatattttgcgagaaaaagcaaataaagtaaatgtaccagatgatactatagacacatgtggtactggaggagatggaaaaaataccttaaatatttctaccgctgcagcattgttgttatctagttttggagttaaggtggctaagcacggaaacaaatctgtctcttcaaagtgtggttccgctgacgtattaaaaaaattaaacatcaatattaatcttgggcccaag

SEQ ID NO: 239348 - DNA, 808 bp, Unknown
  Bacterial polypeptide expressing nucleotide sequence isolated from the Sargasso Sea
ttttttaactcttttatctgaaaaaggtgaagtttctgaagaaatagctggtggtgtttttgtattaagagaaaaatcaaaaagagtaaatgttaatgattgtattgatacctgtggaacaggtggggatggaatgaatacgctcaatatctcaacagcatcggccctgcttttagcgagtatgggtactaaagtagccaaacatggaaataaggctgtttcatcaaaatgtgggtctggagatgttttagaagcacttaagattaaaattaatttagagcctaaagatatagagagagaaattaatactaataattttggttttatgtttgcaccgaattatcatagtgcaatgaaatttgttggtcctactcgaaaaaaaattggaaaaagaactatctttaatatgattggtcctttaagtaatccagctcttgttgacagacaagttgttggagtttttgataaaaaattattaaaaatttttgcagaaggacttaaaaatttacagttaaaatttgcttggatagtcaatagtgaggatggattagacgagatatcaccatatgcaaaaacaaatgttgttcaattaaaagatggtcaaatctctgaaataaaaatagatccacattctttaggtgtaaatgcagataattttaaaaacttagttggtgatgatgcaaaatttaatgcaaacaagatgattgaaatatttaaaggtgaagaacatgacttttcaaaagcagtttgtttaaatgctgcagcaggtttaattgtgggacaaaaattttatgatttttctgaagct

SEQ ID NO: 239349 - DNA, 612 bp, Unknown
  Bacterial polypeptide expressing nucleotide sequence isolated from the Sargasso Sea
ttggagaagcgattttgaaagttggagttggtttcatgtttgcgcctgcacaccacagtgctatgaaacatgttattacagcaaggaaacaaataggagtaagaactgtttttaatttgttggggcccttaacaaatcctgcgggtgctccaaatcaagttataggagtttatagtgttgactggattcgcccaatacttgaagttttacgagaacttgggtctagtcatgtattggtagtcgcagcagaagatggactagacgaaattagtaatatctctgcaactacaattggagagttacaaaacggggaaatttctttgttcaaagtctctcctgaggaattaggtgtcgatcgaataaatagtcacgaaatttttcaagttgattctgcagatgctagtttagccatattgaaaaaagcattaacttacgagctaaaaccagcaggggatatcgttgcgcttaatgctggggctgcgatttatgcggcaaatcttgctgattcattgcaaggcggtgtagtgaaagctaaaagtttgttaacaagcggggttgcgttggctaggttagagtcgcttgttcagtttagcttagaggcgggtaattaag

SEQ ID NO: 239350 - DNA, 517 bp, Unknown
  Bacterial polypeptide expressing nucleotide sequence isolated from the Sargasso Sea
tatgctcggcccgctgaccaatccggccggggtcaagcatcaggtggtgggcgttttcagccaggcgctgtgccggccgctggccgaagtactcaagcgcctcggcagccaacacatcctggtggtgcattcgcgtgatggcctggatgaattcagtctggcgtcggcgacccatgtcgctgagctgaaggacggccagatcaccgaatacgaagtgctgccggaggacctcgggctgaagagccagagtttggtcggcctggcggtggaaagtccggaggcctcgttggcactgattcgtgatgccctgacgaagcgtaagagcgaagccgggcagaaagcggccgacatgattgccctgaatgccggtgcggcgctgtatgcggcggacctggcgagcagcctcaagcagggtgtgcagctggcccatgacgccttgcacactggcctggcctgggaaaaattgcaggagttggtgtcctttaccgctgtattcaaagaggagaatgccgggtga

SEQ ID NO: 239351 - DNA, 556 bp, Unknown
  Bacterial polypeptide expressing nucleotide sequence isolated from the Sargasso Sea
aatgaaacaattcatagaaaaaattaaaaataaagaagatttatcctttgaagaaagtaaagcagcttttgaattattaatggatggtaaagtaaaggaccaggaaatatttgattttttaactcttttatcagctaaaggtgaagcttcagatgaaatagctggaggggtttttgtacttaggaataagtccaaaagagtaagagtagaaaattgtgttgacacatgtggtactggtggagatggcatgaatacacttaatatatcaacagcttctgcgttgctacttgcaagtatgggtgtgaaagtagcaaaacatgggaataaggcagtatcatcaaagtgtggttctggtgatgttttggaagctttaaatatcaaaataaatctagaaccaaatgatattgaaggtcaaattaataaaaataattttggtttcatgtttgcacctaattatcatagtgcaatgagatttgtcggacccactacgaaaaagattggaaaaagaactatatttaatatgattggaccactaagtagcccagcgctagtaaaa

SEQ ID NO: 239352 - DNA, 445 bp, Unknown
  Bacterial polypeptide expressing nucleotide sequence isolated from the Sargasso Sea
atgaaaaaattcttattaaagctaaaaagtaaagaaaatttatctttcgaagaaagtaaagctgtatttgaaatgttaatgaatggaaaggcttctgatgatgaaatatttgaatttcttacattgctttctgctaaaggagaagtttctgatgaaattgctggtggagtttatgttttaagagataaggcaaaaagagttaatgttcaaaactgtatagatacttgtggcactggaggtgatggtaaaaatacattaaatatatcaactgcttcagcgatattactagctagcatgggaattaaagtagctaaacatggaaataaagctgtctcatcaaagtgtgggtccggagatgtactagaagcattaaatattagaattaatttagaaccaaaagatatagaaaatcaaattaatataaataattttggttttatgtttg

SEQ ID NO: 239353 - DNA, 619 bp, Unknown
  Bacterial polypeptide expressing nucleotide sequence isolated from the Sargasso Sea
ttataaaattacaaataatgtaaaagatttagaaaactccttttccaataaaaatttttgctttttatttgcacaaaatcatcattctgccatgaagaatgtaattaacgttcgtaagaatttagctacacgtacaatttttaatttattaggtcctcttactaaccctgctaaagcaagtaaacagcttctaggtgtctattcaagagatttagtttctatgcattgtaattgcttaaaagaactaggctctgaaaaagctatggttgttcatggattggatggtttagatgaaataagtttatcagacaatactctaatcaatgaattgaaagataataaagttctggaatatagttttgatccaagagactatggttatgatttaattaaattagaagatataaaaggtggagatccagaatataatgcaaattgttttaataaaatgattaacggtgattacaaagaatttcaaatgattgtagaaataaatgcaggagcgacaatatatttatccaatttaagaaataatctaaaagatagttttgaattagcaaaaaaaacaattgaggaaggaattacaaaaaattttgtaaactcactaattaatgaataa

SEQ ID NO: 239354 - DNA, 679 bp, Unknown
  Bacterial polypeptide expressing nucleotide sequence isolated from the Sargasso Sea
aaactaaaaaaaaaacaagatttatcttttgaagaaagtaagtcagcttttaacattttgatgaatggagaagcaaatgatacagaaatatttgattttcttactctactatcctcaaaaggtgaagtcgctgatgaaatagcaggtggagtttacgttttaagagaaaaatcaaaaagagttaatgttcaaaattgtgttgatacttgcggtactggaggagatggaatgaatacactaaacatttcaacagcttctgccctattattagccagtatgggcattaaagttgctaaacatggaaataaggccgtttcatcgaaatgtggatctggagatgttttggaggaattaaatataaaaattaacttagaaccaaatgaaatagaagatcaaattgataaaaataattttggtttcatgtttgctccaaattaccatagtgcaatgaaatttgttggtccaactagaaaaaaaattggcaaacgaactatatttaatatgatcggtccattaagcagtcctgcactagttaataggcaagttgttggtgtatacgataagaaattattaaaagtctttgctaatgcactaaataatcttagtattaaatttgcctggattgtaaacagtgaagatggactaaaaaaaatttctccttatgcaaaaactaatatag

SEQ ID NO: 239355 - DNA, 849 bp, Unknown
  Bacterial polypeptide expressing nucleotide sequence isolated from the Sargasso Sea
tatggatcaaatcttagaaaaacttaaaaataaacaagatttaacttttgaagaaagtaaaactgcttttgaaatattaatgacaggaaaagctagtgatgacgaaatttttagttttttaaccttattatccgaaaagggagaagtttcaaatgaaatagcaggtggagtttttgttcttagagaaaagtccaaaagagtaaatgtaagtgattgtattgatacttgtggtactggtggtgatggcatgaatacccttaacatttcaactgcttcagccctacttttagctagcatgggtacaaaagttgcaaaacatggcaataaagctgtttcttcaaaatgtggttctggtgatgttttagaagctcttaaaattaaaattgatttagagcctgaggatattgaaaaagaaattaataccaataattttggttttatgtttgcacccaattatcataatgcaatgagatttgtaggacctgtaagaaagaaaattggaaaaagaactattttcaatatgattggcccattaagtaatccagctcttgtagagagacaagttgtaggtgtttttgataagaaattattaaaaattttttcagaagggcttaaaaatttaaatttaaaatttgcttggatagtaaatagtgaagatggtttagatgaaatatctccatatgcaattactaatgttgttcaattaaaagatggtcaaatatctgaaataaaaatagatccaaatgctttaggtgttaatgcagataattttaaaaatttagtaggtgatgatgcgcaatacaatgctgataagatgattgaaatatttaaaggtgaagataacgattt

SEQ ID NO: 239356 - DNA, 289 bp, Unknown
  Bacterial polypeptide expressing nucleotide sequence isolated from the Sargasso Sea
atgtcagaaatcacagattatattgaaaagataaacaataaaaagagcctttcggttttggaaagctacaatgcatttatgagtataatgtctggtgattgcgttgatggtgatatttctaactttcttattggtcttaaaaataagggtgagtcaatagatgaaatcataggggctgtgcgtgccattagagaaaaaatgactactataaatgttcctgatggcgcaatagatattgttgggaccggtggtgatggttacaaaacattaaatatctcaacagcatccg

SEQ ID NO: 239357 - DNA, 259 bp, Unknown
  Bacterial polypeptide expressing nucleotide sequence isolated from the Sargasso Sea
atgtctaactttcaaaagatattggacaatctaaaaaatagtcaagatttatcctcggatgaagcattcattgtctctgaaaaaatgtttgaaggatctctagctgatgatcaaataaaagatattcttttgttacttaatgaaaaaagtatttgctcaaatgaattaattggtttcgcaagagcaatgagaaaaatatctacaaaagttgaaattaatcacaaagttattgatagctgtggtaccggcggggatggtt

SEQ ID NO: 239358 - DNA, 673 bp, Unknown
  Bacterial polypeptide expressing nucleotide sequence isolated from the Sargasso Sea
aataaagcagtttcatcaaaatgtggatctgcagatgttttggaagcattaaatataaatatcaatttagaaccaaaagatattgaaaatcaaattaaaaaaaatcattttggatttatgtttgctccaaattatcatagtgcaatgaaatatgttggcccaacaaggaaaaaaattggaaaaagaacaattttcaatatgattggacctttgagtagtcctgcaaatgttgaaaaacaagttgtaggagtttttgataaaaaacttctagatatattcgctaatgcattgaaagatttaaatattaaatttgcttggattattaatagtaatgatggtttagatgaaatatcaccatatgataaaactattgttaaacaattaaaaaatggggaaattaatgaaatgattattgatcctaaagaattgaaagtaaatgctgaaggtttcgataagatagttggaaatgacgcaaaatttaattctcaaaaaattatagatatatttaaaggtaatgatgacgacttttctaaagcagtatcattaaatgctgcagctggtttaataatatccgaaagagaagataattttaaatacgcctatgaaaaagcaagagatcatttgttatcaggaaaaacatattcacatttagaaaaattgagaaatgtctgag

SEQ ID NO: 239359 - DNA, 745 bp, Unknown
  Bacterial polypeptide expressing nucleotide sequence isolated from the Sargasso Sea
gcaataattgctgctggtgcaggcgcagttgtagcaaaacatggcaaccgcagcaacacaagaaaaagcgggagtgccgaagcacttgaagcgttaggagtgaatataaatttggaacttgatgaagttgaaaaatgtcttcaggatttgaaaatctgtttttgttacgcgatcaatcaccatccagccatgcgctttgccggaccaatacgcaaggaccttggggtcccaactgtatttaatctgcttggtcccttaacaaatcctgcaggtgcaaaaaatcagttgattggagtcccgaatgttgaacttacttcgaaaatagctcaggtccttaagcgattaggcagcgaacgagtattggtagttcatggatatgatggtttgtgtgagctgacagtcacctcccctacacatgtggcagaacttagagaaggcaatatcaaagaatatgaagtgactcctgagaagcttggtctcaagacgggaaaactggaggagataagcatagataatcctgaagaaagtgccatgataatggagcgtattttttctggagatgagaaaggtactgcacgtgaaattgctctggcaaatgcggccggtgcgttagtcgtttcaggacaagttgagaatttggaagaaggtgtagatatggcagccaagacagttgacaatggaaaagcagcagaaaaacttaatgatttaatcaagtttacatgggcaaaccatcaggctaagtaaa

SEQ ID NO: 239360 - DNA, 820 bp, Unknown
  Bacterial polypeptide expressing nucleotide sequence isolated from the Sargasso Sea
tttttgacaatatttatgatcagaaatataactattgaggaactaaatgggtttagaaaagccttaatagaactatctcttaaaattgaccttgaagagtttgatccaattgatttatgtggaacaggtggagacgaaaaagatacttttaacatttcaaccttggcttcctttgttacagctggttcaggagttaaagtagcaaaacatggaaactatggagtttcttcaagctgtgggtcaagtaatgttttagaaagtctaggtctaatttttgataatgattcaaataaaattaaagaagcggttgataaagcaaatatatgctttttacatgctcctctttttcaccctgcaatgaagaatgttgccccagttagaaaggagctaggattaaaaactttttttaatatgctgggaccaatggtaaatcccactatgcctaaaaagcagattgtaggagtatataatcttgaattagctaggatttataattatttatatcagcttacagatatcaattataatattatccattcattagatggttatgatgaaatatctttaactggcaacacaaaggtttactctaggaaaagtgaatttatattagaatctgaggattttaatttaaagaatattaaccctgtggatataaaaggcggaattgacataaaatcatcagccaagatttttatgaatgttttaaatggagatggatcaaatgatcaagagaatgtagtttgtgcaaatgcatctttagcaattgcaatctcaaagaaaatttcaattttagatgcattgaagaagcaaaagaatc

SEQ ID NO: 239361 - DNA, 506 bp, Unknown
  Bacterial polypeptide expressing nucleotide sequence isolated from the Sargasso Sea
aatggaaagttctttaaagaaattaaaagaaaaaactgatcttagtttcgatgaaactaaagatatattttcaaaaattatgagtggtgatgcctcagagattgaaatatatgatttcttaacgttattatcggataaaggtgaagtatccagtgaaatagctgctggtgtttacgtgttaagaaaaaaatcatcaagagtaaacgcagaaaatgcaatagatacttgcggtaccggcggagatggtaaaaatactctcaatatttcaacagcttctgcacttttattagcatctatgggaattaaagttgctaaacatggaaacaaggcagtttcatccaaatgtggttctggagatgtgctagaaaagttaaatataaatattaatttagatgctaatgcagttgagaatagcattaaaaaatttaatttcggctttatgtttgcaccaaactttcattctgcaatgaaatatgttggccctgtaagaaaaaaaattggtaaaa

SEQ ID NO: 239362 - DNA, 725 bp, Unknown
  Bacterial polypeptide expressing nucleotide sequence isolated from the Sargasso Sea
tgcagcagctatagttttagcaagtatgggtgtaaaagttgcaaagcacggtaacaaagctgtttcctcaaactgtgggtctgcagatgtattagaagctttaaaaataaatataaatttaaaacccgatgaggctgaagaaagcataaaaaagtttaattttgcttttatgtttgcgcctaattatcattcagcaatgaaacatgtgggacctgctagaaaaaaaataggaaaaaaaacgatctttaatttaattggtccattaagtagccctgcacaagtaaaaagacaggttataggagtatttgataaaaaatggatgaagcctttcgctgaggcactaaaagataatggtgtcgttcacgcatttattgttcatagtgaagatgggatggatgagatatcaccatttgcaaaaacaaatgttgtagaacttaaagataaaacaataaaagagtttacaattaatccaaaaactttcggaatcaactcttcaaataaggaaaatttaaatggaaaaaacgcagaatataacgctgagaaaataatcgaaatatttaaaggaaaaaaaaatgaattctcccaatctgttgctctaaatgtggcagcaggattgattgtttctgataaagaaaatgattttaaaatatcatatgaaaaggctacaaatcatttaaattcaggaaatgtgtttcagcacctagtaaaaattcaatcaaattaat

SEQ ID NO: 239363 - DNA, 704 bp, Unknown
  Bacterial polypeptide expressing nucleotide sequence isolated from the Sargasso Sea
tatggatcaaattttagaaaaattaaaaaataaacaagatttaacttttgagcaaagtaaatctgcatttgaaattttaatgactggaaaagccagtgatgaacaaatttttagctttctaacactgttatctgaaaaaggtgaagttgccgatgaaatagctggtggtgtttttgtattaagagaaaaatcaaaaagagttaatgtgagtaattgtattgatacatgtggaacaggcggtgatggcatgaatactcttaacatttcaactgcgtctgcactacttttagcaagcttgggaacaaaagtagctaaacatggaaataaggctgtttcctcaaaatgtggatctggtgatgttttggaggctcttaaaataaaaattgatttagagccacgagatatcgagaaagaaattaatatcaataattttggctttatgtttgcaccaaattatcacagtgcaatgagatttgttggacctgtgagaaagaaaattggaaaaagaactatctttaacatgattggtccattaagcaacccagctcttgtagaaagacaagttgtcggagtatttgataaaaaattattaaaaatttttgcagaagggcttaaaaatttaaatttaaaatttgcttggatagttaatagtgaagatggattagatgaaatatctccatatgcgaacactaatgttattcaat

SEQ ID NO: 239364 - DNA, 778 bp, Unknown
  Bacterial polypeptide expressing nucleotide sequence isolated from the Sargasso Sea
atagatacttgtggaactggtggagatggtaaaaatacattaaatatttccacggcatcagcattactactggcaagtatgaatgtaaaagttgctaaacatggcaataaagcagtttcttctaaatgcggatcaggagatgtcttagaagaattaaaaataaaaataaatttagatcctaaaaatgtggaaattcaaataaataaatataattttggttttatgttcgctcctaactatcatagtgccatgaagtatgttggaccaacaagaaaaaaaattggaaaaagaactatatttaacatgatcggacctcttagcagcccagctcttgttcaaagacaagttgttggtgtttttgataaaaaattactaaaaatatttggaaatggattaaaaaatcttaatatcaaatttgcttggattgttaatagtaatgatggtttagacgaaatatcaccttatgacaaaacgaatgttgtacaaataaaagatgatcaaatttctgaaattgtaattgatcctaaggatttgggaatctctgtgaataaatttgaagatttgttaggagatgatgctaaatttaatgcaaataaaataattgatatttttaagggaaaggataatgatttttccaaagctgtatgcctaaatgcagctgctggattaatagtatctgaaaatcacaacagatttatagatgcttatcaaaatgcaagggaacatatattaagtggaaaaacatacgaacatttaaaaattattcaaaatggttgat

SEQ ID NO: 239365 - DNA, 799 bp, Unknown
  Bacterial polypeptide expressing nucleotide sequence isolated from the Sargasso Sea
gaggcgtcagaagtcatgcgagaaattatgcgtgcgggtatggaccaaactgacggtactaaggctacggaggctcagtttggagcccttttgactgcgttaaggatgaaaggtgagtcggtagaagaaatagtaggtatggctgtcgcgatgcgagagtttagtaaaaagctcgatattgaggcacgcccgttacttgatactgcgggcacggggggatcaggaaggaagcgatttaatgcttccactgctgcagcgtttgttgcagcggctgctggtgcgaaagtggccaagcacggtaacagagctatgagttctcggtcaggtgcggctgatttcctcgaggccctcggtgctgaagtttccattgattcgaaggccgtccgccgttgttttgatgatacaggcatgggatttttgtttgctccaatgtttcatccggccatgaaattcgcgggtccgttgaggccgaccttaggcgtcagaactatttttaatatattgggtccactaacaaatcctgccggagcgaactgtcatgtcttgggggccgcagacttggaaattgccgagaagcttgcgagtgcattaacacagttggagatgcggcacgcggtggttgtagtcggacatgatggtgtcgatgatatttcggtggtagacgattcgactctatttgagattaaagagggttcggtcgaccgtcagatagtgagtccagagtcgattggcttgaagcgacatgcggaaagtgaaatagtcggtggtactgccgaagataatgctcagatctggagat

SEQ ID NO: 239366 - DNA, 743 bp, Unknown
  Bacterial polypeptide expressing nucleotide sequence isolated from the Sargasso Sea
ggcggagatgggcaaaactcactcaacatttcgacggcttcagctatagttttggcaagtatgggagttaaagttgctaaacacggtaataaggccgtttcttcaaattgtggctcagcagatgtgcttgaggctttaaaaataaatattaactccaaccctaaggaggctgaagaaagcattaaaaactataattttgcattcatgtttgcacctaattatcattctgctatgaaacatgttggacctgccagaaaaaaaatggggaaaaaaacaatctttaatctaattggacctttgagcagtcctgcacaagttaaaagacaagtgattggcgtgttcgataaaaaatggatgaaaccatttgcggaagcattaaaggaaaatggcgtcgtacacgcatatattgttcatagcgaggatgggatggatgaaatctcaccttttgaaaaaacaaatgtagtggaactgaaggaaggacatattgctcaattttcaattgatccaaaaaagctcggccttaattctgctaataaagaaaatttaaaaggaaaaaatgctgaatataattctagaaaaattattgaaatttataaaggaacatataatgaattttcccaatctgtagctttaaatgttgctgcaggactaattgtttctggtaaagaaaataattttcgaatagcttttgaaaaagcttccgaacatttaacttcaggagaagtatttaagcatttaaataa

SEQ ID NO: 239367 - DNA, 643 bp, Unknown
  Bacterial polypeptide expressing nucleotide sequence isolated from the Sargasso Sea
aattgcaggtggtgtttatgtacttagagaaaaatcaaaaagagtaaccgttacaggctgtgttgatacttgtggaactggaggtgatggcatgaatacactaaatatttcaaccgcctctgctttacttttagctagtatgggcactaaggttgctaaacatggcaataaagcagtttcttctaagtgcggttcaggagatgttcttgaagctcttaatattaaaatagatcttgaaccaaatgatatagaaaaagagatcaatgataataactttggctttatgtttgctcctaattatcatagtgcaatgagatttgttggacctgtgagaaaaaaaataggtaaaaggacgatatttaatatgattggtccattaagtaaccctgctttagtagatagacaagttgtcggtgtttttgataaaaaattacttaagatatttgctgaaagtcttaaaaatttaaatattaaatttgcatggattgtgaatagtgaagatggactagatgaaatttcaccttatactaagacgaatgtaatacaattaaagaatggggagatatctgaaattgttatagatccccacgaattaaatattaatgcagagaaatttgaaaatttaattggtgatgatgctaaa

SEQ ID NO: 239368 - DNA, 585 bp, Unknown
  Bacterial polypeptide expressing nucleotide sequence isolated from the Sargasso Sea
tatgaaacaaattttagaaaagcttaaaaataaacaagatttaacttttgaagaaagtaaaactgcttttgaaatattaatgacaggaaaagccagtgataatgaaatttttaattttttaactttgctatctgaaaaaggtgaagtttcagatgaaatagcgggtggagtttttgttcttagagaaaagtcaaaaagagtaaatgtaactgattgtattgatacttgtggtactggtggtgatggcatgaatacccttaacatttcaactgcctctgccttacttttagctagcatgggtacaaaagttgctaaacatggtaataaagctgtttcttcaaaatgtgggtctggtgatgttttagaagctcttaaaattaaaattgatttagaacctgtggatattgaaaaagaaattaacatcaacaattttggttttatgtttgcaccaaattatcatagtgcaatgaaatttgtaggacctgtaagaaaaaaaattggaaaaagaaccatttttaatatgattggtccattaagtaatccagctcttgtagagagacaagttgtaggtgtctttgataaaaa

SEQ ID NO: 239369 - DNA, 843 bp, Unknown
  Bacterial polypeptide expressing nucleotide sequence isolated from the Sargasso Sea
aatgctcgatgtgatggatttgataatgtctggtagcttacaagatattgaaatagaagaatttcttatagcgatgaatgaaaagggtgcatccattaatgaaatatcttctgcagcttcagtgatgagagataagtctcttaaatttaatattggagatgggactcatatcgatacatgcgggacaggaggaactggacttcatattttcaactgctcaacagcatcggcttttgttgctgctgcatgtggggcaaaggtcacaaaacacggcaataaaagtatttcaagtaaaactgggagcgccgactttcttttagaagcaggagcagatatttctcatgacaggggtttattagagagtatttttagaaaaactggctttatattcctttttgctcctttgcatcattcgtcaatgcgatatgtaatgcccgcgagacagagaattggaaagaaaactatattcaatcttctaggaccacataccaatccttgctctgctcggaaacagctaatcggagtttacaagagatcactggttgaaactttctcaagcgtggccaaggaacttgaaatggaacatgtaattgtggtccatgggaatgacggattagatgagatctcaattactgatgattcttttataagcgaactcaaggatggaaaaataaaaaactatcaggtatcacctaaagattttggtctaagttatggaaattttgaatccattaaggctttatctcctcaagaaagctttgaaaaagtatctctagcatttgcaggcagagaaggttctgttcaagatatgatagctatcaattcagcagctgcattaaagct

SEQ ID NO: 239370 - DNA, 601 bp, Unknown
  Bacterial polypeptide expressing nucleotide sequence isolated from the Sargasso Sea
catgattgataacgaattacaaaaactaaaaggaaagattgatttaagcaggcaagaaatgctcgatgtgatggatttaattatgtctggtagcttgcaagataatgaaatagaagaatttcttatagcgatgaatgaaaagggtgcatccattaatgaaatatcttctgcagcttcagtgatgagagataagtctcttaaatttaatattggagatggaaatcatatcgatacatgtggcacaggaggaactggacttcatatttttaactgctcaacagcatcggcttttgttgctgctgcatgtggggcaaaggtcacaaaacatggcaataagagtgtttcaagtaaaactgggagcgctgactttcttttagaagcaggagcagatatttctcatgacagaaatttattagggagtatttttagaaaaactggctttatattcctttttgctcctttgcatcattcgtcaatgcgatatgtaatgccagcgagacagaaaattggaaagaaaactatattcaatcttttaggaccacataccaatccttgctctgctcggaaacagctaatcggagtttataagagatcactagat

SEQ ID NO: 239371 - DNA, 478 bp, Unknown
  Bacterial polypeptide expressing nucleotide sequence isolated from the Sargasso Sea
ttggagttagcctttgcagataatttagatctagaggcgacaaaggcagtatttaaattaattatggaaggtaatgtaaatgaagtgcaaattagctcatttctctctttgcttcaaaaatctggcataaaagctcatcatatcaacggagctctagacgtaatgaaatcgaaaatgattaagataaaatcacctaaaggctcaatagatacatgcggcacaggtggcgatggtaaaaatagcttgaatatctctactgctaccgcatttgtgttggcagccaaaggtatacctatagcaaaacatggaaatcgtgctttaacatctaactgcggatctgcagacgtcctgaagtccttaaaaatcaatattgatatggatatttcgaaactagaagactgtttgaacaaaacaggtatttgtttcatgtttgcacctaatcatcatccggccatgaaatatgtaggcccagtaaggc

SEQ ID NO: 239372 - DNA, 742 bp, Unknown
  Bacterial polypeptide expressing nucleotide sequence isolated from the Sargasso Sea
aatggaacaaattttagaaaaattaagaaacaaaactgatctttcttttgaggaaagtaaatctgcctttgaattacttatgactggtcaggcaaatgaagaccaaatttatgactttttaaccttattatcagataaaggtgaagtgtcagacgaaattgctggaggtgtttatgtgctaagagaaaagtcaaaaagggtaaaagtcacagactgtgttgatacctgcggaacaggaggcgatggcatgaatactctaaatatttcaaccgcctctgctttacttttagctagtatgggaactaaggttgctaaacacggtaataaagcagtttcttctaaatgtggttcaggagatgttcttgaggctcttaatatcaaaatagatcttgaaccaagtgacatagagaaaggaattaacgataataactttggttttatgtttgctccaaactaccatagtgcaatgagatttgttggaccagtaagaaaaaaaataggcaaaagaacaatatttaatatgatcggcccattaagcagccctgctttagttgaaagacaagtagttggagtatttgataaaaaattactcaaaatttttgctgaaggacttaaaaatttaaatattaaatttgcatggattgtaaatagtgatgacggtttggatgaaatatcaccttatgctaaaacgaacgtaatacaattaaagaatggagagatatcagagattacaattgatcct

SEQ ID NO: 239373 - DNA, 512 bp, Unknown
  Bacterial polypeptide expressing nucleotide sequence isolated from the Sargasso Sea
tatgaaagaaattttaaatagactaacaaattatgaaaccttatctgaaaaggaagctagagatattattattcaaatttcagaaggtaagttaaacacaagtgagatatcttcttttctaacaatctttatgattagaaatataactattgatgaattgaatgggtttagaaaggctctaattgatttatcattaaaaattgatcttaaagaatttgatactattgacttatgtggaacaggaggagatgaaaaagacactttcaatatttcaaccctagcgtcgtttgttacagcaggtagtggagttaaagttgctaaacatggaaactatggagtatcatccagttgtgggtcaagtaatgtattggaatatttaggtataaattttacaaacgattatgataaaatcaaaagagcagtagataaggctaatatctgctttctccatgctcctttatttcatcctgcaatgaaaaatgttgccccagttagaaaagaacttaggttaa

SEQ ID NO: 239374 - DNA, 539 bp, Unknown
  Bacterial polypeptide expressing nucleotide sequence isolated from the Sargasso Sea
tagtgcgatgaaacatgttgccaacgtcagaaaacagcttggtactagaacaatttttaatttgttaggacctcttactaacccagcctctactaaaaaacaattattaggagtttttgaaaaaaaatgggttaatattcattgtgaagttctgaaagagctaggttcttatcattctattgttgttcatggctttgatggtttagatgaaatatcattatctggcccatcttatatttctgaattaaaggatggaaccattaaagattatatttttgatccaaaagactttggttatgagtatattaaaaatgaagaaattataggtaaagatgctgaatataatgctagagcatttattgaattgttagacggtcctaataatagttttcaaaaaattgttgaaattaattcaggtgctgcaatttatttgtcaggaataagcaaaagccttaaagaaggttttgaattagcacaaaaaacaatattgaataagaatgcaaaaaattattttgaaaatatgattaaaaatcaatgaa

SEQ ID NO: 239375 - DNA, 391 bp, Unknown
  Bacterial polypeptide expressing nucleotide sequence isolated from the Sargasso Sea
tatggatcaaattttagaaaaacttaaaaataagcaagatttaacttttgaagaaagtaaaactgcttttgaaatattaatgacaggaaaagccagtgatgatgaaatttttagctttttaactttactttctaaaaagggtgaggtttcagatgaaatagcaggtggagtttttgttcttagagaaaagtcaaaaagagtaaatgtaagtgattgtattgatacttgtggaactggtggtgatggcatgaatacccttaacatttccactgcttctgccctacttttagctagtatgggtacaaaagttgctaaacatggtaacaaagctgtttcctcaaaatgtgggtccggtgatgttttagaagctcttaaattaaaattgatttaa

SEQ ID NO: 239376 - DNA, 443 bp, Unknown
  Bacterial polypeptide expressing nucleotide sequence isolated from the Sargasso Sea
aatgaaacagattttagaaaaattaagcaaaaaagaagatttaacttttgaagaaagtaaatccgcttttgaattattaatgactggcaaagctagtgaagaagaaatttatgattttttaaccctactctctgataaaggtgaagtttcagatgaaattgctggtggagtttatgtgttaagagaaaaatctaaaagagtaaatgttaacgattgtattgatacctgtggaactggaggtgacggtatgaataccttaaatatttctactgcatcagctttacttttggccagtatgggaacaaaggtagctaaacacggtaataaagctgtatcatctaaatgtggttcaggagatgttctggaagctcttaaaattaaaatagatcttgagccaatagatatagaaaaagtgattaatgataataattttggttttatgt

SEQ ID NO: 239377 - DNA, 528 bp, Unknown
  Bacterial polypeptide expressing nucleotide sequence isolated from the Sargasso Sea
tatgagtacacatttaaccaacgtacttaatgttcaacacgcaattgagcaacttacgattaagcaatcactcagttatagccaatcaaaagcgctatttaatgaaattatgcaaggtaacatgagcgatattgagctaactgctttgcttattagtcttaaaatgaaaggtgaagtgagtgatgaaatagcgggagctgcggcatctatgcgtgaaaacgcagtggcttttaatactacttgctcacaacttgcagatagttgtggcaccggtggcgatgggtcaaatactattaatatcagcaccactgccgctattgtcgcagctgcagcgggtattaacatggtaaaacatggcaaccgcagtgtgtcgagtaactcaggctctgccgacttactcaaagcgcttggtattaatatagatatgagccctgaacaagcagcaaaatgccttgagcaaacacactttacatttttgtttgcacctcattatcacagcggtgtgcgccatgcgatgggtgtgcgtac

SEQ ID NO: 239378 - DNA, 994 bp, Unknown
  Bacterial polypeptide expressing nucleotide sequence isolated from the Sargasso Sea
aatgaataaatatattgagaaattaaaaataaaaaaaaatttaagcttcgatgaaagcaaagatgcttttgaaatattaatgaatggaaaagcgtctgacaatgaaatatttgattttttaacactcttatcttcaaaaggtgaagtttctgacgaaatagctggaggtgtttatgtcatgagaaataagtcaagaagagtaaaagtgcaaaattgtttagatacatgtgggacaggtggagacggtatgaatacattaaatatatcaacagcttcagcaattttacttgctagcatgggagtaaaagtagcaaaacatggaaacaaggccatttcttcaaaatgtggatctggagatgtgctggaagctttaaaaattggaataaactttgagccaaatgaaatagaggatcagattagtaaaaataattttggatttatgtttgctccaaattatcattcagcaatgaagcatgttggcccaacaagaaaaaaaataggaaaaagaactatatttaacatgattggacctttaagtagtccagctcttgttgataaacaagtgataggtgtttttgaaaagaaactacttaggatttttgctgaagcacttaagaatataaatataaaatttgcttggattgtaaatagtgaagatggattagatgaaatttctccttatgcaaaaacgaatgtttttcaattaaaagatggagaaatatcagaatttacgattgatccagaagaattaaatgttaaggcggataagtttgaaaatttaatcggtgatgatgcaaaatttaatgccaataagataattgaaatttttagtggtgtggataatgatttttcaaaagctgtatcacttaatgctgcagcaggactaatggttatggaaaaaaactttaactttaaagactcttatgagtcggcaagaaaatttttattatcaggacaaaccataaatcatttaagaatactacaaaatgtctga

SEQ ID NO: 239379 - DNA, 910 bp, Unknown
  Bacterial polypeptide expressing nucleotide sequence isolated from the Sargasso Sea
cggtaaagcaaatgaaaaggaaatttttgattttttgacacttttatctactaagggtgagtcctcaggtgaaatagcaggtggtgtctttgtacttagaaataagtctaaaagagtaaatgtagaaaattgtgttgatacatgtgggactggtggagatggaatgaatacacttaatatatctacagcatctgcactgttacttgcaagtatgaatgttaaagtggctaaacatgggaataaagctgtatcatctaagtgtggatcaggtgatgtattagaggctttgaagataaaaataaatctggaaccaaaagaaatcgaagatcaaataaataaaaataattttggtttcatgtttgctcctaattatcatagtgccatgaggtttgttggtccaacgagaaagaaaattggaaagagaacaatatttaatatgatcggaccgttaagtagccctgctttagtaaaaagacaggtagttggtgtctttgataaaaaacttttaagaatatttgcaaatgctttaaataacttagacattaaatttgcatggattgtaaatagcgaggatggcttagatgaaatttcgccgtatgccaaaacaaatgttattcaattaaaagataataagatttctgaaattgttattgatccaaaagatttaaagattaatgcagataaatttgaaaatcttgttggagatgacgcaaaattcaatgcagaaaaaatgattaacatatttaaaggtgaggataatgatttttccaaagcagtatgtctaaacgctgcagctggattaattgtaaatgaaaaccataaagagtttacagaagcatataaagatgcaagagagcatattttatctaataaagttatcgaacatttggaaacaattcaaaatgcctga

SEQ ID NO: 239380 - DNA, 1009 bp, Unknown
  Bacterial polypeptide expressing nucleotide sequence isolated from the Sargasso Sea
atgaaaatattattggaaaaattattatccgcaaaagacctatcttttaaggagtcatatgaaatgatactatggattatgagtgaagatgctatagctgttcaagcagcatcaatgttggtattattacaagcaaaaggagttagtgttgacgaaatggctggagctgctctggcaatgcgagagaaagcaaaatttatctctgcaccagaaaattcgattgatacgtgtagtacaggagggaacgggatcagtacatttaatatttctacatgtgcagcaatcattgcttctgcagcaggggcagtagtcgctaaacacggtaacaaaagtaatactagaaaaagtggcagtgcagaagcccttgaagcattaggagtgaatttatctttggagttgaataaggttgaaaaatgtttgaatgatctgggtatttgcttttgttacgcaataaaccatcaccctgcaatgagatttgcagggccaattcgtaaggatttaggagtaccaacaattttcaatttattaggcccattaactaaccctgctggtgtaaaaaatcaattaattggtgttcctaacaaagaactaactttgaaaattgctcaagttttaaaacgtcttggcagtaatagagttatggttgttaacggacaagacggactttgtgaattgactgtaactacttccacaaatataactgagttgaggaataatgaaataaaggaatatgtaattaacccacttgatttaggattaacaaaaggtaaattggatgatataagaattgaaaatcctgatcatagtgctgatatgataaaaagaatttttgatggtaccgaaaaagggaccgctagagatattgctttagttaatgctgctggtgcacttgtagtagcgggattatcaaatgatttgaaagaaggaattgaattatctagaaaaactttagaaagcggcaaagcagaggaaaaaatgaaaaaacttataaattacacaaacaaataat

SEQ ID NO: 239381 - DNA, 994 bp, Unknown
  Bacterial polypeptide expressing nucleotide sequence isolated from the Sargasso Sea
aatgaaacaatatattgaaaaattaagaagcaaaaaaaatttaactttcgaagaaagcaaatcagtttttcaaattttaatggaaggcaaagctagtgatcaagaaatatatgattttttaattttgttatctgataaaggtgaaagttctgacgaaatagcaggtggtgtttatattttaagagaaaaatcaaaaagagttaaagttgatgattgtattgatacttgtggaactggtggtgatggaatgaatactttaaatatttctactgcatcagcaattttacttgcaagcatgggtacaaaagtagcaaagcatggaaataaagctgtttcctcaaaatgtggatcaggtgatgttttagaagcacttaagataaatattcatctagaacctaaagatatagaacatcaaattaataataacaactttggctttatgtttgctcctaattatcacagtgctatgagatttgtaggaccaactagaaaaaaaattggtaaaagaacaatatttaatatgattggacctttaagtagtccagctttagtaaaaagacaagtaattggtgtctttgataaagaattattaaagacatttgcaaatgcactaattaatttagatatgaaatttgtgtggattgtaaatagtgaggatggcttagatgaaatttctccgtatgcaaaaacaaatataattcaattgaaagataatgagatttctgaaattgtaattgaccctaaggaattaaatgtaaatgctggtaaatttgaaaatcttgttggtgatgatgcaaaatttaatgctgataagatgattaatatatttaaaggtgaggataatgatttttcaaaagctgtatgcttaaatgctgcagcagggttaatagtgaatgaaactcatcaaaattttgctgatgcatataaagatgcaagagaacatatcttatcaaataaagttaataaacatttagaaaaaattcaaaatgcctga

SEQ ID NO: 239382 - DNA, 730 bp, Unknown
  Bacterial polypeptide expressing nucleotide sequence isolated from the Sargasso Sea
atcatttgtattagcagcaaacgatataccagttgctaaacatggaaataaagctctcacttcaaaatgtgggtcagccgatgttctgtctgccctagggataaatataaatatgccgatagaattcttggaggattgccttaaagaagtaggaatttgctttatgtttgctccaaatcaccatcctgcaatgaaatatgttggacccgtaaggcaacaaattggagtaagaacaattttcaatatacttggcccattgcttaatccaggtaatgttgataatcaaattattggggtttttggcaatgatgttcttaatatttacaaagaagtatttaataaacgagaaggtaaaaatgctttcattattcttggctatgaaggaatggatgaaatatctacagaaggagaaaactttatctattctaatgtatatggagagaaaatatttaatccagtcgatctcaagttaaaagagcctatcaaatcagagttaattggagatgatcctaattataacgcaaataggattattgatatttttactggtaaaaaggattcattttatgaaattgtcagtataaatgcagcttttgcatttctactttcttctaatgaggaacctaatacaagaaatatcaataaatattatgaactagcaagaagtataattgatactgggtcagcagaaaataaattaaaagatttaatttcatttagtaataaataa

SEQ ID NO: 239383 - DNA, 777 bp, Unknown
  Bacterial polypeptide expressing nucleotide sequence isolated from the Sargasso Sea
tatggataaagtcttaagcaaattaaaattatctcaaaatcttaactttaatgaaagtaaagatgcctttgattttattatggaaggaaaagcaaatgaggatcaaatattttcttttttaacattactctcaaataaaggcgaaacagcagaagaaattgcaggtggagtttttgttttaagagataaatcaaagagagttaacgttgagaattgtatagatacatgtggaactggtggagatggtatgaacacgctaaatatttcaactgcttcagcgttgttgttggctagtatgggtgtaaaagttgctaaacatggtaataaggctgtctcatctaaatgtggatctggcgatgtattagaagctttaaatattaaaattaatttagaaccaaacgaaatagaaaatcaaatagataaaaataattttgcttttatgtttgccccaaattatcataaagccatgaaacatgtgggcccaacaagaaaaaaaattggtaaaaaaactatatttaatatgataggaccattaagtagcccagctttggtcaaaagacaagttgttggtgtatttgataaaaaattattaaaaacctttgcagatgcactaaataatttagatattaaatttgcttggatcgttaatagtgaggatggtttagatgaaatttcaccatatgcaaaaacgaatataattcagttaaaagataaaaaaattactgaaatcatagtagatcctaaaaaacttaatgttaatgctgataaactaaaaaa

SEQ ID NO: 239384 - DNA, 589 bp, Unknown
  Bacterial polypeptide expressing nucleotide sequence isolated from the Sargasso Sea
aatgtctgaagtaatgttagatctgttagaagggcgtgccactgatgcacaaataggggcattcctgatagctttaaatatgaaaggtgagacagtacaagaagtattaggtgctgcgaaaattatgagacaactttctgcgaaagtagaagttaataaagaaaatttggtagatacttgtggtacgggaggttcaggtatagggatattcaatgtatcaacaaccgccgcatttgttgcttgtgcttgtggtgctagggtagcaaaacatggaaatagatcagcaactagaaatagtggaagcgcagatttgcttgaagctgcaggagtttcccttgagctgaacccttctcaagtggcggattgcatagagaatgtaggtttaggctttatgtttgctccaagtcatcacagtgctatgaagcacgtaataggaccaagaaaagaaatagctcacaaaagtatattcaacttattagggcctttaactaatccagcttctacactaaaccaagttatgggcgtctatgatgaaaaatggttaaagccagtagataaagttcatcaataccttggaagtaaaaatgtc

SEQ ID NO: 239385 - DNA, 1018 bp, Unknown
  Bacterial polypeptide expressing nucleotide sequence isolated from the Sargasso Sea
aatgagtaattttaataatattataagagatattaaaaaacataaggctttaaaaaaagaagatattaaattctgctttaattttattttagagggaaaagctaacgaacttgaaatagagaattttttaattggcttaaatgataaaggtataactattgacgatattacggcaggtgttgaagttttaagagaaaaatcatcaaaagttaatattccagaaaatgctattgatacttgcggaactggcggtgataaatcaggaacttataatatttctactgccgccacaattgtggctgccggtgccgggtgtataattgcaaaacatgggaatagagctttaacttcaaaatctggatcttctcaagtcttggaagaattaggtgttaaaattaattctagttctgaaaatattttgaactgtatagataaatcgaatattggctttatgtttgcagctaatcatcactcagctatgaaatatgtagggccagtaagacaaaaaataaaagaaaggacaatatttaatcttttaggccctttaagtaatccaggaaatgttaaaaaacaattaataggagtatttaatacgaaatggctaaaccctcttgcggaaacacttaaaaaattaggttctaaacatgttatgcttgtatgtggttctgatggtttagatgagataacaacaacaacaaaaacatatgttgctgaattaaaaaataatgaaattataaattatgaaataaacccagaagactatggcctcaataaggctgaccccagtgaattaattggggatacaccaacaataaatgcacaaaaaattttaaaacttcttgatggagaaaaaggtgccttcagaaatatagtaatcttgaatgcagcagccgcaatttatgtttttggtattgcggaaaatatcaaacatggagtggaattagcgaataaatcgattgatgaaggcagcgcaaagtcatcattagaaaaacttattaaggcatcaaatgaaaaataa

SEQ ID NO: 239386 - DNA, 419 bp, Unknown
  Bacterial polypeptide expressing nucleotide sequence isolated from the Sargasso Sea
tatgaaagactttattaacaaaataaataataaagaagatctaactcttaacgagatgcaagaagccattaattcaataatgtctggtatgtctgatgatgacgatattgaatcttttcttattggattaaatagaaagggtgtatcagagactgaagttactgctgctgcaattgtgatgaaagaaaaatcattaaaatttgacataggtgatggttcacatattgatacttgtggtactggcggaacaggtcatcatacttttaattgctcaacagcctcgtcttttgttgctgcagctggaggagcaaaaatcaccaagcatggtaataaagcaatttctagcaaatctggtagtgcagattttcttacacagtcaggtgcaaacattaatcatgaaagagaaaaactaatatcaa

SEQ ID NO: 239387 - DNA, 1015 bp, Unknown
  Bacterial polypeptide expressing nucleotide sequence isolated from the Sargasso Sea
atgattgataacgaattacaaaaactaaaaggaaaaattgatttaagcaggcaagaaatgctcgatgtgatggatttaattatgtctggtagcttacaagataatgaaatagaagaatttcttatagcgatgaatgaaaaaggtgcatccattaatgaaatatcttctgcagcttcagtgatgagagataagtcacttaaatttaatattggggatgggactcatatcgatacatgtgggacaggaggaaccggacttcatattttcaactgctcaacagcatcagcttttgttgctgctgcatgtggggcaaaggtcacaaaacatggcaataaaagtatttcaagtaaaaccgggagcgccgactttcttctagaagcaggagcagatatttctcatgatagaagtttattagagagtatttttagaaaaactggctttatattcctttttgctcctttgcatcattcgtcaatgcgatatgtaatgccagcgagacagaaaattggaaagaaaactatatttaatcttttagggccacatactaatccgtgctctgctaggaaacagctgattggagtttacaagagaccactggttgaaactttctcaagcgtagctaaggaacttgaaatggagcatgtaattgttgtccatgggaatgatggattagatgagatctcaattactgatgattcttttataagcgaactcaaggatggaaaaataaaaaactatcaggtatcacctaaagattttggcctaagttatggaaattttgaatccattaaggccttgtctcctcaagaaagctttgaaaaagtatctctagcatttgcaggcagagaaggtcctgtccaagatatgatagctatcaattcagcagctgcattaaagctttcaggcattgtaaagtctcttaatgaaggcgttgagctttctaaatcagccatgaatgaaggcctagctcaatcaaaactcgaaagttatgtaaaaatgtctaataacttatgaa

SEQ ID NO: 239388 - DNA, 994 bp, Unknown
  Bacterial polypeptide expressing nucleotide sequence isolated from the Sargasso Sea
tatgaaagaaattttaaatagattaataacgtacaaaacattgaatgaaaatgagtccaaagaaatacttattagaatttcaaatggagaattaaacaacagtcagatatcttcatttttaactgtatttatgatgagaaatataacccttgaagaattaaaaggatttcgtgatgcgcttcttgaattatgcataaaagttaaccttgaggaatttaatgcaattgatttatgtggaacaggcggagatggaaaggatacatttaacatttcaactttggcttcttttgttactgctggctcgggatgtaaagttgcaaaacatggtaattatggagtctcttcaggctgcggatcaagtaatgttctagagtctcttggattaaaatttacaaatgattacgacactcttagaaatgcaattgataaatctggaatatgttttcttcatgcacctctatttcacccggcaatgaaaaatgttgcaccagttagaagagaattgggaatgaagactttttttaatatgctagggccacttgtaaatccctctatgcctaataaacaaattgttggagtgtttaatcttgagcttgcaagaatatataattatctacttcaaaaaagtaacaaaaaatacagtataatttattcgttagatggttatgatgagatttcattaactaatgatactaaaatttactcaaacaactatgagagaattttaaaatcaaaagagtttgaattagaaaatttaaaagcttctgaaattaaaggtggctttgatattccatcatcatctaaaatatttatgaatgttcttaatggagctggaacagaaagccaaaataatgttgtatgtgctaatgcaggtatcgcaatatctatttcaaaaaatataagtattaaggaaggttttgaattagcaaaggaatctttaatatcaagtaaagcacttgattcattcaataaactaaaaaaaataatggcatga

SEQ ID NO: 239389 - DNA, 994 bp, Unknown
  Bacterial polypeptide expressing nucleotide sequence isolated from the Sargasso Sea
tatgaaagaaattttaaatagactgacaaattatgagaccttaactgaaaaggaagctagtgatattattattcaaatctcagagggtaaactaaatacaagtgaaatatcttcatttctaacaatctttatgattagaaatataactattgaagaattaagtggatttagaaaagctctaattgacttatcattaaaaattgaccttgatgaatttgacactatagacctatgtgggactggaggagatgaaaaagacacattcaatatatcaactttagcatcgtttgttactgctggaagtggagtaaaagttgcaaaacatggaaattatggtgtttcatctagttgtggatccagtaatgtactggaacacttaggtatcaattttactaatgattatgataaaattaaaaatgctgttgataaagcaaacatttgttttcttcatgctccattatttcatcctgcaatgaaaaatgtagctccagttaggaaagaacttagattaaaaacattttttaatatgctaggcccaatggttaacccatctatgccaaaaaaacagatggttggtgtatacaatttagaacttgcaagaatttataactacctctaccagaatactaatattgaatataatataattcatgctttagatggatatgatgagatttctctaacaggaaatactaaagtctattctagatcaaatgaatttattttagaatctaaggattttaatctagacaatatagatgcagatttaattaaaggaggaaaggatgtcgaatcatcatcaaagatttttatgagtgttcttaatggaattggatccaatgaacaagaaaatgttgtttgcgcaaatgcttcaatggctatttcactgtcaaaaaatgtttcaattattgaggcttttgaaattgctaaggaatctattaaaagtaagagtgcattaagatgttttgagaaacttattgaattaatgaaatga

SEQ ID NO: 239390 - DNA, 802 bp, Unknown
  Bacterial polypeptide expressing nucleotide sequence isolated from the Sargasso Sea
tatggatcaaattttagaaaagctaaaaaacaaacaaaatttaacttttgaagaaagtaaatcagcttttgaaatattaatgactggtaaagctacagatgaacaaatttttaattttttaatgcttttatctgaaaaaggtgaagtttctgaagaaatagctggtggtgtttttgtattaagagaaaaatcaaaaagagtaaatgttaatgattgtattgatacctgtggaacaggtggggatggaatgaatacgctcaatatttcaacagcatcggccctgcttttagcgagtatgggtactaaagtagccaaacatggaaataaggctgtttcatcaaaatgtgggtctggagatgttttagaagcacttaagattaaaattaatttagagcctaaagatatagagagagaaattaatactaataattttggttttatgtttgcaccgaattatcatagtgcaatgaaatttgttggacctactcgaaaaaaaattggaaaaagaactatctttaatatgattggtcctttaagtaatccagctcttgttgacagacaagttgttggagtttttgataaaaaattattaaaaatttttgcagaaggacttaaaaatttacagttaaaatttgcttggatagtcaatagtgaagatggattagacgagatatcaccatatgcaaaaacaaatgttgtacaattaaaagatggtcaaatctctgaaattaaaatagatccatattctttaggtgttaatgcagataattttaaaaacttagttggtgatgatgcaaaatta

SEQ ID NO: 239391 - DNA, 190 bp, Unknown
  Bacterial polypeptide expressing nucleotide sequence isolated from the Sargasso Sea
gttgttagcaagtatgggtgttaaagtagcaaagcatggaaataaagcagtttcatcaaaatgtgggtcagctgacgttcttgaagccttaaatataaatatcaactcagaaccaaaacaaatcgaagaacagattaaaattataattttggctttatgttcgcacccgaattaccactcggcaatgaaa

SEQ ID NO: 239392 - DNA, 730 bp, Unknown
  Bacterial polypeptide expressing nucleotide sequence isolated from the Sargasso Sea
ggcttttgttgctgctgcatgtggggcaaaggtcacaaaacacggcaataaaagtatttcaagtaaaactgggagcgccgactttcttttagaagcaggagcagatatttctcatgacaggggtttattagagagtatttttagaaaaactggctttatattcctttttgctcctttgcatcattcgtcaatgcgatatgtaatgcccgcgagacagagaattggaaagaaaactatattcaatcttctaggaccacataccaatccttgctctgctcggaaacagctaatcggagtttacaagagatcactggttgaaactttctcaagcgtggccaaggaacttgaaatggaacatgtaattgtggtccatgggaatgacggattagatgagatctcaattactgatgattcttttataagcgaactcaaggatggaaaaataaaaaactatcaggtatcacctaaagattttggtctaagttatggaaattttgaatccattaaggctttatctcctcaagaaagctttgaaaaagtatctctagcatttgcaggcagagaaggttctgttcaagatatgatagctatcaattcagcagctgcattaaagctttcaggcattgttaagtctcttaaagagggtgttgagttttctaaatcagctatgaatgaaggcctagctcaatcaaaactcgaaagttatgtaaaaatgtctaataacttatga

SEQ ID NO: 239393 - DNA, 673 bp, Unknown
  Bacterial polypeptide expressing nucleotide sequence isolated from the Sargasso Sea
tatgaaatataacataggtgataaagttactaataaaaatgtaaaatatgtaattaaatatttattccaaacagataatataactcatcaggcaataatcatttatcaacttaataaattaattaatgatagtgatatacttttatcattaagagattacatctttaaaaattctaataaaattaagcaatatcctaattctttagatacatgtggaacaggtggagacggattaaaaacgcttaatatatctaccacagttgcaatcttattatcttctgttggaatacccatagcaaaacatggaaatcgggctgctagttcattaagtggttcctcagatattatctctgaattaaaaataccaaatgagaagaattcaaaaaaaattattaaaagaatttcaaatgataaatttgtatatttgaatgcaccatttttttatcctaacttaagtagagttggagaagttaggaaaaaaataggaataaaaacgatatttaattatatgggtcctacattaaatccattaggtgcaaaatttcaaatattaggcacaatagataaaagttctgcagaaattatgtcaaaaatattatcaaaaattaaaaataaaaaatttactatttttttctcagaggatggtttagatgagataagtatatttgctcca

SEQ ID NO: 239394 - DNA, 483 bp, Unknown
  Bacterial polypeptide expressing nucleotide sequence isolated from the Sargasso Sea
tatgagtcaatctattttagctttggtgcaacaaagcttaaaaggcgaaactttgtcttttgagcaaagccaccagtttttcagcgctgtggtcaaaggtgaagtggagcctgtattactgacggccctgctggttgcactgaaaatgcgtggcgaaaaggccgaagaaattgccggagctgcggctgccatgcgcgctgccgcagccacatttcccgctactgtggctggcgctatagattgttgtggcacaggaggtgacggctccaacaccattaatatctccagcacagcggctctggttgccgccagtatgggattgccagtggccaaacatggcaacagaagcgtatcctctcagtcaggttcagccgacttgctggagcaattaggcatcaatatccaaatgagcccggctaccgcagccaatgccttaagccaatgcaacagcagtttcttatttgcgcctttgtaccatgccgg

SEQ ID NO: 239395 - DNA, 505 bp, Unknown
  Bacterial polypeptide expressing nucleotide sequence isolated from the Sargasso Sea
atggatagtttcataaaaaaattaaataacaatcaggatctctcttttaatgaaagtaagtcagcttttaaattacttatggaagggaaagcaaatgaaagtcagatttttgattttttaacatcattatcaaaaaagggtgaagtttctgatgaaattgcgggtggagtttatgtccttagagaaatgtccaagagagtaaatgttaaaaatgcagtagatacatgcggtacaggaggagatggaaaaaatacccttaatatatcaactgcctcagcattattgctaggcggtatgtctatcaaagttgccaaacatggtaataaagctgtatcatcaaaatgtggatcaggggacgttttagaagagttgaaaataaatataaatttagattcaagtgatattgaaaaagaaataaatagaaataattttggttttatgtttgcgccaaactttcatagtgccatgaagtacgtcggtcctacaagaagaagaattggtaaaa

SEQ ID NO: 239396 - DNA, 567 bp, Unknown
  Bacterial polypeptide expressing nucleotide sequence isolated from the Sargasso Sea
agtttttttttgcgccaaattttcatccagcaatgaaacacatcgctccaatcagaaaagcattaaagattagaacagtttttaatatcctcgggccactcacaaacccagccaaaccatccttttatttactaggagcattcagttctgaaatggcgtcactgatggcatccagcttgagcggaatggaaatgagtcgagcgtttgttgtccatggattaaatggttgggacgagccaacacctgcttctaaatttgaactattcgatgtgagcaaagattcaatttcacataaaatcatcgatccgtcagagctcggaatggataaatgcaaagaggaggatctgaaaggtggaacgtctgaggtcaatgcaaaagccttattagaagtttttgatggcaaggacaatggggcacatgaagatgcattggttttgaatgcggctctatctcttcaagttgcaggcaaagcagcagatctcattgaaggaattgaaattgcaaggcagacaattgtgagcggaaaagcaaaagactttgtatcgggtttgacaaatggggattaaa

SEQ ID NO: 239397 - DNA, 985 bp, Unknown
  Bacterial polypeptide expressing nucleotide sequence isolated from the Sargasso Sea
tatgaaatttaaaatagatgacttaataactaagagaaatgttgaatatgctattaaatatttatttgactcagataatatttctcatcaagcaattataattcatcaactaaataaattaattaataatagcgatatacttttatctctaaggaaatttatttttaaaaattctaataaaataaagcaatatcctaattctttggatacatgcgggactggaggtgatgggttaaagacactaaatatatcaacaacagtagctatattattatcatctgttgaaattccagttgcaaaacatggtaatcgtgctgctagctcattaagtggctcctctgatattatttctgaattgaatatatctagcgaaaaagactcaaagaaaataattaataaaataacaaatgataaatttgtctatttaaatgcaccttttttttatccaaatcttagtaaagttggagaagtaagaaaaaaattaggaataaaaacaatatttaattatatgggccccacattaaatccattaggcgcaaaatatcaaatattaggtacagtgaataaaaactcagcagaaattatgttaaaaatactatctaaaattaataataaaaattctacaatttttttctcagatgatggattagacgaaataagtatatttgctccaacaaatttttattttaaaagaggaataaatatcacaaaaaagaggatatctcatactaaatataaaaagtacctttcatctagattaaattttaaggatattaaaggaaatactccctcttataacgcaaacaggctgattgaattatttcaaggaaaaaaagatagttacagagatataactattattaattctatttatgctatgcaaacaataaaacccacttataaatttgatgaatgctatgatatattaactaattctcttgatacgtctaaggctctaaatcatttgaacaatattaaaaagtaa

SEQ ID NO: 239398 - DNA, 370 bp, Unknown
  Bacterial polypeptide expressing nucleotide sequence isolated from the Sargasso Sea
aatggaagacattattaaaaaggtcaaaaataaacaaaacttaaattttgaagaaagcaaatccgtttttgaaaatatgatgtcgggcaaagttagtgatgagcaaattcatgattttttaaccttctcttcagcaaaaggtgaaacgtcggatgaaatagctggtggtgtttatgttttgcgagataaagcaactagagtaaaatctacagatgaaacaatagatacttgtggcacaggaggagatggaaaaaatactttaaatatttctactgctgcagcgctattgctgtctagctttggtataaaagtagctaaacacggtaataaatcagtttcttcaaaatgtgggtctgctgatgttttccaa

SEQ ID NO: 239399 - DNA, 727 bp, Unknown
  Bacterial polypeptide expressing nucleotide sequence isolated from the Sargasso Sea
aatggaacaaattttagaaaaattaagaaacaaaactgatctttcttttgaggaaagtaaatctgcctttgaattacttatgactggtcaggcaaatgaagaccaaatttatgactttttaaccttattatcagataaaggtgaagtgtcagacgaaattgctggaggtgtttatgtgctaagagaaaagtcaaaaagggtaaaagtcacagactgtgttgatacctgcggaactggaggcgatggcatgaatactctaaatatttcgaccgcctctgctttacttttagctagtatgggaactaaggttgctaaacacggtaataaagcagtttcttccaagtgcggttcaggagatgttcttgaggctcttaatatcaaaatagatcttgaaccaagggatatagaaaaagagatcaatgataacaactttggttttatgtttgctccaaactaccatagtgcaatgagatttgttggaccagtaagaaaaaaaataggcaaaagaacaatttttaatatgatcggcccattaagcagccctgctttagttaaaagacaagtagttggagtatttgataaaaaattacttaagatttttgctgaaggacttaaaagtttaaatattaaatttgcatggattgtaaatagtgaagacggtttggatgaaatatcaccttatgctaaaacaaacgtgatacaattaaagaatggagaaatatcggag

SEQ ID NO: 239400 - DNA, 334 bp, Unknown
  Bacterial polypeptide expressing nucleotide sequence isolated from the Sargasso Sea
aatgaaaaagatattagaaaagttatttgatcacaattatttggaatacgaggaatcaaaaaaagttcttaaagaaatctcctcaaaaaaatacaataacagtcaagttgcatcgttcttgacagtgttcaagatgaggaatccatctgttcaagagattgaaggttttcgggatgcgttattagacttgtgtgtcaaaatagatttaagttcagattttgaaacaatcgatttatgtggaactgggggagatggaaaaaatacatttaatatatcgactatttcctcttttgtagtggcaggtgcaggatataaagttacaaaaacatggtaa

SEQ ID NO: 239401 - DNA, 964 bp, Unknown
  Bacterial polypeptide expressing nucleotide sequence isolated from the Sargasso Sea
tatggatcaaattttagaaaaactgaaaaataaaaaagatttaacttttgaagaaagtaaagctgcttttgaaatattaatgacaggaaaagccagtgatgatgaaatttttgactttttaacttttctgtctgaaaaaggtgaagtttcagatgaaatagcaggtggagtttttgttctgagagaaaaatcaaaacgagtaaatgtaagtgattgtattgatacttgtggtactggcggtgatggtatgaataccctcaatatttcaactgcttctgccctacttctagctagtatgggtacaaaagttgctaagcacggcaataaagctgtttcctcgaaatgtgggtccggtgatgttttagaagctcttaaaattaagattgatttagaacctgatgatatagaaaaagaaattaataccaacaattttggttttatgtttgcaccaaattatcatagtgcgatgagatttgtaggacccgtaagaaagaaaattggaaaaagaaccatttttaatatgattggtccattaagtaatccagcacttgcagaaagacaagttgtaggagtttttgataaaaaattattaaaaatttttgcagaaggacttaaaaatttaaatttaaaatttgcttggatagtaaatagcgaggatggattagatgaaatatctccatatgcaatcactaatgttattcaattaaaagatggtcaaatatctgaaataaaaatagatccaaatgctttaggggttaatgcagataattttaaaaatctagtgggtgatgatgcaaaatttaacgctgataagatgattgaaatttttaaaggtaaagataatgatttttcaaaagcagtttgtttaaatgctgcagcaggtttaattgttggagaaaaattttcagacttttctgaagcatataattacacaagagaatttatcctttctggaaaaactttt

SEQ ID NO: 239402 - DNA, 450 bp, Unknown
  Bacterial polypeptide expressing nucleotide sequence isolated from the Sargasso Sea
aatgaaacaattcatagataagattaaaaataaagatgatctctcctttgaagacagcaaagcagcttttgaattattaatggaaggtaaggcaactgaacaagaaatatttgattttttaacacttttatccgctaaaggtgaagtttcaaatgagattgctggtggagtttacgttttaagaaataaatcaaaaagagttaatgtgcaaaattgtatagatacgtgtggcacaggtggtgatgggatgaacacactcaatatttcaacagcttccgcattactgcttgccagtatgggtgttaaagtagcaaaacatggaaataaggcagtatcttctaaatgtggatctggcgatgttttagaggcattaaatatagaaattaatttagaaccaaatgatattgagtcacaaattgaaaaaaataattttggttttatgtttgcacc

SEQ ID NO: 239403 - DNA, 559 bp, Unknown
  Bacterial polypeptide expressing nucleotide sequence isolated from the Sargasso Sea
atttatcatcctgctatgaaaaatgtcatgcctgttaggcaagaacttggttatagaacggtatttaatatattaggtcctctaactaacccggcttctgttaactatcaacttatcggtgtctatgaaaaatcattagctataaaaatgatagaggttcttagaaatttaaatactaaaagagcatgggtcgttcacggatcagatgggactgatgaaatttctatcacaggtgaaacttatgtggttgaacttgataggggtaaaattaaagagttcaaaattaatcctgaagatgttaacttaaaatcatgtgatttttcagaaattttggggggatctcctaaatttaatgcgcaaaaaattgagcaattagtaaatggagaaaagaatggttttttttactcagttattttaaacagtgctgttgcattaaatataagtgaaaaagtaaaaaacattcaagatggaattagattggcttccgatacattactttctgggaaaacaaagaagctaattgaaaacttgagagtaacgaaaacatcgttgcaatgag

SEQ ID NO: 239404 - DNA, 382 bp, Unknown
  Bacterial polypeptide expressing nucleotide sequence isolated from the Sargasso Sea
tatgaaatctgaaataattaaaaataaattatttgaacaaaaaaatttaacttcagaagaaactaaattcatttttaatttaattatgagtgcagagatttcagaaattgatactgccgctattctaattgcattaaaaataaaatctgaaactgcagaagaaatttatggtgctgcaaatattatgaaagaaaaatctctaaagatttctgcttctgatgatactattgatacatgcggaactggtggagataataaaggaacattaaatatttcaacaagttcggcaataatagctgcaagcgctggtgcaaaagttgcaaaacatggaaacagatcaataagttcaaactcaggatctgctgatatgctgaaaaattag

SEQ ID NO: 239405 - DNA, 994 bp, Unknown
  Bacterial polypeptide expressing nucleotide sequence isolated from the Sargasso Sea
aatgaaagaaataatagaaaagcttaaaagcaaacaaaatctatcttttgaagaaagtaaattagcctttgaaatattaatggatggcaaagcatctgatgatgaaatgtttagttttcttactattctctcatcaaaaggcgaagtatctgaagaaattgcgggtggagtttatgtattgcgaaataaatctaaaagggtgaatgcaagtgattgtgttgatacttgtggaactggtggtgatggtaaaaatacattaaatatatcaactgcatcagcgttattgctagctagtatgggtataaaagtagctaaacatggaaataaagccgtttcttctaaatgtggttctggagatgtattggaagcattaaatattaaaattaatttaggaccaaaagaaatagaagaacaaataagtaaaaataattttggttttatgtttgcaccaaattatcatagtgcaatgaaatatgtgggtccgacaagaaaaaaaattggaaaaagaacaatatttaatatgataggtcctttaagcagtccagctcttgtaaatagacaagttgtaggcgtttttgataaaaaattactcaaaatttttgcaaatgctttaaaaaatttaaatattaaatttgcgtggatagtaaacagtgaagatggtttagatgaaatttctccttatgctaaaactaatgttgtccaactaaaaaataacgagatatcagattttattattgatccaaatgaattaaatataaatgctgataattttgaaaatttattaggagataatgcaaaatttaattctaataaaatgattgatatatttaaaggtgaagataatgatttttcaaaagctgtttgtttaaatgcagctgcaggactaattgttatagacaaacatacaaattttaaagactcttacaatgaagctagaaattatattttgtctggaaaaacctataattatttaaattcattacaaaatgcctga

SEQ ID NO: 239406 - DNA, 1009 bp, Unknown
  Bacterial polypeptide expressing nucleotide sequence isolated from the Sargasso Sea
atgagcagtaaatttaagactcttttagacgcaccggcagataacttcgatgagttaaaattctactttcatcacttattaagtggagattgtgatgatgatgaaataattgaatcattaaatgaaatgagtgaatacggaatcaatcagaaaatcctagaacccttaacatctacacttaaagataaatcaagtccattagaaatcggaacaaatgattatattgatacttgtggaacaggtggttctgggttaaatatttttaattgctccacattaagtgctttagttgtagcaaccgctggtgggaaggttttaaagcatggaaataaatctgtaacgagtaaatcaggtagtgcagattttcttcaaagagcaggcattaatttagatcattccatagaacttgttaaagaagcatttgaaattttcaattttgcctttctgttcgctccaagcttccatagttcattaaaacatgtggctaatgctagaaaacaaataaacaaaagaactgcctttaatgtagcaggtcctctggcacacccaggtaacccaaaatttcagataattggcacatcagacaagaaattaaatgaagacattatcaatattttaaaaaaaaggaagcttaaaagagctatggtagttacagctgaagatggtgtagatgaaatatctatatgcagtaaaacatacgtccatgagttaaaaaatgacgaaattaatcaatttgttttagaccctgaagaatttaatatgcaactagctaatcttaatgacattcaagtaaatacagctgaggaagcctatgtatttgggcttgatatcttaaatggtaaaagaggaaatgggtttaatatggttgcattaaatgcaggtgcagctttgtatacactaggaattaataataacctttcagatggaatagagaatgcaattaatgttttacattcaggaagagtattattacttttaaataaatacgcaaagtttactaatcaataaa

SEQ ID NO: 239407 - DNA, 994 bp, Unknown
  Bacterial polypeptide expressing nucleotide sequence isolated from the Sargasso Sea
tatggaaaaaattctcaaaaaactagaaaataaagaagacttaagttttgatgaaagtgtaaatgcgtttgaaacaataatggaaggaaaagctaatgatcaacaaatgcaagactttttaacattattatctgttaaaggtgaacaggcaagtgaaattgctggtggggtatatgttttaagaaacaaatcaaaaagagttaaaattaaagatgcaatagatacttgtggtacaggtggtgacggaaaaaatactttaaatatttcaactgcttcggctttgttattatcagctctaggaattaaagttgctaaacatggaaataaagctgtttcttcaaaatgtggttcgggagatgtattggaaaaattaaaaataaatattaatttagaaccatctgctattgaaaactgcattgataaaaatggttttggctttatgtttgcaccaaattaccatagtgcaatgagatatgtgggtccaattagaaaaaaaattggcaaaaggactatttttaatatgattggtcctttaagtagccctgcattagtaaatagacaagtagttggagtttttgatataaagcttttaaacatatttgctgaagcattaaaaaatttgaaaataaaatttgcctggattgttcatagcaatgatggtttagatgaaatctcaccttatgatattaccaatgtttgtcaattaaatgatggaaaaatagacaatataaaaataaatccaaaagatttaggaataaattcttccaattttgaaaatttgataggaaaagaatctgattacaatgcagaaaaaattattgaaattttttcaggaaaagataatgatttttctactgctgtctgtctaaatgctgctgcaggattgatagtttctgaaaaatttactgattttaaaaacgcttataatcattcgaaagaatttattctatcaggcaaaactttagatcatcttaaaaatattcaaaatgtctga

SEQ ID NO: 239408 - DNA, 546 bp, Unknown
  Bacterial polypeptide expressing nucleotide sequence isolated from the Sargasso Sea
catgattgataacgaattacaaaaacttcgaggaaaaattgatttaagcagccaagaaatgcttgatgtgatgaatttaatcatgtctggtagcttgcaagacaatgaaatagaagaatttcttatagctatgaatgaaaagggtgcatccattaatgaaatatcttctgctgcttcagtgatgagagataagtctcttaaattcaatattggagatggaactcatatcgatacatgtgggacaggaggaactggacttcatatttttaactgctcaacagcatcggcttttgttgctgctgcatgtggggcaaaggtcacaaaacacggcaataagagtgtttcaagtaaaactgggagcgctgactttcttttagaagcaggagcagatatttctcatgacagaagtttattagagagtatttttagaaaaactggctttatattcctttttgctcctttgcatcattcgtcaatgcgatatgtaatgccagcgagacagaaaattggaaagaaaactatattcaatcttttaggaccacatac

SEQ ID NO: 239409 - DNA, 994 bp, Unknown
  Bacterial polypeptide expressing nucleotide sequence isolated from the Sargasso Sea
atgaaaaaattcatagataaaatcaaaaataaaaaagatctttcttttgatgaaagcaaagcagcttttgaactactaatggagggtaaagtgaatgaccaagaaatatttgattttttaacccttttatctgcaaaaggtgaggcctctaatgaaatagctggtggtgtttatgtactgagaaataaatcaagaagagttaatgtgaaaaattgtatcgatacatgtggtacgggtggtgatggaatgaatacgcttaatatttctacagcttctgcaatattactttcaagtatgggagttaaagtagcaaaacatgggaataaagcagtatcatcaaaatgtggatccggtgatgttttagaagctttaaatataaaaattaatttagaaccaaaagatattgaggttcaaattgataaaaataattttggttttatgtttgctcctaattatcatagcgcaatgaaatatgttggacctactagaaaaaaaattggtaaaagaacaatttttaatatgattggtcccttaagtagtcctgccttagtaaaaaaacaagttgttggtgtatttgaaaaaaaattgttaaaaatatttgctaacgctttaaaaaatttagatattaagtttgcctggatcgttaatagtgaagatggtttagatgaaatttctccatatgctaaaacaaatatagttcaattaaaagataatattatttcagaaattaccattgatccaaatgaattgaaaataaatgcagataaatttgaaaacctcgttggtaatgatgcaaaatttaatgctaataaaatgatcgatatattcaagggtgaagataatgatttttctaaagcagtttgtttaaacgcagctgcaggattaatcgttaatgaaactcataaacattttactgaagcttataatgacgcaagaaagcatattttatcaaataaagttaatgatcatttacaatcaattcaaaatgcctgaa

SEQ ID NO: 239410 - DNA, 741 bp, Unknown
  Bacterial polypeptide expressing nucleotide sequence isolated from the Sargasso Sea
aatgaaacaatttttagaaaaacttaaaaataaacaagatttatcatttgaagaaagtaagtcagctttcaatatactgatgaatggagaggctaatgatgaagaaatatttgattttcttactcttttatctctaaaaggtgaagtatcagatgaaattgctggtggtgtatatgttttaagggagaagtccaaaagagtaaatgttcaaaattgtgttgatacatgcggtacaggaggagatgggatgaatacacttaacatttcaacagcttctgccctattattagccagcatgggcattaaagttgctaaacatggaaataaggctgtttcatcgaaatgtggatctggtgatgtattagaagcattaaacattaaaattaacttagagcctaatgagatagaaaaacaaataaatacaaataattttggttttatgtttgctccaaactatcatagtgcaatgaaatttgttgggccaacaagaaaaaaaataggtaaaagaactatatttaatatgattggtccattaagtaatcctgcattagttcaaagacaagtagttggtgtatttgataaaaaattattaaaaatttttgcaaatagcttaaaaaatttaaaaattaaatttgcttggatagtaaatagtgaggatggtttagacgaaatatcgccttattcaaaaactaaagtggttcaacttaaagatgataaaatttcagaaatattaatagatcc

SEQ ID NO: 239411 - DNA, 493 bp, Unknown
  Bacterial polypeptide expressing nucleotide sequence isolated from the Sargasso Sea
catgagcctttccttattagaactggtacaaaaaagcctgaaaggcgaagcgttatccttcgaacaaagccatgcctttttcagcgcagtcgtcaaaggtgacgtcgaacctgtgttactgacagcgcttttggtcgcgctgaaaatacgtggcgaaacggccgatgaaattgccggtgctgccgctgcgatgcgcgaagctgcaacagcgtttccaacatctgtggcaggcgctatcgactgttgtggcacaggcggcgatggctccaataccatcaatatttccagcactgcagctattgttgccgcaagtatggggttgccagtggccaaacacggcaatagaagcgtatcctctcagtccggttcagccgacttactggagcacttaggcattaatatccaaatgagccctgctactgccgccaaagccaaaagccaaagcaacagcagcttcttatttgcgcctttgtatcatgcgggtataaagcat

SEQ ID NO: 239412 - DNA, 700 bp, Unknown
  Bacterial polypeptide expressing nucleotide sequence isolated from the Sargasso Sea
atgagcattaacgtagcaaaacatggtaataaagcagtttcatcaaaatgtggatctgcagatgttttggaagcattaaatataaatatcaacttggagcctaaagatattgaaaatcaaattaaaaaaaatcattttggatttatgtttgctccaaattatcatagcgcaatgaaatatgttggcccaaccaggaaaaaaattgggaagagaacaatttttaatatgattggtcctttaagtagtccagcaaatgtcgaaaagcaagttgtaggagtttttgataaaaaacttctagatatatttgctggtgccttgaaagacttaaatattaaatttgcttgggttgttaatagcaatgatggtttagatgaaatatcgccatatgataaaactatcgttaaacaattaagaaatggggaaattaacgaaatgattattgatcctaaagaattaaaagtaaatgctgaaggtttcgataaaatagttggaaatgacgcaaaatttaattcacaaaaaattatagatatatttaaaggtaatgatgatgacttttctaaagcagtatcattaaatgcggcagctggtttaataatatccgaaagagaagataattttaaatatgcctatgaaaaagcaagagatcatttgctatcaggtaaaacatattcacatttagagaatttgagagatgcctgac

SEQ ID NO: 239413 - DNA, 739 bp, Unknown
  Bacterial polypeptide expressing nucleotide sequence isolated from the Sargasso Sea
atgactgttgatttcaaagaattcattcaattagcttacgaagatagtttagatttaaaatctactaaaaaagcctttatgcaaatcatgaatggtgaaataagtgagatacaaataagttcatttatttcattgctccaaaagtcaggagttaaatcacatcatgtaattgctgctttagaagtaatgagaaaaaaaatgctctcaatcaatgcaccattaaatacaatggacacatgcggtacagggggtgatggaaaaaatagcttaaatatttcaactgcaacagcttttgttttggcggcctctggcataccaatagctaaacatggaaatcgagcactaacatcaaaatgtggttcagctgatgttttaaaagcattaaacataaatatcgatatggaaacttctaaattagaagattgtctcagaaatataggaatatgttttatgtttgccccaaatcaccatcctgccatgaaacacgttgctcaagtgaggcaattacttggtttccgtaccatatttaatatgttgggtcctttgttaaatccagcaaatgttagaaatcaaatagttggcgtttattctaaagaagtttttgatatttataaggacgtttttgaaaaagaagataaaaatatatgcttaattgctggccatgatgggaacgatgaaatatctctcagcggtattaatttaattttcacaaataagaaaatggaattatgcagtttga

SEQ ID NO: 239414 - DNA, 772 bp, Unknown
  Bacterial polypeptide expressing nucleotide sequence isolated from the Sargasso Sea
catgattgataacgaattacaaaaactaagagaaaaaattgatttaagtaggcaagaaatgctctatgtgatgaatttaataatgtcaggtagcttacaagataatgaaatagaagaatttcttatagccatgaatgaaaagggcgcatccattagtgaaatatcttctgcagcttcagtgatgagagataagtctcttaaatttaatattggagatggaactcatatcgatacatgtggaacaggaggaactggacttcatattttcaactgctcaacagcatcggcttttgttgctgctgcatgtggggcaaaggtcacaaaacatggcaataaaagtatttcaagtaaaactggtagcgccgactttcttttagaagcaggagcagatatttctcatgacagaagtttattagagagtatttttagaaaaactgactttatatttctttttgctcctttgcatcactcgtcgatgcgatatgtgatgccagcgagacagaaaattggaaagaaaactatatttaatcttttagggccacataccaatccttgctctgctcggaaacagctaatcggagtttacaagagatcactggttgaaactttctcaagcgtagctaaggaacttgaaatggagcatgtaattgttgtccatgggaatgacggattagatgagatctcaattactgatgattcttttataagcgaactcaaggatgaaaaaataaaaaactatcaggtatcacctaaagattttggtctaagttat

SEQ ID NO: 239415 - DNA, 994 bp, Unknown
  Bacterial polypeptide expressing nucleotide sequence isolated from the Sargasso Sea
atgaaagaaattttaaataggctaacgaattatgaaaccttatctgaaaaggaagctagagatattattattcaaatttcagaaggcaagttaaatacaagtgagatatcatcttttctaacaatctttatgattagaaatataactattgatgaattaaatggatttagaaaagcgctgattgatttatcattaaaagttgatcttagggagtttgatactatagacttatgtggaactggaggggatgaaaaggacactttcaatatttcaactctagcctcatttgtttctgcgggtagcggaagcaaggttgctaaacatggaaactatggagtatcatccagttgtgggtcaagtaatgtattggaatatttaggtataaattttacaaacgactatgataaaattaaaagagcagtagataaggctaatatctgctttctccatgctcctttatttcatcctgcaatgaaaaatgttgccccagttagaaaagaacttaggttaaaaacattttttaacatgttaggaccaatggtaaacccatctatgcctaaaaaacaaatggttggcgtatacaacctagaacttgcaagaatttataactacctataccagaatactgatgtagaatataatattatacatgccttagatggttatgatgaaatatctttaacaggtaatactaaagtttattctagatcaaacgagtttattcttgaatcaaaagattttgaattagatgatattcataaggattcaattaaaggtggaaaagatgtaaaatcatcatctaaaatttttatgaatgttctaaatggtaaaggaactactgaacaagaaaatgttgtttgcgcaaatgcttcaatggctatctctttatcaaaaaaagttacaataattgaagcttttgaactagcaaaagattcactattatctagtaaagctttagattcattcaataaattaaaagatataatgaaatgaa

SEQ ID NO: 239416 - DNA, 994 bp, Unknown
  Bacterial polypeptide expressing nucleotide sequence isolated from the Sargasso Sea
aatggaacaaattttagaaaaattaagaaacaaaactgatctttcttttgaggaaagtaaatctgcctttgaattacttatgactggtcaggcaaatgaagaccaaatttatgactttttaaccttattatcagataaaggtgaagtgtcagacgaaattgctggaggtgtttatgtgctaagagaaaagtcaaaaagggtaaaagtcacagactgtgttgatacctgcggaactggaggcgatggcatgaatactctaaatatttcgaccgcctctgctttacttttagctagtatgggaactaaggttgctaaacacggtaataaagcagtttcttctaaatgtggttcaggagatgttcttgaggctcttaatatcaaaatagatcttgaaccaagtgacattgagaaagaaattaacgataataactttggttttatgtttgctccaaactaccatagtgcaatgagatttgttggaccagtaagaaaaaaaataggcaaaagaacaatttttaatatgatcggcccattaagcagccctgctttagttaaaagacaagtagttggagtatttgataaaaaattacttaagatttttgctgaaggacttaaaagtttaaatattaaatttgcatggattgtaaatagtgatgacggtttggatgaaatatcaccttatgctaaaacaaacgtgatacaattaaagaatggagaaatatcggagattataattgatcctcaattattaaatattaatactgagaaatttgataatttagttggtaatgatgcaaagtataatgcaagtaaaatgattgaaatttttaaaggaaaagacaatgatttttcaaaagcagtttgtttaaatgctgctgcaggtttaattgtaaatgaaaaatattcagaattttctaaagcttataaatatgctagagaatttattttatcaggaaaaccatatattcatttagaaaaaatacaaaatgcctaa

SEQ ID NO: 239417 - DNA, 442 bp, Unknown
  Bacterial polypeptide expressing nucleotide sequence isolated from the Sargasso Sea
tatggaaattaaaagttttaaaaataaattattctctcagcaagatttaacatcagatgagtcaatgcatctttttgaattgattatgagtggaaaactaagcgagattgatattacagccattttgacttcacttaagttaaagggtgagactaaggatgaaatattaggagctacaaaaataatgagatcaaaatctatgaaaatttcttcttctgtcaatactgttgatacatgtggtactggtggagatatgtcagatactttaaatatatctacagctgcctctttggttgctgcaagttgcggtataaaaattgcaaaacatggaaataaatcagtaagttcaaaatctggttctgcagacatgttagaaaatataggctacaaattttcagacgatccaaaatttatagaggatcaattaagcagaaataatttc

SEQ ID NO: 239418 - DNA, 994 bp, Unknown
  Bacterial polypeptide expressing nucleotide sequence isolated from the Sargasso Sea
aatgaaaaaatttattgaaaaactaaaaaataaaatagatttagattttgaagaaagtaaagacgctttcgaaattttaatggatggaaaagctactgatcaagaaatatttgactttttaacattattatctgcaaaaggcgaagtctctaatgaattagcaggaggcgtttatgtaatgaggaacaagtcaaaaagagtaaatgtaaaaaattgtttagatacttgtggtacaggaggcgatggtatgaatactttaaatatatcaacagcctctgcccttttgttatcaagcatgggaattaaggttgcaaaacatggaaataaagctgtttcatcaaaatgtggttccggtgatgttttggaagctttaaaaattaaaataaatttagaaccaaatgaaatagagaaacaaataaataaatataattttggatttatgtttgctcctaattatcactctgcaatgaaacatgtcgggccaactagaaaaaaaattgggaaaagaactatatttaatatgattggacctttaagtagtccagcacatgttaatagacaggtaattggagtttttgataaaaaattgctaagaacatttgcagaagctctaaataatttaaatgtaaaatttgcttggattgttaatagtgaagatggattagatgaaatttctccttatgcaataactcatgtttatcaagttaaagatggcaaaatatcaaaattaactatagatccaaaaaaattaaacataaatgctgatagatttgaaaatttaattggaagtgacgctaattttaatgcagacaaaatgattgatatttttaaaggtacagataatgatttttcaaaagcagtttgtttaaatgcagcagccggtttaattgtaatggaagtaaattctagctttaaagagtcttatgaggcagttagaaagtttattctctcaggtaaaactatggattatttacaatcaattcaaaatgcctga

SEQ ID NO: 239419 - DNA, 763 bp, Unknown
  Bacterial polypeptide expressing nucleotide sequence isolated from the Sargasso Sea
atgaaagatattttagaatatttatttgagtacaataaacttgattatgatcaggcaaaaaaaatacttattgagattaattccaataagtattcaaattcagagatatcatcattcatgacagtttttaaaatgagaaatccatcaattgaggaaatggaaggatttagagatgctcttttagaactttgtgtaaaaattaattttgatcaatttaacactgtagatctttgtggtactgggggggatggtaaggatactttcaatatatcaacaatttcatcttttatagtagctggcgcaggattcaaggttacaaagcatggaaattatggtgtgtcgtctaattgtggatccagtaatgttttggaatatttaggtgtaaaattcactaataatgaatctcatttaaaaaaatgtttagacaaattcaatatatgttatttacatgctccattattccatccttcaatgaaaaatgttgcacccataagaagagagctaggattcaagacattttttaatcttttaggtccattggtaaatccttcacgcccaaataatcagctaacaggtgtttataatttagaaatagcaaggatttatggttacatttttaaaaatactcaaattaatttttcaattgtatatgcccttgatggttatgatgaaatctctttaactaatgattttaaattaataacgaataatcatgagatcatttcagactcaaaattcttcaattttcaaagaacatcaagtg

SEQ ID NO: 239420 - DNA, 690 bp, Unknown
  Bacterial polypeptide expressing nucleotide sequence isolated from the Sargasso Sea
gagttgcaaaacatggaaataaagcggtttcatcaaaatgtgggtctgctgatgtacttgaagcattaaacattaatataaatttagaaccacatcaaattgagaatcaaataagaaaaaataattttggctttatgtttgctccaaattatcactcagcaatgaaatatgttggtccaacaagaaaaaaaattggtaaaagaacaatttttaatatgattggtccattaagtagtccagcacttgttgatagacaagtaattggtgtctttgacaaaaaacttctaaaaatctttgcaaatgctcttaaaaatttaaatctaaaatttgcatggattgtaaatagtgaggatggtctggatgaaatatcaccatatgctaaaactcatgttgttcaattaaaaaataatgaaatttctgaatttaatatcgatccaaatgaattaaatgttaatgcagataaatttgaaaatttaataggaaatgatgctaaatttaactcagataaaattttaaatatttttcaaggagaagacaatgatttttcaaaagctgtatgtcttaacgctgcagctggactaatgatttccgaaaaatataatgattttaaagttgcatataatttttctacagattttataaaatcgggatcagcatttgaatatataaggaatttacaaaatgtctgaa

SEQ ID NO: 239421 - DNA, 994 bp, Unknown
  Bacterial polypeptide expressing nucleotide sequence isolated from the Sargasso Sea
atgaaacaattcattgaaaaaattaaaaaaaaagaaaatttaacttttgatgaaagtaaaactgcttttgaattattgatggagggtaaagcagaagaccaagaaatatttgattttttgacacttttatcagctaaaggtgagtcttcagatgaaatagctggtggagtttttgttcttagaaacaaatctaaaagagtaaatgtagaaaactgtgttgatacatgtggaactggtggagatggaatgaatacacttaatatatcaacagcctcagcattattactttcaagtatgggtgttaaagtagctaaacatggaaataaagctgtatcctcaaaatgtggatctggtgatgttttagaggctttaaatataaaaataaatttagagccgaatgatattgaaaatcaaattaatgatcataattttggcttcatgtttgcacccaactatcacagcgcaatgagatttgttggacctacaagaaaaaaaattggaaaaagaactatattcaatatgatcggacctttgagtagccctgctctagtaaaaagacaagttattggtgtttttgataaaaaactattaaaaatattcgctgatgctttaaaaaatttagatattaaatttgcttggatagtcaatagtgaagatggattagatgaaatttcaccttatgctaaaaccaatataattcaattaaaagatggtgtgatctctgaaattattattgatccaaataagttaaatataaatgcagataagtttgaaaatctcattggtaatgatgcaactttcaatgcagatagaataattaatatatttaaaggtgaggataatgatttttctaaagcagtttgtttaaatgctgcagcaggattagttgttaatgaaactcatcagaattttgataaagcttatgacgatgctagaaaacacattttatcaggtcaaacatttaatcaactagagaaaattcaaaatggctgaa

SEQ ID NO: 239422 - DNA, 997 bp, Unknown
  Bacterial polypeptide expressing nucleotide sequence isolated from the Sargasso Sea
atgaaacaattcatagataaaattggagcaaaacaagatttaacttttttagaaagtaaagaggcgtttaaaaaattgatggaaggaaaagctaatgatcaagagatatttgactttttaactctattatcagaaaagggcgagtcctcagacgaaatagctggaggtgtttatattttgagagagaaatctaaacgggtaaatgtagataattgtatcgatacatgtggtacaggtggagacggtatgaacactttaaacatttctactgcatcagctttattattagctagtatggatattaaagtagcaaaacacggtaacaaagctgtttcatcaaaatgtggatctggggatgttttggaagctctaaatataaatattaatttagagccaaatgaaattgaacaacaaatttataaaaataattttggtttcatgtttgcgcctaattaccatagtgcaatgaaatttgttgggccaactagaaaaaaaattggaaaaagaacaatttttaatatgattggacctctaagtagccctgcattggttaaaaaacaagttattggtgtatttgacaaaaaacttttaaaaatattcgcaaatgctttaaaaagtttaaatatcaagtttgcctggatcgtaaatagtgatgacggattagatgaaatatcaccgtatgcaaagactaaggttatgcaattgaaaaataatgaaattacagaaatcataatagatccaaaaaaatttaaagtaaatgcagataaatttgataatcttgtagggcaagatgcaaaatttaatgctgaaaaaatgttgaatatctttaaaggggaagataatgatttttcgaaggcagtatgtttaaatgctgccgcaggattagttgtatctgaaaaatatgaaaattttgagttagcttataattacgcaaggggtttcattaaaactggagctccttataaacacctactaaaaatacaaaatgtccagtaac

SEQ ID NO: 239423 - DNA, 481 bp, Unknown
  Bacterial polypeptide expressing nucleotide sequence isolated from the Sargasso Sea
gatgaacgagcatattaagccattaattgaagcagcagcgagcggtccattaagtcatgatgaggcagttaatgcctttgaaatactatttgaaggctcagcaacactggctcaaattgggggcctattaatggctatgcgaacgcgcggtgagagtgtaacggaatatgcagcagcagcttcggttatgcgttccaagtgtataaaagtaaaagcaccaaacaattccatagacatagtaggaaccggaggggatggagtaggaactttaaatatttcaacagcaacagcgtttgttgtggctggagctggtgtcactgttgctaaacatggcaataaaaatttaagttcaaaatcgggagcggcagatgcattgtcagctagcggtgttaacgtgatggttggaaaagaaatcgtggagaaagctatagcagaggttggcatcggatttatgatggctccaatgcatcacccagccata

SEQ ID NO: 239424 - DNA, 838 bp, Unknown
  Bacterial polypeptide expressing nucleotide sequence isolated from the Sargasso Sea
atgtatagttttaaagagataatttcttcactgaataataaaaatgatttatccaaagatgaagcattctttatctcggaaagtatgtttaaaggaactctatctgattctgaaatcaaaaatgtgctggttgcattgaataccaagggcatatgcacggatgaaatagtcggatttgcaaaagccatgagaaaaatatcaactaaagttgtaactgatgaaaaagttattgattgctgtggcacaggaggtgacggcataaatacattcaatatatctacatgctctgcttttatctcagccgcctcgggagtgaaagttgcaaaacatggcaataaggcaatcacaagcaattcagggagtgcagacgtgcttcatgatgctggcgcaaaacttgatttgtctccagaaaaagtaagccagtgcatcaacgaggttaattttggattcatgtttgcaccattacatcatcaagctatgaaaaatgttgcagcatctagaaaagaaattgccccaaataagaccatatttaatatgttagggccgattacaaatccagcgaatgcacaaattcaacttatcggggtatttggtaaaagtgcaatgcaccttgtggcagactcactcatggagttaggaacatccagggcaattattctaaattcaagggatggaatggacgaagccagtatttatgctgaaacagacataatagaaataaaagatgatgttaaaactcagtacacaattaatccaaaagactatggcatatcaggaaaaaatatagatagcataaaaacaagcaatgaaaggagtagtcttgattttatgctatcta

SEQ ID NO: 239425 - DNA, 874 bp, Unknown
  Bacterial polypeptide expressing nucleotide sequence isolated from the Sargasso Sea
ctgggatcaaatctcacagaaagtgagatgtctaaagtaatgttggacttactagagggtaaaactacagatgctcaaataggagcatttttgatagctttaaatatgaagggcgagtcagtcgaagaggttttaggaggcgctaagatcatgagacagctttctgctaaagttgaagttaaaacagacaatttagttgatacttgcggtacaggaggttcgggtattggaatatttaatgtttcaaccactgccgcatttcttgcttgcgcttgtggtgctagggttgcaaaacatggaaataggtcagctactagaaatagtggaagtgcggatttattggaagcagctggcgtatctttggaactaagtccttctcaagtttcgcactgcatagagagtgttgggttaggttttatgtttgcaccaagtcatcatagtgctatgaaacatgtgatagggccgagaaaagaaatagctcataaaagcatttttaatatattaggacccttaacgaatcctgcatcaacacctaatcaagtaatgggagtgtatgaagaaaaatggatgcaaccggtagcagaagttcatctatccctcggaagcaaaaacgttatggttgtccattctgaagataatctagatgaaattagtatatcttctaaaactaaagttgctgaattaagagaagggaaaatttccagatacgtcatttctccagaagattttggtttagaactccagtctttagacgaactcaaagtaaattctccagaagaaagtttgtctatggccaagaaagctttaaaaggagaacatactgcagccagctccatggttgctttgaatgcaggggctgccttgtatgtttctg

SEQ ID NO: 239426 - DNA, 822 bp, Unknown
  Bacterial polypeptide expressing nucleotide sequence isolated from the Sargasso Sea
gatgattgaatcaataaaaaaagttgtaaaaaaagaaaacctcaacgagaatgaagcttttgaaattatgctagaattaatgaaaggaaatctagatgacgttcaaattgcagctttattagttggtttaaggtcaaaaggagaaacagttgatgaaataactggttttgcaaaagctatgcgacatactatgattgaattagatcttaattttcctgctattgatatgtgtggtacaggcggagattattctggaacatttaatatttcaactgcatcatcaattgttgtggctggagcaggaataaaggtagctaaacacggtaatagatctatgacatcaaaatcaggttcagctgatgttctcgaagcattgaacgtagatataaataaatcaaatgaaaattgcattcgaagtttagaaaaaaataatatatgcttcatgtttgctccaaattttcatccagctgtaaaaaatgctatgaatgttagaagtaaattaaaaattaaaacagttttcaatattttaggtccattatgcaatcctgcaaatgttaaaaatcaagcaatgggagtttttgaaccatcattgactaaaattcaaacacaagttttaaaaaatttaggttcaaagaatgttatggtttttaacggagacgatggccttgatgagcttactacaacttgcgattctaatatttcttattttttaaatgatagtaaaattatcaatttaaaatttgatccaaagtctataggaatttcattgtccaaacatgaagatttacagggaggtacttcagacattaatgcaaaaattat

SEQ ID NO: 239427 - DNA, 814 bp, Unknown
  Bacterial polypeptide expressing nucleotide sequence isolated from the Sargasso Sea
atgagagagaaatctttaaaaataaactctccgcaaaatacaattgatacttgtggtacgggtggagatatgaaagacacattaaatatatcaacaagtgcagcaatagttgcggcaagtgctggcgttactatagcaaagcatggcaatcgttccgttagttcaaaatcaggctctgcagatatgctagaaaaaataggttataaaattacaaataatgtagaagatttagaaaactcattatccaataaaaatttttgctttttatttgctcagaatcatcattctgccatgaaaaatgtaattaacgttcgtaagaatttggctactcgcacaatttttaatttattaggcccgcttactaatcctgctaaagcaggtaaacagcttttaggagtctattcaaaaaatttagtttctatgcattgtaattgtttaaaagaattaggatctgaaaaagcgatggttgttcacggattggatggtttagatgaaataagtttatcagacaatactctaattaatgaattgaaagataataaaattttggaatatagttttgatccaagagactatggttatgatttaattaaattagaagatataaaaggtggagatccagaatataatgcaaattgctttaataaaatgattaacggcgattacagagaatttcaaatgattgtagaaataaatgcaggagcggcaatatatttatccaatttaagaaataatctaaaagatagttttgaattagcaaaaaaaacaattgaaggaaggaattacaaaaaattttgtaaactcactaattaat

SEQ ID NO: 239428 - DNA, 796 bp, Unknown
  Bacterial polypeptide expressing nucleotide sequence isolated from the Sargasso Sea
ttcttcagagcttatcgatattgtgggaacaggtggagacggttcgcacagctttaatatatcaacaggcgcagcattgctgagcgctgcttgtggacttaaagttgcaaaacatggcaatcgatcagtctcaagcaaatccggaagcgctgatttactcgagtttcttggctatcgctttccaatggatgcagatggcgtcaaagcacaaataaagaaaaacgggtttagctttttatttgccccaaactttcatccggcaatgaaacatattgcgcctatcagacaagctttaaaggcaagaactgttttcaatatccttggaccacttacaaatccagccaacccatctttttatctgctcggtgcatttagttctgaaatggcatcactgatggcgtctagtttgagtggtatggacatgaaccgtgcatttgtaatccacggattaaatggttgggatgagccaacaccggcttctaattttgaactattcgatgtgagagagggttcaatttctcacacaatcattgatccgtctgaatacggaattaagaaatgcaaagaggaggatctgaagggggggacatccgaagtgaatgccgaggcactgttaaaagtttttgagggcaaagacaaaagcgctcatgaagacgcattgattttaaatgccggtttagctcttcaagtttcaggtgaagcaaaagagctgagagatggcatagaaattgcaaaagaaacaattaagagcggcaaagcagaagactttctatcaagcttgaggaacaatgagtaa

SEQ ID NO: 239429 - DNA, 673 bp, Unknown
  Bacterial polypeptide expressing nucleotide sequence isolated from the Sargasso Sea
atggataaatttttagataaattaagaaataaacaaaacttatcatttgaagaaagtattaatgcttttcaaattttaatggatggaaaagcaaatgatgacgaaatattcaaatttttgacttacctttctgaaaaaggcgaggtttcagatgaaattgcaggaggtgttgcggttttgagagacaaagcaacaaaagtgaatgtgcagaattgcattgatacttgtggaacaggtggtgatgggaaagatacattaaatatttcaactgcctcagctttgttattggcaagtatggaggttaaggttgcaaaacacggtaacaaagcagtttcgtccaaatgcggctctgctgatgttttagaggcattaaaagtaaatatcaatttagattcaaaaggtgtagaaaatcaaataaataaaaaccattttggtttcatgtttgctcctaactatcatagtgccatgaaatatgtcggaccaacaagaaaaaaaattggaaaaagaactatatttaatttaattggtccattaagcagtccagcaaaagttgagagacaagtagtgggtgtatttgatagaaatttactcaaaatattttctagcgcattaaaaaacttaaatatcaaatttgcttgggtagtaaacagtgaagatggtttaaatgaaatat

SEQ ID NO: 239430 - DNA, 817 bp, Unknown
  Bacterial polypeptide expressing nucleotide sequence isolated from the Sargasso Sea
tatgattcaagattttattaatcagctagaaagaaaagaggaccttgatttccattcaatgcagtctgcgattgaatcaatcatgactggagaggttgatgatctctctattgaagcatttttgctggccttgaatgaaaaagggattcaagaaactgagattactgctgcagctagagtcatgaaagaaaaatctttaacttacccattaggagatggagatcacatagatacttgtggcacaggaggttcaggccttcatacttttaattgctctacggcttcatcttttgtggctgctgctggaggagccgcagtaaccaagcatggtaataaggcagtatccagtaagtctggtagcgcagatttgttgttagccgctggagctgacatagcccatgatcgagcaaagttggaaaatatttttaagagagtgggttttgtttttttgtttgcccctttgcatcatgagtcaatgaaatatgtgatgcccgcaaggcaaaaaattggaaagaaaaccttgtttaatttgctaggccctcatacaaatccatgtggtgcaaaaaggcaaatcctaggcgtttaccaaaaagatttggtgagaacttttgcatcggttgcaaagaatttatctatggaacatgttcttattgttcatggtttcgatggtttagatgaaatttctatcaccgactccacatatgttgcagagctaaaggataatactatttctgaatatgaaatctctccaaaggattatggtttatctcttggaacactgcctgaaatctcagccacttcaccggatgacagttgc

SEQ ID NO: 239431 - DNA, 816 bp, Unknown
  Bacterial polypeptide expressing nucleotide sequence isolated from the Sargasso Sea
aatgacaaaagaaattttagataaattatgcaactttaatgatctaagcgaaaaagaagttaatttttttttctctgaattgatgtcaggaaatttatcagaaggtatttctgcagcaatattagttgcactaaaaattaaaaagcccagtaaagaagaaattttttatgcttcaaactatttattaaactctctggatttaaattcaactagaaataataactatattgatttatgtggaacaggaggagatggaaaatcctcaattaatgtttctactatttcatctctaatactttctagccttgatgttaaagtcgcaaaacatggaaatagatctgtttctagtaatgttgggagtgcagatttatttgaggcattaaatgttagttttgataaagattataaagatgcattagtgaatattaaaaataaaaatttaacttttttattcgcaccaaatttccattcatcgatgaaaaatgttgcaaaaataagaaaagacattgcaactaggaccatatttaatgttttgggtcctttgattaatcctttaaaaccatctcatcaattattaggggtatatgattctcagcttttggagccaatagctgaaaccctaatgctccagggcttaaattctgcgatggtagtccatagttttgatggaatggatgaaatttctatctcagataaaactcatgttattgagttaagaaatgataaaatcagtaaatatgtttttaatccaacagattatggttttacaattgggaatagtgataaattagttatcaaaaatgttgaggaatcaaa

SEQ ID NO: 239432 - DNA, 658 bp, Unknown
  Bacterial polypeptide expressing nucleotide sequence isolated from the Sargasso Sea
atggatgttaaagattttaaaaactatatatttctaattactgaaaaacaaattttaacttatgaagaagcaaaatcttgctttaaatttattatgtctgggaaagcaacagatatattaatctcatcatttttaacttcactaaaaataaatttaatgattaatggcttttcatctgaaataatagctgctggagctgatataatgagagacaaagctatcagtgttaaaactccagaaaatgcaatagacgtagttggtactggaggcgatgggcacaatacttttaacatttccacagctaccgcatttgttgttgctggagcagatgttccagtagcaaagcatggaaattattcagcgacctcaaaatctggcgccgcaaacgttttagaaagtctcggcgttaatataaataatagcgttgaaaatattcaagattgtataaatgagtgcggaatttgttttttcttcgccccaaaacaccatagtgcaatgaaatttgtaatgaatgttagaaaagaactaggatttagaacaatttttaatcttttaggaccattgtcaaatcctgggtttgttaaaaaacaaatagttggagtttattcaaaagaattattgataccatttgtaaaagcacttaaaaaacttggttcaa

SEQ ID NO: 239433 - DNA, 727 bp, Unknown
  Bacterial polypeptide expressing nucleotide sequence isolated from the Sargasso Sea
cgccgccggcggttatgtggccaagcacggtaaccgcggcgtgtcctccaaaagcggcagcgccgacctgatcgaaaaggccggcatcaacctggacatgaaaccggaagaagtagcccgctgcgtggagcagatcggcgtcggcttcatgttcgccccggcccaccacggtgccatgaaacacgccatcggcccgcgccgggagctgggctgccggaccatcttcaatatccttggcccgatgaccaatccggccggcgtcactcgccagctgatcggcgtgttcaccagggaactgtgccgcccgatggcagaagtgatgcagcgcctgggcgcagaacacatcatggtggtctgctcgaaggatggcctggatgaaatcagtctggccaccgttacccatgttgcagagctgaaggatggcgaaatcaccgaatacgacctgaccccggaagacctgggcatcaagagccagtcgctggtgggtctgacggtagacggtgctgacgaatcgctggcattgatcaaagccgccttcggccgcagccacgacgaaaccaccgagaaagcccgagacatgatcgccctgaacgccggcgcggctatctatgttgccggcctggccaagaccaccaaagaaggcgtggatatggcgctggacgcgatgggctctggcctggcggcgggcaagatgtcggaactggctgacttttctcagtgcttttaa

SEQ ID NO: 239434 - DNA, 726 bp, Unknown
  Bacterial polypeptide expressing nucleotide sequence isolated from the Sargasso Sea
aatggatcaatttttagaaaagctcagaaacaaaataaatttaaattttgatgaaagtaaagatgcatttaagattttaatgaatggtgatgctagtgaacaacaaatttatgattttttaactttattatcagaaaagggtgaggtttcagatgaaatagctggaggtgtatatatattaagagataaatcaaaaagagtaaaagttgaaaattgcattgatacctgtggtactggaggagatggaaaagatactcttaatatttcaactgcatcagcgctgttgttagcaagtatgggtgttaaagtggcaaaacatggaaataaagcagtttcatcaaaatgtgggtcagctgacgttcttgaagccttaaatataaatatcaacttagaaccaaaacaaatcgaggaacagattaaaaattacaattttggctttatgttcgcaccgaattaccacttggcaatgaaatatgttggtccaacaagaaaaaaaataggaaaaaggacaatttttaatatgataggtccattaagtagcccagcacttgttgagaggcaggtaattggtgtttttgataacaaacttctaaaaatttttgcgaatgctcttaaaaatttaaatttaaaatttgcgtggattgtaaatagtgaagatggtctagatgaaatatcaccttacgccaaaactaatattgtacaattaaaaaataatgaaatatctga

SEQ ID NO: 239435 - DNA, 604 bp, Unknown
  Bacterial polypeptide expressing nucleotide sequence isolated from the Sargasso Sea
aatgcaaatacaaactgcgctcgcaaaaattgtggaaagcaataacctgagccgcgaagaatctgctcaagtcttcaacctaataatgactggcgaaacgactgacgctcagattggcgcctttcttgctgcgatgcgcgtcaaaggagagacagcagaagaactggcaggtgcagcagaaaccatgcgaaatctgtcctctaaagtccccctcaattcaaccgagaaactggtcgacacatgtggtaccggcggcagtggtctgaaattgttcaatatttcaactgctgcagcgtttgttgcgtcagcaagcggcgccctagtcgccaaacacggtaatcggaaaatgaccagcttctgtggtagcgcagacgtattagaggcggcagggatcaaactggaattaacgcccgaacaaattgcggattgtatcaatcagatagggattggcttcatgtttgccccggttcatcacagcgccatgagatatgcaggccccgttaggcaggagctcagcatcagaaccatgatgaatatacttggcccaatgactaatccagctcaggcaaaaagacaggtaattggggtttttgctcgagagtgg

SEQ ID NO: 239436 - DNA, 865 bp, Unknown
  Bacterial polypeptide expressing nucleotide sequence isolated from the Sargasso Sea
ggttgatgatattgccgctgctgcaaatgtcatgcgacaaaaggctcaaacaattaaagcacccgatatagcaatggatattgtcggtacgggcggtgatgggtttggtacttataatatttcaactgcatgcgcctttgttgtggcgggttgcggaattccggttgccaaacacgggaataaagccgtatcgtcaaaaagcggggcggcggatgttctctcctcacttggcattaagcttgattgcgatatgtcgcttgttgaacgagcactggtagaggcgaacattacctttttgatggcgccacgtcatcatgcggcaatgcgccatgttggcccaactcgtgccgcacttggcgtacggacgattttcaatttgctgggaccattatctaatccagccctagtaaagcgcatcatggttggggtttttgatcagagctattgcgcctctttcgcccatgtacttgcccagctgggtgcaacgcatgcgtgggttgtccatggggcagacgggctcgatgaagttagcacaaccggcaaaacccatgttgccgcactgcataatggaaccgtaacagaatttaccatctcacctgatgatattggcctccgtacagcaagccttgaccagcttcgtggcggtgatggggaccataatgcgcgctatcttcgcgcgcttttagagggcgagaccggtccttatcatgatgttgtattgttcaatgcagccgcagcacttgttgcgggcggtcatgcagaggacttgcaagaagcagcaatacaggcgcaggaggcacttgactccggaaaggcccttgcagcccttgataatctgattgccatcacaaatgataaggcctaa

SEQ ID NO: 239437 - DNA, 745 bp, Unknown
  Bacterial polypeptide expressing nucleotide sequence isolated from the Sargasso Sea
ataagcaaaatagtctcaaatcaagatcttcgaaaacaagaaatgtcttctgttatgtttgagatattagaaggtaaggctactgattctcaaatcggtgcttttttaatagctttatcgatgaaaggagaaacggttgaagaagtaataggcgcagttgaagtaatgagagaactttctgaaaaagtcaaaactgatttaactcacctggtagatacttgtggtacaggaggatcaggaattggtatttttaatgtatcaacagcttctgcatttgttgcaagtcaatgtggagcaaaagtcgcaaaacatggaaacaggtcagcaacgaggagcagcggtagcgcagatcttcttgagcaagcaggtgttcctcttacacttaaaccctctgaagtggcagattgtataaaaaatatcggtttaggattcatgtttgctccagcccatcatagtgccatgaagcatgttgttggtcctagaaaagaaatcgctcaaaagagtattttcaatgtccttggaccgttgactaatcccgcatctgctaaaagacaagttatgggtgtttatgacaagaagtggatgaagccgattactaatgtattaaaagaattgggaagtgaacatacgatgattgttcactctaaagatggcttggatgaaattagtatcgcctctccaacgttagttatagagatgaaagatggagatatctctgagtatactattaacccccgaagacttt

SEQ ID NO: 239438 - DNA, 772 bp, Unknown
  Bacterial polypeptide expressing nucleotide sequence isolated from the Sargasso Sea
gatacgtgtggaactggtggagatatgagtggaacattaaatatatcgactagcgctgcaattgtagcagctagtgctggagctaaaatagctaaacatggaaaccgttcgattagttctaaatctggatcagctgatatgttagaaaaattaggttatagaatttctaataatgtcaaatatttagaagcttcattaaaaaaaaataatttttgttttatgtttgcgcaatttcaccattctgccatgaagtatgtaataaatgttagaaaaatgctaggaacaagaactatttttaatttactcggtcctctaactaatccagctaactcaaaatatcaaattcttggcgtttttgacaaaaagtgggttaaaattcattgtgaagttttaagagatttaggatcgcagcacgcattagttgttcatggagaagatgggttagatgaaatatctttaagcgctaaaacaaaaattgctgaattaagaaatgggagaataaaagaatatacttttaatcccaatgaatatgggtatgatttaataaatctaaaagatattcaaggaaaagatgctggatataatgcacgacaatttattaaaatgctagatggtaaacataaaaaatttcaacatattgtagaattaaatgctggagcagcattatatgttggtggaaaaactaaaaatttaaaagatggtttttccttatcgaaatatgtaattgagaatagtataactaaacaatatttaaataaaataatttcataaa

SEQ ID NO: 239439 - DNA, 598 bp, Unknown
  Bacterial polypeptide expressing nucleotide sequence isolated from the Sargasso Sea
aatgtcaaatatcaaagaaaagttaaaaaaaggtcaaaacctttcttttgaagaaagcaaaattcttttttcagagcttatggaaggaaaacatgatgaaagttcgataattgatattttagaaaatcttttagcaaaaggagaaacaaaagaagagctcgcaggtggtatctacgtgctcagagaaaaagcaaacaaagtaaatacagatgaaaatactatagatacatgcggcactggtggtgatggtcaaaattcacttaatatttcaactgctgcagctatagttttagcaagtatgggtgtaagagttgctaagcatggtaataaggcagtctcatcaaattgtggttcagcggatgtgcttcaagctttaaaaattaaaatcaatttaagccccaaagaagttgaagaaaatattaaaaaactcaattttgcttttatgtttgctccaaattatcactctgcaatgaaacatgtaggacctgctagaaaaaagatgggaaaaaaaacaatatttaatttaatcggccctttgagtagccctgcacaagtaaaaagacaggtaattggagtttttgataaaaaatggatgaaa

SEQ ID NO: 239440 - DNA, 430 bp, Unknown
  Bacterial polypeptide expressing nucleotide sequence isolated from the Sargasso Sea
aatggatcattttttagaaaagctcagaaataaaataaatttaaattttgatgagagtaaaaatgcatttaagattttaatgaatggtgaaggtagtgatcaacaaatttatgattttttaactttattatcagataaaggtgaggtttcagatgaaatagctggtggtgtatatatattaagagataagtcaaaaagagtaaaagttgaaaactgcatagatacttgtggtactggtggagatggaaaagatactctaaatatttcaacagcatcagcgctgttgttagcaagtatgggtgttaaagtagcaaagcatggaaataaagcagtttcatcaaaatgcgggtcagctgacgttcttgaagccttaaatataaatatcaacttagaaccaaatcaaatcgaagaacagattaaaaatgacaat

SEQ ID NO: 239441 - DNA, 657 bp, Unknown
  Bacterial polypeptide expressing nucleotide sequence isolated from the Sargasso Sea
aatgaaagaatatttattaaaaattaatgaaaataatgatttaagttttgatgaaatgaagtcggccattcaaatggttatgacaggacaaattgatcagtcagagatagaattatttcttttaggattaaataaaaagggtatttctgaagatgaaataactgctgctgcttcagttatgaaagagaagtcattaaactttgatattggtgatggaagtcatatagacacctgtggtactggaggtaccggcattcatacttttaattgctcaactgcatcttcatttgtagctgcagctggaggggccaaaattaccaaacatgggaataaagcaatttccagtaaatcaggcagtgcagattttttaattgaagtaggggcagatatcaatcatgatagagaaaaactaattacgatatttaatcaaataggttttgtatttttatttgcaccacttcaccatcaagcaatgaagcatgtcatgcccgcaaggcagaaaatagcccaaaagacaatttttaatttattaggacctcatacaaatccatgcaatgcaaaaagacaggttataggagtatatgatatgagcttattaaaaacttttgcacaagtgtctaaaaatttagatatggagcacgtgcttatcgttcatgg

SEQ ID NO: 239442 - DNA, 767 bp, Unknown
  Bacterial polypeptide expressing nucleotide sequence isolated from the Sargasso Sea
aatggatcaaactttaatattaaataaaattctcgaacatcaaaatctgaatattgaagagagtatgtatatatttaataaaattatgagtggagaattagatgatattaaaattacatctatactaattggtttaaagttaaaaggtgaaacaaaagaagagattatcggtgcagctaaagtaatgagagagaaatctctaaaaataaactctcctcaaaatacaattgatacttgtggcaccggtggagatatgaaagacacattaaatatatcaacaagtgcagcaatagttgctgcaagtgctggtgttactatagcaaagcatggtaatcgttcggttagttcaaaatcaggctctgcagatatgctagaaagaataggttataagattacgaataatgtagaagatttagaaaactcattatcaaataaaaatttttgctttttatttgctcaaaatcatcattctgccatgaagaacgtaattaacgttcgtaagaatttagctacacgtacaatttttaatttattaggtcctcttacaaatcctgctaaagcaagtaaacagcttctaggtgtctattcaagagatttagtttcaatgcattgtaattgcttgaaagaattaggctctgaaaaagctatggttgttcacggatttgatggtttagatgaaataagtttatcaggaaatactctaataaatgaattgaaagataataaagttctggaatatagttttgatccaagagactatggttatg

SEQ ID NO: 239443 - DNA, 528 bp, Unknown
  Bacterial polypeptide expressing nucleotide sequence isolated from the Sargasso Sea
tatgtcaaattcagtaaaaaaactaaaaacaggtcaaaacctttcttttgatgaaagtaaatttcttttcacagaactaatggagggaaaatatgacgaaaattcagtaatagaaatattggaggcatttatcaaaaaaggagaaactaaagatgaaattgcaggaggaatttttgttttaagaaataaagcaaataaagtaattgccgacgaagatactgtagatacttgtggaactggaggtgatggtcaaaactctttgaacatttcgactgcagccgcaattgttttggcaagcatgggtattaaagttgctaaacatggaaataaagcagtatcatcaaattgtggttctgcagacgtgttggaagctttaaaaataaatataaatttaaatcccaaagaagctgaaaataatattaaaaaatttaattttgcttttatgtttgcgccaaattatcattctgctatgaagcacgttggtcccgcgagaaaaaagatgggaaaaaaaactatatttaatttaat

SEQ ID NO: 239444 - DNA, 751 bp, Unknown
  Bacterial polypeptide expressing nucleotide sequence isolated from the Sargasso Sea
tatgaaagataccttaaatatttcaactagcgcagctatagtagcagccagtgctggtgttaaaatagcaaaacatggaaatcgatcagtaagttcaaaatctggatcagctgatatgttagaaaaaataggctataaaatctcaaacgatataaatgaattagaaaaatcactaaacaataataatttttgttttttatttgcacaaaatcatcattcagcaatgaaaaatgtaattaatgttagaaaaaatttaggaacaagaactatttttaatttacttggccccttaactaatcctgcaaatgccaaaaaacaacttttaggcgtttattctaaagatcttgtaaatattcattgtaattgtcttaaagaacttggtactgaaaaagcattagttgtttatggattagatggattagatgaaattactctttcagataaaacatatgttaacgaattaaaagacaataaaattattgaatttatttttgatccaaaagaacatggctatgatttaataaatattgaagatattaaaggtggcgatcctgaatataatgcaaaatgctttaacaaaatgattgctggtaattataagcaatttcaagagattgttgaagtcaatgcgggtatggcaatttatttatcaggaattgtttctaatctaggtgaaggtttctccttagcaaaaaaagttattgaagaaggtattacaaaaaattttgtaaatttattaataaatgaataa

SEQ ID NO: 239445 - DNA, 811 bp, Unknown
  Bacterial polypeptide expressing nucleotide sequence isolated from the Sargasso Sea
gatgtctaactttcaaaacatattggacaatctaaaaaagggtcaagatttatcttcggatgaagcattcataatctctgaaaaaatgtttgaaggatctctagctgatgatcaaataaaagatattcttttgttacttaataaaaaaaatatttgctcaaatgaattaattggtttcgcaagagcaatgagaaaaatttctacaaaagttgaaattaaagacaaggttatagatagctgtggaaccggtggggatggtttgaatacatttaatatctccacatgttcatcttttatagctgcggcttgtggcgttaaagttgcaaaacatggtaataaagctattacaagttcatcaggaagtgcagacttgctgcatgatgctggcgctaagattgacctagctccagaacatgtaagtaagtgtatagagcatataaactttgggtttatgttcgcccctttgcatcatcaggctatgaaaaatgtagcaaatactagaaaaagtattgctccggataagactatttttaatattctagggcctattacaaaccccgctaatgcaaaaattcagttaataggtgtatataataatgaagtgatgcatttaattgctaatgctttactcgagttgggtacattaagagcattaataataaattcaagagatggtatggatgaggcaagtatttatactaaaacagatgtcttagaaattaaaaataatagtattattagctattcaatagatcctaaagattttgggataaggggcaacagtattgaggaaataaaaaacgaactctga

SEQ ID NO: 239446 - DNA, 403 bp, Unknown
  Bacterial polypeptide expressing nucleotide sequence isolated from the Sargasso Sea
aatgaataatttattagaaaagttaattaataaaatagatctaaccgaaaaagaagcctataatatgatgatatctattatgtcaggtgattatgatgatattcaaatatctggaatgctaacggctcttagatgtaaaggggaaaccgtaaaagaaataactggttttgcaagggcaatgagaaaaaaaatggtttcagtaaaattaaatgttccagcaattgacatgtgtggaacaggaggagattcaaaaggtacttttaatatttcaacggctgccacttttgtggttgcgggatcgggtgtaaatgttgcaaaacatggaaatagatccatgacatcaaagtcaggttctgctgatgtccttcaagctttgggtatttctatcaatagggatatcaat

SEQ ID NO: 239447 - DNA, 804 bp, Unknown
  Bacterial polypeptide expressing nucleotide sequence isolated from the Sargasso Sea
cacccgaagatgccattgacgtggtcggaacaggtggcgacggcgcgggtacgctaaatatatcgactgcaaccgcattagtggttgcaggaaccggcgtcccagttgcaaaacatggaaatcatgccgcgtcatcaaaatccggagccgcagacgtgctctccgaactaggcataaatctgcaagcagacgttccaacggtcgaacgagcaatccgagaagctggaataggttttttattggcgcccagttaccacagttcaatgcgacacgtcggaccaactcgcgtcgaaatgggcgttcgcacaatatttaatattttaggacctctggcgaaccccgcatcagtcaaacggctgttggttggcacatttgcccatgaatgggtcgagccgatggcgcaagttctcggaaatttgggcacggaacgcgcctgggttgttcatggcgcagacggccttgacgaattaaccatcaccggaccgtcctacgtcgctgagctctctaatggcaaagttacgaaacgcgagctttcaccttcggatgctggccttccaacggcatcattaaacgacataaagggcggtgcacctgcagaaaatgcacaagctctccgtgagcttcttgacggtcgaaaaggggcataccgaaatattacgctatatggtgcgtctgcagctttgttaattgcaggcaaagtagacacattgattgatggtgccgctttggccgcagccgctatagacgacggtaaagctgcgaacgcattagctaaactcgtcgaaattaccaacgcatcatgag

SEQ ID NO: 239448 - DNA, 745 bp, Unknown
  Bacterial polypeptide expressing nucleotide sequence isolated from the Sargasso Sea
aatggaagggaagcacgatgataatgcgataattgatatattagaatcttttttaaaaaaaggggaaactaaagacgaattagctgggggaatttatgttctaagagataaagcaacaaaagtaagagcgaaccaagaaactattgatacatgcggaacaggtggagacggtcaaaattctttaaatatatcaactgctgctgcaattgtgttagcaagcatgggggtaaaagtagcgaagcatggtaataaagcagtttcatcaaactgtggttctgcagatgtgctagaagctttaaaaattaatatcaatttaaaaccaaatgaagctgaagaatgtataaaaaaatataattttgcttttatgtttgctcctaattatcattcagcaatgaaacatgtgggcccagcaagaaaaaaaatggggaaaaaaacgatttttaatttaattggaccattaagtagccctgctcaagtaaaaagacaggttgttggagtgtttgacagaaaatggatgaaaccttttgcggaggctttaaaagaaaataacgttattcacgctttaattgttcatagtgatgacggtatggatgaaatttcaccttttgctaagacaaatgtaattgaacttaaggacggaaatataaagaacttttctatcgatcctaaaacattaggtattagtgaaggtgataaaaaaaatattaaaggaaaaaatgctgaatataattcagaaatgattgtt

SEQ ID NO: 239449 - DNA, 933 bp, Unknown
  Bacterial polypeptide expressing nucleotide sequence isolated from the Sargasso Sea
gaggtcaacaccatctcgctctgagtgtagtttttttgtaaatcaagtttttagtggaggagtagacaaagatgtcgttacgaaaattctaagattgttcaatgacgtcgggttcaatgctgttcagctatcaggttttgctgaatctatgagaaaagcatcaaaaaaagtcatatgcaagaaagacgtcgtagacaattgtggaacaggtggagatgcaatgcatactttcaatatatctactacagcttcattaattgcatcatgttgcgaggttagtgttgctaaacatggcaacaagtctattactagtaactcgggaagtgcagacttactatctggtgttggtataaacataaatttatcaccggaggcagtgagcaaatgtattgaaaagctaaattttggatttatgtttgcaccacttcatcattcttcaatgagatatgttgctgactctagaaaagagatagcgcctgagaaaactatattcaatctcttaggtcctttgacaaatcctgctggagctaaaaagcaattaataggcgtttatgatccgaagtacatgaatattattgctgagacactatctaacttaggtacagagcgagctagaattgtacattcacatgatggtcttgatgaaataagtttattcgatcaaacctcgataacctcactctcaaataataatataaaatcctacgattttgagccatcagattattttgacatctcaacatctaaaatcgatgacataagagtatccagcattgatgagagtgtcgatatgtttcgcagtgttataaataacgaacctgggccagctagagatatcagtatcttaaattcagctttccttttatcaatagcatatgatgatatctccatttctgaaggaataaaattatgtcggaatgctctaaaaagatc

SEQ ID NO: 239450 - DNA, 451 bp, Unknown
  Bacterial polypeptide expressing nucleotide sequence isolated from the Sargasso Sea
atgcttaacgcaggccctctactagaacaaattatgttgcgagaatcactgtcgcaaaccgaggcatacagcttgtttaacagcatcatgcacggtgagcaaagcgaggtgatgattgcttcagtgctgactgcgctgaaaatgaaaaaagaatctcccagcgaaattgcgggtgcggcgagtgcaatggttgctaacgcgctaccctttcccacgccgtcctatgaatttgccgacatcgttggtacgggcggcgatggccacaacactattaatatatccagtgcagctggggtggttgccgcatcttgtggcgtgaaggtggcgaaacacggtaatcgcagtgtttcgagtaagtctggctctgctgatttgtttcgccagtttggtcttaatttagaaattagcccagaaacttcccgcaagtgcttagatgaagcaaatttcacat

SEQ ID NO: 239451 - DNA, 964 bp, Unknown
  Bacterial polypeptide expressing nucleotide sequence isolated from the Sargasso Sea
aaaattctcgaacacaaaaatctgaatatggaagagagtatgtatatattcaataaaattatgagtggagaattagatgatattaaaattacatcaatactaattggtttaaagttaaaaggtgaaacaaaagaagaaattatcggtgcagccaaagtaatgagagagaaatctctaaaaataaactctcctgaaaatacaattgatacttgtggcactggtggagatatgaaagacacattaaatatatcaacaagtgcagcaatagttgctgcaagtgctggcgttactatagcaaagcatggtaaccgttcggttagttcaaaatcaggttctgcagatatgctagaaaaaataggttataagattacaaataatgtagaagatttagaaaactcattatcaaataaaaatttttgctttttatttgctcaaaatcatcattctgccatgaagaatgtaattaatgttcgtaagaatttagctacaagtacaatttttaatttattaggccctcttacaaatcctgctaaagcaagtaaacagcttctaggtgtctattcaagagatttagtttctatgcattgtaattgcttaaaagaactaggttctgaaaaagcgatggttgttcacggattggatggcttagatgaaataagtttatcagataatactctaattaatgaattgaaagataataaagttctggaatatagttttgatcccagagactatggttatgatttaattaaattagaagatataaaaggtggagatccagaatataatgcaaattgctttaataaaatgattaacggcgattacagagaatttcaaatgattgtagaaataaatgcaggagcggcaatatatttatccaatttaagaaataatctaaaagatagttttgaattagcaaaaaaaacaattgaagaaggaattacaaaaaattttgtaaactcac

SEQ ID NO: 239452 - DNA, 736 bp, Unknown
  Bacterial polypeptide expressing nucleotide sequence isolated from the Sargasso Sea
atggacgaaattattaaaagactcaagaataaacaaaatttaagttttgaagaaagcaaatctgtatttgaaagcataatgtcaggcaaagttaaagaagagcaaattcatgattttttaacttcttcttccgctaaaggggaaacttcagatgaaatcgctggaggtgtttatgttttgcgaaataaggcaacgcaagtaaatgtaccagataatactgtagatacatgtggtaccgggggagatggaaagaatactcttaacatttcaactggtgcagctttattattatctagttttggtacaaaagtggctaaacatggaaacaaatctgtttcttcaaaatgtgggtctgcggatgttttagaaaaattaaatatcaacattaatcttggagctaaacaagtagaaacaagtataaataaaaacaattttggatttatgtttgctccaggatatcactcggccatgaaatatgttgggccaataagaaaaaggattggaaaaagaacaatatttaatttaattggaccactcagcagtccggcaaaagtaaaaagacaagttgtaggggtttttgataaaagattacttaaagtttttgctgaagcacttaaaaatttgaatttaaagaaagctttgatcgtgaatagtcaggacgggcttgacgaaatttctccatatgcaaacactgatatcgcaatgctaagtgatggaaaagttaaagaatctgttt

SEQ ID NO: 239453 - DNA, 478 bp, Unknown
  Bacterial polypeptide expressing nucleotide sequence isolated from the Sargasso Sea
atggatatcaaagaagcaatatcaacagttgtatccggaaaatcactatccataggagatgcatctgctgtaatgaacacaataatggatggagaagctactccttcacaacttggagcttttttgacaggccttcatttaaaaggcgagactccaccagaaattgctggaatggctaatgtaatgcgagaaaaggctctgaatgtacatgttagcgaagatgtagctgatacatgcgggactggcggagacggtaagaatacattcaatatctcaacggctgcagcattcgtagcagctagttgcggaatacctgtagcaaaacatggaaaccgagctgcatcaggatcatgtggaagtgctgatgttttggaagccttaggagtaaaaatagatttagagcctgaggctgtagcaaaatgtataaccgaagtagggatgggatttatgtttgctccagtattccatcccttctaga

SEQ ID NO: 239454 - DNA, 853 bp, Unknown
  Bacterial polypeptide expressing nucleotide sequence isolated from the Sargasso Sea
gaaactgctgaagaaattgcaggcggcgtttatgttttaagaaataaagctgagcaagtaaatgtaccagatataactatagacacttgtggtactggtggtgatggaaaaagtacattaaatatttctactgcctcagcactattactttccagttttggaataaaagtagctaaacatggaaataagtctgtgtcatcaaaatgtggttcggctgatgttttagaaaaattaaatataaatattaatcttggtcctaaagaagtggaaacgagtattaagaactataattttggatttatgtttgctccaggttatcactctgcaatgaaatatgtcggaccagtaagaaaaaaaattggaaaaagaacaatatttaatttaattggtccactaagcagtcctgcaaaagttaaaaggcaagtagtgggggtctttgataaaaaactacttaaaatttttgctgaagcgcttaaaaatttaggtctaaaaaaagcattaatcgtaaacagccaagatggactagatgaaatttcaccattcgcaaatacaaatattgtagaactaagtgaaggaaaaattaaagaatcaattttaaatccaaaagatttaggtatcagtgcagctagttttgataatattgttggaaaagactcaggttttaatgcagacaaaatgaaagaaatatttcaaggaaaagataatgatttttcaattgctgtgtgcttaaatgctgcagcgggtctgcttgtagctgaaaaatcaacctcgttcaaagaaagttacgacaatttaaggaaacatatactttcaggaaaagttattcatcatgttacaaagctagtaaaatgaa

SEQ ID NO: 239455 - DNA, 597 bp, Unknown
  Bacterial polypeptide expressing nucleotide sequence isolated from the Sargasso Sea
catgaaaaaagccgccgaagggatacaaagtcttcttaataaggtcgctgccggtcaaactcttagcgaacatgaagcagaaaacgcctttgatattattatgtctggtgatgcaacccctgcacaaataggaggctttttgatggccttaagggtccgcggggaaaccgtagacgaaatcactggggctgctcggattatgcgttcaaaagctttaatgattaatgctcccgaggatgcgatagatattgtgggtactggcggagacgcgagtggaactctaaacatctctacgggagcagcaattgtagttgcagggtgcggtgtcccaatagcaaaacatgggaatagagccctatcatcaagagcgggggccgcagacgtccttacctcattgggtgtgaacatagactgtgaaatgacactgatcgagaaatcgatccgtgaagccaaaattggatttatgatggcgcctcgtcaccacagcgcgacgcgccacgtcgccggaccacgggttgaactcgcgactcgaactctctttaacattttaggccccctctccaacccagctggcgtcaaaagtcttcttgtaggtgt

SEQ ID NO: 239456 - DNA, 850 bp, Unknown
  Bacterial polypeptide expressing nucleotide sequence isolated from the Sargasso Sea
tactgctgctgcaattgtcatgaaagaaaaatctttaaaatttgacataggtgatggttcacatattgatacttgtggaacaggtggaacaggcttacatacttttaattgctcaacagcctcatcttttgttgctgcagctgcaggagctaaaatcactaagcacggtaataaagcaatttctagcaaatctggtagtgcagactttcttgcacagtcaggtgcaaacattaatcatgaaagagaaaaactaatatcaatttttgataaagttggattcgtatttttatttgcaccacttcatcatgaagcgatgaagtttgtgatgccagttagacaaaaaattgctgaaaaaactatttttaatttgttaggaccgcataccaatccatgcagtgcaaaaaaacaggttctaggagtttatgatgaacagcttgtaaaaatgttttctaatgttgcaaaaaatcttgatatgaaacatgtcatgattgttcacggagatgatggtcttgatgagatttcaatttgttcagaaactattgtttcagaattaaaagacaataatattagtgaatataaaatttctcctaaagattatggactaaacctatcttcatttgatcaaattactgcgaattcttcggacgaaagtcttttacttgtgaatagcgcatttaatggagagagttctgctgtgcaagacatgatcgcattaaatagcggggctgctttatatgtagcaagtgtagttaactctataagtgatggcgtagaaatggcatttgattgtatgaataacggacaagctgcacaaaaattagcagactacgtgagggtttcaaacgaataa

SEQ ID NO: 239457 - DNA, 892 bp, Unknown
  Bacterial polypeptide expressing nucleotide sequence isolated from the Sargasso Sea
ttctagattattaatgaatagatggcttaatgatgaaatatctgatgttcaaacaggagcttttttgagtgctttgcgagctaagggttgtacaggagatgaattatactctatggctgaggaacttttaaatgtttgcgaattaccagtatccagacctgatttgtatatggtagatacttgtggaactggaggtgatggggctaatacattcaatatttctactgcagtagcatttgtatcttcatcttgtggtgtaaaaattgctaaacacggaaataaaagtgctagtggaaaagttggttctgcagatgttttgatgaatcttggattgaatttaaattgttcatcagaaaaagtaatctctgccgtcaatgaagttggtataacttttttgtttgctccaatttggcataaatctttaataaaacttgctccattaagaaaggaccttggaattaggactgtatttaatcaacttggacctttggtaaatcctttgagacccaatgctcaagttttgggggttgcttctgagagtcttttagagcctatgggaagtgcattattaaaattgggtatgaatagggcaatagtagttcatggttctggtggtcttgatgaggcttcattacaaggcgaaaataaattaatatttgttgaaaaaggaaaattacgattctcaaaaataaatatttcagactttgaatatgaaaatatatctaatgaaaaactcgtagtttcagatagagatacaaatgaggaaatattaaaatcagttttaaatggctctggacaacaatcgcatataaatgttgttgctttgaatgcagcattagtcctatgggttgcaggtatagaggatgatttacatgaaggatttaaaaaagct

SEQ ID NO: 239458 - DNA, 937 bp, Unknown
  Bacterial polypeptide expressing nucleotide sequence isolated from the Sargasso Sea
aaaaatgcatttagatttttaatgaatggtgaagctagtgatcaacaaatttatgattttttaactttattatcagataaaggtgaggtttcagatgaaatagctggtggtgtatatatattaagagataagtcaaaaagagtaaaagttgaagattgcattgatacttgtggtactggtggagatggaaaagacactttaaatatttcaacagcatcagcgctgttgttagcaagtatgggtgttaaagtagctaagcatggaaataaagcagtttcatcaaaatgtggatcagctgacgttcttgaagccttaaatataaatatcaacttagaaccaaaacaaatcgaggaacaaattaaaaataacaattttggttttatgttcgcacaaaattaccactcggcaatgaaatatgttggtccaacaagaaaaaaaataggaaaaaggacaatttttaatatgataggtccattaagcagtccagcacttgttgagaggcaggtaattggtgtttttgataacaaacttcttaaaatttttgcgaatgctcttaaaaatttaaatttaaaatttgcttggatcgtaaatagtgaagatggtctagatgaaatatcaccttatgccaaaactaatattgtgcaattaaaaaataatgaaatatctgagtttataattgacccagatgaattaaatattaatgctgataaatttgaaaatttaattggagatgatgctaaatttaattcttataaaattttaaatatttttgaaggtgaagacaatgatttttcaaaagctgtatgtttaaatgctgcagcaggattaatgatatctgaaaaatataatgattttaaaattgcttataattatactagaggttttattaagtctggagcggcattcaaatatataaaaagtttacaaaatgtctgaa

SEQ ID NO: 239459 - DNA, 829 bp, Unknown
  Bacterial polypeptide expressing nucleotide sequence isolated from the Sargasso Sea
aggttttgcaacagccatgagaaatgcttcgcaaaaagtaattacgacgaatgatgttgttgataattgcggtacaggtggtgatggactccaaacatttaatgtatcaactactgcttctttgattgcatctagttgtggtgtctgtgttgcaaaacatggtaataaagctgttacgagtaaatcaggtagcgctgatttacttgaatttgccggtgtaaatttagagattacgcctgaacaagtctcggcttgtttatcagagttgagtttcggcttcatgtttgcgccattacatcattcttctatgagatttgttgcgtcttcaagaaaagaaatatcaccacaaaagactatatttaatttactcggcccactaacaaatcctgctggtgcaaaaagacagcttataggtgtatattcaaaaaagttcatgcgacctatggcagagacacttattaatcttggaacttcaagagctatgatagtacattcatttgatggattggatgaaattagtatttttgataagacatatgtcttagaggttgatgatggcaatattaaagaatatgtaattgatccagaaaattacttttcttctaaatataaattatcggatattgttgttaatgacgtagaatctagtttatcgatgacaaaagaagtatttaaagagaaaaatattcctgcaaaaaatatcgctatcattaatgctgctgcaattatatatatctcaggaatagtttcaacgcttgacgaaggaataaaaatatcagaagagtcaatcagtagtggtaaagttactaataaacttgatgacttaata

SEQ ID NO: 239460 - DNA, 651 bp, Unknown
  Bacterial polypeptide expressing nucleotide sequence isolated from the Sargasso Sea
tatgaaagactttattaacaaaataaacaataaagaagatctaactcttaacgagatgcaagaggccattaatttaataatgtctggaatgtctgatgatgaggatattgaatcttttcttattggattaaatgaaaagggtgtgtcagagactgaagttactgctgctgcaattgttatgaaagaaaaatctctaaaatttgatataggcgatggttcacatattgatacttgtggaacaggcggaacaggtctacatacttttaattgctcaacagcctcatcttttgttgctgcagctgcaggagctaaaatcactaagcacggtaataaagcaatttctagtaaatctggtagtgcagattttcttgcagagtcaggtgcaaacattaatcatgaaagagaaaaattaatatcaatttttgataaagttggattcgtatttttatttgcgccacttcatcatgaagcgatgaaatttgtgatgccagttagacaaaaaattgctgaaaaaactatttttaatttgttagggccgcatactaatccatgcagcgcaaaaaaacaggtcttaggagtttacgatgaaaagcttgtaaaaatgttttctaatgttgcaaaaaatcttgatatgaaacatgtcatgattgt

SEQ ID NO: 239461 - DNA, 802 bp, Unknown
  Bacterial polypeptide expressing nucleotide sequence isolated from the Sargasso Sea
tgcttttgatcaaatcttattacaaaaaattgaagaaaaaaaaattattgaatttcttacatctttatcaaaaaagaatgaaagcgtagatgaaattttaggcgcaataaaaagtattaaaaaaaaagcaaatataattaaaggttttaaaagttcttttgatacatgcggtactggaggcgacggatctaaaacatttaatatttcaacaactagcgcaatagttatagcaagtaccggtgttcgcgttgcaaaacatggtaataaagcagtatcttcattaacagggtctgctgatgtcttatccgaactaggaattaatataaacttagataaaactaaaataattgattgtttaaataaaattaatttatgtttcttatttgctcctaattttcatccaattttaaaaaatgtcgctgatataagaaaaaaaataggcaaaagaacaatttttaatattttagggcctttgctaagtccagtagaatgtaaaaaacaaataatgggagtttatgatgtaaatatattatctaaagtagctgaagtattaaaaaaattaggcactgaacatgcatgggttgtttctggaaataaagaatttgatgaattaacaacaacaggaaaaaattatgttgttgaaattaaaaataatacaataaaagaattagaaatcgactccactagttttggtttagaaaaaagcaaaaaagaagatttaattggtggtgatagtaaaaaaaatgctgaaataataaaaggaattttaaaaggtgaattgtcaggaccaaaaaagatatag

SEQ ID NO: 239462 - DNA, 665 bp, Unknown
  Bacterial polypeptide expressing nucleotide sequence isolated from the Sargasso Sea
accgacgcgcagatcggcgccttcctcatgggcatgcgcatgaagagcgaaaccatcgacgagatcgtcggtgccgccagcgtcatgcgcgagctggccgcaccggtggtcattgacgccgagcggctggtcgacacctgcggcactggtggcgatggcatgaacatcttcaatgtctccaccgctgcggccttcgttgtcgccgcggccggtggcaaggtggccaagcacggcaaccgcgcagtctccggcaagagtggcagcgccgatctgctggaagccgccggcgtctacctggggctcaaacccgagcaggtcgcgcgctgcgtcgagagcgtgggcgtcggcttcatgttcgcgccgtctcatcacggggcaatgaagcacgccatcggtccgcgccgcgagctgggcctgcgcaccctcttcaacatgcttggcccgatgaccaacccggcaggtgccaaacatcaggtcatcggtgtattcagccaggcgctgtgccggccgatggccgaagtactgcagcgcctgggcagcgagcacgtattggtggtgcacgcgcaggatggcctggacgagatcagcctggccgcgccgaccttcattgccgaactcaggaatggcacggtcagcgagtaccgcatccagcctgaggatttcgg

SEQ ID NO: 239463 - DNA, 822 bp, Unknown
  Bacterial polypeptide expressing nucleotide sequence isolated from the Sargasso Sea
ggaatttttgtcttaagagaaaaagctactaaagttagagccgatcaaaatactatagatacatgtggaacaggaggagacgggcaaaattctttaaatatttctactgcagcagctatagttttggcaagtatgggtgtaaaagttgccaagcatggaaataaagctgtttcttcaaactgtggatctgcagacgtattagaagctttaaaaataaatattaatttgaaacccaatgaagctgaagaaagtataaaaaactttaattttgcttttatgtttgcgccaaattatcattcagcaatgaaacatgtaggacctgctagaaaaaaaatgggaaagaaaacaatctttaacttgattggccctttaagtagtcccgcacaagtaaaaagacaggtaataggagtatttgataaaaagtggatgaagcctttcgctgaggctcttaaagataacggagttgttcacgcatttatcgttcatagtgaagatggtatggatgagatatctccatttgcaaaaacaagtgtggtagaacttaaagactcagtgattaaagaatttataattgatccaaaaattttaggaattgactctgcaaataaagaaaatttaaaaggaaaaaatgcagaatataattctgaaaaaattattgaaatatttaaaggaaaaattaatgaattctctcaatctgttgctcttaatgtagcagcaggtctaatagtttccggtaaagaaagtgattttaagatttcgtacgaaaaggctgtgaaacatttaagttcgggacaagtatttaagcacttagtaaaaattcaa

SEQ ID NO: 239464 - DNA, 832 bp, Unknown
  Bacterial polypeptide expressing nucleotide sequence isolated from the Sargasso Sea
atttatgattttttaactttattatcagacaaaggtgaggtttcagatgaaatagctggaggtgtttatatattaagagataagtcaaaaagagtaaaggttgcaaattgcatagatacctgtggtactggaggagatggaaaagatacacttaatatttcaactgcatcagcgctgttgttagcaagtatgggtgttaaagtagcaaagcatggaaataaagcagtttcatcaaaatgtgggtcagctgacgttcttgaagccttaaatataaatatcaacttagaaccaaaacaaatcgaggaacagattaaaaataagaattttggcttcatgttcgcaccaaattaccactcaacaatgaaatatgttggtccaacaagaaaaaaaataggaaaaaggacaatttttaatatgataggtccattaagcagcccagcacttgttgagaggcaggtaattggtgtttttgataacaaacttcttaaaatttttgcgaatgctctaaaaaatttaaatttaaaatttgcgtggattctaaatagtgaagatggtctagatgaaatatcaccttacgccaaaactaatattgtgcaattaaaaaataatgaaatatctgagtttataattgacccaaatgaattaaatattaatgctgataaatttgaaaatttaattggagatgacgctaaatttaattctgacaaaatcttaaatatttttcaaggagaagataatgatttttcaaaagctgtatgtctaaacgctgcagcagggttaatgatatctgaaaaatatgataattttaaaattgcctacaattataccagga

SEQ ID NO: 239465 - DNA, 450 bp, Unknown
  Bacterial polypeptide expressing nucleotide sequence isolated from the Sargasso Sea
tatgactaaaattatagaaaaattaaaaataggggaaaatttatcctttgatcaaagcaaagttctttttactgatctaatggaaggtaagcattctgaagacttaataatagaaatattggagtcttttataaaaaaaggagaaaccaaagacgaacttgcaggtggtatttttgtattaagaaataaagcaaacaaagtaaaaactgatccgaataccatagatacatgtggaacaggtggagatgggcaaaactctctaaatatatcaactgctgcagctatcgtacttgctagtatgggagtaaaagttgctaaacatggtaataaagctgtttcatcaaattgtggttcagcagatgttctggaagcattaaatatagatataaatttaaagccagaagaagcggaaaattctattaataaatttaattttgcttttatgtttgc

SEQ ID NO: 239466 - DNA, 896 bp, Unknown
  Bacterial polypeptide expressing nucleotide sequence isolated from the Sargasso Sea
atggagggaaaacacaatgaacgtgaaataatagaaatattggatgcttttttaaaaaagggagaaacaaaagacgagcttgcgggaggtatttatatactaagggaaaaagcaagcaaagttaaaacagatgaaaatactatagatacttgtggtacaggtggagatggcaaaaattcactaaatatttccactgccgcagcaattgttttatcaagcatgggtgttaaagttgctaagcatggtaacaaagccgtctcgtcaaattgtggttcagcggatgtacttgaagccctaaaaattaaaatagatttaaaccctgaggaagctgaagaaagtattaaaaaatttaattttgcttttatgttcgctccgaattatcacgctgcaatgaaacatgtaggacctgctagaaaaaaaatgaaaaagaaaaccatatttaatttaattggacctttaagtagtcccgcgcaagtcaaaagacaagtgattggagtatttaataaaaaatggatgaaaccatttgctgaggctctaagagaaaataatgtagttcatgcgtatatcgtacatagcgatgatggaatggatgaaatctcaccattcgacaaaacaaatgttgtagaacttaaggaaggtataataaaagaatttacaattgatccaaaaaatcttggcttaaattctacaaacagagaaaatttaaagggaaaaaatgctgtgtacaattctgaaaaaataattgaaatatataagggaaaaaataatgaattttctcagtctgtagctttaaatgttgctgccggtttaatagtttctggtaaagaaaataattttaaaacagcttttgaaaatgcatcaaaacatttgaattcaggtaaagtatttcaacattt

SEQ ID NO: 239467 - DNA, 799 bp, Unknown
  Bacterial polypeptide expressing nucleotide sequence isolated from the Sargasso Sea
gacattgtcggcacgggcggcgacgggatcggcacctacaacatctcgacggcgacggcgtttgtcgtggccggcgccggcgttccggtggccaagcacggcaacaaggccgtgtcctcgaaaagcggcgccgccgacgtgctgtcgagcctgggtatcagggtggattgcgaaatggcgcttgtccgccgcgcccttgtagaggccggcatatgtttcctgatggcgccgcgccaccattccgcgatgcgccatgtcgcgccggtgcgggccgaactcggcgtcaggacgatcttcaacatgctggggccgcttgccaatccggcgctggtccgccggatcatggtcggcgtgttcgatccggacctgtgcgttcccttcgccagggcgctgtccagcctcggcacgacgcacgcctgggttgttcacggcgccgacgggctcgacgaggtgtcgacgacaggcccgacaagggtcgccgcgctggccggcgggaacatcgaggaattcaccatttcgccggatgatctcggccttgcgagcgtcagcatcgatgcgcttcgcggcggcacgccggaggagaatgcggcaagccttcgcgacgttcttaacggcgccgagggcgcctaccgggatgtcgtcatcttcaacgccgcggcggcgcttgtcggcggcggccacgccgccaatctcggcgacggtgccgaacgggcaaccgcctcgatcgccagcgggcgcgccatgacggcgctggaatcgctggtcgcgatcaccaacagcgaagcggaaagtgcctgac

SEQ ID NO: 239468 - DNA, 790 bp, Unknown
  Bacterial polypeptide expressing nucleotide sequence isolated from the Sargasso Sea
gcaaagagttctacaggtgtcgaactaagctctatggctgaggaactcttaaatgtttgcgaattgccagtagctagaccaaatttgtatttggtagatacttgtggaacagggggtgatggagctaatacattcaatatttcaactgcagttgcatttgtagctgcatcttgtggggtaaaaattgcaaaacacggaaataaaagtgctagtggaaaagttggctctgctgatgttttgttgaatcttggtttgaatttaaattgtccattggaaagagtaatcaaagcagtaagtgaaattggaataacttttttgtatgcacctgtttggcataaatctttaataaaacttgctccattaagaaagactcttggaataaggacagtatttaatcaacttggaccattggtaaatcctttgagacccaatgcacaagttttgggtgttgcttctgaggatcttttaaaacctatgggaagcgcacttttaaaaatgggtatgaatagagcaatagtcgtacatgggtatgggggccttgatgaagcttctcttcaaggagaaaataaattagtatttgttaataatggtgaattacggttttcagaaataaatatttcagactttaaccatgaaaatatatctaacgaaaagcttgtggtttctgatcctgagtctaacgagaaaatattaaagtctgtcttaaatggttctggacaaaaatctcatattgatgtggttgccttgaactctgcattagtgctttgggccgcaggcattgaggataatt

SEQ ID NO: 239469 - DNA, 835 bp, Unknown
  Bacterial polypeptide expressing nucleotide sequence isolated from the Sargasso Sea
agctggtggtgtatatatattaagagataagtcaaaaagagtaaaagttgaagattgcattgatacttgtggcactggtggagatggaaaagacactttaaatatttcaacagcgtcagcgctgttgttagcaagtatgggagttaaagtagcaaagcatggaaataaagcagtttcatcaaaatgtggatcagctgacgttcttgaagccttaaatataaatatcaacttagaaccaaatcaaatcgaggaacagattaaaaatatcaattttggcttcatgttcgctccaaattatcattcagcaatgaaatatgttggtccgacaagaaaaaaaataggaaaaaggactatttttaatatgataggtccattaagcagcccagcgcttgttgaaaggcaggtaattggtgtgtttgataataaacttctaaaaatttttgccaatgctctaaaaaatctaagtttaaaatttgcgtggattgtaaatagtgaggatggtctagatgaaatatcaccttacgccaaaactaacgttgtgcaattaaaaaataatgaaatatctgagtttataattgatccaaatgaattgaatgttaatgctgaaaaattcgaaaatttagttggagatgacgctaaatttaattctgacaaaatcttaaatatttttcaaggtgaagacaatgatttttcaaaagctgtttgtttaaatgctgcagcagggttaatgatatctgaaaaatatgatgattttaaaattgcttacaattatactagaaattttattaagtccggagcagcattcaaatatattaaaaatttacaaaatgtctga

SEQ ID NO: 239470 - DNA, 368 bp, Unknown
  Bacterial polypeptide expressing nucleotide sequence isolated from the Sargasso Sea
tatgaaaattataattgaacaactattaaaccaacaagatttaacacagaaagaagctaaagatataatgagacaaattatgtctggagaatatgataattcacaaatatcaggctttttagtagctatgagggctaaaggtgagaaatcatttgaaattgctggttttgcagaagcaatgagagaaaagatgacaactatatctatatcaaatgatgctatagatatgtgtggtactggaggcgatgctagtggaactttcaatgtttctactgcagcttcatttgtagttgcgggggcaggtgtaaaagtagctaaacatggtaatagatcaatgacctctaaatcagggtctgcagatgttcttg

SEQ ID NO: 239471 - DNA, 790 bp, Unknown
  Bacterial polypeptide expressing nucleotide sequence isolated from the Sargasso Sea
atgtctaacagtttagaaaatttaaaaaaagggcaagatttatctttggaggagagtaaaaccttatttggagaattaatggaaggaaaatataatgagaaagtgataatagaaattttagaagctcttatcaaaaaaggtgaaactaaaaatgaattagctggaggaatttacgttttaagaaaaaaagcaagtaaggtgagagtcgacaccaattctatagatacttgtggcacaggtggagatggtcaaaattctttaaatatatctactgcagcagcaatcgtgctagcaagcatgggagtaaaagtagctaaacatggtaataaagcagtttcctccaattgtggatctgcagatgtgctagaagctttaaaaattaatattaatttaaatccaaaagaagcggaagagagtatcaaaaaattaaatttcgcttttatgtttgctcctaattatcattctgctatgaagtacgttggtcctgctcgaaaaaaaatgggaaaaaaaacaatttttaatctaattgggccattgagtagtcctgctcaagtaaaaagacaagtagttggggtgtttgataaaaaatggatgagaccctttgcagaagctttaaaagataacaatgtcattcatgcttacattgtaaatagtgatgatgggatggatgaaatttctccatttgcaaaaacaaatgttgttgaattaaaagacggcaatataaaggaattttcaataaatcctaatgagcttggagtaacatccggtaataaagaaaatttaaaaggta

SEQ ID NO: 239472 - DNA, 483 bp, Unknown
  Bacterial polypeptide expressing nucleotide sequence isolated from the Sargasso Sea
aatggatgaaattttaaaaaaactccaaagtaaacagagcctttcttttgaagagagcaaacaggcttttgagaatatgatgtctgggagactaaaagataatcaaattcatgactttttaactttttcatctgcaaaaggtgaaacatctagtgagatagccggtggtgtttatgttttacgcgataaagctactaaagttaatgttccggatgatacggttgatacttgcggaactggaggtgacggaaaaaataccttaaatatatctactgcagcagcgcttttattatcaagtttcggtgtgaaagtagcaaagcacgggaataaatctgtttcatcaaagtgcggatctgctgatgttcttgaaaaattaggaataagtatatctcttggtgctaaagaagtagaagaaagtataaagaattataattttggatttatgtttgctccaggttatcactctgcaatgaaatttgtagg

SEQ ID NO: 239473 - DNA, 585 bp, Unknown
  Bacterial polypeptide expressing nucleotide sequence isolated from the Sargasso Sea
aatggatcaatttttagaaaagctcagaaataaaataaatttaaattttgatgaaagtaaagatgcatttaagattttaatgaatggtgatgctagtgatcaacaaatttatgattttttaactttattatcagacaagggtgaggtttcagatgaaatagctggaggagtatatatattaagagataagtcaaaaagagtaaaagttgaaaattgcattgatacctgtggtactggaggagatggaaaagatactcttaatatttcaactgcatcagcgctgttgttagcaagtatgggtgttaaagtggcaaagcatggaaataaagcagtttcatcaaaatgtgggtcagctgacgttcttgaagctttaaatataaatatcaacttagaaccaaaacaaatcgaggaacagattaaaaataataatttcggcttcatgttcgctccaaattaccactcggctatgaaatatgttggtccaacaagaaaaaaaataggaaaaaggacaatttttaatatgataggtccattaagcagcccggcacttgttgagaggcaggtaattggtgtttttgataacaa

SEQ ID NO: 239474 - DNA, 907 bp, Unknown
  Bacterial polypeptide expressing nucleotide sequence isolated from the Sargasso Sea
atgattgaactgctgaaaaaactgatggggcgggaagacctgacttttcaagaagcttcagaactcattcaatgggtgatgagtgaagatgccgttgccgtccaggcttcggcgctgctggtgctgcttcaggccaaaggcattaacgatgaagagatggccggagcggcatacgccatgcggggaagggtctcaaaaatcaatgcgcctgaggatgtcattgatacctgcagcaccggcggaaacgggatcagcaccttcaacatctcgacctgtgcggcgatcattgctgcagcagccggagccaaggtggccaaacatggaaaccggagcaacacccgcaagagtgggagtgccgaggcactggaagccctcggagtgaatatcaacctgggaattgaggaagtcgaacgttgtctggtagaaatcgatttgtgcttctgttatgcggtcaatcatcatcctgcgatgcgttatgcgggaccgattcgaagagaactaggagtgccgaccgtttttaacctgcttggcccattgaccaatcccgcaggagccaaaaatcagctgatcggagttccgacacctcagttaacggggatgatgacaaaagttctgaacagattggaaagcagaagaatccttgccgttcacggagaagacgggctctgtgaactgactgttaccgctcctacgctggtttcggaacttcgggacggaaccatccgggaatacacaatcacggcagaggaaatgggacttcgtcccgggaaactggatgacatccgcaccgattccgcagaagaaagtgctcagatgattctggcgattctttcaggagaggatcagggaactccgagagacatggcactcatcaacagctcaggagctctggtggtagcagggctgg

SEQ ID NO: 239475 - DNA, 643 bp, Unknown
  Bacterial polypeptide expressing nucleotide sequence isolated from the Sargasso Sea
aatggatcaatttttagaaaagctcagaaacaagataaatttaaattttgatgaaagtaaaaatgcatttaagattttaatgaatggtgaggctagcgatcaacaaatttatgattttttaactttattatcagacaaaggtgaggtttcagatgaaatagctggaggtgtatatatattaagagataagtcaaaaagagtaaaagttgaaaattgcattgatacctgtggtactggaggagatggaaaagatactcttaatatttcaactgcatcagcgctgttgttagcaagtatgggtgttagagtagcaaagcatggaaataaagcggtttcatcaaaatgtgggtcagctgacgttcttgaagccttaaaaataaatattaacctagaaccaaaacaaatcgaggaacagattaaaaattacaattttggctttatgtttgcaccgaattaccactcggcaatgaaatatgttggtccaacaagaaaaaaaataggaaaaagaacaatttttaatatgataggtccattaagcagcccagcacttgttgagaggcaggtaattggtgtttttgataataaacttctaaaaatttttgcaaatgctctaaaaaatttaaatttaaaatttgcttggatt

SEQ ID NO: 239476 - DNA, 559 bp, Unknown
  Bacterial polypeptide expressing nucleotide sequence isolated from the Sargasso Sea
aatgtcaaatattaaagaaaagttaaaaaaaggacaaaacctttcttttgaagaaagtaaaattcttttttcagagcttatggaaggaaaacataatgaaagttcgataatagatatattagaaaatcttttagcaaaaggcgaaacaaaagatgagcttgcaggtggtatctacgtactcagagaaaaagcgagcaaagtaaatacagatgaaaatactatagatacatgcggtactggtggtgacggtcaaaactcgcttaatatttcaaccgccgcagctatagttttagcaagtatggatgtaagggttgctaagcacggcaataaggcagtctcatcaaattgtggttccgcagacgtacttgaagctttaaaaattaatataaatttgaaccctaaagaagcagaggaaagtattcaaaaatttaattttgcttttatgtttgctccaaattatcactctgcaatgaaacatgttgggcctgctagaaaaaaaatgggaaaaaaaacaatatttaatttaatcggccctctgagcagtcccgcgggtgtaaaa

SEQ ID NO: 239477 - DNA, 819 bp, Unknown
  Bacterial polypeptide expressing nucleotide sequence isolated from the Sargasso Sea
aatgtctaatttcgtagaaaacttaaaaaaaggacaaagtttatcttttgaagaaagtaaagtcttatttaatgggcttatggaaggtaaatataatgaaaattctataattcaaattttggagtcactcacaaaaaaaggtgagagtaaagatgagttagcgggaggaatttttgttttaagagaaaaatctactaaagttaaagctgatcaaaatacaatcgatacgtgcgggacaggaggagatgggaaaaactcattgaatatttccactgcagcagctttagttttagcaagtatgaatgtgaaagttgctaaacacggtaataaagctgtttcctcaaactgtgggtctgcagatgtattagaagctttaaaaattaatataaatctaaaacccgatgaggctgaagaaagtataaaaaaattcaattttgcttttatgtttgcacctaattaccattcagcaatgaaacatgtgggacctgctagaaagaaaatgggaaagaaaactatctttaacttaattggtcctttaagtaaccctgctcttgtaaaaagacaagtaataggagtatttgataaaaaatggatgaaacctttcgctgaggccctaagtgaaaatggagttattcatgcatttatcgttcatagcgaagacggaatggatgaaatttccccatttgcaaaaactaatgtggtagaacttaaaaataaaactattaaagaatttataatagatccacaaaccttaggaattaattccacaaacacggagaatttaaaaggaaaaaatgcagaatataattctaaaaaaat

SEQ ID NO: 239478 - DNA, 979 bp, Unknown
  Bacterial polypeptide expressing nucleotide sequence isolated from the Sargasso Sea
gatggatattcaagcagcgatcgctcaagctatcgagggaaaagatctgacgcggacggatatggtgtccgtgatggatgccatcatgtccggagaagcagcggacgctcagatcggcggatttctggtcgcgcttaggatcaagggtgagaccatcgacgagatccggggcgccgccgaggtgatgcgtgagaagtcgacgaagatcaagacgacacattcggtgatcgtcgatacgtgcggtacgggtggtgatcattcgagcacgttcaacatctcgacgacggccgcttttgtcgccgctggtgccgggctgtgtgtcgctaagcacggaaaccggtcggtgacgagtcagagcgggagcgcggacgtactggccgttcttggggtgaataccgaggcctcacccgaggttgtcgggcaatgtctggacgacgtggggatcggattcctctttgccgtcgccctgcacggagcgatgaaacacgcgatcggacctagacgggagctggcaacacgaacggtattcaatgcgcttggaccgttgacgaatccggccggcgcgacgcgtcaggtggtgggtgtttacagcccaaacttgaccgagatgctcgccaatgtgctgagcggtctgggttcagagcacgcatttgtcgtgcacggctccgatgggctcgacgaagtgacgacgacaggcccaacgagagtgagcgaattcaagacggattctgtctcgacatacgagatttcgccgggtgacttcggcctggataccgccgcgcccgaggatctgaagggcggcgagcctgccgagaatgcagagatcctgaagggtgtcctgagcggagagaagggaccacggcgggatattgtcctgatcaattcggctctggcactggtggccggcggaaaggccgaaagcctagaagagggtgtggctctggcggcgaagaccatcgattcaggcgccgccacggag

SEQ ID NO: 239479 - DNA, 705 bp, Unknown
  Bacterial polypeptide expressing nucleotide sequence isolated from the Sargasso Sea
catgattgaactgctgaaaaaactgatggggcgggaagacctgacttttcaggaagcttcagaactcattcaatgggtgatgagtgaagatgccgttgccgtccaggcttcggccctgctggtgttgcttcaggccaaaggcatcaccgatgaagagatggccggagcggcatacgccatgcggggaagggtttcaaaaatcaaagctcctcaggatgtcatcgatacctgcagtaccgggggaaacgggatcagtaccttcaacatctcgacctgtgcagcgatcattgctgcagcagccggagccaaggtggccaaacacggaaaccggagcaacacccgcaagagtgggagcgctgaggcattggaagccctcggagtgaatatcaacctgggaattgaggaagttgaacgttgtctggtggaaatcgatctctgcttctgttacgcggtcaatcatcatcctgcgatgcgttatgcgggaccgattcgaagagaactaggagtgccgaccgtttttaacctgcttggtccattgaccaaccccgcaggagccaaaaatcagctgatcggagttccgacacctcagctaacggggaagatgacaaaagttctgaatagattagaaagccgaagaatccttgctgttcacggagaagacgggctctgtgaactgaccgtcactgcacccacgcttgtttcgga

SEQ ID NO: 239480 - DNA, 658 bp, Unknown
  Bacterial polypeptide expressing nucleotide sequence isolated from the Sargasso Sea
tatgtctgatatatcgactaaattaaaacaaggtcaaaacctttcatttaaagatagtaaatctctattttcagatttgatggaggggaaacacacagaaagtcaaatcattgaaatacttgaagctttaataaaaaaaggtgaaacaaaagatgaattagccggtggtatctttgttttgagagacaaagcaacaaaggtttcttgtgatccaagcactattgacacttgtggaaccggtggtgacggtcaaaattctttaaatatttcaacagccgctgcaattgttttagctagtatgggagtaaaagtagcaaaacatgggaataaagccgtttcatctaattgtggttcagcggatgttttagaggctttaaaaataaatatcaatttaaaaccaaatgaagcagaagatagtataaaaaattttaattttgcttttatgtttgctccaaattatcactcagctatgaaacatgttgggtctgctagaaaaaagatgggaaagaaaacaatttttaatttaattggtcctttaagtagtccagcccaagttaaaagacaagtgattggtgtctttgacaaaaaatggatgatgccctttgctgaagctttaaaagaaaacaatgtagttcacgcttatattgttcatagcgat

SEQ ID NO: 239481 - DNA, 508 bp, Unknown
  Bacterial polypeptide expressing nucleotide sequence isolated from the Sargasso Sea
atgcttaacgcaggccctctactagaacaaattatgttgcgagaatcactgtcacaaaccgaggcatacagcttgtttaacagcatcatgcacggtgagcaaagcgaagtgatgattgcttcagtgctgactgcactgaaaatgaaaaaagaatcgcccagtgaaattgcgggtgcagcgagtgccatggttgccaatgcactgccctttcccacaccgacttatgaattcgcagatatcgttggtacaggcggagatggacacaacaccattaatatttccagtgcagccggtgtagttgccgcagcgtgtggcgtgaaagtagcaaagcatggtaaccgcagtgtgtcgagtaagtctggctctgctgacttgtttcgccagtttggactgaagttagaaataagcccggaaacatcccgcaagtgcttagatgaagcaaatttcacatttctttttgcaccggtttatcacgcaggtatgcgccacgcagcccccgtgcgcgctg

SEQ ID NO: 239482 - DNA, 454 bp, Unknown
  Bacterial polypeptide expressing nucleotide sequence isolated from the Sargasso Sea
atgaatcagactttgatattaaaaaaaatttttgaaaaaaaaaatctaagtattgaagagagtacgtatatatttagtaaaattatgaatggagaattagacgatattataattacatcgatactaattggtttaaaattaaaaggtgaaacaaaagaagaaattattggtgcagctaaagtgatgagagaaaaatctctaaaaataaattctcctcaaaatacgattgatacttgtggtactggcggagatatgaaagacaccttaaatatttcaacaagtgctgctatagttgctgcgagtgctggtgtcactgtagcaaagcatggcaatcgttcggtcagttcaaaatcaggatcagcagatatgctagaaaaaataggttataagatttcaaataatgttcaagaactagagaattcattatccaatcagcattttttttctatttgct

SEQ ID NO: 239483 - DNA, 646 bp, Unknown
  Bacterial polypeptide expressing nucleotide sequence isolated from the Sargasso Sea
gatgattgaaaaagcaattgggaaactagtagaaaatattcatctcacttctgatgaagctgaaagtgtgatggatcagattatgaatggagacgccacagaggcgcaaattggggcctatcttgtggcattgagaatgcttggagagtctccagatgaaataattggcagtgttcgttcgatgagaagtaagtctactaagataaaaagcagacattcggaaatagtggatgtcgtcggaactggtggtgatggtactcatacatttaatattagtacgacgtctgctttagttgtatctgctacaggtcagccagttgcaaaacacgggaaccgttctgtttctagtagttctggtgctgcagatgtattgaaagaactaggagtaaatattgatatttcctctgaaaaagttggaagatgtttggatgaagtaggaatagcttttctttttgctccacttttacatggtgctatgaaacatgcaattggtcctaggagagaactttcaatgagaagtatttttaatgttatgggaccccttacaaatccggcaaatgcagatactttgcttgttggtgtttattctgaaatgcttaccgaattaatagctgatgttttgtcgaaaattaggtgcaaaagagca

SEQ ID NO: 239484 - DNA, 787 bp, Unknown
  Bacterial polypeptide expressing nucleotide sequence isolated from the Sargasso Sea
atagatattgtaggtaccggtggcgacggcagcgggaccctaaatatatctaccggcgccgccctcgttaccgcaggctgtggaattactatcgctaaacatggcaatcgggccttatcatctcgctcgggagcggccgatgtactcggtgccctcggtgttaatatcgattgtgaaatgacaaaaatagaaaagtccattcgcaaagccaaaattggatttatgatggctcctcgacatcatagtgcgacccgacacgtagcaggaccccgggttgaattggctacaaggacaatttttaatatcttagggcctttatcgaatcctgcaggggtcaatcgactacttgtcggagtatttgctcgtgaatgggtggagccaatggccaaagttttaggaaatttaggagcagaacgtgcatgggtggtccatggctccgatggtctggacgaacttactacaacgggtaattcgtatgtatccgctttggaaaatggaaaaataacaaatttccaagtttcaccatcagatgctggtatcccaatcgcaaatccagaagacctaaagggcggggatgctaaggacaatgcagcggcaatgatgggtatgctagaaggaaaacttagtgcatttcgtaatatagtaatatacacggctggggctgcactcatcgttgcaggtaaagcacaaaacctaaaagatggggccgaaattgctgctaacgcaatagatggcggccatgccaaaagagcacttgaaaaattaattattataaccaacgaataga

SEQ ID NO: 239485 - DNA, 804 bp, Unknown
  Bacterial polypeptide expressing nucleotide sequence isolated from the Sargasso Sea
catgaaaagtgttatgatgggtaaaattacagatatacaactttctggcgttttaattgctcttagaataaaaaaagaaaattcagatgaagtaactggattcgctagggctatgcgagaaaaaatgataaaaattgatctagattatgaagcgattgatatgtgcggtacaggaggtgattatcatggtacgtttaatatttctacagcagcctgctttgttacagctggggccggagttaagatagcgaaacatggaaacaaggcgatatcatcctcatctggctctgcgaatgttttagagtcattaggtattaacataaataaaagcgtcgctgcatcaaaatcggatattaaaaatcacaatttagggttcatgtttgctccttcctaccacccagctatgaaatatgctatgaatgtaaggaatgacttaaaactcaaaactgtttttaacattcttggaccattgtgcaaccccgcttcagtcaaatctcaagcaatgggaacctttgataaaaatttaaccgaaattcaagctaaagtattaaaaaatttaggctcaaaaaacgtaatgactttttgtagtgatgaagggctagatgaattaacaactacaggcaaaactaaagtgacgcaatttatgaatggaggagaattaaaaaacttcgaatttgagcctgaaaatattggattgaaaaggtctaacattaaagacttaaagggcggaactcctgatgagaatgcaaaaatcattattgaaatactacaaggagctgaaggtccaaaaacagacatagtatt

SEQ ID NO: 239486 - DNA, 845 bp, Unknown
  Bacterial polypeptide expressing nucleotide sequence isolated from the Sargasso Sea
tagcgaaatagctggtggggtttatgttttacgtgacaaagccaacaaagttaatgttccggatgatacagtcgatacttgtggaactggaggggacggaaaaaataccttaaatatatctactgcagcagcacttctgctatcgagcttcggtgtaaaagttgcgaagcacggtaataaatctgtttcgtcaaagtgcggatctgctgatgttcttgaaaaattagggataagcatatctcttagtgcaaaggaagtagaagagagtataaataattataattttggatttatgtttgctccaggttatcactctgcaatgaaatttgtaggcccagtaagaaaaaaaattggaaaaagaactatatttaatttaattggacctttaagtagtccagctcaagtgaaaagacaagtagtaggtgtatttgataaaaagttacttaaaatttttgctgaagctctaaaaaaccttaaattaaaaaaagctctaatagtaaatagcgaagatggtctagatgaaatttctccctacgctaagacaaatgtcgttgaattagaagatgaaagtataaaagaatttattttggatccaaaagaaatgggaataaatgcaaataattttaataatattgttggtaaagaacctgattataatgctgaaaaaataaaagaagtttttcaaggaaaagacaatgatttttcaatcgctatatgtttaaatgctgcggcaggtttaattgtatcagataaaattaaatcttttaaggaaggttacgatcaattaagaaagcatatactttcaggaaaagtagaaaatcatctatctaaattggttaaatgag

SEQ ID NO: 239487 - DNA, 763 bp, Unknown
  Bacterial polypeptide expressing nucleotide sequence isolated from the Sargasso Sea
aatggataaaatcttagaaaaattaaaaagtaaaacaaacctgaatttcgaggaaagcaagtttgcttttgaagaaataatgtcaggtaaagtcaatgaagatgatatttataaatttttaacttattcttctgcaaaaggtgaaacatctgatgaagtcgcaggaggagtattcgttctcagggacaaagcttcgaaagtatctgtgcctgatgatacgatagatacatgtggtactggtggtgatgggaaaaatacattaaacatttctaccgctgctgcaatattattatctagttttggtgtaaaggtcgctaaacatggaaacaaatctgtttcttcaaaatgtggatctgcagatgttttagaaaaattaaaaattaatatcaatcttgggccaaaagaagtagagacaagtattaaaaataataactttggatttatgtttgctcctggatatcattcagctatgaagtatgttgggcctattagaaaaaaaattgggaaaagaacgatttttaatttaattggacctttaagtagtcctgctaaagtaaaaaggcaagttgtaggcgtttttgataaaaaattaattaaaatttttgcagttgctcttaaaaatttaaatttaaaaaaagcattcattgtaaatagtgaagacggcttagatgaaatttctccttacgcaaacacaaatgtagctgaattaagtgaaggaagtataaaagaatacgttttgaatccaaatgatttaaacataaaa

SEQ ID NO: 239488 - DNA, 877 bp, Unknown
  Bacterial polypeptide expressing nucleotide sequence isolated from the Sargasso Sea
caaaaattgctggtatcagaagctctcagctttgaagaatcgcgagaaatgatactatggatcatgagtgaagatgctgtgtctgttcaggcggctgcacttttagctttgttgcaggctaaaggagttactgttgaagaaatggctggagctgctctggccatgaggaaacgtgcttctggaattaaagcacctgaaaatgctatagacacctgcagcacaggaggaaatggaataagcacattcaacatttcaacatgtgctgcaataatcgcagctggtgcaggtgcagttgttgcaaaacacggcaaccgcagcaacacaagaaaaagcgggagtgctgaagtactggaagcgttaggagtgaatataaatttggatcttgatgaagttgaaaaatgtcttcgggatttggatatttgtttttgttatgcgatcaatcaccatccggctatgcgctttgcgggaccaatacgcaaggatctcggagtcccgactgtatttaatctgcttggtcccttaacaaatcctgcaggtgcgaaaagtcagttgattggagtcccgaatgttgaacttacttcgaaaatagctcaggtccttaagcgattaggtagcgaaagagtactagtagttcatggattagatggtttgtgtgagctaacagtcacctcccctacacatgtggcagaacttagagaaggcaatatcaaagaatatgaaataactcctgagaagcttggtctcaagacaggaaaattggaggagataaccatagatactcctgaagaaagtgccaggataatggagcgtattttttctggagatgagaaaggtactgcacgtgaaattgctctggcaaatgccgcgggtgcgttag

SEQ ID NO: 239489 - DNA, 805 bp, Unknown
  Bacterial polypeptide expressing nucleotide sequence isolated from the Sargasso Sea
aaggcttctaaagtaaaaactgatgaaaatactattgatacttgtggaactggaggggatggccaaaacacattaaacatatctaccgcttcagcaatagtattagcaagcatgggggttaaagtagccaaacacggtaataaagcagtttcttcaaattgtggttcggctgatgtattggaggctttaaatgtcaatattaacctaaaacctaatgaggtcgaggaaagtataaaaaaatttaattttgcctttatgtttgcccctaattatcattcagcaatgaaacatgttgggcccgctagaaaaaaaattggaaaaaaaacaatttttaatttaattggacctttaagtaaccccgcccaagtaaaaagacaagtagtaggagtatttgataaaaaatggatgataccttttgctgaagctctgaatgaaaatggtgttattcatgcatacatcgttcatggtgatgatggtatggatgaaatctctccttttgcaaaaacaaaagttgttgagcttaaaaatggaatgataaaagaatttataattgacccaaaaattttaggtataaattcatttaataaagaaaatttgaaaggtaaaaatgcagaatataattctgaaaaaattattgaaatctataaaggaaaaataaatgaattttctcattctgttgccctaaatgccgctgcgggattaattgtttcaggcaaagaaaatgattacaaagtgtcttaccaaaaagcaaaagaatatttaaattcaggtaaagtatttgaatatttaaataaaatacaatcaa

SEQ ID NO: 239490 - DNA, 544 bp, Unknown
  Bacterial polypeptide expressing nucleotide sequence isolated from the Sargasso Sea
atggaacaagaaagaattctaattaaaatctttaacaaagaaaatcttaatattgaagaaagcgcatttatttttaacaaaattatgagtggtgagctagatgatattaaaattacttcaatattgattggattaaaattaaaaggtgaaacagaagaagaaattataggtgcagcaaaagtaatgagagacaagtcattgaaaattgtatctcccccaaatacaatagacacatgtggaacaggcggtgatatgaaagacaccttaaacatctcaacttctgctgctttagtcgcagctagtgctggtattaaaattgcaaaacatggtaatagatcagttagttctaaaagtggttcagctgatatgatagagcatctaggtcttaaaatcacagatgatttaaaaaaattagaacaatcacttattgaaaaaaacttttgttttttgtttgcacaaaatcatcatacagctatgaaaaatgtaataaatgtaagaaaaaatcttgggacaagaacgatttttaatttacttggtcctctaa

SEQ ID NO: 239491 - DNA, 690 bp, Unknown
  Bacterial polypeptide expressing nucleotide sequence isolated from the Sargasso Sea
agcacggtaataaagcaatttctagcaaatctggtagtgcagactttcttgcacagtcaggtgcaaacataaatcatgaaagagaaaaattaatatcaatttttgataaagttggattcgtattcttatttgcaccacttcatcatgaagcgatgaaattcgtgatgccagttagacaaaaaattgctgaaaaaactatttttaatttgttagggccacataccaatccatgtagtgcaaaaaggcaggtcttaggagtttatgatgagaagcttgtcaaaatgttttctaatgttgcaaagaatcttgatatgaaacatgtcatgattgttcacggcgatgatggtcttgatgagatttcaatttgttcagaaaccattgtttcagaattaaaagacaataaaattagcgagtataaaatttctccaaaagattatggactaaaggtatcttcatttgatcaaattgctgcgaattcttctgatgaaagccttttgctcgtgaacagtgcatttaatggagagagttctgctgtgcaagacatgattgcattaaatagcggggctgctttatatatagcaaatgtagttgactctataagtgatggcatagaaatggcatttgattgtatgaataacggacaagctgcacaaaaattagctgattatgtaagggtttcgaacgaataat

SEQ ID NO: 239492 - DNA, 736 bp, Unknown
  Bacterial polypeptide expressing nucleotide sequence isolated from the Sargasso Sea
tatgaaagactttattaacaaaataaataataaagaagatctaactcttaacgagatgcaagaagccattaatttaataatgtctggtttgtctgatgatgacgatattgaatcttttctaattggattaaatgaaaagggtgtatcagagactgaagttactgctgctgcaattgtcatgaaagaaaaatctttaaaatttgacataggtgatggttcacatattgatacttgtggaacaggtggaacaggtctacatacttttaattgctcaacagcctcatcttttgttgctgcagctgcaggagctaaaatcactaagcacggtaataaagcaatttctagcaaatctggtagtgcagactttcttgcacagtcaggtgcaaatattaatcatgaaagagaaaaattaatatcaatttttgataaagttggattcgtatttttatttgcaccacttcatcatgaggcgatgaagtttgtgatgccagttagacaaaaaattgctgaaaaaactatttttaatttgttagggccgcatactaatccatgtagtgcaaaaaggcaggtcttaggagtttatgataagaagcttgtcaaaatgttttctaatgttgcaaagaatcttgatatgaaacatgtcatgattattcacggcgatgatggtcttgatgaaatttcaatttgttcagaaaccattgtttcagaattaaaagacaataaaattagcgaatat

SEQ ID NO: 239493 - DNA, 610 bp, Unknown
  Bacterial polypeptide expressing nucleotide sequence isolated from the Sargasso Sea
atgaaagtattgcttgataaaattatcaatggtagtgacttgaacgtagaagagtctttcaatataatgaatgacctaatgtcaggcaaacttgatgatattcaaatcagtgcgctgttaattgcgttaaggtgtaaaggagaatcagtatcagaaatacttggatttgctaaatcaatgagacaaaaaatgatgaaaatgcctttacaaaaagatgcccttgatatttgtgggactggaggtgattcactgggtaccttcaatatttctacagcaacatgttttgttatttcgggtgcaggcgtccctgtagctaaacatggaaatagatctatgacttctaaatcaggttcagcagacgttttgcagtcgttgggagtcaatattaataaaacagttgaagaatctagaaatgacattgataaatttggtttaggttttatgtttgcgccacagtatcaccctgcaatgaaatacgctgtcaatgctagatctactcttggaatcagaaccatatttaatcttcttgggcctttatgtaatcctgcaaaagtaaaatatcaggcaatgggcatattcaattcggattttcttgaaaaacaaatcaagg

SEQ ID NO: 239494 - DNA, 588 bp, Unknown
  Bacterial polypeptide expressing nucleotide sequence isolated from the Sargasso Sea
tatgactgatgaaatgaaatcattaatctatgcagcctcagagggtccattaagcacggctcaggctaaattagcttttgatatcttgtttgagggtaaagcaaccccctcgcaggttggtggtctgttgatggcgatgagagcgcgcggtgaatccgtttcggaatattcagcagcagcggaagccatgcgatctaggtgcatttctgtaaatgctccccctggatctattgatatagttggcacaggtggcgacggaataggaacacttaacatttctacggcgtctgctttcgtagtagctggagctggagtaaatgtagctaaacatggtaataaaaatttaagttcaaaatcaggtgctgccgatgctctgactagtcttggaataaacgtgatggtggatgccagtgtagtagaatcagaaatccaacacgctggcatagggtttatgatggctccaatgcatcaccccgccacaaagcatgttatgcctatccggcaagaacttgggtgcaaaaccattttcaatatccttggaccattgactaatcctgcaggtgtaaaacgtcaactgagcggtgcgtt

SEQ ID NO: 239495 - DNA, 442 bp, Unknown
  Bacterial polypeptide expressing nucleotide sequence isolated from the Sargasso Sea
aatggacgaaattattaaaaaactcaaaaataaacaaaacttaaattttgaagagagcaaatctgcttttgaaaacatgatgtcaggcaaggttagtgaagatcaaattcatgattttttaatctattcttctacaaaaggcgaaacttctgatgaaatagctggtggtgtttatattttgcgagacaaagcagctaaagtaaattcgccggatggcacaatagatacctgtggtactggaggagatggaaaaaatacattaaatatttctactgctgctgcgctactactgtctagcttcggggtaaaagtagctaaacacggtaataaatctgtttcttcaaaatgtggctctgctgatgttttagaaaaattaaatataagtatttctctaagtcctaaagaagtagaggcaagcataaacaataacaactttggcttt

SEQ ID NO: 239496 - DNA, 589 bp, Unknown
  Bacterial polypeptide expressing nucleotide sequence isolated from the Sargasso Sea
aatggaaactaaaaaaatattagaagcgattaatttggcatcaagtaatgaggacttagattttgagttagcaaaactatccatgaatgaaattatgagtggagaagttacgccttcacaatttggggcatttattatggcgatgaaaatgaaaggtgaaacgcctatcgagatcgcaggtctggctactgcaatgagagaaaaatcattaaaaattgaattagatgagcctctacttgatacatgcggaactggtggagatggcttaaaaacttttaatatttcaactgcagtagcttttgttgttgcaggtgcaggaataaaagttgctaagcatggcaacagagctatttccggctcatctggaagtgctgatgctcttgaagaattaggtgtgaaaattactcttacaccctattctgtaaaaaaatgcattcaagaaattggaattggttttatattcgctcagtcctttcatcctgcaatgaagtttgcttcacctttaagaaaagagataggaatcccaacaatctttaatatattaggccctttgacaaacccagcgggtgcctcaaatcaattgattgga

SEQ ID NO: 239497 - DNA, 741 bp, Unknown
  Bacterial polypeptide expressing nucleotide sequence isolated from the Sargasso Sea
aatgaacgatatactaaaaaaactcaaaaataaaaaaaatctcacgtttgaagagagtaaaactgctttttcagacataatgtcgggggaagtaaacgaggaaataatttatgattttttaactttttcatctgccaaaggtgaaacatctgatgaaatagctggtggggtttatgttttacgcgataaagctgccatagtaaatgttccagatgatacggttgatacttgtggtactggaggtgacggaaaaaatactttaaatatatcaactggagcagcacttttattatcgagtttcggtgtgaaagttgcaaaacacggtaataaatctgtttcgtcaaagtgtgggtctgctgatgttctagaaaaattagggataagtatatctcttggtgctaaagaggtagaagagagtataaagaattacaattttggatttatgtttgctccaagttatcactcagcaatgaaatttgtaggcccggtaagaaaaaaaattggaaaaagaactatatttaatttaattggacctttaagtagcccagccaaagtaaaaaggcaagtagtaggtgtttttgataaaaagttgcttaaaatttttgctgaagctttaaaaaatcttaaattaaaaaaagctctaatagtaaatagtgaagatgggctagatgagatttctccctacgtaaagacaaacatcgttgaattggagggtgaaaatataaaagaatatattttgga

SEQ ID NO: 239498 - DNA, 765 bp, Unknown
  Bacterial polypeptide expressing nucleotide sequence isolated from the Sargasso Sea
aatgtctaattttgtagaaagtttaaaaagaggtcaaaacctttcctttgaggaaagtaaagctctattcaataagcttatggaaggtaaatataacgaaaatttaattatagaaattttagagtctctcataaaaaaaggtgaaactaaagatgagctagctggagggatttttgtcttgagagaaaaagctactaaagttaaagttgaactagatactatagatacctgtggaacaggaggagacgggcaaaactctttgaatatttctactgctgcagctatagttttagcgagtatgggtgtaaaagttgcaaagcacggtaataaagctgtatcttcaaattgtgggtccgcggatgtattagaggcattaaaaataaacattaatttgaaaccaaatgaggctgaagagagtattaaaaaatttaattttgcctttatgtttgcacctaattatcattcagcaatgaaacatgtggggccagctagaaaaaaaatgggaaagaaaacaattttcaacttaattggtcctttaagtagtcctgcacaagtaaaaaggcaggtagtaggagtatttgataaaaaatggatgaaacctttcgctgaggcgcttaaagaaaacggagttattcacgcattcatcgttcatagcgaagatggaatggacgagatatcaccgtttgtaaaaacatatgtggtagaacttaaagactcaataattgaagaatttataattgatccaaaaattttaggaattgatac

SEQ ID NO: 239499 - DNA, 709 bp, Unknown
  Bacterial polypeptide expressing nucleotide sequence isolated from the Sargasso Sea
gcatgcggtcttaaagttgcaaagcatggcaatcgctctgtttccagtaaatcaggaagcgccgatttgctcgaatttcttggttatcgctttccaacagatgccgatggtgtcaaagcacaaatcagcatgaatggctttagttttttatttgcgccaaattttcatccagcaatgaaacacatcgctccaatcagaaaagctttaaagattagaacagtttttaatatcctcgggccactcacaaacccagccaaaccatccttttatttactaggagcattcagttctgaaatggcgtcactgatggcatccagcttgagcggaatggaaatgagtcgagcgtttgttgtccatggattaaatggttgggacgagccaacacctgcctctaaatttgaattattcgatgtgagcaaagattcaatttcacataaaatcatcgatccgtcagagctcggaatggataaatgcaaagaggaggatctgaaaggtggaacgtctgaggtcaatgcaaaagccttattaaaagtttttgatggcaaggacaatggggcacatgaagatgcattggttttgaatgcggctctatctcttcaagttgcaggcaaagcagcagatctcattgaaggaattgaaattgcaaggcagacaattctgagcggaaaagcaaaagaacttctatcgggtttaacaaatggggattaaa

SEQ ID NO: 239500 - DNA, 751 bp, Unknown
  Bacterial polypeptide expressing nucleotide sequence isolated from the Sargasso Sea
tatgttagataccttaaatatatctacagcagcttctttagttgcggcaagctgtggagttaaaatagccaaacatggtaataaatcagttagctctaagtcaggatcagctgacatgctagagcatattggttacaaaattacagatcaaatagaagaattagaaacacaacttaatgaaaataatttctgctttatgtttgcgcaatatcatcacactgcaatgaaatatgttataaatgtaagaagaagtctaggcacaagaacaatttttaatcttttaggccctctactcaatccagcaaatgctaaaaatcaattacttggagtttatgacaaaaaatggctaaatacccattgtgaaacacttaaagatcttggatctcaaaacgtcttggtagttcacggatgtgatgggctggatgaaataactttaacggacaacacttttatttgcgaactaaaaaataatagtattaatagatacacatttgaccctagggaaattggatatgaatacattttgcttcaagatatcaaaggaggtgaccccaaatataattctgactgttttttaaagatgataaatggagataataaaaagttccaaagtattgttgaaattaatgctggtgccactctttatttagctggtatggcaaagagtataaaggaaggttctcaaatagttgcaaaagctataaatgaaggaaaaacgaaaagttttataacaaaaattattaatggataa

SEQ ID NO: 239501 - DNA, 502 bp, Unknown
  Bacterial polypeptide expressing nucleotide sequence isolated from the Sargasso Sea
atggaccaaaacttaatcataaatcaaatttttaatggagaagaccttactattgaagatagtacttttctatttaataaaattatgagtggcgaattagatgatattaaaattactgcaatactaattggtttaaaattgaaaggtgaaaaaattgatgaaattattggcgcagcaaaagtaatgaaagagaaatcaattaaaattaattcccctgataacacaattgatacttgtggcacaggtggtgacatgaaaaatacattaaatatatcaactagtgcagctatagtcgctgcaagtgctggagtaaaaattgcaaagcatgggaataggtcagtaagttcaaaatcagggtcagctgatatgcttgaaagtattgggtacaaaatttcaagtgatgtaaatgaattagaaaaatctttaaatgataataacttttgttttttatttgctcaaaatcaccataacgcaatgaaaaatgttgcaaacgtgagaaaaa

SEQ ID NO: 239502 - DNA, 571 bp, Unknown
  Bacterial polypeptide expressing nucleotide sequence isolated from the Sargasso Sea
atggaaattaaaagctttaaaaataaattattctctcagcaagatctaacatcagatgaatcaatgcatctttttgaattaattatgactggaaaactcactgagattgatattgcagcaattttgacttcacttaagataaaaggtgagactaaagatgaaatattaggtgctacaaaaataatgaggtcaaaatctttaaaaatttcttcctctgttaatactgttgatacgtgtggcactggaggagatatgtcagatactttaaatatatctacagcttcctctttggttgctgcaagttgcggtataaaaattgcaaaacatggcaataaatcagtaagttcaaaatctggttctgcagacatgttagaaaatctaggctacaaattttcagatgatccacaaattatagaggatcaattaagcagaaataatttttgtttcatgtttgctcaataccatcattcagctatgaaatatgtaatcaatgtaaggaaagcattaggaacaagaacaatttttaatcttttgggccccattaacaaatccagcaaatgccacaaatcaa

SEQ ID NO: 239503 - DNA, 418 bp, Unknown
  Bacterial polypeptide expressing nucleotide sequence isolated from the Sargasso Sea
atgaatcatgatttaaaagattttttagctcaacttctcaatggtcaagacctaacagaagatcaatctgaagaattgatgacagctctagcagaaggctctgttgaaccagcattggcaggagctttattggtctctttaagaatgaaaggcgagtcagctgaggaagtaagaggctttgccaatggcatgcgtaaggcggccaaaggagttgtgctggaaaattcttcagagcttatcgatattgtgggaacaggtggagacggttcgcagagctttaatatatcaacaggcgcagcattgctgagcgctgcttgtggacttaaagttgcaaaacatggcaatcgatcgatctcaagcaaatccggaagcgctgatttacttgagtttcttggctatcgctttccaatggatgccg

SEQ ID NO: 239504 - DNA, 481 bp, Unknown
  Bacterial polypeptide expressing nucleotide sequence isolated from the Sargasso Sea
tatgaacaatgaattcaaaaaatatattaaactagctttattcgatgaccttgatttagaatctacaaagacagcattcagcatgataatgagtggtgaaattggtgagattcaaattagctcttttatttcgttaatacaaaagtctggtgtaaaagcacaccatgttattggtgctttggacgtaatgaaatctaagatggtcagcattaaggcgccaattagagctatggatacttgcgggactggcggcgatggtaaaaatagtcttaacatatcaacagcaacagcatttgttcttgcggcaaaagggatagcagttgcaaaacatggaaatagagcattgacctcgcagtgtggatccgcagatgttcttaaggcgttgaatgttaatgttgaaatggaaaccgcaaagatagaagattgtcttataaaaaacagtatttgtttcatgtttgctcccaaccaccaccagcaatga

SEQ ID NO: 239505 - DNA, 682 bp, Unknown
  Bacterial polypeptide expressing nucleotide sequence isolated from the Sargasso Sea
atgtctgaaacactaaaaccgcttatcactcgtctttgtaacggagaactgatttcatttgaagaaatgcaaacagctttttccattttgatgagtggtgaagctactgtcgcgcaaatcacaagctttatgatcgcccttaaaatgagaggagagacagcatctgatattgcagctggtgcctctcagatgcgtgctaatgcgatttctattaaagcacctaataattcaatcgatattgttggtacaggcggcgatggagcaaatagcttaaatatctcaactgctgctgctataatagttgctggttgcggcgtacctgtcgcgaaacatggcaacaaggccgtatcctcaaagagtggtgcggcggatatattaagcgaattaggtattaatcttgaatgtgactttacgcaaattgaacgtgctatagctcaagctaaaattggatttctgatggctccaaggcatcacccaactcttcgcttcgtggggccaacgcgcgtagagcttggaatcagaacaatctttaaccttctcggccccttatcaaaccctgccttcgttgataaagcactaattggcgtttatgatacaaaatggggtcgcccgtttgctgaagccctcaaactacttggcactgaacatgcgtttattgttcatggtgatggtggccttgatg

SEQ ID NO: 239506 - DNA, 734 bp, Unknown
  Bacterial polypeptide expressing nucleotide sequence isolated from the Sargasso Sea
aatggatcaaactttaatattaaataaaattctcgaacaacaaaatctgaatattgaagagagtatgtatatatttaataaaattatgagtggagaattagatgatattaaaattacatcaatactaattggtttaaagttcaaaggtgaaacaaaagaagaaattatcggtgcagccaaagtaatgagagagaaatctctaaaaataaactctcctgaaaatacaattgatacttgtggcactggtggagatatgaaagacacattaaatatatcaacaagtgcagcaatagttgctgcaagtgctggcgttactatagcaaagcatggtaaccgttcggttagttcaaaatcaggttctgcagatatgctagaaaaaataggttataagattacaaataatgtagaagatttagaaaactcattatcaaataaaaatttttgctttttatttgctcaaaatcatcattctgccatgaagaatgtaattaatgttcgtaagaatttagctacacgtacaatttttaatttattaggccctcttacaaatcctgctaaagcaagtaaacagcttctaggtgtctattcaagagatttagtttctatgcattgtaattgcttaaaagaactaggttctgaaaaagctatggttgttcacggattggatggtttagatgaaataagtttatcagacaatactctaataaatgaattgaaagataataaagttctgg

SEQ ID NO: 239507 - DNA, 505 bp, Unknown
  Bacterial polypeptide expressing nucleotide sequence isolated from the Sargasso Sea
aatggatcatttttttgaaaagctcagaaataaaataaatttaaattttgatgaaagtaaaaatgcatttaagattttaatgaatggtgaagctagtgatcaacaaatttatgattttttaactttattatcagataaaggtgaggtttcagatgaaatagctggtggtgtgtatatattaagagataagtcaaaaagagtaaaagttgaaaactgcattgatacttgtggtactggtggagatggaaaagatactctaaatatttcaacagcatcagcgctgttgttagcaagtatgggtgttaaagtagcaaagcatggaaataaagcagtttcatcaaaatgtgggtcagctgacgttcttgaagccttaaatataaatatcaacttagaaccaaatcaaatcgaagaacaaattaaaaattacaattttggcttcatgttcgctccaaactaccattcagcaatgagatacgttggtccgacaagaaaaaaaataggaaaa

SEQ ID NO: 239508 - DNA, 931 bp, Unknown
  Bacterial polypeptide expressing nucleotide sequence isolated from the Sargasso Sea
ttagttatgaatcaaattttaacgggatcagtctcggaagatcagataaaaactttcttattttccctaagttctaaaggagaatctatagaagaggtcattggatctgcagaagtaatgcgatcactatcaacaaaagtatctgttaaaacaaagtatcttgtagatacttgtggaactggtggtgttggatcaggtatatttaatgtatcaacaacggcagcatttgtagcgagttcttgtggagcaaaagttgcaaaacatggaaatcgtagtgctaccagaaagagtggcagtgcagatcttttagaagttgctggagtatctttagatcttaatcctgaacaagtaaaggactgtattgaaaacgtgggtttaggatttatgtttgcacctgctcaccatagcgcaatgaaatatgcaattggccccagaaaagagcttggaataaaaactatatttaacctattaggcccactgacgaatcctgctggagccttaaatcaagtgttgggagtttttgactataaatgggttaggcccttagccgaagtattgaaaggactgggcagcgagaatgtattggttttacattcagaagatggtctagatgaatttagttccgccacctcaacctatgtagcagagttacgaaatggagaaattaaagaatattccatttcacctgatgattttgaactaaagatattaccgattgaaaatctcactgcagactcacccgaagaaagcttacaaattgctaaggaggctttaagaggaaaaaatcaggcagcagctcaaatggtagccatgacttctggagcagctctttatgtagcgggtttagctagtactttgaaagagggaattgatatgtctttacaaagcattagtgaaaagagaggtatagaaaaacttgaggaactgtgag

SEQ ID NO: 239509 - DNA, 631 bp, Unknown
  Bacterial polypeptide expressing nucleotide sequence isolated from the Sargasso Sea
aatgaatgagatactaaaaaaactcaaaaataaaaaaaatctcacttttgaagagagtaaaactgctttttcagacataatgtcgggtaaagttaatgagaaaataatttatgattttttaactttatcatctgccaaaggtgaaacatctaatgaaatagctggtggggtttatattttacgcgataaagctaccaaagttaatgttccggatgatacggttgatacttgcggcactgggggtgacggaaaaaatactttgaatatatccactgcagcagcgcttttattatcaagtttcggtgtgaaagttgcaaaacacggtaataaatctgtttcgtcaaagtgtggatctgctgatgttctagaaaaattagggataagtatatctcttggtgctaaagaggtagaagagagtgtaaaaaattacaattttgggtttatgtttgctccaggttatcactcagcaatgaaatttgtaggcccagtaagaaaaaaaattggaaaaaggactatatttaatttaattggacctttaagtagcccagctaaagtaaaaaggcaagtagtaggtgtttttgataaaaagttacttaaaatttttgctgaagctttaaaaaatcttaaatta

SEQ ID NO: 239510 - DNA, 928 bp, Unknown
  Bacterial polypeptide expressing nucleotide sequence isolated from the Sargasso Sea
atatcttataaaaatgctgaattggtttttgaaaatatcatggatggcaagctttcagagattgaaatatcttcatttcttacctctttaaaagtacgtggcgaaagcatagatgaacttacggctgctgcctctattatgagggaaaaatctctcaaagttttaaatggtgaggattctgtagatattgtgggaacaggtggagacggcatgaatacgttaaatatttcgacagcaagctccctcactgttgcttccactggaatgcgtgttgcaaaacatggtaatagaaaaatttcttctcttgctggagcttctgacacccttgagatacttgggataaatactctaatggaaccaaagattgctcaaaaatccctagagcaatttaacttttgctttatgttggctcctttataccatcctgcaatgaaaaacgtcatgccagttagacaagagcttggctttagaacagtattcaatatacttggtcctctaacaaacccagcttctgttaaatatcaacttattggtgtttataaaaagtcattagctattaaaatgatagaggttctaagaaatttaaatactaaaagagcttgggtcgttcacggatcagatgggacggatgaaatttctatcactggtgaaacatttgtgattgaacttgatgagggtaacattaaggagttcaaaataagccctaaagatgctgagctaaaatcaggcaatttttcagaaattttggggggttcccctaaatttaatgcacaaaaaattgagcaattagtgaatggggataagagcagttttttttattctgtcatttttaatagtgcagcggcattagctataagtgaaaaagttaaaatcttcaagatggagttaggttggcctctgaagcgttactttctggaaaaacaaagag

SEQ ID NO: 239511 - DNA, 835 bp, Unknown
  Bacterial polypeptide expressing nucleotide sequence isolated from the Sargasso Sea
gctggaggagtatatattttaagagaaaaggctacgccggtcaaagtgtcagatgatgctatcgatacatgtggtacaggcggtgatggaaaaaatacactaaatatttcaactgcagcagcgcttttattatctagttttggagttagagtggcaaaacacgggaataaatctgtttcttcaaaatgtggttcagccgatgttttggaaaaattaaacattaatattaatctcggacctaaagaagttgaagcaaatataaataaaaataattttggatttatgtttgctccaggttatcacgcagctatgaaatatgtgggaccggtaagaaaaaaaattggaaaaagaacaatcttcaatttaattggaccattaagtagcccagcaaaagtaaaaaggcaggtagttggagtttttgatcaaaaacttcttatgatttttgctcaagctctaaaaaatttaaatattaaaaaagcattaatagttaacagtcaagatggacttgatgaaatatccccatatgcaaatacaaatgtaatcgaattaaatgagggaaaaattaaagaatttgttttaaatccaaaagatctaaatattaacgctgggaaacttgaaaatattattggaaaagagcctgaatataatgctcaaaaaattaaagaaatatttcaaggaaaggacaatgatttttcgattgctgtatgtcttaatgctgctgctggtttacttgtatcagaaaaattaaataactttaaagaagggtatgaaaaattaagagagcatatactctctggtaaagtgatgcctcatattataaaactacaaatatgat

SEQ ID NO: 239512 - DNA, 915 bp, Unknown
  Bacterial polypeptide expressing nucleotide sequence isolated from the Sargasso Sea
aatgtcttcaaatttatcaaacgttgaaatcttaaaaattttgttagaggggagaaaccttgatgacataacttctagatcattaatgcaaagatggcttaatgatgaaatatctgatgtagaaactggagcttttttaagtgctttaagagttaagggctgcacaggaattgaattgagttctatggctgaggaaatcttaaaagtatgtgaattgccattagcaaggccaaatctatacatggtagatacttgtggaactggaggtgatggagctaatacatttaatatttctactgcagtagcatttgtagctgcatcttgtggtgtaaatattgctaaacacggaaataaaagtgctagtggaaaagtaggttctgctgatgttttgttgaatcttggtttaaatctaaattgttcattagaaaaagtaatatcctcagtcaatgaaattggaataacatttttatttgcgcctgtttggcataaatctttaataaaacttgctccattaagaaagactcttggaataaggactgtatttaatcaacttggaccattagtaaatcccttaagaccaaatgctcaagtactaggtgtggcaactgaggatcttttagagcctatgggaagtgcacttctgaaaatgggtatggatagagtaataatagttcatggttctggcgggcttgatgaagcctctcttcaaggagaaaataaactggtttttgttgaaaaaggtaaattacgattttcaaaaataaatatttctgattttaatcatgacaacatatcaaacgaaaagcttgtagtttcagaaagtgactccaacgaagaaattttaatgtccgttttaaatggtactggacaaaaatcacataaagatgttgttgccttgaatgctgcattagtcct

SEQ ID NO: 239513 - DNA, 687 bp, Unknown
  Bacterial polypeptide expressing nucleotide sequence isolated from the Sargasso Sea
tatgaaagactttattaacaaaataaataataaagaagatctaactcttaacgagatgcaagaagccattaatttaataatgtctgggatgtcttatgatgacgatattgaatcttttcttattggattaaatgagaagggtgtgtcagagactgaagttactgctgctgcaattgtgatgaaagaaaaatctttaaaatttgacataggggatggttcacatattgatacttgtggaacaggcggaacaggtctacatacttttaattgctcaacagcctcatcttttgttgcagcagctgcaggagcaaaaatcactaagcatggtaataaagcaatttctagcaaatctggtagtgcagactttcttgtacagtcaggtgcaaacataaatcatgaaagagaaaaattaatatcaatttttgataaagttggattcgtatttttatttgcgccacttcatcatgaagcgatgaagttcgtgatgccagttagacaaaaaattgctgaaaaaactatttttaatttgttagggccgcatactaatccatgtagtgcaaaaaaacaggtcataggagtttatgataagaagcttgtaaaaatgttttctaatgttgcaaaaaatcttgatatgaaacatgtcatgattgttcacggcgatgatggtcttgatgagatttcaatttg

SEQ ID NO: 239514 - DNA, 103 bp, Unknown
  Bacterial polypeptide expressing nucleotide sequence isolated from the Sargasso Sea
gcaggtgtaactatagcaaagcatggcaatcgttcagtaagttccaaatcaggttccgcagatatgcttgaaaaaataggctataaaattcaagtaacgtaga

SEQ ID NO: 239515 - DNA, 568 bp, Unknown
  Bacterial polypeptide expressing nucleotide sequence isolated from the Sargasso Sea
aatggatattaaagattttaaaaattatatttttctaattactgaaaagcagattcttaattatgaggaggcaaagtcttgctttgagtttataatgtctggaaatgcatcagatattttgatttcttcttttcttacttcattaaaaataaatttaatggtgaatgggttttctcctgaaattatagctgcaggggcagacataatgcgtgaaaaagctttaaaaattgatcttccaaatgatgcaatagacatcgttggtactggcggtgacgggcataatacccttaatatatctactgcctctgcctttgtggtagctggaactgaaattactgtggccaagcatgggaattatgccgcaagttcaaaatctggttcagcagatgttttagagagcttaggtataaatataaacaataacatagaaaatataaatgagtgttttgaagaatgtggcatatgcttttttatcgctcctaaacatcatagtgcaatgaaatatgtcatgaatgttcggaaagagctagggttcagaaccatatttaatttgcttggtccctctcaa

SEQ ID NO: 239516 - DNA, 886 bp, Unknown
  Bacterial polypeptide expressing nucleotide sequence isolated from the Sargasso Sea
ttatcgatgaaaggagaaacggtgaaagaagttattggcgcagttgaagtaatgagagaactttctgcaaaagtcaaaactgatttgactcacctggtagatacttgcggtactggaggatcaggaattggtatttttaatgtatcaacagcatctgcatttgtcgcaagtcaatgtggagcaaaagttgcaaaacatggcaacaggtcagcaacaaggagcagtggtagcgctgatctccttgagcaagcaggtgttcctcttacactcaaacccagtgaagtggcagattgtataaaaaatatcggcttgggatttatgtttgctccagctcaccatagtgctatgaagcatgttgttggtcctagaaaagaaattgcccaaaagagtattttcaatgtccttggaccattgactaatcccgcatctgctaaaagacaagtcatgggtgtttatgataagaaatggatgaggcctattactaatgtattaaaggaattgggaagtgaacatacgatgattattcactctgaagatggcttggatgagataagtatcgcctctccaacgtttgtaatagagatgaatgatggagatatctctgagtatactattaatcctgaagattttaatttcaagacttctacgcttgatggattacaagtgaattctccagaagaaagtcttaatctcattaaactggcgttagttgataaacatcaagaagcttcttcaatgatctcgatggcagctggcgctgcactatatgtttccgaagtatcaagctcattagaggcaggtattatattagccaatgaatgtgtaaaagatggcggtgggattgaaaaacttaatcaactggttgaatattcctctaaattctaat

SEQ ID NO: 239517 - DNA, 406 bp, Unknown
  Bacterial polypeptide expressing nucleotide sequence isolated from the Sargasso Sea
aatgaatgaaataattgaaaaactgagaaaaagacaagatttaagcttcgagcaaagtaaatctgcattcgaaaatatcatgacaggcaaagcaaaagaggaggaaatatatgattttttaattgcatcttcttctaagggtgaaactgcagaggaaattgcaggaggagtttatgttttacgtgataaagctactaaagttaatgtcacagatgatgcaatcgatacttgcggaactggtggtgatggaaaaaatactttaaatatatccactgctgcagcccttttgttatcaagttttggagtaaaagtagcaaagcatggaaataaatctgtttcctcgaaatgtgggtctgctgatgtgttagaaaaattgagtataaaatataaatcttggtccaaatga

SEQ ID NO: 239518 - DNA, 595 bp, Unknown
  Bacterial polypeptide expressing nucleotide sequence isolated from the Sargasso Sea
tatgaaagactttattaacaaaataaacaataaagaagatctaactcttaacgagatgcaagaggccattaatttaataatgtctggaatgtctgatgatgaggatattgaatcttttcttattggattaaatagaaagggtgtgtcagagactgaagttactgctgctgcaattgttatgaaagaaaaatctctaaaatttgatataggcgatggttcacatattgatacttgtggaacaggcggaacaggtctacatacttttaattgctcaacagcctcgtcttttgttgctgcagctggaggagcaaaaatcaccaagcatggtaataaagcaatttctagcaaatctggtagtgcagattttcttacacagtcaggcgcaaacattaatcatgaaagagaaaaattaatatcaatttttgataaagttggattcgtatttttatttgcaccacttcatcatgaagcgatgaagtttgtaatgccagttagacaaaaaattgctgaaaaaactatttttaatttgttagggccacatacaaatccatgcagtgcaaaaagacaggtcttaggagtttatgataagaagctt

SEQ ID NO: 239519 - DNA, 435 bp, Unknown
  Bacterial polypeptide expressing nucleotide sequence isolated from the Sargasso Sea
tatgattgaaattatagaaaagttaaaaaaaggtcaaaacctttcatttgaagagagtaaaactctttttaatgagcttatggaaggtaagtataatgaaaattcggttattgaaattctagagtttcttataaaaaaaggtgaaactaaagatgaattagctggaggaatttttgttttaagaaaaaaagctactaaagttagaacagatgaaagcaccattgacacttgtggaacaggaggtgatggcaaaaattctctaaatatctctacagccgcagctatagttttagcgagtatgggtgtaaaggttgctaagcacggaaataaggctgtatcttcaaactgcgggtctgcggatgtattagaggctctgagaataaatataaatttaaaacctaatgaagctgaggaaagtattaagaagttaaattt

SEQ ID NO: 239520 - DNA, 926 bp, Unknown
  Bacterial polypeptide expressing nucleotide sequence isolated from the Sargasso Sea
ctgacttttcaggaagcttcagaactcattcaatgggtgatgagtgaagatgccgttgccgtccaggcttctgcgctgctggtgttgcttcaggccaaaggcatcaccgatgaagagatggccggagcggcatatgccatgcggggaagggtctcaaaaatcaatgcgcctcaggatgtcatcgatacctgcagcactggtggaaacgggatcagcaccttcaacatctcgacctgtgcagcgatcattgctgcagcagctggagccaaggttgccaaacacggaaaccggagcaacacccgcaagagtgggagtgccgaggcactggaagcccttggagtgaatatcaacctgggaattgaggaagtcgaacgttgtctggtagaaatcgatctctgcttctgttacgcagtcaatcatcatcctgcgatgcgttatgcgggacccattcgaagagaattgggagtgccgaccgtttttaacctgcttggtccattgaccaaccccgcaagagcaaaaaatcagctgatcggagttccgactcctcagctaacggggaagatgacaaaagttctgaacagattggaaagccgaagaatccttgccgttcatggagaagacgggctctgtgaactgaccgtcaccgcgccttcgctggtttcggaacttcgagacggaaccatccgggaatacacaatcacggcagaggaaatgggacttcgtcccggaaaactggatgacatccgaaccgattccgcagaagaaagtgcccagatgatccttgcgattctttcaggagaggaccagggaactccgagagacatggccctcatcaacacctcaggagctctagtggtagcaggattggccgatgatctgaaacagggagtgagccttgcttcggaggctgttgattcaggccgcgc

SEQ ID NO: 239521 - DNA, 757 bp, Unknown
  Bacterial polypeptide expressing nucleotide sequence isolated from the Sargasso Sea
atgaataaaacagaagaaataataaaagatataaaaaaaggtaaaaatctaagttttgaagaaagtaagtcaatttttcttaatataatgagtggaaatataagcgatgatttaatttttgaattcttaacaagtttatccctcaaaggcgaaacagctgatgaaatagctggcggtgtttatgttcttagagaaaaagcattaaaagtaaactctaaggaaaatataatagatacttgcggaactggaggagatgggaaaaacactcttaatatttctactgcttcatctctacttttagctagcatgggtattaaagttgctaaacatggaaataaagctttgtcttcaaaatgcgggtcggcagatgtgttggagagattaaaaattaatataaatttacagcccgatggagtcgtaaaaagtatagaagaaaataactttggtttcatgtttgcaccaaattatcatcgtgctatgaaatatgttgcttctataagaaaaaaaattggaaaaagaacaatatttaatttattaggacctttaagtagtcccgctaatgtgaaaaggcaagtggtgggggtttttgaaaaaagatggttgcatccttttgcggaagcattaaaaaatttaaattcagagcgagcttggatagttcatagcgaagatggaatggatgaaatttcgccttttgaaataacaaatatagttgagcttaaagagaataaaataacagaactaatgatagatccgaaaa

SEQ ID NO: 239522 - DNA, 903 bp, Unknown
  Bacterial polypeptide expressing nucleotide sequence isolated from the Sargasso Sea
atgacattaaaattacatcaatactaatttgcttaaagttaaagggcgaaacaaaagaagaaattattggtgcagctaaagtaatgagagagaaatctctaaaaataaactctcctcaaaatacaatagatacttgtggcaccggtggagatatgaaagacacattaaacatatcaacaagtgcagcaatagtcgctgcaagcgctggcgttactatagcaaagcatggtaaccgttcggttagttcaaaatcaggttctgcagatatgctagaaaaaataggctataagattacaaataatgtagaagatttagaaaactcattgtcaaataaaaatttttgctttttatttgctcaaaatcatcattctgccatgaagaatgtaattaatgttcgtaagaatttagctacacgtacaatttttaatttattaggccctcttacaaatcctgctaaagcaagtaaacagcttctaggtgtctattcaagagatttagtttctatgcattgtaattgcttaaaagaactaggttctgaaaaagctatggttgttcacggattggatggtttagatgaaataagtttatcagataatactctaataaatgaattgaaagataataaagttctggaatatagttttgatccaagagactatggttatgatttaattaaattagaagatataaaaggtggagatccagaatataatgcaaattgtttttataaaatgattaatggtgattatagagaatttcaaatgattgtagaaataaatgcaggagcggcaatatatttatccaatttaagaaataatctaaaagagagttttgatttagcaaaaaaaataattgaggaaggagttacaaaaaattttgtaaactcactaattaatgagtaat

SEQ ID NO: 239523 - DNA, 655 bp, Unknown
  Bacterial polypeptide expressing nucleotide sequence isolated from the Sargasso Sea
atgatccaagattttattaatcagctagaaaagaaagaagaccttgattttcattctatgaagcatgcgattgaatcaatcatgacggggaaggttgatgatcattctatcgaagcttttttattagccttaaatgcaaagggcattcaggaaactgagattactgctgcagccagagtcatgaaagaaaaatctcttactatttcattgggtgatggagatcatatagatacttgtggcactgggggctcaggtcttcatatttttaactgttctaccgcctcatcatttgtggctgctgcaggaggtgctgcagttactaagcatggtaacaaggctgtatctagcaagtcgggaagtgcagacttattgttagcagctggcgctgatatagcgcatgacagagaaaagctagaaaccatatttaggagagtaggttttatttttttatttgcccctttacatcataaatcaatgaaatatgtgatgccggcaaggcaaaaaataggtaaaaaaaccttatttaatttgttaggccctcatacaaatccttgcggtgcaaaaagacaaattttaggcgtctatcaaaaagatttagtaagagcttttgcatcagttgcaaagaatttatcaatggagcatgctcttattgttc

SEQ ID NO: 239524 - DNA, 243 bp, Unknown
  Bacterial polypeptide expressing nucleotide sequence isolated from the Sargasso Sea
cgaattcgccaccaaggtcgacgtgcccgctgaggtgtccgaccactttgtcgacatcgtcggcacgggcggcgacggcgccaacaccttcaacatctccaccgcctcgatgttcgtggcagcagccgccggcgcacgcatcgccaaacatggtggacgcggcgtcagctccaagtcgggcagtgccgatgtgctcgaagcgctgggcgtgaacatcatgctcacgcccgagcaggtggccga

SEQ ID NO: 239525 - DNA, 739 bp, Unknown
  Bacterial polypeptide expressing nucleotide sequence isolated from the Sargasso Sea
tctaaacatatctactgcagctgcaattgttctagcaagtatgggtgtaaaagtagccaaacatggtaataaagccgtttcatcaaattgtgggtctgctgatgttcttgaggcattgaaaataaatataaatttaaaacctgatgaagcagaacaatctattcgagaattaaattttgcttttatgtttgctccaaattaccactcggcaatgaaacatgttggtccagctagaaaaaaaataggtaaaaaaactatatttaaccttattggtccattaagcaatcctgctcaagtaaaaaggcaggtggttggtgtttttcacaaaaaatggatgaagcctttcgcagaagctttaaaacagaataaagtgttacatgcttatgtagttcacagcgatgatggctttgatgaaatttctccttttgcaaaaacaaacgtagttgaattaaaagataataatttaaatgaatttataatagatcccaaggaactgggaataaattcggtgaataaaaataacttaaaaggtaaaaatgctctatacaattcccagaagataattgaaatatataaaggtaattttaatgaattctcacaagcagttgctttaaatgtagcagctggtttgattgtttccggaaaagaagataattttaaaaatgcctatgaaaaaactactatacatttaaaatctggaaaggtatttcaacacttaaataaattacaattaacttaa

SEQ ID NO: 239526 - DNA, 825 bp, Unknown
  Bacterial polypeptide expressing nucleotide sequence isolated from the Sargasso Sea
cttacaacagatgaaacaagttttatttttgatttaataatgactggtaaaatttcagaaatagaaatgtctgcaatattaatttctttaaaaataaaatctgaaacaaaagaagaaattctaggggccacattatgcatgagagaaaaatctttaaagattaatacagaagaagacaccgtagatacatgtggcactggaggcgatatgagtggaactttaaatatttcaacaagtgctgctattgtagctgcaagtgctggaataaaagtggcaaaacatggaaatagatcaattagttcaaaatcaggctctgcagatatgttggaaaaattatcttataaaattttagataatcctagtgaaattgaaaaatctcttaaaaaaaataatttttgttttttatttgcccaatatcaccattcagctatgaaacatgttggaaatgtaagaaaattaattggtacaagaacgatttttaaccttttgggacctctgacaaatcctgcaagtgcaaaaaaacagttacttggtgtttacgataaaaaatgggtgaaaattcactgtgaagttttaaaacaacttggttcaaaacatgctttggttgttcacgggaatgatggattagatgaaatttcacttagtggagttacgcatatatcagaattaaaagatgaaaagattattcaatatatatttgatcctaaagattataattacaaatatattaaaaactctgaaattaaagggggagatgcaaattataatgctaaaaaatttattgaaatgttagatggtaaatttaaagaatttcaacatattgta

SEQ ID NO: 239527 - DNA, 382 bp, Unknown
  Bacterial polypeptide expressing nucleotide sequence isolated from the Sargasso Sea
tatgtctgatttaattgaaaatttaaaaaaaggtcacagtctttcatttgaagaaagtaaaattctttttaatgagcttatggaaggtaaatataatgaaagttcaattatagaaatactagagtctcttcttaaaaaaggtgagactaaagacgaattagcaggaggaatttttgttttaagggaaaaagcaattaaagttaaaacggatgaagatactattgatacgtgtggaacaggaggagatggtcaaaactctctaaatatttcaactgcggcagctattgttctggcaagtatgggcgtaaaagttgcaaagcacggtaataaagctgtttcgtctaactgtggttcagcagatgttttagaagctttaaaaata

SEQ ID NO: 239528 - DNA, 730 bp, Unknown
  Bacterial polypeptide expressing nucleotide sequence isolated from the Sargasso Sea
catggccaaggggttcaagccgatcctcgcccgcctggtcgagggccagccgctgacgtccgagcaggcgcacgccttcttcgcggcctgcctgcgcggcgaaccgacgccggcccaggtcgccgccgccgtcaccgccctgcgcatccggggcgagaccgtcgacgagatcgccgccttcgccggggccatgcgcgacgccgccctgaccctggatcatccctatgaggtgatcgacacctgcggcaccggcggggacggccagcacacctacaacatctccaccgctgcggccctggttctggccggggccgggctgaaggtggccaagcacggcaatcgtgcgatctcttcgaaatcaggctcttccgacgtcttgtcgatcctcggcgtgaacctggcggcgtcgcccgcgcagcagcgccgggcgctggacgaggctggcatctgcttcctgttcgccccggcctatcacggcgccatgcgccatgtgggacccgtcaggtctgagattggtttccgcaccgttttcaacctgttgggaccactttccaatcctgcgtcggcgaaacgccaggtcatgggcgtgtatgatccgcgcctgctggagccgctggccgaagtgctgggtcggctcggcgcgacgcgggcctggaccgtccacggccagggcctggacgaactggcgacatcgggccccacggaagtcgccgaatggaaggacggggcg

SEQ ID NO: 239529 - DNA, 538 bp, Unknown
  Bacterial polypeptide expressing nucleotide sequence isolated from the Sargasso Sea
tatgtctaattttgtgaaaaatttaaaaaaaggtcaggacctttcttttgaggagagtaaagctctttttaatgaacttatggaaggtaaatatgatgaaaattcgattattgaaattttagaatctcttttaaaaaaaggtgagacaaaagatgagttagcaggaggaatttttgttctaagggaaaaagctactaaagttgaatctgatcaaaatactatagacacatgcggaacaggaggagacgggcaaaactctttaaatatttctaccgcagcagccatagttttagcaagtatgggagtaaaagttgccaagcatggaaataaagctgtttcttcaaattgtgggtctgcagatgtattagaagctttaaaaataaatattaatttaaaaccaaatgaagctgaggaaagtatcaaaaactttaacttcgcttttatgttcgcacctaattatcattcggcaatgaaacatgtgggacctgctagaaaaaaaatgggtaagaaaacgatctttaacttaattggcccttta

SEQ ID NO: 239530 - DNA, 833 bp, Unknown
  Bacterial polypeptide expressing nucleotide sequence isolated from the Sargasso Sea
cacaaaaatctctgctccagacgcatcaatcgacatagttggcacggggggcgatgctttcggaacacttaatatttccacgggggccgctctcgtggtggctgcttgtggcgttccggtcgcaaagcatggaaacagagctttatcatcacgctccggagcagcagacgttcttactgcacttggagtaaatattgaatgcgagatgcgcctcatagaggagtcaataaagcatgccggttttggttttatgatggcgccccgtcatcatagtgcgacccgccacgtggctggtcccagggtcgaactggcaacgagaacaattttcaatgttctaggccctttatccaacccagcaggagtaaagagattactggtgggcgtattctcagagaaatgggttgaacccttagcacatgtattggggaagcttggcgctgaaaaagcctgggtagtgcatgggtcggacggcctagacgaaatgactctcagtggcccaacacatgtcgcagagtatgaaaacggattggttaatacattcgagtgttcgcccgcagatgccggcttaagagaggcacctataaagagtatacaaggtggagatgccgcctataacgcggacgcattgaccgcattactcaacggggaacacggtccttacagagacatcgtttgttatacttcagctggagcacttgtcgtagccggggtagccaaccagctcagcgaaggagtggaaatcgctcaaagggcgattgaccaaggacatgcaaagaaaacattgcaactccttatcgaaattacgaatgaaagatcgagcacagaaatttaat

SEQ ID NO: 239531 - DNA, 874 bp, Unknown
  Bacterial polypeptide expressing nucleotide sequence isolated from the Sargasso Sea
aatgaattaataggtttcgcaagagcaatgagaaaaatttctacaaaagttgaaattaatgacaaggttattgatagctgtggtaccggcggggatggtttgaacacattcaatatctccacatgtgcatcttttatagctgcggcttgtggtgttaaagttgcaaaacatggtaataaagccattacaagttcatcaggtagtgcagacttactacatgatgctggtgcaaagattgacctagctccggaacatgtaagtaagtgtatagagcatataaactttgggtttatgtttgcccctttgcatcatcaggctatgaaaaatgttgcaaacactagaaaaagtattgctccagataaaactattttcaatatgttagggcctattacaaatcctgctaatgcaaaaattcagttaataggtgtatataataatgaagtgatgcatttaatcgctaatgctttactagagttgggtacttcaagagcactaataattaattcaagagatggtatggatgaggcaagtatttatactgaaacagatgtcttggaaattaaaaataatagtattgatagctattcaatagatcccaaggattttgatataagaggcaatagtattgaagaaattaaaacaaactctgaaaggagtagtcttgatattatttatactgttattaataacatagattcggatgctaggaagatatctcttctaaatgcagcccttctagttatgttattcaagaatattagtttgagagatgcattatcagaatgtaatgatgctttagagaattatttagttagagataagtttaaccaatatatagattttacaaatcaggtttcaaaaaatgttaaatgaa

SEQ ID NO: 239532 - DNA, 526 bp, Unknown
  Bacterial polypeptide expressing nucleotide sequence isolated from the Sargasso Sea
gatgaatctgccagacgcaatccggaaggtctctcgcggcgaagatcttggccgagaggagatgggccaggtgatgcgtatcatcatgagcggtgatgccacccccgcccagatcggcgctgtattgacagccctgcacatcaagggagaaacggttgaagaactgaccggtgcggcgacggtgatgcgtgaatttgccgccagcgtcagtgtccaggcagatcaggttgccgattctgtcggtacgggaggcgatggcgcgagtctatttaacgtatctacggcttcggccctggtggcttgtgccgccggagccgttatggccaaacacggcaaccgcgccgcgaccggaaagtccggcagtgccgatgttctggaagcggccggcgtcaacatcacgctttctccagagcaggttgccaaaaccattgacgcagtgggcatcggattcatgtttgcgccgacacaccacggcgccacccggcacgcggttgggccgcggcgtgagattggggttcgaaccttg

SEQ ID NO: 239533 - DNA, 508 bp, Unknown
  Bacterial polypeptide expressing nucleotide sequence isolated from the Sargasso Sea
aatggaaaaatatttaaaaaaacttgaattaggtgaaaatttaacattacaggaaagtattggtgcttttgaaattttgatgaatggaagagctaatgataacgaaatttataattttttaactctgctctctaaaaagggtgaagtttcaacagaaatagcaggtggtgtctcagtgcttagaaataaagcgaaaaaagttaatgtagatgactgcatagatacatgtggaacaggtggtgatggcaaggatacactaaacatatctactgcttcagcattattactttcgagtatgggcattaacgtagcaaaacatggtaataaagcagtttcttcaaaatgtggatctgcagatgttttggaagcattaaatataaatatcaacttgaagcccaaagatattgaaaatcaaattaaaaaaaatcattttggatttatgtttgctccaaaattatcaaagcgcaatgaaatatgttggcccaaccagaaaaaaaatgggaaaagg

SEQ ID NO: 239534 - DNA, 532 bp, Unknown
  Bacterial polypeptide expressing nucleotide sequence isolated from the Sargasso Sea
aatgctgcatctgatgcggctcatcatgcgcggcgaactgtcgcccgtgatgtcggcggcaatcatcaccggcttgcgcgtcaaaaaagagaccatcggcgaaatcaccgcagccgccacggtgatgcgtgaatttgcccggcatgtcgaggtgcaggacaactcgaacttcgtcgatatcgtcggtaccggcggcgatggctcgcaaaccttcaatatttccaccgcaaccatgttcgtttcggctgcggcgggcgccaaggtcgcgaagcacggtggccgcggcgtatcgagcaaatcgggcagcgcggacgtgctcgaagcgctcggcgtgaacatcgatctgcaaccggaccaggtagcggcatcgattgcggaaaccggcatgggcttcatgttcgcgccgaaccatcacccggcaatgaagaacatcgcgccggtgcgccgcgaacttggcgtgcggactatcttcaacattctcgggccgctgaccaatccggccggcgcaccgaatcagttgatgggcgtgttc

SEQ ID NO: 239535 - DNA, 823 bp, Unknown
  Bacterial polypeptide expressing nucleotide sequence isolated from the Sargasso Sea
catgaatatcaaggaagccctgggccgcatcgtcgtccagctcgatctgaccaccgaggaaatgcaggcggtgatgcgcgagatcatgaccggtcagtgcaccgacgcgcagatcggcgccttcctcatgggcatgcgcatgaagagcgagaccatcgacgagatcgtcggtgccgccagcgtcatgcgcgagctggctgcaccggtggtgatcgacgccgagcggctggtcgacacctgcggcaccggtggcgatggcatgaacatcttcaacgtctccaccgccgcggccttcgtcgtcgccgcggccggtggcaaggtggccaagcacggcaaccgcgccgtgtccggcaagagtggcagcgccgatctgctggaagccgctggcgtctacctggggctcaagccggagcaggtcgcgcgctgcgtcgagagtgtgggcgtcggtttcatgttcgcgccgtctcatcacggcgcgatgaagcacgccatcggtccgcgccgcgagctgggcctgcgcaccatcttcaacatgcttggcccgatgaccaacccggcaggtgccaaacatcaggtcatcggcgtgttcagccaggcgctgtgccggccgatggccgaagtgctgcagcgcctgggtagcgagcacgtactggtggtgcacgcgcaggatgggttggacgagatcagcctggccgcgccgaccttcattgccgagctcaaggacggcaaggtcagcgagtaccgcatccagcctgaggatttcgctatcaagagtcagagcctgatcggcctgaccgtcgacaacgccgagcagtcgctggcg

SEQ ID NO: 239536 - DNA, 1036 bp, Unknown
  Bacterial polypeptide expressing nucleotide sequence isolated from the Sargasso Sea
aatgttttctaatccatcaaactctgaaatcctaaataatttgttagagggaagggaccttgatgatttaacttctagatccttaatgcaaagatggcttaatgatgaaatttctgatgttgaaacaggagcttttttgagtgctttgagagccaagagctctactggtgtcgagctaagttctatggctgaggaactcttgaatgtttgcgaattgccagtatcaagaccaaatttgtatttggtagatacttgtggaacaggaggagatggagctaatacattcaatatttcaacagcagtagcatttgtttctgcatcttgtggggtaaaaatagcaaaacacggaaataaaagtgctagcggaaaagttggctctgctgatgttttgttgaatcttggtttgaatttagattgctcattagaaaaagtaatcaaagccgtaagtcaaattgggataacttttttgttcgcacctgtttggcataaatctttaataaaacttgctccattaagaaagacccttggaataaggacagtatttaatcaacttggaccattggtaaatcccttaagacccaatgcacaagttttaggtgttgcttctgaagaacagttagaacctatgggaagcgctcttttaaaaatgggtatgaatagagcaatagttgttcatgggtctggtgggcttgatgaagcttcgcttcaaggagaaaataaattagtatttgttgataatggtgaactgaggttttcagaaataaatatttcagacttcaaccatggaaatatatctaacgaaaaacttgtggtttctgataaagagtctaacgatgaaatattaaagtctgtattaaatggttctggacaaaaatctcatattgatgttgttgctttaaactctgctttagtgctttgggtcgcaggtattgaggatgatttaaatgaaggatttaataaagctttattttctataaatcaaggagatccatggaaaaagtttttacttttaaaaaattatttaaatgcaaattaa

SEQ ID NO: 239537 - DNA, 934 bp, Unknown
  Bacterial polypeptide expressing nucleotide sequence isolated from the Sargasso Sea
tatgtttaaaggaactctatctgattctgaaatcaaaaatgtactagtggcactgaatgccaagggcatatgtactgatgaagtaattgggtttgcaaaagccatgagaaaaatatcaaccaaagttgtaactgatgaaaaagttgttgattgctgtggtacagggggagatggaataaatacattcaatatatcaacatgctctgcttttatatcagctgcctcgggagtaaaagttgcaaaacatggcaacaaggcaatcacaagtaattcagggagtgcagacgtgcttcatgatgctggcgcaaaacttgatttatctccagaaaaagtaagccagtgcatcaacgaggtaaattttgggtttatgtttgcaccattacaccataaagctatgaaaaatgttgcagcatctagaaaagagattgcacccaataagaccatatttaacatgctcggacctattacgaatcccgcgaatgcacagattcaacttatcggggtatttgataaaagcgcaatgcaccttgtggcagactcactcatggaattaggaacatccaaggcgattatactaaactcaagggatggaatggacgaggccagtatttatgctgaaacagacatcattgagataaaagatagtattaaaactcagtacacaattaatcccaaagactatggtataacaggaaaagactttgatagtataaaaacaagcagtgagaagagcagtcttgattttatatttagtgttataaataatgaagaatcggacgcaaaagaaatttgtgtcttgaatgctgcactatctgttatgttatataaagacatagaactgaatgattctatatcgcagtgcagagaatccctgtctgaatacaaagtcagagataaattcaatcaatacatagatttcacaaatcaggtataa

SEQ ID NO: 239538 - DNA, 997 bp, Unknown
  Bacterial polypeptide expressing nucleotide sequence isolated from the Sargasso Sea
aatgacaaatttaattgatattttaaaaaatggtaaaaatctttcatttgatgaaagtaaaactctttttaatgagcttatggaaggaaaatataacgatagtgcaatcatagaaattttagagtccctttcaaaaaaaggtgaaactaaagatgaattggctgggggaatttttgttttaagagaaaaggcaacaaaagtagaagctgatcaaaatacaattgatacatgcggaacaggtggagatgggcagaattcgttaaatatttctactgcagctgcaattgttttagcaagtttgggagtaaaggttgctaaacatggtaataaagccgtttcctcgaattgtggttcagctgatgtgttagaggcccttaaaattaatataaacttaaaacctaatgaagctgaagagagtataaaaaaattcaattttgcatttatgtttgctcctaattatcattcagcgatgaaatatgttgggcctgctagaaagaaaatgggaaagaaaacaatttttaatttaattggacctttaagcagtcctgcccaaataaaaaggcaagtcgttggagtgtttcataaaaaatggatgaaaccttttgcagaggcactgaaagacaatggtgttatccatgcgtacatagttcatagcgatgatggtatggatgagatctcaccttttgcaaaaacaagcgtagttgaacttaaagataaaaaaattaaagaatttatcattgatccaaaaactttaggtattaattgtaaagataaagaaagtttaaaaggaaaaaatgcagaatataattctgaaaaaataatagaaatttttaaaggaaaaaaaaatgaattttcccagtctgttgctcttaatgtcgctgcaggattaattgtttcgggtaaggaaactgattttaaaacagcatttgaaatagctacaaaacatttaaattcaggaaacgtgttccaacacttaactaagattcaatctttttaa

SEQ ID NO: 239539 - DNA, 1018 bp, Unknown
  Bacterial polypeptide expressing nucleotide sequence isolated from the Sargasso Sea
atgaatatacaagaaggaataagcaaagtagtctcaaatcaagatcttcaaaaacaagaaatgtcttctgttatgtttgagatattagaaggtaaggctactgatgctcaaatcggtgcttttttaatagctttatcgatgaaaggagaaacggttgaagaagtaattggcgcagttgaagtaatgagagaactttctgcaaaagtcaaaactgatttaactcacctggtagatacttgcggtacaggaggatcgggaattggtatttttaatgtatcaacagcttctgcatttgttgcaagtcaatgtggagcaaaagtcgcaaaacatggcaacaggtcagcgacgaggagcagcggtagcgctgatcttcttgaacaagcaggtgttcctcttgcacttaaacctactgaagtagcagattgtataaaaaatatcggcttaggattcatgtttgctccagcccatcatagtgctatgaagcatgttgttggtcctaggaaagaaattgctcaaaagagtattttcaatgtccttgggcccttgactaatcccgcatctgctaaaagacaagttatgggtgtttatgataagaagtggatgaagcccattacaaatgtattaaaggaattgggaagtgaacataccatgattgttcactctaaagatggcttggatgagataagtatcgcctctccaaccttggttgtagagatgaaagatggagatatctctgagtatactattaacccagaagattttaattttacaacttcttcgcttaatggattacaagtgaattctccagaagaaagtcttaatctcgtaaaattagggctagctgataaacatccagaagcttcttctatgatctcgatggcagctggtgctgcactatatgtttctgaagtatcaagctcattggaggcgggtattagattagctaatgaatgtgtaaaagatggcggtgggattgaaaaacttaatcaattagttgaatactcctctaaattctaat

SEQ ID NO: 239540 - DNA, 997 bp, Unknown
  Bacterial polypeptide expressing nucleotide sequence isolated from the Sargasso Sea
atgaccgatatagtagaaaaattaaaaaaaggtgaaaatttatcttttgaagaaagcaaaagtctttttacagacctaatggaaggcaaacatcaggaagactcaattattgaaatattagagtcattcactaaaaaaggggaaacaaaagatgagctagcaggaggtatttttgtattaagagataaagctaacaaagttaaaactgaccctaatacaattgatacatgtggaactggtggagatgggcaaaattctctgaatatatcaacagccgcagctattacactagctagtatggatgtaaaagttgctaaacatggtaacaaagctgtctcctctaattgtggatccgctgatgtgcttgaagcgttaaaaataaatattaatttaaaaccgaatgaagtagagaattctattgataaaacaaattttgcttttatgtttgctcctaattaccactcagcaatgaagcatgtagggcctgctagaaaaaaaatgggaaaaaaaactatattcaatctcattggtcctttgagtagtccagcccaggtaacgagacaagttgttggcgtttttgataaaaaatggatgaaaccttttgctgaagctttaagagaaaacaatgttgttcatgcttatattgttcatagtgaagatggaatggacgaaatttctcccttcgcaaaaacaaatatagttgaattaaaggatgctaatattagtgaatttacaatcgatccaaaaaagtttgggattaatgctagcaatagaaataatttaaaaggtaaaaatgcagcttataactctttaaaaataattgaaatatttaaaggaatatctaatgaattttcacatgctgtagctttaaatgtagctgcaggtttaattgtatcaggtaaagaaaatgattttgaagattcatttaaaaaagcttctatacatttgaaatcaggaaatgtttttcaacatttgtctaaaataagatccatctaat

SEQ ID NO: 239541 - DNA, 856 bp, Unknown
  Bacterial polypeptide expressing nucleotide sequence isolated from the Sargasso Sea
atgattgaactgctgaaaaaactgatgggacgcgaagacctgacttttcaggaagcttcagaactcattcaatgggtgatgagtgaagatgccgttgccgtccaggcttctgcgctgctggtgttgcttcaggccaaaggcatcaccgatgaagagatggccggagcagcatacgccatgcggggaagggtctcaaaaatcaaagcgcctgaggatgtcatcgatacctgtagcaccgggggaaacgggatcagtaccttcaacatttcgacctgtgcggcgatcattgctgcagcagccggagccaaggtggccaaacatggaaaccgaagcaacactcgtaagagtgggagcgccgaggcattggaagccctcggagtgaatatcaaccttggaattgaggaagtcgaaagctgtcttgtagaaatcgatctctgcttctgttacgcggtcaatcatcatcctgcgatgcgttatgcgggaccgattcgaagagaactaggagtgccgaccgtttttaacctgcttggtccattgaccaaccccgcaggagcaaaaaaccagctgatcggagttccgacacctcagttaacggggaagatgacaaaagttctgaatagattggaaagccgaagaatccttgccgttcacggagaagacgggctctgtgaactgaccgtcactgcacccacgcttgtttcggaacttcgggacggaaccatccgggaatacacaatcacggcagaggaaatgggacttcgttccggaaaactggctgacatccgaaccgattccgcagaagaaagtgcccagatgattctggcgattctttcaggagaggacgagggaactccga

SEQ ID NO: 239542 - DNA, 1024 bp, Unknown
  Bacterial polypeptide expressing nucleotide sequence isolated from the Sargasso Sea
aatgaaagaattactgcaaaaattgctggcttcagaagctctaagctttgaagaagcacgagaaatgattttatggattatgagtgaagaagctgtgactgtccaggcagcagcacttttagctttgctacaggccaaaggggttactgttgaagaaatggctggtgctgctttggcgatgagggaacgagcttctggaataaaggcaccggcaaatgctatagacacctgcagcacaggaggaaatggaatcagcacattcaacatttctacatgtgctgcaataatagcagcaggtgcaggcgctatagtagcaaaacacggcaaccgtagtaacacaagaaaaagcgggagtgctgaagcactagaagcgttaggagtgaaaataaatttggaagtagatgaagttgaaagatgtcttcgagatttgaatatttgtttttgctacgcgatcaatcaccatccagcaatgcgctttgctggaccaatacgtaaggatcttggggttcctactgtatttaatcttcttggtcctttaacgaatcctgcaggtgctaaaagtcaattgattggagttccgaatgttgaacttactttgaaaatagctcaggtacttaagcggttaggcagtgaaagagtaatggtagttcatggatatgacggtttatgtgaacttacagtcacttcccctacacatgtggcagaacttagagaaggtaatatcaatgaatatgaaataactcctgaggagcttggtctcaaaacgggaaaattggatgagataggcatagattctcctgaagaaagtgccaggataatgaaaagtatattttctggagatgagaaaggtacagcacgtgagattgctctggcaaatgctgccggtgcgttagtcgttgcaggacaggttgagaatttgaaagaaggagtagttctagctgctaagacagttgacaatggaaaagcagcagaaaaacttaatgatttaatcaagttttcatgggaaaaccatcaggcaagttaa

SEQ ID NO: 239543 - DNA, 919 bp, Unknown
  Bacterial polypeptide expressing nucleotide sequence isolated from the Sargasso Sea
aatgaaaggaaatctagatgacattcaaattgcagctttattagttggtttaaggtcaaaaggagaaacagtagatgaaataactggttttgcaaaagctatgcgacaaactatgattgaattagatcttaattttcctgctattgatatgtgtggtacaggcggagattattctggaacatttaatatttcaactgcatcatcaattgttgtggctggagcaggaataaaagtagctaaacacggtaatagatctatgacatcaaaatcaggttcagctgatgttctcgaagcattgaacgtagatataaataaatcaaatgaaaattgtattcgaagtttagaaaaaaataatatatgcttcatgtttgctcccaattttcatccagctgtaaaaaatgctatgaatgttagaagtaaattaaaaattaaaacagttttcaatattttaggtccgttatgcaatcctgcaaatgttaaaaatcaagcaatgggagtttttgaaccatcattgactaaaattcaagcacatgttttaaaaaatttaggttcaaaaaatgttatggtttttaacggagatgatggccttgacgagcttactacaacttgtgattcaaatatttcttattttttaaatgatagtaaaattatcaacttaaaatttgatccaaagtccataggaatttcattgtccaaacataaagatttacagggaggtacttcagatattaatgcaaaaattattttggatattttgaatggaaaaaaaggtcctaacagagatatagttttgctgaatgccgctgcaggaataatggttggaggtaaagcaacgtctttaaaagaaggttattctttagcggaagaatcagtcgattcgttatcggctcttaaggcattgaaaggtattcaaaagtga

SEQ ID NO: 239544 - DNA, 1009 bp, Unknown
  Bacterial polypeptide expressing nucleotide sequence isolated from the Sargasso Sea
tatgaaagactttattaacaaaataaataataaagaagatctaactcttaacgagatgcaagaagccattaatttattaatgtctggtatgtctgatgatgacgatattgaatcttttcttattggattaaatgaaaagggtgtgtcagagactgaagttactgctgctgcaattgttatgaaagaaaaatctttaaaatttgacataggcgatggttcacatattgatacttgtggaacaggcggaacaggtctacatacttttaattgctcaacagcctcatcttttgttgctgcagctgcaggagcaaaaattactaagcatggtaataaagcaatttctagcaaatctggtagtgcagactttcttgcacagtcaggtgcaaacataaatcatgaaagagaaaaattaatatcaatttttgataaagttggattcgtatttttatttgcaccacttcatcatgaagcgatgaagttcgtgatgccagttagacaaaagattgctgaaaaaactattttcaatttgttaggaccgcatactaatccatgcagtgcaaaaaaacaggtcttaggagtttacgatgagaagcttgtaaaaatgttttctaatgttgcaaaaaatcttgatatgaaacatgtcatgattgttcacggcgatgatggtcttgatgagatttcaatttgtgcagaaaccactgtttcggaattaaaagacaataatattagcgaatataaaatttctccaaaagattatggactaaacctatcttcatttgatcaaattgctgcgaattcttcggatgagagccttttgcttgttaacagcgcatttaatggagagagttctgctgtgcaagacatgatcgcattaaatagcggggctgctttatatgtagcaagtgtagttaactctataagtgatggcgtagaaatggcatttgattgtatgaataacggacaagctgcacaaaaattagcagattatgtgagggtttcaaacgaataa

SEQ ID NO: 239545 - DNA, 848 bp, Unknown
  Bacterial polypeptide expressing nucleotide sequence isolated from the Sargasso Sea
gatgacctcaacctggcctcagttgctggagctcttgctccgtggcggtgagcttgagggtgatcaagctgctgccctgatgcaggcttggttggccgaagagctggaaccagttcagaccggagcttttctcgctgccttgcgttgccgcagttaccggtcagttgaacttgctgcgatggccaaggtccttcgttcagcctcgcccctgccctgtgctcgcccagcgctgcctctggtcgatacctgtggcacaggaggagatggcgccgacagtttcaacatttctacggcggttgcgtttaccgctgcagcctgtggggttgtggtggccaagcacggcaaccgcagtgcgagcggcaaggttggctcggctgatgttctagaaggcctcggtctccagctccaggcacctctgcaacaagtcgtgggcgcccttgagcaggctggcatcaccttcttgttcgcgcctggctggcatccagccttgaagtcgttggctccattgcgccgctgtttgggggtccgcacggtcttcaatcttttgggccccctggtcaaccccctgcaaccggatgctcaggtgcttggtgtcgccaccgaagatctggtggagcccatggctggtgccctgcagctattgggtttaaaacgtgctgtcgtcgtccatggccatggcggcctcgatgaggccagcctttcaggcatcaatcaattgatggttttagaaaacggtcaattaaggcgcgatgagctggatccacaacaacttggcctgcaactgcaaccgatttcggccgttgctggaggcgacttggcttgcaaccaggagatcttgaaggcagttt

SEQ ID NO: 239546 - DNA, 1012 bp, Unknown
  Bacterial polypeptide expressing nucleotide sequence isolated from the Sargasso Sea
atgaaagaatatcttcaaaagattaataatggccaagatctcctactagatgagatgaaaagtgcaattaatcaaattatgtctggaactgtttcagatgcagatattgaatcttttctaacaggcttaaacaacaaaggaatatctgaaaatgaaattacaggtgctgcagtagtcatgaaacaaaagtcactcaaaattgatgtcaactgtaaagaaaatattgatacttgtggaacaggcggtactggaatacatacttttaattgttccacagcatctgcatttgttgcagcggctggaggagcaaagattacgaaacacggaaataaagctatttctagtaaatctggtagtgctgattttttaactcaggcaggagctgatataggtcatgacagagaaaaacttggatttatatttgaaaatgttggttttatatttttgtttgcacctcttcatcatgaagcaatgaaatatgtcatgcctgtaagacaaaaaatctcagaaaaaactatatttaatttattaggaccacatacaaatccatgtaatgcaaaaaaacagataataggagtttatgatgaaaaactcctaaaaacattttgcaatgtttctaaaaatcttgaaatggagcatgtcatgattgttcatggaagcgacggtttagatgaaattacaataaccggccgcacttcaattgttgaactaaaagataataatattaatgagtttaatatttcacctaaagattttggtctaagccttgccactcttgatgatatttatgcaaaatcgtctgaagatagtttgaggctagttgaacaagcatttgcaggagaaaaatcacctgttcaagatatgattgctcttaacagtggagctgcactatatatatcaggagtcgttgattcgattggcgatggagtggatcaatcatttaagcttatgaataatggagaagcacaagcaaagctcgcttcgtatgtagaaatttctaatcagctatgaa

SEQ ID NO: 239547 - DNA, 1033 bp, Unknown
  Bacterial polypeptide expressing nucleotide sequence isolated from the Sargasso Sea
tatgaataacatagaaaaaatagtcgatattttagagagtggtcaacaaccatctcgttctgagtgtagtttttttgtaaataaagtttttagcggaggagtagacaaagatgtaattacaaaaattctaagattattcaataatgttggctttgatgctcctcaattatcaggttttgctgaatctatgagaaaagtatccaaaaaagttatatgtaagaagaatattgtagataattgcggaacaggtggagatgctatgcatactttcaatatatctacgacatcttcattaatcgcatcatgttgtgaggttagtgttgccaaacatggcaataaatctatcactagtaactcgggtagcgcagacttgctatctggcgtcggtataaaaataaatttatcgccggaagctgtaagtaattgtattgaaaagttaaattttggatttatgtttgcaccactacatcattcttcaatgagatatgttgctgaatctagaaaggagatagcacctgagaaaactatattcaatctcctaggtcctctaacaaacccagctggagcaaaaaagcaattgataggtgtttatgactcaaagtacatgaaggtcattgcagagacattatctgacttaggcacagagcgagctaaaattgtacactcaaatgacggtcttgatgaggtaagtttatttgatctaacttcaataacttcactaaaaaatcataagatagaatcatatgattttgacccatcagatcattttgatatctcaaggtcaaaaattgatgacataagagtatccagtatcgacgagagtgttaacatgtttcgaggtgttgttaataatgagccaggaccagctagagatatcagtattctgaattcagctttccttttgtcaattgcatacgacgatatctccatttctgagggcataaaattatgtcgcaaagctcttgataaatcattagttagagataaattagaagaactcattacattaacacagtcatatgaagatgcttga

SEQ ID NO: 239548 - DNA, 691 bp, Unknown
  Bacterial polypeptide expressing nucleotide sequence isolated from the Sargasso Sea
tatgattcaagaatttattgaacaattagaaaacaaagaagatcttgattttcattcaatgcaatctgcaattgaattgataatgacaggtgaggttgatgattcatttattgaaagatttttattagctttaaatgaaaaaggtatcagtgaaaaggagataactgcagctgctaatgtgatgaaagataagtctttaacttttgatattggcaatggggatcatatagatacttgtggcactggtggttctggactgcatacttttaattgttctacagcatcagcatttgtagctgctgcaggcggcgcttcagttacgaaacatggcaataaggccgtctccagtaaatcaggaagcgcagacttattgatagcagctggagctgacattgtgcatgaaagggaaaaactcgaaactatatttaatcgggttggatttgtttttttatttgccccgttacatcaccaatctatgaaatatgtaatgcctgcaagacagaagataggtaaaaaaactttatttaacctgcttggacctcacactaatccatgtggagcaaaaagacaaattttaggcgtctatgaaaaaaatttagttaaatcttttgcttcagttgcaaaaaatttatccatggatcacgtccttattgttcatggtttcgatggattggatgagattacaattacc

SEQ ID NO: 239549 - DNA, 1009 bp, Unknown
  Bacterial polypeptide expressing nucleotide sequence isolated from the Sargasso Sea
tatgaaagactttattaacaaaataaataataaagaggatcttaatcttaacgagatgcaagaagccattaatttaataatgtctggtatgtctgatgatgacgatattgaatcttttttaattggattaaatgaaaagggtgtatcagagactgaagttactgctgctgcaactgtgatgaaagaaaaatctttaaaatttgacataggcgatggttcacatattgatacttgtggaacaggcggaacaggcctaaatacttttaattgctcaacagcttcgtcttttgttgctgcagctggaggagcaaaaatcaccaagcacggtaataaagcaatttctagcaaatctggtagtgcagactttcttgtacagtcaggtgcaaacataaatcatgaaagagaaaaattaatatcaatttttgataaagttggattcgtattcttatttgcaccacttcatcatgaagcgatgaagttcgtgatgccagttagacaaaaaattgctgaaaaaactatttttaacttgttagggccacataccaatccatgcagtgcaaaaaggcaggtcttaggagtgtatgatgagaaacttgtcaaaatgttttctaatgttgcaaagaatcttgatatgaaacatgtcatgattgttcatggcgatgatggtcttgatgagatttcaatttgttcagaaaccattgtttcagaattaaaagacaataaaattagcgaatataaaatttctccaaaagattatggactcaacgtatcttcatttgatcaaattgcagcgaattcttcgtatgaaagcttattacttgtaaatagcgcatttaatggagagagttctgctgtgcaagacatgattgcattaaatagcggggctgctttatatatagcaaatgtagttgactctataagtgatggcatagaaatggcatttgattgtatgaataatggtcaagctgcacaaaaattagctgactatgtaagggtttcgaacgaataa

SEQ ID NO: 239550 - DNA, 748 bp, Unknown
  Bacterial polypeptide expressing nucleotide sequence isolated from the Sargasso Sea
aatgaaagaagttttagaaaaaattaataatcaagtgaatctttctatgatagaaatgcaggatgctatgagtcagatcatgtcaggtaaagtaaatgacattgatatggaatcattcttaatcggacttaatacaaaagggatatcagaagaggaaataactgcagccgcaatgatcatgagagaaaaatctcttcaaattgatattggagatggcagtcatattgatacctgcggaaccggaggaaccggattacatacatttaattgttctacggcttctgcatttgttgcagcagcgggtggtgcaaaaattactaaacatggaaataaagcaatttctagtaagtctggtagtgccgattttttagaagaagcaggtgcaaatatcaatcatgacaggagtatgcttgataacatatttaatgagattggttttatttttttgtttgctccattgcatcaccaagcaatgaagtatgtcatgcctgtgagacaaaaaattgctgccaagaccatattcaatcttttaggaccacatacaaatccttgtaattcaaaaagacaattgcttggtgtttatgacaaaaatttactaagcactttttctcaggtagctaaaaatttagacatgaaacacgtgttagttgtgcatggagatgacggtttagacgaaataagtgttacttcagagacctctatttcagaattaaaagatatgcaaataaaagaatataaaatttctcca

SEQ ID NO: 239551 - DNA, 565 bp, Unknown
  Bacterial polypeptide expressing nucleotide sequence isolated from the Sargasso Sea
aatggaaaaaattattgaaaaattaaaaaataaagaaaatttgagctttgaggaaagtaagtcttcatttgaagatataatgtcaggaaaagttaaagaacaacaaattcacgattttttaatactctcatcaaaaaaaggagaagtatcagatgaaattgctgctggtgtatttgttttacgtaataaagctaatcatgtaaatgtatcggatgatactatagatacctgtggcacgggtggggatgggaaaaatactttaaatatttcaactgctgcagcattattgctatcaagttttggtgttaaggtagcaaaacacgggaataaatctgtctcttccaagtgtggttcggctgatgttttagaaaaattaaatattaatatcaatcttggacccaaagaagtagaaaaaaatatcaataataataattttggtttcatgtttgctccaggttatcactcagcaatgaaatatgttgggcctgttagaaaaaaaattggaaaaagaacaatatttaatttaattgggccattaagtagtccagcaaaagtaaaaagacaa

SEQ ID NO: 239552 - DNA, 981 bp, Unknown
  Bacterial polypeptide expressing nucleotide sequence isolated from the Sargasso Sea
aatgtcttttaatctatcaaacgctgaaattctaaataatttgttggagggacgggaccttgatgcattaacttccagatcattaatgcaaagatggcttcatggtgaaatttcagatgttgagacaggagcttttttaagtgctttgagagcaaagagttgtacaggtatcgaactaagttctatggctgaggaactcttaaatgtttgcgaattgccagtagcaagaccaaatttgtatttggtagatacttgtggaacagggggtgatggagctaataccttcaatatttcaactgcagtagcatttgtagctgcatcttgtggggtaaaaattgcaaaacacggaaataaaagtgctagtggaaaagttggctctgccgatgttttgttgaatcttggtctgaatttagattgttcattagaaaaagtaatcaaagctgtaagtgtaattggaataacttttttgttcgcacctgtttggcataaatccttaataaaacttgctccattgagaaagacccttggagtaaggacagtatttaaccaacttggaccactggtaaatcctttaagacctaatgcacaagttttgggtgtagcttctgaggatcttttaaaacctatgggaagcgcacttttaaaaatgggtatgaaaagagcaatagtcgttcatggtactggtggtcttgatgaagcttcgcttcaaggagaaaataaattagtatttcttgataatggtgaattgcggttttcagaaataaatatttcagactttaaccatgaaaatatatctaacgaaaagcttgtggtttctgatcatgagtctaacgaggaaatattaaagtctgtcttagatggttctggacaaaaatctcatattgatgtagtcgccttgaactctgctttagtgctttgggccgcaggcattgaggatgatttaaatgaaggatttaataaagctttattttcgataaatca

SEQ ID NO: 239553 - DNA, 916 bp, Unknown
  Bacterial polypeptide expressing nucleotide sequence isolated from the Sargasso Sea
accctcacagtttggagcattaatgtctgcattggcaatgaaagaagagacttcaactgaattagcaggaatggcatcaataatgagagaatattccttaaaaatcaaatcaaaggaaaattctatagacgtatgtggtactggtggcagtggattgaaatggttaaatatatcaactgcttcagctattatagtatcctcattaggaattccagttgcaaaacatggtaatagagcaatgtctggaaactcaggctctgcagacgttttagaagagctaggagtaaaaattcagattgatccccaaaaagtagaagattgtttgcatgagattgatctagcatttatttttgctcaatcttttcatccatccatgaaatttgctgctcctctaagaagagaaataggtattagaacaattttcaattttttagggccattgaccaatccagcaggagtaaaaaaacaaattataggaacacccaatagtatagttgcaaaaaaaattgcagaggccgcaaaaatcctaaattcagaaagaataataacaatcagtggagaatctggtgctgatgagattgagatagataataaaacaaagttttatgactcaaaaaatgaatttaaagaagaaataattaattttacaaaaggatatgattcaaagtatctgatagttagttcacctaaagaatctgcaaaaaaaatagttgactctttcaacttaaaaagtgttagttctgatgaagagaaaaaatctgttctacattctatactaatcaattcttcaatcgctctatatttaaatgaaagtagttcaaatttagatgaatgctatcaaattgcagaagaaaatgtatacaacggtaaagccttaaaaaagctaaatcaacttattgaaataactaataaataa

SEQ ID NO: 239554 - DNA, 1045 bp, Unknown
  Bacterial polypeptide expressing nucleotide sequence isolated from the Sargasso Sea
atgaatgcaacatcgattcagcccctgctcgatattttgtttcagggcaaggcattaacacgcgagcaaaccgccagcctctttagcgcccttatccaaggtgaaatgaatgaggccgtgatggcggcgatgttaatggcgcttaaaattcgcggcgaaaccatagctgaaatcagtggcgccgccgatgcgatgcgcgcagccgctaagcctttcccttattcggaatcaagccgcagccaagggattatcgatatcgtcggcaccggaggcgatggttttaacaccattaatatctccaccacagccgcctttgtcgccgcagccgctggtgcaaaagtggcgaaacacggtaatcgctccgtctcgagcaaatcgggctcgtcagatttactcgcccaatttggcatcgatttaactatgtcacccgagctggcgggccgctgcctcgaatcactcaatctgtgcttcctgtttgcgccccactaccatggcggtgtcaaacatgcagtgcctgtgcgccaagccctgaaaactcgcaccttattcaatgtgttagggccattgattaacccagcgcgcccagaatttatgttgcttggggtatatagcccagagctagtgacgcctatcgcccgcgtactgcaagcccttggcacgcaaagagccatggtggtacatggcagtggtttagatgaagtagcgctccatggcagcacacaggtcgccgaactcaaagacggtgagattattgaatatcaattaacaccggcggattttggtgtgcctcaagcccacattactgagcttgaagggggcgagcctgcacagaacgcccaaatcacgcaatcgattttgcaaggacaaggcagcgatgcccacacccatgcggttgccatcaatgcgggttgtgccttatatctgtgtggcctatcggactcagtcaaagccggcaccgcccttgcgctcaataccataaaaagcggcaaagcctttgaattactgaatcaactcgctaaagtcagcagcgaagcacaggaataat

SEQ ID NO: 239555 - DNA, 1012 bp, Unknown
  Bacterial polypeptide expressing nucleotide sequence isolated from the Sargasso Sea
catgaagaattttataaaaacattaaacagtaataaacatcttaatttagaagaaatgcaagaagcaattaatcagattatgacaggtatggttgttgaagaagatatcgaatcttttcttttaggtttaaataagaaaggcataacagaagatgaaattactgcagcagcaattgtcatgaaagataaatctcttaaatttgatattggagatggatcgcaaatagatacttgtggaactggaggaactggactgcatacttttaattgctcaactgcatcatcatttgttgctgcggctggtggtgcaaaaattacaaaacacggtaacaaggcaatatcaagtaagtctggaagtgcagactttcttttagagtcaggtgctgatatcagccatgatagaaataaattaaaggcaatttttgaagatgttggatttatttttttgtttgcaccccttcatcatcaagcaatgaaatatgtaatgcctgcaagacaaaagattgcagaaaaaacaatttttaatttactaggaccacacaccaatccatgtggagccaaaagacaagttttaggtgtttatgacaagaatttagttagcacattttctaatgttgctaaaaatcttgatatggaacatgtattagttgttcatggagatgacggacttgatgaaatttcaatttgctctgaaaccttagtatctgagcttaaagaacataaaatcaatcaatataaaatttctccaaaagattttggattaaatcttgcatcatatgatgaaattgttgctaactcatctaaagaaagcttaggattagtaaatgaagcatttgatggaaaaaattctgcagttcaagatatgatcgctcttaatagcggggcagctttatatatatcgaatattacgaacacaataaatgatggagtcgagatgtcattcgagcttatgaataatggtaaggcagctgaaaagttagcggcctatgtaagagtttctaataaaaaatga

SEQ ID NO: 239556 - DNA, 725 bp, Unknown
  Bacterial polypeptide expressing nucleotide sequence isolated from the Sargasso Sea
catgcatcatcatctcaacaccctctatcagggtcagtctctgagccgtgaaagtacccgcgacgccttcggccaggtggtacgtggcgaagtggaccccatcgtgctcgccagtctcctgaccgccctcaagatcaagggggagaccccggaggagatcgctggcgccgccgaggccctcttggcagaagcgcgcgacttcccgcgtccggactatgaattttgcgacatcgtcggcaccggtggcgatggcctcaacaccatcaacgtctccaccacctcggcgctggtcgccgccgcctgcggcctgaaagtggccaagcacggcaaccgctcggtctcgagcaagtcgggttcgagcgatctgctggacaaaatgggcatcaagctcgacatgagcccggcgcaggcgcgccgctgtctggacgagctcggcatctgcttcctgttcgccccccagtaccacgccggggtgcgccacgccatgccggtgcgccaggccctcaagacccgcaccctgttcaacgtgctggggccgcttatcaaccccgcccgccccacctatcagctgatgggggtctatgcccccgagctggtgcgccccatcgccgaaaccctgctggcactggggctgaaaaccggtatggtggtgcacggtgccgggctggatgaaattgccatccacggcccgaaccaggtggcccagatccgtgacggcgagatcc

SEQ ID NO: 239557 - DNA, 766 bp, Unknown
  Bacterial polypeptide expressing nucleotide sequence isolated from the Sargasso Sea
ggtactggtggagatggaaaagatactctaaatatttcaacagcatcagcgcttttgttagcaagcatgggtgtaaaagttgcaaaacacggaaataaagcagtttcatctaaatgtgggtcagctgacgttcttgaagccttaaatataaatatcaacttggaaccaaatcaaatcgaggaacagattaaaaataacaattttggcttcatgttcgctccaaattaccactcggcaatgaaatatgttggtccaacaagaaaaaaaataggaaaaaggactatttttaatatgataggtccattaagtagcccggcgcttgttgaaaggcaggtaattggtgtttttgataataaacttttaaaagtttttgcaaatgcactaaaaaatctaaatttaaaatttgcatggattgtaaatagtgaggatggtctagatgaaatatcaccttacgctaaaactaatgttgtgcaattgaaaaataatgaaatatctgagtttattattgatccaaatgagttaaatgttaatgctggtaaatttgaaaatttagtaggagatgatgctaaatttaattctgatcaaattttaaatatttttcaaggggaagataatgatttttcaaaagcagtatgtctaaatgctgcagcaggattaatagtttccgaaaaatatgatgattttaaaattgcttataattataccagagggtttattaaatctggagctgcattcaaatatgtaaaaaatatacagaatgtctgaa

SEQ ID NO: 239558 - DNA, 1021 bp, Unknown
  Bacterial polypeptide expressing nucleotide sequence isolated from the Sargasso Sea
atggaaaaaattaacagagatttaacatttgacgaaatgtcatctgtaatgagtgaaattctaaatggaaaaaatagcgatgaagaaattgctgaatttctaaaagacttatcagacaaaggagaaactaacgaagaattacgtgcgatgtttacaaaaatgaacgaatattcagtaaatatcaatccacgttgtcatgggaatttgattgatgtttgtggaactgggggagacaacttgcagacattcaatatttcgactgctgcatcatttgttattgcaggggcaggaggcaatgttgcaaaacatggaaatcggtcagtttcaggcatatctggaagtgcagatattttcgaatattttggatttgatttgaactcagagccatggatggttgaagaaatgatagaaaagataggaataggattcatgtttgcgccaaaatttcaccctgctatgaaaaatgtggcaccagcgagaaaaataattggtaaaagaactgcgtttaatctgttaggacctttatgtaatcctgcaaaagttagacatcaaatgataggagtttttgcagataattacattgaaagaattgcaagaatcatgcaaaagaatttttcagatacagtactaacagtaaggtctgatgatggaatggatgaattgtcaacaacatcaaaaaataaagcatgtttattaaaaaatgaagagataacagaattcatcatagacccaagtaagtataatatggaaaaaggaaatttatcagatattcaaatttctactaagaaagaagccatagaatcatttgtcaaagtattgaataacacatcaaataaaacaatgaaagaaataacaattctaaatgcagcaggaggattgttggtaggaggattatgtgacaaatttgaagaaggcatagaattagcacgacaaacagtcgataatgggaaagcatttgaaaaattaaaacaatttgtaaaagaaaataattcattggaaaaattagaggagtttaactgac

SEQ ID NO: 239559 - DNA, 880 bp, Unknown
  Bacterial polypeptide expressing nucleotide sequence isolated from the Sargasso Sea
ttgaaaaaatatttagaaaaaataataaatgaagaaaatttatcagttgatgaatcaatgagtttaatgagcatgatcatggatggcgaacttaatccctcgcaagtcacctccattatcgtcgccttaagatgcaagggcgaaagtctaaatgaaattcttggctttgctcaggccatgagaaataatatgaaaaaagctgcgatcaatgttccatctatagatatgtgcggaacagggggtgattcctttggaagttttaatatttcaacagttgcatcttttgttgttgcgggcgctgggatacatgtagctaaacatggaaacagatctattagttcaaaatgcggttcagcagatgttttagaagaacttggaattgatattgatgtttcaatttctaaaacaattttaaacatagaaaaaaacaagctgggtttcttatatgctcctaaatatcatccagctatgaaattcgcagctgaagctagaaattcaataaaaattaagacaatcttcaatcttttaggaccactcacaaatcctgcaaatgcccaagcgcaatccatgggtattttcaataaagatctcactgaacaacaagctaaggttctacaaaagttaggcgttaaaagaggaatggttttttgcggatacgatggattagatgaaataactataacaacaaaaacaaggattagtctttttgatgaaaatagcgatgttcgttcgtacgattttaatcctgaagattatggttatagaatccacggcaaacattctattcttgggggatcttcaaaggataatgcaaaaattacaattgacatacttaagggagaaaaaggacccaaaagagatatagtcatattgaatgctg

SEQ ID NO: 239560 - DNA, 772 bp, Unknown
  Bacterial polypeptide expressing nucleotide sequence isolated from the Sargasso Sea
atgcaagatgccattaatttaataatgtctggtatggttgatgatgacgctattgaatcttttcttattggattaaatacaaaaggcatatcagaaatcgaagttactgctgcggcaactgtaatgaaagaaaaatctttaaaatttgatattggtgatggtaaacatatagatacttgtggaaccggtggaacaggtcttcatactttcaattgctctactgcatcttcatttgtagccgcagctggcggagcaaaaattactaagcatggtaataaagctgtatctagcaaatctggaagtgcagactttctttcagagtcaggtgcaaatataaatcatgaaagagaaaaattaatttcaatatttgataaagttgggtttgtattcttatttgctcctcttcatcatgaagcaattaaatatgtcatgccagtaagacaaaaaattgcaaaaaaaacaatttttaacttattagggcctcatactaatccatgcagcgctaaaagacagatcataggagtttacgacaaggagtttgtaaaaatgttttctaatgttgctaaaaatcttgatatggaacatgtcatgattgtgcacggcgatgatggtcttgatgagatttcaatttgttcagaaaccactatttctgaattaaaagataatcaaattaatgagtataaaatttctcctaaagattttggactaagcatatcttcatttgatcaaattactgcaaattcatctaacgaaagcctttttacttgttaat

SEQ ID NO: 239561 - DNA, 1021 bp, Unknown
  Bacterial polypeptide expressing nucleotide sequence isolated from the Sargasso Sea
catgaaaaaaattaatggtgatttaacatttggcgagatgtcacaagtaatgagtggtattctaaatgggagaaatgatgatcaagaaattgcagattttctaagagacctatctaacaaaggagaaacaaatgaagagttacgtgcaatgtttacaaaaatgaacgagtattcagttaacatcaacccacgttgtcatggaactttaattgatgtatgtggaacgggaggcgataacttacaaacattcaatatttcaacagcagcagcatttgtgattgcaggtgcaggagggaatgttgccaaacatggaaacaggtcggtttcaggcatatctggaagcgcagatatttttgaatattttggattcgatttgaactcagaaccatgggtagttgaagaaatgattgagaagataggaataggattcatgtttgcaccaaagtttcaccctgctatgaaaaatgtggcacctgcaagaaaaataattggtaagagaactgcgtttaatctattaggaccattatgcaatcctgctaaagtaagacatcaaatgataggagtgtttgcagataattacattgaaaggattgccaaaattatgcaaaagaatttttcagatacggtactaactgtaagatctgatgatggaatggatgaattatcaacaacatcaaaaaacaaagcatgtctattaaaaaatgaagagataacagaattcattattgatccaagtaagtataatttagaaaaaggtaatttaatagatattcagatttcaacaaaaaaagaagctattgattcatttgtgaaagtattgaataatacatcaaacaaaacaatgaaagaaattacaattctaaatgctgcaggaggattattggtaggaggattcagtaataaatttgaagaatgtgtagagttagctaaacagacagtaaataatggaaaagcatttgaaaaattaaaacaatttgcaaaagaaaataatgcattagataaattagaggagtttaagtga

SEQ ID NO: 239562 - DNA, 1021 bp, Unknown
  Bacterial polypeptide expressing nucleotide sequence isolated from the Sargasso Sea
catgaatcatgatttaaaagattttttagctcaacttctaaatggtcaagacctaacagaagatcaatctgaagaattgatgacagctctagcagcaggctctgttgaaccagcattggcaggagctttattggtctctttaagaatgaaaggcgagtcagccgaggaagtaagaggctttgccaatggcatgcgaaaggcggccaaagaagttgtgctggaaaattcttcagagcttatcgatattgtgggaacaggtggagacggttcgcacagctttaatatatcaacaggcgcagcattgctgagcgctgcttgtggacttaaagttgcaaaacatggcaatcgatcggtctcaagcaaatccggaagcgctgatttactcgagtttcttggctatcgctttccaatggatgccgatggcgtcaaagcacaaataaagaaaaacgggtttagctttttatttgcgccaaactttcatccggcaatgaaacatattgcgcctattagacaagctttaaaggcaagaactgttttcaatatccttggaccacttacaaatccagccaacccatctttttatctgctcggtgcatttagttctcaaatggcaacactgatggcgtctagtttgagtggaatggacatgaaccgtgcatttgtaatccatggattaaatggttgggatgagccaacaccggcttctaattttgaactattcgatgtgagagagggttcaatttctcacacaatcattgatccgtctgaatacggaattaagaaatgcaaagaggaggatctgaagggggggacatccgaagtgaatgccgaggcactgttaaaagtttttgagggcaaagacaaaagcgctcatgaagacgcattgattttaaatgccggtttagctcttcaagtttcaggtgaagcaaaagagcttagagatggtatagagattgctaaagaaacaattaagagcggtaaagcagaagactttctatcaagcttgaggaacgatgagtaa

SEQ ID NO: 239563 - DNA, 586 bp, Unknown
  Bacterial polypeptide expressing nucleotide sequence isolated from the Sargasso Sea
tatggaaattaataatttaaaaaacaaactctttttacaaaaagatttaacagcagatgagtcagctgatctttttgaactaataatgaatggcaagttaagtgaaatagatatgtcagcaatattaattgctctaaaacttaaaggagaagctaaaaatgaaatttttggagcttcaaaaataatgcgctcaaaatctatgaaaatatcttctccggataatactgttgatacgtgcggtactggaggagatatgtcaaatacattgaatatatctactgctgcctccttggtggctgcaagttgtggagttaaaatagcaaagcatggtaataaatctgtaagctctaaatctggttctgcagatatgcttgagtatattggttacaaattttctgatgatcctaaaaggttagaagaccaacttaacaaaaataatttttgctttatgtttgcacaataccatcactcagctatgaaatatgttattaatgtcagaaaatcattaggtaccagaacaatatttaatctcttaggtccgttaacaaatccagcaaataccaaaaaccaacttttaggtgtgtac

SEQ ID NO: 239564 - DNA, 1036 bp, Unknown
  Bacterial polypeptide expressing nucleotide sequence isolated from the Sargasso Sea
aatgtcttctaatctatcaaacgctgaaatcctaaacaatttactggagggaagggatcttgacgaattaacttctaaatctttaatgaaaagatggcttaatgatgaaatttcagatgttgaaacaggagcttttttgagtgctttgagagcaaagagttctacaggtgtcgaactaagttctatggctgaggaactcttaaatgtttgcgaattgccagtagcaagaccaaacttgtatttagtagatacttgtggaacggggggtgatggtgctaatacattcaatatttcaactgcagtagcatttgtggcagcatcttgtggggtaaaaattgcaaaacacgggaataaaagtgctagtgggaaagttggttctgccgatgttttgttgaatcttggcttggatttaaattgttcattagaaaaagcaatcacagccgtgagtgaaattggaataacttttttgttcgcacctgtttggcataaatctttaataaaactagcgccattaagaaagacccttggaataaggacagtttttaatcaacttggaccattagtaaatcctttaagacccaatgcgcaagttttgggagttgcttctgaggatcttttaaaacctatgggtagtgcccttttaaaaatgggtatgaacagagcaatagtcgtttatggttctggcggccttgatgaagcttcgcttcaaggagaaaataaattaatatttgttgaaaatggtgaattacggttttcagaaataaatatcacagactttaaccatgaaaatatctctaacgaaaagctcgtggtttctgatattgattccaacgaggaaatattaaagtctgttttaaatggttctggacaaaaagctcatattgatgtagttgccttgaactctgctttagtgctttgggcagcaggaattgaggatgatttaaaagaaggatttaataaagctttattttctattaaacaaggagatccttgggaaaagtttttacttttaaaagattatttacatacaaattaa

SEQ ID NO: 239565 - DNA, 1030 bp, Unknown
  Bacterial polypeptide expressing nucleotide sequence isolated from the Sargasso Sea
atgcaaatacaaactgcgctcgcaaaaattgtggaaagcaagaacctgagccgcgaggaatctgctcaagtcttcaacctaataatgactggcgaaacgactgacgctcagattggcgcctttcttgctgcgatgcgggtcaaaggagagacagcagaagaactggcaggtgctgcagaaactatgcgaagtctgtcctctaaagtccctctcacttcaaccgagaaactagtcgacacatgtggtaccggtggcagcggtttgaaattgttcaatatttcaactgccgcagcgtttgttgcatcagcaagcggcgccctagtcgccaaacacggtaatcggaaaatgaccagcttctgtggtagcgcggacgtgttagaggcagcaggtatcaaactggaattaacacccgagcaaattgcggattgtatcaatcagataggaataggcttcatgttcgcccctgctcatcacagcgccatgagatatgcaggccctgttcggcaggagctcagcatcagaaccatgatgaatatacttggcccaatgactaatccagcccaggcaaaaagacaggtaatcggggtttttgctcgagagtggcaagagaaaatcgctagagtccttcaaatgcttggcagtgttcatgctcttgtggtgcatagtgaaggtttagatgaaattagactggacgcgcccacacatgtggtcgaactcaaagatgacacgataactgaatatacgatatcacctagagattttggaattgctgaagcgacacctgaagaacttcaaaaactttcggccgactcagtgtcaaaaagtctcgagcttgtcaaagagagtttgagtcaacctgattccctagcagccaacatagttgccctaaatgcgggcgccgcgatctatacgtcgggggtaacggatgatctcaaatcaggggtttcggcagctcaaactatcatcgctgaaaaaagtggcttggcaaagttaaaggaattagctctactctcctcaaaagaaacttaaa

SEQ ID NO: 239566 - DNA, 1045 bp, Unknown
  Bacterial polypeptide expressing nucleotide sequence isolated from the Sargasso Sea
atgagcgcaacatcgattcagcccctgctcgatatcttgtttcagggtaaggcattgacccgcgagcaaaccgccagcctctttagcacccttatccaaggtgaaatgaatgaggcagtgatggcggcaatgttaatggcccttaaaattcgcggtgaaaccattgccgaaatcagtggcgccgccgatgcgatgcgcgccgccgccaagccattcccctatccagcctcaagccgtagccaagggattatcgatatcgttggcaccggtggcgatggttttaataccatcaatatttccaccacagcagcctttgtcgccgccgctgctggcgccaaggttgcaaaacacggtaatcgctcggtctcgagcaaatcgggctcttcggatttactcgcccaatttggcatcgatttaaccatgtcacccgagctggcgagccgttgcttagaatcactcaacctgtgtttcctgtttgcgccccactaccatggcggtgtcaaacatgcggtgcctgttcgccaagcgctgaaaactcgcaccttattcaatgtgttagggccattgattaacccagcacgcccagaatttatgttacttggggtctatagcccagagctagtgacgcccatcgctcgcgtactgcaagcccttggcacgcaaagagccatggtggtacacggcagtggtttagatgaagtagccctgcatggcagcacgcaagtcgccgaactcaaagacggtgagattattgagtatcaattaacgcctgctgattttggtgtaccacaagcccaaattagcgagcttgaaggcggagagcctgcacaaaacgcccaaatcactcaatctattttgcaaggacaaggcagcgatgcccacacccatgcggttgccattaatgcgggttgtgccttatatctatgtggcctatcggactcagtcaaagctggcaccacccttgcgctcaacaccattaaaagcggcaaagcctttgaattactgaatcaactcgctaaagtcagcagcgaagcacaggaataat

SEQ ID NO: 239567 - DNA, 619 bp, Unknown
  Bacterial polypeptide expressing nucleotide sequence isolated from the Sargasso Sea
catgattgaactgctgaaaaaactgatggggcgggaagacctgacttttcaggaagcttcagaactcattcaatgggtgatgagtgaagatgccgttgccgtccaggcgtctgcgctgttggtgttgcttcaggctaaaggcatcaccgatgaagagatggccggagcggcatacgccatgcgggaaagggtttcaaaaatcaatgcgcctgaggatgtcattgatacctgcagtaccgggggaaacggaatcagcaccttcaacatctcgacttgtgcggcgatcattgctgcagcagccggagcaaaggtggccaaacatggaaaccggagcaacacccgcaagagtgggagcgccgaggcactggaagccctcggagtgaatatcaaccagggaattgagcaagtcgaacgttgtctggtagaaatcgatctctgcttctgttacgcggtcaatcatcatcctgcgatgcgttatgcgggaccgattcgaagagaactaggagtgccgaccgtttttaacctgcttggtccattgaccaaccccgcaggagccaaaagccagctgatcggagttccgacacctcagttaacggggaagatgacaaaagttctgaat

SEQ ID NO: 239568 - DNA, 854 bp, Unknown
  Bacterial polypeptide expressing nucleotide sequence isolated from the Sargasso Sea
catgcttaacgcgggccctctactagaacaaattatgttgcgagaatcactgtcgcaaaccgaggcatacagcttgtttaacagcatcatgcacggtgagcaaagcgaggtgatgattgcttcagtgctgactgcgctgaaaatgaaaaaagaatcacccagcgaaattgcgggtgcggcgagtgccatggttgccaatgcactgccctttcccacaccgtcttatgagtttgcagatatcgttggtacaggcggagatggccacaacaccattaatatctccagtgcagccggtgtagttgccgcatcttgtggcgtgaaggtggcgaaacacggtaatcgcagtgtatcgagtaagtctggctctgctgatttgtttcgccagtttggtcttaatttagaaattagcccagaaacatcccgcaagtgcttagatgaagcaaatttcacatttctttttgcaccggtttatcacgccggtatgcgccacgcagcccccgtgcgcgctgcgatgaagaccagaaccttatttaatatactggggccgctggcaaacccggcgggtccaactcatggcgttttcggcgtatactctcctgaactgcttgaaccttacgcaaaaacccttatgctgcttggccaacaccgcgcaatgatagtgcatggcgatggcttggatgaactggcgcttcacggcgaatcaatgatttacgaccttgagcatggcgatattcgcaagcttaccgttaccgccgaagacttcggtttacctcattatcctctttctgcgattgagggcggtgaacctgaagaaaacagacaatttgttgaagcagcgcttaacggcgaaggta

SEQ ID NO: 239569 - DNA, 950 bp, Unknown
  Bacterial polypeptide expressing nucleotide sequence isolated from the Sargasso Sea
atctgcaattgaattcattatgactggagaagttgatgacctctcgatcgaaaagtttttattagcattaaatgaaaaaggcatcagtgaaaaggagataacagctgctgcaatagtcatgaaggataaatctctaacttttaatattggcaatggtgatcatattgatacttgcggaactggtggctcaggacttaacacctttaattgttctacagcatcttcatttgtcgcggcagctggcggggctttagttactaaacatggcaataaagctgtctccagtaaatctggaagcgcagatttattgatagctgctggagctgatattgctcatgacagagagaagatagaaactatatttgatcgagttggatttgtttttcttttcgctcccttgcatcaccagtctatgaaatacgtaatgcctgccagacaaaagatcggcaaaaaaaccttatttaatttacttggacctcataccaatccctgtggtgcaaaaaaacaaattttaggtgtctatgataaagatttagttaaatcttttgctgctgttgctaaaaacctatctatggagcatgttcttatagtccatggatttgatggattagatgaaattacaattacaaataaaacttatgttgcagaacttaaagacaattctataaatgaatacgaaatttcaccaaaagactttggcttaaattttggtcaactttcagaaataatcgctcaatcatctgatgacagcttacaattaataagagaggcattttcaggagaaaaatctgcagttcaagatatgattgccctcaattcaggagcagctttatatctagcaaaggtagttcattcaattgctgatggtgtagaactctcttttgagcttatgaacaatggcatggcagcagataagttagcttcatatgtgagagtatcaaatagttaat

SEQ ID NO: 239570 - DNA, 1015 bp, Unknown
  Bacterial polypeptide expressing nucleotide sequence isolated from the Sargasso Sea
atgaatattaatgaggcaattttagagttgatgaaatctaaagatttatcaaaggatcagatctcatctgttataagacagatcctaaccggggaatgtgctgactcacaaatatctgcttttctggtttccctttcaattaaaggggagacagtggatgaagttataggtgccgcagaagtcatgagagagctttcagaaaaagtaatagtcaatatagaaaatctggttgatacctgtggaactggaggtgatggatcaggcttgtttaatgtctctactagcgctgccatccttgcagctgctgcaggagctaaagtagcaaagcatggaaatagaagtgcttctagtacaagtggaagcgcagatttattagaacaagctggggtcaacttagctttaagtcctgatcaagtaagaaattgtatagaagaagtaggggtaggttttatgtttgctcctgcacatcactctgctatgaaacatgtaatgggtccaagaaaagagctaggaataagaacaatatttaatttgctagggccactaacaaatccagctggagctaagaatcaagttctaggagtattcgataaaacttgggtgaggcctatagcggaagttcttagaggtcttggaagcgatagagttatggtaatccattctgaggatggcctagatgagtttagtgttgaagcagcgactttagttgctgagttgagggaaggagaaataagagaatatacggttactccagaagacctgggggttaatagatctagtataagcctgctcaaagttgcttctccacaagaaagtcttgtcatagcaaaagattctttatctggagaaaataccgtaggttctgagatgatttccatagcctcaggagcagctctttatgtatcaggattagtttcctcattaaaagatggatttaaggaatctcaactgatcatagaagaagaaaaggcgataaagaaactagatgaattaatttctttcacaaatagataaa

SEQ ID NO: 239571 - DNA, 1054 bp, Unknown
  Bacterial polypeptide expressing nucleotide sequence isolated from the Sargasso Sea
catgggctcatcgcgcgtcatgtcccctgcctctaccccctggtccggtctgctggagcagctgcttggcggtgaaaacctttcggctgctcaggcgacggacctgatgcaggcctggctgtcggagtccctgacgcccgtgcagaccggtgcctttctggccggtctccgggccaaagggatggaggccgaggagttggcggcgatggcggcggtgctgcgacaggcctgtccgctgccctgtgcccgccccgatcgtttcctcgtcgacacctgcggtacgggtggcgatggtgccgacaccttcaacatttccactgccgtcgccttcaccgcagcggcctgtggtgttgaggtggcgaaacatggcaaccgcagtgccagtggcaaggtcggctccgctgatgtgctcgagggacttggcctcaatctcaaggctccattgcaagccgtcatcgatgcgattccagcggccggtgtcacctttctgttcgccccggcctggcatccagccctggtgaatctggcgccgttgcgtcgcagtcttggcgtccgcacggtgttcaacctgcttggccctctggtcaatcccttgaaaccacaggcccaggtgctgggggtggccagggacgatctgctggatcccatggccggagccctccaacgccttggtctggagcgggctgtggtcgtccacggcgccgggggactggatgaggcatcgctggcaggccccaatgacctgcgcctgatcgaagccggtgccattcgttcccttcagctccgtcccgaagaactgggattgtccacggcgaatcttgaggctctcaaaggcggagatctgcagcgcaatcagacgatccttcaacaggtgctgcagggccatggtgaaccggcgcagcgcgatgtggtcacgctgaacacggctctggtgctgtgggctgctggggtcgacacggatctcgcgtctgccgctgcccgcgcagccagaaccctggatgaaggcctgccttggacccgtctggagaccctgcgcgagcacctggcccgctga

SEQ ID NO: 239572 - DNA, 844 bp, Unknown
  Bacterial polypeptide expressing nucleotide sequence isolated from the Sargasso Sea
ggcggaggaactcttaaatgtctgcgacttgccagtagcaagaccaaatttgtatatggtagatacttgtggaactggaggtgatggagccaatacattcaatatttctactgcagtagcatttgtggccgcatcttgtggtgtaaatattgcaaagcacggaaataaaagtgctagtggtaaagttggttctgcagatgttttgttgaatcttggtttaaatttaaattgttcattagaaaaagtaatctctgcagtcaatgaaattggtataacttttttgtttgcacctgtttggcataaatctttaataaaacttgctccactaagaaaggcccttggaataaggactgtatttaatcaacttggaccattggtaaatcctttaagaccaaatgcgcaagtattaggtgttgcatctgaggaccttttagagcccatgggaagcgcactattgaaaatgggcatgaacagagtaatagtagttcatggctctggcggccttgatgaagcctcacttcaaggagaaaataaattagtatttgttgagaaaggtaaattacgtttttcaaagataaatatttcagatttcaatcacgaaaatgtttcaaatgaaaagcttgtagtctctgatggtgagtctaacgaggaaatattaaactctgtattaaaaggttctggaaaaaaatcgcataaagatgttgttgccttgaatactgcattagtactctgggcagctgggattgaggatgatttacatgaaggctttaataaagctttattttcaattaatcaaggaaatccttggaaaaaatttttactcttaaaaacatatttatcttga

SEQ ID NO: 239573 - DNA, 1021 bp, Unknown
  Bacterial polypeptide expressing nucleotide sequence isolated from the Sargasso Sea
catgaatcataatttagaagattttttagccatgcttctagacggtaaagacttattagaagatcagtctgaggaattaatgactgcaatgacagagggcgaagttgagccagcattggcaggagcactactggtggctttgcggatgaaaggcgagtcagctgaggaagtcagaggttttgccaatggtatgcgtaaggctgccaaagaagttgagttagaaaattcttctgagttgatcgatattgtaggaacaggcggtgatggctcacacagttttaatatatcgacaggcgcagccttgctcagcgctgcatgcggtcttaaagttgcaaagcatggcaatcgctctgtttccagtaaatcaggaagcgccgatttgctcgaatttcttggttatcgctttccaacagatgccgatggtgtcaaagcacaaatgagcatgaatggctttagttttttatttgcgccaaattttcatccagcaatgaaacacatcgctccaatcagaaaagcattaaagattagaacagtttttaatatcctcgggccactcacaaacccagccaaaccatccttttatttactaggagcattcagttctgaaatggcgtcactgatggcatccagcttgagcggaatggaaatgagtcgagcgtttgttgtccatggattaaatggttgggacgagccaacacctgcttctaaatttgaactattcgatgtgagcaaagattcaatttcacataaaatcatcgatccgtcagagctcggaatggataaatgcaaagaggaggatctgaaaggtggaacgtctgaggtcaatgcaaaagccttattagaagtttttgatggcaaggacaatggggcacatgaagatgcattggttttgaatgcggctctatctcttcaagttgcaggcaaagcagcagatctcattgaaggaattgaaattgcaaggcagacaattgtgagcggaaaagcaaaagaacttctatcgggtttgacaaatggggattaa

SEQ ID NO: 239574 - DNA, 1018 bp, Unknown
  Bacterial polypeptide expressing nucleotide sequence isolated from the Sargasso Sea
atgaacgaattctcagatattttaattaaaattcaaaaatctgaatatttaagcagggaagatttaaagtttgcttataattttattttagatggaaaagctaatgatattgaaatagaagattttttaattggattgaataacaaaggtataaccatagatgatattatttgtggtgttgaagttctaagagaaaaatcttttaaagtagaagtaccagtcgatgcaatagatacatgcggaacaggtggagataactctggaacatttaatatttctacagccgtaacatttgttactgctggggcaggtgctattgttgcaaaacatgggaatagagccctatcatcaaaatcagggtcttctcaagttttagaagaattaggcatcaatataaatattaaaccaaataaaatatcggattgtataaataaatctaatgttggatttatgtttgctccaaaccatcattctgcaatgaaatatgttggccctataagacaaaaattgaaggttaggacaatatttaatctcttaggaccgctaattaatccaggaagtgtaaaaaaacaattattaggagtttataataaaaaatggttaaaccctctaatagaaacattacaagaattaggttcaactgatgttatgttagtttgtggctcagatggactagatgaaattactactacttcagaaacttacattgctgaattaaagaataacaaaattacaaattatacaatcaaacctgaagattttggtattaatagagctaatcctgatgaattaattggcgatacaccaaaagtaaatgcacaaaaaattttaaaacttttagatggggaaaaaggtgcctttagagatatcgttattataaactcggcagcagcaatttatattgctggtattgcagaaagcattgaacatggattaaagtttgcaaatacttcaattgataatggtaatgctaaaacatcacttgaaaaacttgttaaggcctcaaatgaaaaataat

SEQ ID NO: 239575 - DNA, 553 bp, Unknown
  Bacterial polypeptide expressing nucleotide sequence isolated from the Sargasso Sea
aatgtcagaaatcactgattatattgaaaagataaacaataaacagagcctttcggttttggaaagctacaatgcatttatgagtattatgtctggtgattgcgttgatgatgatatttctaactttcttattggtcttaaaaataagggtgagtcaatagatgaaatcataggggctgtgcgtgccattagagaaaaaatgaccactataatggttcccgatggcgcgatagatattgttgggaccggtggtgatggttacaaaacactaaatatctcaacagcatccgcgcttgtcgtcgcgtcaaacagtattaaagtagcaaagcatggcaacagatcagtatcatctatatcaggatcatccgatatattaacagagcttggcgtaaatattgatataaaaccagactcttgcgtggaatgcataaacgagacaaatatttgctttttatttgctccactatttcatggtagctttaaacatgttgcaaaagtacgggcagaactcaaaacacgaactatttttaatatacttggtcctatgtgtaac

SEQ ID NO: 239576 - DNA, 1021 bp, Unknown
  Bacterial polypeptide expressing nucleotide sequence isolated from the Sargasso Sea
catgaaaaaaattaacggagatttaacatttgacgaaatgtcatctgtcatgagtgaaattctaaatggaaaaaataatgatgaagagattgcagaatttttaacagacctatcaaacaaaggagaaacaaatgaagaattacgtgcaatgtttacaaaaatgaacgagtattcagtgaatatcaatccacgttgtcatggaactttaattgatgtgtgtggaactggtggagataacttacagacattcaatatttcaacagcagcatcatttgtgattgcaggggcaggaggaaatgttgcaaaacatggaaaccggtcagtctcaggcatatctggaagcgcagatatttttgaatattttggatttgatttgaactcagaaccatgggtggtagaagaaatgatagagaaaataggaataggattcatgtttgcaccaaagtttcatcctgccatgaaaaatgtggcaccagcaagaaaaataattggtaaaagaaccgcgtttaatctattaggaccattatgtaatcctgctaaagtaagacaccaaatgattggagtgtttgcagataattatatcgaaagaattgctaaaattatgcaaaagaatttttcagatactgtactaacagtaaggtctgatgacggaatggatgaattatcaacaacatcaaaaaataaagcatgtttattaaaaaatgaagagataacagaattcattattgatcctagtaagtataatttagaaaaaggtaatttagcagatattcagatttcaacaaaaaaagaagccatagattcatttgtcaaagtattgaataatacatcaaacaaaacaatgaaagaaattacaattctaaatgctgcaggaggattattggtaggaggatttagtaataaatttgaagaatgtgtagagttagctaaacagacggtcaataacggaaaagcatttgaaaaattaaaacagtttgcaaaagaaaataatgcattggataaattagaggagtttaactga

SEQ ID NO: 239577 - DNA, 763 bp, Unknown
  Bacterial polypeptide expressing nucleotide sequence isolated from the Sargasso Sea
tatgaattttaaattactaaaagagaaaatatttaattttcaaaatcttacagttgatgaaactagtcttgtttttaatttaataatgactggtaaaatttctgaaatagaaatatccgcaatattaattgctctgaaattaaaatctgaaactaaagaagaaatattgggggcttcgatatgtatgagagaaaaatctataaaaattaatacagaagaagatactatagatacatgtggaactggaggagatatgagtggaactttaaatatttcaacaagtgccgctatagtagctgcaagcgctggagttaaaattgcaaaacatggaaatagatcaataagttcaaaatcaggttcagcagatatgttagaaaaactttcttataaaattttagataatcctaatgagttagaaaaatcaataaaagaacataatttttgttttttatttgcccaatatcatcactcagctatgaaacatgttgggaatgtaaggaaattacttggaacaagaacaatttttaatcttttaggacccttgactaatcctgcaaatacaaaaaaacaattacttggagtttatgataaaaagtgggtaaatattcactgtgaagttttaaaagagcttggctcaaaacatgctttagttgttcatggagatgatggattagatgaaatttcacttagtggaattactcatatatcagaattaaagaatgaaaaaattatacaatatatatttgatccaagggtattataa

SEQ ID NO: 239578 - DNA, 805 bp, Unknown
  Bacterial polypeptide expressing nucleotide sequence isolated from the Sargasso Sea
aatgtcttctaatctatcaaacgctgaaatcctaaataatttgctggagagaagagaccttgatgaattaacttctagatctttaatgcaaagatggcttaatgatgaaattacagatgttgaaactggagcttttttgagtgctttgagagcaaaaagttctacaggtgtcgaactaagtgctatggctgaggaacttttaaatgtttgcgaattgccagtagcaagaccaaatttgtatttagtagatacttgtggaacagggggtgatggagctaatacatttaatatttcgactgcagttgcatttgtagctgcatcttgtggggcaaaaattgcaaaacacggaaataaaagtgctagtgggaaagttggctctgctgatgttttgttgaatcttggtttgaatttaaattgttcattagaaaaagtaatcaaagcagtgagtgaaattgggataacttttttgttcgcacctgtttggcataaatctttaataaaacttgctccattaagaaagactcttggaataaggacagtatttaatcaacttggaccattggtaaatcctttaagacccaatgcacaagttttaggtgttgcttctgaggatcttttaaaacctatgggaagcgcgcttttaaaaatgggtatgaatagagcaatagtcgttcatgggtctggtggccttgatgaggcgtcgcttcaaggagaaaataaactagtatttgttgacaatggtaaattgcggttttcagaattaaatatttcagattttaaccatgaaaatatatctaacgaaaag

SEQ ID NO: 239579 - DNA, 1033 bp, Unknown
  Bacterial polypeptide expressing nucleotide sequence isolated from the Sargasso Sea
atgacgattaccccgcaggaagcgctgcagcgcacgatcgagcaccgcgaaatcttccacgacgagatgctgcacctgatgcggctcatcatgcgcggcgacatgtcgcccgtgatggcggccgcgatcatcaccgggctgcgcgtgaagaaggaaacgatcggcgagatcgccgccgccgcgaccgtgatgcgcgaattcgcgaaccacgtcgaagtgcaggacaactcgaacttcgtcgacatcgtcggcaccggcggcgacggctcgcacacgttcaacatctcgaccgcgtcgatgttcgtcacggccgcggccggcgcgaaagtcgcgaagcacggcaaccgcggcgtatcgagcaagtccggcagcgccgacgtgctcgaggcgctcggcgtgaacatcgacctgcagtccgagcaggttgccgcgtcgatcgccgaaacgggcatgggcttcatgttcgcgccgaaccatcacccggcgatgaagaacatcgcagccgtgcgccgcgagctcggcgtgcgcacgatcttcaacatcctcggcccgctgaccaacccggccggcgcgccgaaccagctgatgggcgtgttccaccccgacctcgtcggcatccaggtgcgcgtgatgcagcgtctgggcgcgcagcacgtgctcgtcgtgtacggcaaggacgggatggacgaggtatcgctcggcgcggcgacgctcgtcggcgaactgcgcgacggcaaggtgcacgaatacgagatccatccggaagacttcggcctgcagatggtgtcgaaccgcacgctgaaggtggaaaatgccgacgaatcgcgcacgatgctgctcggcgcgctggacaaccagccgggcgtcgcgcgcgagatcgtcacgctgaacgcgggcaccgcgctctatgcagcgaacgtcgccgaatcgatcgcggacggcatccagctggcccgcgaggcgatcgcgagcggcaaggctcgcgccaaagtcgacgaactcgtgcgcttcacgcagcagttcaagcgctgac

SEQ ID NO: 239580 - DNA, 1006 bp, Unknown
  Bacterial polypeptide expressing nucleotide sequence isolated from the Sargasso Sea
atgaaagaagttttagaaaaaattaataatcaagtaaatctatctatgggtgaaatgcaggacactatgaatcaaattatgtccggcaaagtaaatgatattgacatggagtcatttttaattggacttaatattaaagggatatcagaagaggaaataactgcagcagcaatgatcatgagagaaaaatctctccaaattgatattggagatggcagtcatattgatacatgtggaactggaggaaccggacttcatacatttaattgttctactgcttcttcatttgttgcagcagcgggtggcgcaaaaattactaaacatggcaataaagcaatttctagtaagtctggcagcgccgattttctagaagaagcaggagcaaatatcaatcatgacaggagtatgcttgatactatttttagtgagattggttttgtttttttatttgctccattacatcaccatgcaatgaagcatgtaatgcctgtgagacaaaagattgctgacaagaccatattcaatcttttagggccacatacaaatccatgtaattcaaaaagacaattgctcggcgtttatgataaaaatttactaagtactttttctcatgtagctaaaaatctagatatggaacatgtattagttgtgcacggagatgatggtttagatgaaataagtgtgacttcagagacctccatttcagaactgaaagatatgcaaataaaagaatataaaatttctccaactgatttcggattagattttggaacttttgaaacaattacatctcaatcttccgaagaaagtctcaaaatggttaatgaagcttttgcaggtaccaaatcttctgttcaggatatgattgcattgaatgctggggctgcgctttatattgcaaataaagtaacctcaattaatgatggagttgagttggcttttgaattaatgaatagtggtaaagctgcagaaaagttaaatgcttatgttaatgcttcaaataatt

SEQ ID NO: 239581 - DNA, 1021 bp, Unknown
  Bacterial polypeptide expressing nucleotide sequence isolated from the Sargasso Sea
atggaaaaaattaacggggatttaacatttgatgaaatgtcatcagttatgagtgaaattctaaatggaaaaaataatgatgaagagattgcagaatttctaagagacttatcaaacaaaggagaaacaaatgaagaattacgtgcaatgtttacaaaaatgaacgagtattcagtgaatatcaatccacgttgtcatggaactttaattgatgtatgtgaaactggaggagataacttacagacattcaatatttcaacaacagcagcatttgtgattgcaggtgcaggaggaaatgttgcaaaacatggaaacaggtcagtttcaggcatttcggggagcgcagatatttttgaatattttggatttgatttgaactcagaaccgtgggtggtagaagaaatgatagagaaaataggaataggattcatgtttgcgccaaagtttcaccctgctatgaaaaatgtcgcacgagcaagaaaaataattggcaaaagaactgcgtttaatctattaggaccattatgtaatcctgctaaagtaagacatcaaatgataggggtatttgcagataattatatcgaaagaattgctaaaatcatgcaaaagaatttttcagatactgtactaacagtaaggtctgatgatggaatggatgaattatcaacaacatcaaaaaataaagcatgtctattaaaaaatgaagagataacagaattcattattgatccaagtaagtataatttagaaaaaggtaatttagcagatattcaaattgcaacaaaagaagaagccatagattcatttgtcaaagtattgaataatacatcaaacaaaacaatgaaagaaattacaattctaaatgctgcaggaggattattggtagggggatttagtaataaatttgaagaatgtgtagagttagctaaacagacagtaaataatggaaaagcatttgaaaaattaaaacaatttgcaaaagaaaataatgcattggataaattagaggagtttaactgat

SEQ ID NO: 239582 - DNA, 1054 bp, Unknown
  Bacterial polypeptide expressing nucleotide sequence isolated from the Sargasso Sea
catgggcccattccgcttcatgtcacctgcctccccctcctggtccggtctgctggagctgctgttgtgcggggaaagcctgtccgctgcacaggcgacggacctgatgcaggcctggctgtccgagtccctgacccctgttcagaccggtgcctttctggccggtctccgggccaaggggatggaggccaaggagctggcggcgatggcggcggtgctgcgtgaggcttgtccattgccctgtgcccgccccgatcggtttttagtggacacctgcggcacgggcggcgatggtgccgacaccttcaatatctccaccgccgttgccttcaccgctgcggcttgcggcgtggaggtggcgaaacacggcaaccgcagtgccagtggcaaggtcggttccgccgatgtgctggaggggctgggcctgaacctcaaagcaccgttgcaatcggtcgtcgacgcgattcctgccgccggcgtcacatttttatacgctccggcctggcatcacgctctggtgaacctggcgcccttgcgacgcagcctcggtgtgcgcacggtgttcaatctgcttggcccgctggtcaatccgttgaaaccacaggcacaggtgctgggggtcgcgaagaaggatcttctggatcccatggctggagccctgcaacgtcttggattggagcgagccgtggtcgtccacggcgccggagggctggatgaggcgtcgctggcaggtcccaatgagctgcgcttcatcgaagctggcgccatccgctcgcttcagctctctcctgacgaactcggattggcaacggcggatctcgaggcgttgaaaggtggtgacctggattgcaaccagaccatccttcagcaggtgctccagggccgtggggaaccagcccagcgggatgtggtcgccctgaatacagccctggtgctgtgggccgctgggatcgacaaggatctgtcgtctgctgcggcccgcgccgccgaagccctggatcaaggtcttccctggacccgtctggaggccctgcgccagcacctggccagctga

SEQ ID NO: 239583 - DNA, 826 bp, Unknown
  Bacterial polypeptide expressing nucleotide sequence isolated from the Sargasso Sea
agaaaaatctttaaaatttgacataggcgatggttcacatattgatacttgtggaacaggcggaacaggcctaaatacttttaattgctcaacagcttcgtcttttgttgctgcagctggaggagcaaaaatcaccaagcacggtaataaagcaatttctagcaaatctggtagtgcagactttcttgcacagtcaggcgcaaacataaatcatgaaagagaaaaattaatatcaatttttgataaagttggattcgtattcttatttgctccacttcatcatgaagcaatgaagttcgtgatgccagttagacaaaaaattgctgaaaaaactatttttaacttgttagggccacatactaatccatgtagtgcaaaaaggcaggtcttaggagtttatgatgagaagcttgtcaaaatgtttgctaatgttgcaaagaatcttgatatgaaacatgtcatgattgttcatggcgatgatggtcttgatgagatttcaatttgttcagaaaccattgtttcagaattaaaagacaataaaattagcgaatataaaatttctccaaaagattatggactcaacgtatcttcatttgatcaaattgcagcgaattcttcgtatgaaagctttttacttgtaaatagcgcatttaatggagagagttctgctgtgcaagacatgattgcattaaatagcggagctgctttatatatagcaaatgtagttgactctataagtgatggcatagaaatggcatttgattgtatgaataatggtcaagctgcacaaaaattagctgactatgtaagggtttcgaacgaataa

SEQ ID NO: 239584 - DNA, 994 bp, Unknown
  Bacterial polypeptide expressing nucleotide sequence isolated from the Sargasso Sea
catggataaatatttagaaaaactcagaaaaaaaataaatttaaattttgatgaaagtaaaaatgcatttaagatattaatgaatggtgaagctagtgatcaacaaatttatgattttttaactttactatcggtcaaaggtgaagcttcagatgaaatagctggaggcgtatatgtattaagagataagtcaaaaagagtaaaagttgaagattgccttgatacttgcggtactggtggagatggtaaagatactttaaatatttcaactgcatcagcattattgttagcaagtatgggtgttaaagtagcaaagcatggaaataaagcagtttcgtccaaatgtgggtcagccgacgttcttgaggccttaaagataagtatcaacttagaaccaaatcaaatcgaggagcaaattcaaaaaaataattttggtttcatgttcgccccgaattaccattcagcaatgaaatatgttggcccaacaagaaaaaaaataggaaaaaggactatttttaacatgataggtccattaagcagcccagcacttgttgaaagacaggtcattggtgtttttgacaataaacttctaaaagtttttgcaaatgcactgaaaaatctaaacttaaagtttgcatggattgtaaatagtgaggatggtctagatgagatatcaccttacgctaaaactaatgttgtgcaattgaaaaataatgaaatatctgagtttataattgatccgaacgaattaaatgttaatgctgaaaaattcgaaaatttagttggagatgacgctaaatttaattctgataaaatcttaaatatttttcaaggtgaagataatgatttttctaaagctgtttgtttaaatgctgcagctggattaatgatatctgaaaaatatgatgattttaaaattgcttataattttacaagaggttttattaagtctggatctgcacacaaatatataaaaaatatacaaaatgtctga

SEQ ID NO: 239585 - DNA, 1012 bp, Unknown
  Bacterial polypeptide expressing nucleotide sequence isolated from the Sargasso Sea
tatgatccaggattttattaatcagctagaaaagaaagaggaccttgattttcaatccatgcagtatgcaattgagtcaattatgactggaaatgttgatgatctttctattgaagcatttttattagccttaaatgcaaagggcattaaggaaactgagattactgctgcagccagagtaatgaaagaaaaatctcttactttttcattgggtaatggagatcatatagatacttgtggcacagggggttcgggtttgcatacttttaactgttctaccgcttcatcttttgtggctgctgcaggaggtgcagcagtaacaaagcatggcaacaaggcagtatcaagtaagtctggaagtgcagatttattattagcagctggagctgacatttcgcatgatagagaaaagttagaaattatttttaagagagttggttttgtttttttgtttgctcccttgcatcatgaatcaatgaaatatgtgatgccagccaggcagaaaattggaaaaaaaactttatttaatttacttggccctcatacaaatccatgttgtgcaaaaaggcaaatcctaggcgtttatcaaaaagatttagtgagaacttttgcatcggttgcaaagaatttatctatggatcatgttcttattgtccatggttttgatggtttagatgagattactataaccggctctacatatgttgcagagcttaaggataatactatttctgagtatgaaatttctccaaaagattttggcttatctcatggaacactgcctgaaatctcagccgcttcacctaatgacagtttgcaattaattagagaagctttctcaggtgataaatcagccgttcaagatatgattgcccttaatgctggtgcagccttatatctagcaaaaaaagtagattcaattgcaagtggtgttgagctttcgtttgaattaatgaataacggtatggctgcagataaattagcttcatacgttcgagtttcaaatagctaa

SEQ ID NO: 239586 - DNA, 841 bp, Unknown
  Bacterial polypeptide expressing nucleotide sequence isolated from the Sargasso Sea
catgcaagcgattcgagagcaagtatcgaacgcgcttattgaagatcttggcggcgaattaaatgctgcaaacgacattacggcgaacctgatagatgaaagcgttaatgcaaaagccactattattacgcgagagccttgcgtggtatgtggaatcgcatgggcaaaccaagcgtttgcactaatcgacgagtcggtgtcgctaacgtggcatgtaaaagatggtgacaaggttgatgccaacaccgtactggttagtttggaaggctctgctcgcgcgatattgacggcagaacgtacggcgcttaacttcctacaaaccctgtcagcaaccgccactgttactgccttttacgctaagtttttagatggctccaacaccaaaattctcgatacccgcaaaacgttgccaggtctgcggcacgcacagaaatacgcggtgcgttgtggtggtggtcaaaaccatcgtgtgggtttgttcgatgcattcttaattaaggaaaaccacatattttcttgcggaaacatcgaaaaagccgtaagccgagcgaaaacaatgatgccgggcaagcccgttgaagtagaggtagagaatttaaccgagcttgaacaagcccttggtgcaggtgccgacattgtcatgctggataatttttctaacgaacagatccaacaggcagtagcgctcaacaaaggtcaatgtaaactggaagtatcaggaaacattactgatgaacgactggcgtctctcgctaagctaggcgtagattacatttcatctggagctttaaccaaacacgttcaggccattgatttgtcgctgcgcattaatttgtcatag

SEQ ID NO: 239587 - DNA, 379 bp, Unknown
  Bacterial polypeptide expressing nucleotide sequence isolated from the Sargasso Sea
gacggtgtcgatgtgctggctaaagttggtgggttcgatcttgtcggcatggcaggggttatgttgggggcggcctcctgcggcctgccggtcgtgctggatggttttctttcttattccgctgcgctggcggcctgccagattgcaccacaaattaaaccctacctaatcccgtcacatttctccgctgagaagggcgcccgtaccgcgctggcgcatcttgaattggatccgtatctgaatatggggatgcgtttgggcgaaggcagtggggccgcgttggcgatgccaattgttgaggctgcttgtgcgatgtacaacaatatggggcagttagccgccagtaacatcgtgcttccggatggtaaggaagcgtagt

SEQ ID NO: 239588 - DNA, 448 bp, Unknown
  Bacterial polypeptide expressing nucleotide sequence isolated from the Sargasso Sea
aatgtgtaaaaaaaattatattgaagatttttttaatggccttacaaatatacccgagtttgaccaattaaaggcgagcaatgctaaggaattacaaaatgaacttttaaagcctaaaggtagtttaggtaaattagaagagtatgctatttggatggctggatggcaaaagaaaataaatcccttaatagaaaatgcgcattgtttgatttttgcaggcaaccatggtgttgctagaaaaggggtctcagcttttccttctgaggttactgagcagatggttgagaactttaataaaggtggagcagcgattaatcagttatgtgaactagctggtctgaaattaaatgtgatcccattagatttagatgaaccaacaaaagatttttcagaaaattttgctatggagcaaagaagaagtaatatctgcaatgcaaactggttttga

SEQ ID NO: 239589 - DNA, 475 bp, Unknown
  Bacterial polypeptide expressing nucleotide sequence isolated from the Sargasso Sea
ttgtgtggaaaagggactggggtggatgattccggacttgagcacaaacaaaatactattcggcaggcacttgaaaaacatgctgaaattaaagaacctcaagcagtattgtccacttttggaggctttgaaattgcgatgatggtcggagctatactggaatcagctgttttaaagaggattattctaattgatggatttattgcatcagcggcatttctttcggcctccaggatcgttccagaaataaagcaatacgctgtttttactcataagtctgatgaacagggacattctgaaattctaaaatatttgcaggtagaacccctgatttcattaggaatgcgccttggagagggaacaggagcggcagtagctttcccaattatacagtcggctgtttcattcttgaatcaaatggcatcctttgaatctgcccgtgttagtggtcgtactgatgttaaaaaagcttaga

SEQ ID NO: 239590 - DNA, 237 bp, Unknown
  Bacterial polypeptide expressing nucleotide sequence isolated from the Sargasso Sea
aatgaacgaagaactagcattacaacttcagtataaactcgatagaaaaacgaaacctccaggatcattaggggatttggagcaattggcattgagggtcggagtgatccaggggactttggagactcaactgaagagtccgacaatgctggtttttgcaggagatcacggaattaccaacgagggagtcagcccctatccttcggaggtaactgcccagatggtaaaaaacttcct

SEQ ID NO: 239591 - DNA, 597 bp, Unknown
  Bacterial polypeptide expressing nucleotide sequence isolated from the Sargasso Sea
tgttttgtcgtcagttaggcttcaatctcgaagtgattgattgcggtatcttaaccccagttgaagatgccgaaggcattatcgaccaacgccttggtgcaggaacggctgcgattcacttagagcctgccatgacgttagcctgtgtggataagggctttgccatggcgcaggcattaatcgagcgtcaccatcaggcgggctgtaacttggttgcctttggtgagatgggcataggtaatacttcgtcagctgcggcgattatggcggccattatgcaactcgatgtagccgactgtgttggccgtggtacgggcatcaatagcgaaaccttagagcgtaaacagatgcttatcgaactcgcgctgctgttacaccagagtgcgatgactgggcctcggcaagtgctggcctgtttgggtggctttgaaattgtgcaaatgacgggagccatgctcgccgcagccgagcgcaagatgctggtcgtggtggatggttttattgcgaccgcagcggctttggttgccgtgaatatcaacgcgaatgtgcgggattatttggaacatatcgcaaccaaaagtcgttcaataatttaga

SEQ ID NO: 239592 - DNA, 343 bp, Unknown
  Bacterial polypeptide expressing nucleotide sequence isolated from the Sargasso Sea
ttgtattatgctaatttagctaaaaaccgtcaaaataacttaacaaaaccaataggaagtttgggtaaattagagaaatatgcaatatggatggcaggttggcaaaaaaaagaaaagccaacaatgaataattttcagtgccttgtttttgctggaaatcatggagtagcaaaaagaaatgtatcagcatatccgtctgaagtaacagaacaaatggtggaaaattttaagaatggtggagctgccattaatcaattgtgtgatttatcaaatattaaactgtcagttattccaataaatcttgaaaaacatacaaatgatttttcagaggaaaaagcaatga

SEQ ID NO: 239593 - DNA, 373 bp, Unknown
  Bacterial polypeptide expressing nucleotide sequence isolated from the Sargasso Sea
atgagaaaatatttaattccacctgtttcagcgaaaattgaagttgatttaaagagaaaaatcgacggcaagacaaaaccaccaggttcacttggcagactagaaacagtggcattacagtgcgggataatacagaacagcctcaatcctgaacttgtaaatcccacaatcctggtttttgcaggcgatcatggaattacagaagaaggagtgagtccatatccgcaggaagtaacagggcaaatggtactcaattttctcaacggaggagccgcaattaatgtgttttgtcgtcagaacaatatcagtttacatgttgtggatgcaggggtgaaaactgatttacctgtaggcactgagttaataaatgcaa

SEQ ID NO: 239594 - DNA, 236 bp, Unknown
  Bacterial polypeptide expressing nucleotide sequence isolated from the Sargasso Sea
aatgaacgaagaactggcatcacaattaaagtcgaaactcgatggaaaaaccaaacctccaggatcgttaggggatttggagcaattggcattgaggatcggaatgatccaggggactttggaaccgcaactgaagagtccgacgatgctggtctttgcaggagatcacggaattaccaacgagggagtcagcccctatccttcggaggtaactgcccagatggtaaaaaacttcc

SEQ ID NO: 239595 - DNA, 763 bp, Unknown
  Bacterial polypeptide expressing nucleotide sequence isolated from the Sargasso Sea
tgttttctgcaggcagcatggttttgacctgaaagttatcgacgccggagtcgcttccgattttgaaaaacaccctcttctggtcgatgagaaaatcgcttacggtactgcaaatttccttaaagaaaaggccatgagtgagaatcatgccaaagaatgtatttcacggggagagaaacttgcggaagaactcccggatccttcgtgcaatgtgattggttttggcgagatgggaatcggcaacacctcctcttcagcgctgatgatgcaccgactcaccgggatcaagttggaatcctgtgttggacgcgggaccggacttgatgaccaaggactttcccaaaaattcatgatacttcaggaagcctcagaaattcacagcggggcccgtggagccatcgaagtcattgcagcgtttggcggattcgaaatcgtcatgatatgcggagcgatgatcgcatcctcgagaatgggtcgtatccttttgatcgacggattcatcgcatcgacggccctgttgctggcacgtgaaatggatccgaaagtgatggatcacgcggtgttcacccatgtttccggggaacagggccaccgtcctttactggaacatctacaggtcaaacccctgctggatctgaacctcaggcttggagagggtaccggcgcagccctggcctatccgctcctggtttcagcagttgcttttctgaatgagatggcttctttcgaatcggcaggcgtcagtgatcgcagcgatgcctga

SEQ ID NO: 239596 - DNA, 718 bp, Unknown
  Bacterial polypeptide expressing nucleotide sequence isolated from the Sargasso Sea
caaaaaacttttaaaccaactataaacaacccacattgtgtaatcttcgcaggtaatcatggtatatcaaataagggtgtttcagcatatccatctgaagtaacggctcaaatggtagaaaactttaaacaaggtggagctgcaataaatcaactgtgtaaattagcaaaaattaaattatcggtaattccagtagatttggacaaacctacaatggatttttctgaaagcaaagctatgagcgaagaagaagtgttttccttcatgcaattgggttttgactcaatcccatctagctgtgatttactaattttaggtgaaatgggaatttccaatacgacatctgcaacttcaatttcctgtgctctatttaacgaacctgttgatgtaatgacaggtattgggacgggtattaataaggtccaactatctaacaaaataaagataattaacaaagctcttcagttgcatgggaaaaaatttagagacccagttagtatattgtcatgttatggaggtaaagaaatagcagctattgcaggatcggtaatttctgccagaataaagtctattccagtactcttggatggatttataaccaccgctgcagcttctactttaataagttttgaaaaaaatattttagatcattgtttggtctctcatttatctgctgaaccaggtcatgataagatattaaataatcttaaaaaagaac

SEQ ID NO: 239597 - DNA, 642 bp, Unknown
  Bacterial polypeptide expressing nucleotide sequence isolated from the Sargasso Sea
tttgaaggacttaacgaagcctgacaatgaggtttgccaagcgcttgaaaaacgacttgccgacatcctcagacccagcggcgcattgaaacgcctcgatgaaatagcaatctttatgggtggatggcaagggtcgctcacgccgcgggttgaaagacccaaagtactgatctttgctgccgatcacggagttgcaaccgctggagtgagcgcctacccatcttcggtgaccgaatcaatgatgagtgctttcgaggctggcttgtcgaccataaacgcttttgctcgaatagctggagctgaagtaactgctgttgacgttggaataggcagaccgaccgccgatattcgactcgagccagcgatgtccgaacagcgctttttcgaagcacttgagagcggacgtcaagcagtgaaagattctgacagtgacttgctggtgcttggcgaaatgggcattggtaacaccacctcgtccgcggcaatatcgtgtgccctttttggcggcgatgcgtcggattgggtgggtcgcgggactggcatcgatgaagatggtttacgccgcaaaagagaagcagttgaacacgcggtcaagcggattgacggcgcgagcccgccagaaatattgcgcgagttaggtgg

SEQ ID NO: 239598 - DNA, 792 bp, Unknown
  Bacterial polypeptide expressing nucleotide sequence isolated from the Sargasso Sea
caaagtatgaggtttctgcttttccaagttcggttactagcgaaatggtcaaaaactttgttgaaggtggtgcagccgttaaccagctgtgtaaaacatttgacgccgatttgcgtgtttacgagcttggtttggaacatccaacctcagatttcacaaaagaacccgcaatgactgaagaagaatgcgttcgagctatggcttatgggatgatggcaatagagccagggtttgatattatttgcctaggcgaaatgggaattgggaataccacgtctgctgcagcaatttcaatggctctctttgggggaactgcgaaagattgggtgggccgtggaacagggataaattctgagactttagaaagaaaaatagagttagttcaaaaagcagtggagctccatttagctgaaacaaaagatccattaagtttgtttgctgctttgggcggtctagaacttgctgcaatagtgggcgctatcgttgctgcaagattagctcgtgtgccagttatattggatgggtttgcctgtacagtttctgcttctgttttatttgccatcgatccaacaactgtggaccattgtctagtggcccaccgctcggttgagcccggacactctaggcttcttgaattgatgcataaggagccggtactagaccttggattacgcttgggtgaggcgtcgggagctacattagctattggaattttaaaagcagctgtcggttgccatgctggtatggctacgtttgcctctgctggaattagcaaatcggtagatctataat

SEQ ID NO: 239599 - DNA, 2089 bp, Unknown
  Bacterial polypeptide expressing nucleotide sequence isolated from the Sargasso Sea
catgtccgcaggcctgaatcccgcccagaacgaagcggtgcgctacctcgacggtccctgtctcgtgctcgccggcgcgggcagcggcaagacccgcgtgatcacgcagaagatcgcgcacctgatcgaagcgaaaggcttcgagccgcgccacatcgccgccgtcacgttcacgaacaaggcggccgccgaaatgcgcgagcgcgtgtcgaagctgctcgagggcaagacgctcaccacgcccggcaaggaaggccgcaaggtgcccgtcaaccagctcaccgtctgcaccttccactcgctgggcgtgcagatcctgcgccaggaggccgagcacgtcggcctgaagccgcagttctcgatcatggattcggacgattgcttcgggatgatccaggagcagatcggcacgaccgacaagggcctgatccgcaagatccagagcaccatctcgctgtggaagaacggcctgatcatgcccgacgaggcgatgacgatcgcggccaacgaggacgagcaccaggccgcgctggtctaccgcaactacgtcgcgacgctgcacgcgtaccaggcggtcgactttgacgacctgatccgcctgcccgccgagctgttcgcgaagaacgaacaggtgcgcgaccgctggcagaacaagctgcgctacctgctgatcgacgagtaccaggacaccaacgcgtgccagtacgagctgctgaagctgctcgcgggcccgcgcgcggcgttcacggcggtgggcgacgacgaccaggcgatctacggctggcgcggcgcgacgctcgagaacctcgcgcagctcggcaaggatttcccgaagctgcacgtgatcaagctcgagcagaactaccggtcgacggtgcgcatcctcactgccgcgaacaacgtgatcgcgaacaacccgaagctgttcgagaagaagctgtggtccgagcacggaatgggcgattcgatcaccgtcacgccgtgcaatgacgaagagcatgaagccgaatcggtcgtgttccggctgtccgcgcacaagttcgagcggcgcgcgcagttccgcgactacgcgatactgtatcgcggcaacttccaggcgcggatcttcgaacaggtgctgcgccgcgagcggatcccgtacgtgctgtccggcggccagtcgttcttcgacaaggccgagatcaaggatctgtgcgcatacctgcggctgatcgcgaacgccgacgacgatcccgcgttcatccgcgcggtcactacgccgcgccgcgggatcggcaacacgacgctcgaagcgctcggctcgttcgcgggccaggcgaaggtgtcgctgttcgaggccgtgtacatgggcgggatcgaggcgcggctgtccgcgcgccaggtcgagccgctgcggatgttctgcgacttcatccagcgcctgaccgagcgcgcggacaaggatccggccaccgccgtgctcgacgacatgatggaggcaatccactacgaggcgtacctgtacgacgcgttcgacgaacggcaggcgcagtcgaagtggcagaacgtgctcgaattcctcgaatggctgaagcgcaagggcaccaagcccgaggcggaagcggtcgacggtgaggcggaaggcttccacaacgcggacggcctcgccgatacgggcaagaacctgctcggcctgatccagaccgtcgcgctgatgtcgatgctcgagggcaaggacgaagacccggacgccgtgcggttgtcgaccgtccacgcgtcgaaggggctcgagtatccgcacgtgttcctggtcggcgtcgaggaaggcatcatgccgcaccgcggcggctccgaggacgacggcccgatcgacaacgagcggatcgaggaggagcgccggctgatgtacgtggcgatcacgcgcgcgcagcgcagcctgcacctgaactggtgcaagaagcgcaagcgggcgcgcgagacggtcgtgtgcgaaccgtcgcgcttcatcccggagatggggctcgacgacgcgccgccgccgacgccggaagaggcgccgatgtcgccgaaggaccggctcgcgagcctgaaggcgttgctgcagaagtga

SEQ ID NO: 239600 - DNA, 1024 bp, Unknown
  Bacterial polypeptide expressing nucleotide sequence isolated from the Sargasso Sea
aatgtgtaaaaaaaattatattgaagatttttttaatggccttataaaaatacccgagtttgaccaattaaaggcaagcaaagctaaagaattacaaaatgaactcttaaagcctaaaggtagtttaggtaaattagaagagtatgcgatttggatggctggatggcaaaagaaaataaatccctcaatagaaaatgcgcattgtttgatttttgcaggcaaccatggtgttgctagaaaaggggtctcagcctttccttctgaggttactgagcagatggttgaaaactttaaaaaaggtggagcagcaattaatcagttatgtgaattagctggtctgaaattaaatgtgcttccattagatttagatgaaccaacaaaagatttttcagaaaattttgctatggacaaagaagaagtaatatctgcaatgcaaactggttttgactctgttccatcaaattgtgacttattagttttgggtgaaatgggcatatcgaacactacatctgcttcagctttatcatgtgctctttttaatgagaaagttgagaacatgacaggtactggaactggtttaaatcataaacagttagaaaacaaaatgtctgttataaaaagtgctcttaaacttcacggtacaaaatttacaagcactataaaaatactatcatgttttggtggtagagaaatttcagcaattgcggggtcaataattgctgcaagaataaagtctattcctgtgctcttagatggttttatatgtacagccgcggcctcaactttaactctttttgatgaaaattttttagatcattgtctaatatcacatttatcaacagagcctggccatttaaaaatattatcttatttgaaaaaagatccaattttagatctaaatttaagacttggggaaggtagtggtgctgcaatagcatctcttatattaaaatctgcaattgttacacataacggaatgtcaacattttctgatgcccatgtaactaataaaaatgcttcgtga

SEQ ID NO: 239601 - DNA, 386 bp, Unknown
  Bacterial polypeptide expressing nucleotide sequence isolated from the Sargasso Sea
aatgaacgaagaactggcattacaacttcagtcgaaagtcgatggaaaaaccaaacctccgggatcgttaggggatttggagcaattggcattgaagatcggaatgatccaggggactttggaaccaaaactgaagagtccgacaatgctggtctttgtaggagatcacggaattaccaacgagggagtcagcccctacccttgggaggtaactgcccagatggtaaaaaacttcctgtccggaggggcagcaatcaatgttttctgcaagcagcatggttttgacctgaaagtgatcgacgccggagtcgcttctgattttaaaaacaccctcttctggtcgatgagaaaatcgcttacggcacagcaaatttccttaaagaaaa

SEQ ID NO: 239602 - DNA, 838 bp, Unknown
  Bacterial polypeptide expressing nucleotide sequence isolated from the Sargasso Sea
gagaaaggcatctccgcctttccccaagccgtcaccgggcagatgattgccaattttgttgctggcggagctgccatcagtgtcatggcaaaacaactaggcgccgctctggaagtaatcaacctgggcaccgtcagcccgctgcccattgacgacggcgtgattgatgaacacatcgccccgggcaccggaaacctagcccgccaacccgccatgaccgacgcccaattgcaggccgcactcgccgccggagatcgcgctgcgcaacgggccgccgatcgccaagccgacgtgtttattggcggggagatgggcattggcaacaccaccagcgccaccgccctggcctgcgcactattaggcgaagacgccaccgcactcaccggccctggcaccgggctgacaccagaaggcgttgcccacaaagcccaagtgattgcccaggccctagcccgtcacggcacccggcccgaaccgttggccgtgctggtctctttggggggctttgaaatcgtcgctctggctggcgcctttatcggctgcgcggtacgcggcatcccggtattagtggacggttttattgtctccacagcagcccttgccgcctgccaacttcgaccacaattacgcccctggttactgttcgcccaccagtcacgcgagcccggccaccaacggctgctgcacgccctggacgccaccccgctgctggatctttccctacgcttgggcgaaggcagtggcgcggctgtagcagtaccgttattacgcaatgcctgcgcgctacacaatcatatggcgacctttgccgacgccaatgtcagcaacgaaaactaat

SEQ ID NO: 239603 - DNA, 730 bp, Unknown
  Bacterial polypeptide expressing nucleotide sequence isolated from the Sargasso Sea
gtagttgatgctggtgtaaattataaatttgattatttagataacttaataaattcaaaaatagattttggtacaaaaaacttcattaatcaaaaagcaatgactaagtctcaattggaaaaatgtttcaaatttgggaagaaaataatacaagatatttcacctaaagagactaatataatgggatttggtgaaatgggaataggaaatacttcttcggcaacaatgataatgagttcattgcttgatttaccaatagacaaatgcgtaggaataggaactggtttagataaccaacaattaattactaaaacgaaaattcttcaagaagctaaattatttcataagaaaattactgatgtatatgaaatattacaaacttttggtggttttgaaatcgttcaaatgtgttcagcaatgcttgaggcttacaataaaaatatgattattatggttgatggtttcattgcctcttgtgcttatttagcagcttataatataaatcctaaaattaagaataatgcactatttagccataaaagctctgaaaacggacatgaattattgttgcatatcttgaaagtaaaaccaatattaagtctagatatgagattgggggaaggtacaggctgcgcacttgcttacccaataatcttaaattcagtgaattttatgaataatatggctacatttgaaaacgctcaagtaagtactcagtcaaatgattaaa

SEQ ID NO: 239604 - DNA, 667 bp, Unknown
  Bacterial polypeptide expressing nucleotide sequence isolated from the Sargasso Sea
aatgtttaatatcatgcctattaatcagcgattttcagctgtaattcaaaaaaaaatagacctcaaaacaaagccgttaggcgccttaggtcagcttgaaagttgtgctaaacaattaacgcttattttttcaaagcaacttgatagtgagcaggcgctagttgcctttaaaccggttatttcaaacccttctctagttgtatttgcgggtgatcatggtgtggcaagccaaggtgtgtcgattgctcctagctgcgttacatctcaaatggtggcaaactttgcagcaggaggtgcagcgattaatgtattttgtcgccagcttggctggcagctagaagttgttgacgctggaacactcagtacttcacacgataaaagtgtgcataaccagcgtttaggtgacattactgcaccactaaataatgaaatggctatgtcacttagccaggttgaaaaagggtttgcattagccaaacagcgagttcattcactctatgagcaaggttgtaataccatcgcctttggtgagatgggtattggcaataccacaagtgctgcggcattaatggctgccttgttgtcgttacctgctagccaatgtgttggtaaaggcacaggtgtgagcgacgaggttgttgctaaaaaaattaaagttgttgagcaa

SEQ ID NO: 239605 - DNA, 703 bp, Unknown
  Bacterial polypeptide expressing nucleotide sequence isolated from the Sargasso Sea
aatgagaaaatttttaatttcacctgtttcatcgactatagatgttgatttaaagaaaaaaattgacgcaaagacaaaacctccgggttctcttggaagactggaaaaactggcagtacagtttggaagaattcagaacagccttaatcctgaacttataaatcccacattcttggtttttgccggtgatcatggaattacagaagagggagtgagtccatatccacaggaagtaacaacgcaaatggtaatcaattttctcaacggaggagccgcaattaatgttttttgtcatcagaacaacattagtttacatgttattgatgcaggtgtgaaagctgattttcccgaatgtaatgaattaataaaagcaaaaataggaagaggtacaaaaaatttctgtaaagaagcggcgatgagcttagatgaatgtgaaagggcaattgagaagggagccgagctaagccgtactgttccattgtctacttgtaatgtgattggatttggcgagatgggaattggtaatacatcttctgcggcggccttgacccatcgatttacagggcttcctgttgaggattgtgttggtaaaggaaccggacttgatgatcaaggacttgagcacaaacaaaatactattcgtcaggcacttgaaaaacatgctgaaattaaagaacctcaagcagtattgtcaactttggag

SEQ ID NO: 239606 - DNA, 334 bp, Unknown
  Bacterial polypeptide expressing nucleotide sequence isolated from the Sargasso Sea
aatgaagaaatatttaattccaccggtttcatcgaaaattgaggttgatttaaagagaaaaatcgacagcaagaccaaaccaccaggttcacttggcagactggaaacagtggcatttcagtgtggaaaaattcagaacagcctcaatcctgaacttatagatcccacaatcttggtttttgcaggtgatcatggaattacagaagaaggagtgagtccatatccgcaggaagtaacagcacaaatggtactcaattttctcaacggaggagccgcaattaatgtgttttgtcgtcagaacatatcagtttacatgttgtggatgcaggggtga

SEQ ID NO: 239607 - DNA, 652 bp, Unknown
  Bacterial polypeptide expressing nucleotide sequence isolated from the Sargasso Sea
ccgccccaggtagagcaggttaaggtggttgtttttgccggaaatcatggtgtcacggctcagggggtgtccgcatttccgcgagaagttacggggcaaatggttgcaaattttgaagctggcggggcggccattaatcagctttgtaaactgcagaatgcggaactggctgtgatcgccctggctcttgaggccccgacggcagacttcaccgaagcgccggccatgacagagacagagaccgttgcggctctcaataccgggctggctgccgttgacgacggcctggatcttatctgtgttggcgagatggggattggtaatacgacctctgccgctgcgatctgtcacgctgtttttggtggcgaacccgcagattgggcggggcccggcactggcgtgaacggagatgcactcaccaacaaaattaatgtcgtgggggctgccgctgccacgcacaaagaggcaatgactgatggtgcggaggttctccgtcatttgggtggtcgggagatcgcggccctggttggtgctgttgtgggcgcgcgcctaaatcgcacacctgttctcttggatggctatgtcactggcgcagccgctgctattctccatgccctcaattcgaaggcactggaccattgtaaggttggac

SEQ ID NO: 239608 - DNA, 814 bp, Unknown
  Bacterial polypeptide expressing nucleotide sequence isolated from the Sargasso Sea
agtgacctatcaaatggtaaataattttttaaatggtggagcagcaataaatgtcttttcaaaaactagttctattaaattacaaattgttgatgcaggagtaaattataattttaaaaatgcaaaaaatttaattgataaaaagatagattttggaacaagtaattttattgatgctaaagcaatgactaaaactcaatttatgaattgctttaaatcaggaaaagatattataaacgaagtttcaaaaactaaaactaatattattggttttggtgaaatgggcattggaaacacttcgtctgcatcaatgataatgagctatttacttaaattgcctttgagtaaatgcgtagggtcagggactggattaagtactatgcagttaaaaaataaagttgagatattgaataaagcaaaaaaatttcatggcacaatagatgatgtatatgaaattttagaaacttttgcaggttttgagatagtccaaatgtgttcagctattcttcaatcctatgaaaaaaatatgattatactagttgacggttttattggatcaagtgctttcttggcagctttaaaaattaatcctaaaattataaataactctttttttacacatagaagttcggagtttggccataagattttattggaatatataaatgtaactcctattttagatttaaaaatgagattaggcgaaggaactggatgtgcacttgcatacccaataatccaaaatgcagttaattttattaatgacatggcaacgtttgaaaatgccaaggtgagcactgaatcaaatgattaa

SEQ ID NO: 239609 - DNA, 562 bp, Unknown
  Bacterial polypeptide expressing nucleotide sequence isolated from the Sargasso Sea
ttgtgtttaggggaaatgggcataggtaacactacatcggcatcggcactttcattggctctttttggcggcaacgcgaaggattgggtcggaagtgggaccggtatttcttctgattcctttggtaaaaaaattaaaatagtccagcaagcatgtgaactgcatgggaacatgaagggggatccactggcaatttttgcagctttaggtggattagaactagccgctatagctggcgcaatactagcggctagattggctaaggtccctgtcgtgctagatgggtttgcatgtaccgtcgccgcagcaattttatatgcaattaaaccttgtacaattgatcactgtcttgtctcccattgttctgttgagcctggtcataaaaaacttttaggtaaaataaataaagaatcattattagacctagggatgcgattaggcgaaggatctggagcgacacttgcactcggtataatacgcgccgctatcgcgtgtcaccttgggatggcaacgttcgaaggggctggcgtgagtaactctcaatccaacaaaattgtctaat

SEQ ID NO: 239610 - DNA, 853 bp, Unknown
  Bacterial polypeptide expressing nucleotide sequence isolated from the Sargasso Sea
cacccacccacgctcaactcagcgcagacaatcgtctttgccgctaaccatggcgtcgctgccaacggcgtctccgcttatccaaccgaagtgactgcacagatggtcgcaaactttaaggacggtggggcagcaataaatgctcttacctcaaattcgctcgctaacttatctgttgttccaatttctttagagataccaacaaaagacctcacgcgggatgccgccatgtcgacgagcgaacttaagacagctttagatattggagcatcggcaatacctgacgatacagatatcttgctactcggagagatgggaattggtaacacaactagcgcggctgcgctcgcctgcgccctcttcggcggaaaggcttcagattgggttggtcttggcaccggagtaaacgcggatggattgaaacgaaaatccaaagccgttgagacggcactgacctttcacaaaaacgcgctggacgatccactggacgcgctgcgccgtgtcggcggcagggaattagcagccattaccggtgcgaccttggaagcccggcggcgacgcattcccgtactcttagatggatttgtttccactgccgccgcctccgtcctatttgcctatgacgagaacgcgctcgatcattgcctcgtatcacacctatcttctgaggcaggacacagtcggctcctcgcaaaactatgtaagtccccgcttctggatcttgaaatgcgattgggcgaagcgtctggtgcagcggttgcgctgtcgatcgttcgagccgcactaatggcgcacatggaaatggcaacgttctcagtagcgggggtcgacggacggtcagagggcgtctaaa

SEQ ID NO: 239611 - DNA, 727 bp, Unknown
  Bacterial polypeptide expressing nucleotide sequence isolated from the Sargasso Sea
ggtgtgaaaacggattttcccgaatgtaatggtttaataaaagcaaaaataggaagaggtacaaaaaatttttgtaaagaagcggcgatgagctttgatgaatgtgaaagggcaattgagaagggtgctgagataagccgtactgttccattgtctacttgtaatgtgattggatttggtgagatgggaattggtaatacatcttctgcggcggccttgacacatcgatttacagggcttcctgttgaggattgtgttggtaaaggaaccggacttgatgatcgaggacttgatcacaaacaaaatactattcgtaaggcacttgaaaaacatgctcaaataaaagaacctcaagcagtattgtcaacttttggaggttttgaaatcgctatgatggtcggggctatgttggaatcagcagttttaaagaggattattatgattgatggatttattgcaacagcggcatttctcgctgcttttagaattgttcctgaaataaaacagtatgctatttttgctcataagtctgatgaacaggggcacggtaaaattctaaaatatatgcaagtagagcctctcatttcattagggatgcgtctgggagagggaacaggagcggcagtcgcctttcctattttacagtcagctgtttcattcttgaatcaaatggcatcctttgaatctgcgggtgtgagtagtcgtactgatgttaaaaaatcttaga

SEQ ID NO: 239612 - DNA, 832 bp, Unknown
  Bacterial polypeptide expressing nucleotide sequence isolated from the Sargasso Sea
tatggttgcacggaccgcagcgcgagcgcgcaacgagatgttgaccaagccgccgggcgcgctggggcggctggaggatctggcgatctggtatgccggatggcgcgcgcacgcggcgcctcgtgtcctggcccctcaggtcatcgtctttgccggaaatcatggcatcacggggcagggggtttctgcttttccggccgaggttaccgcgcagatggtcgcgaattttcagcagggcggcgctgcgatcaaccagttggcaagggatgcggtggcgcgaatggatgttcacgcgctggaactcgaccgccccactgacgacttcacccaaggcccggcgatgagcgcacaggactgcaccgctgccttcgataccgggtggaacgccgtggacgtcaccacggatctgctggttgtgggtgagatggggatcggcaacaccacctccgccgcggcgattgcggcggcgctgctgggcggatccggcgcggattgggtgggacgcggcacgggggtggacgatgacgggctggcgcgaaaggccgaggttgttgatcgtggccttgccgcaaacccgtcgcgcgatccgctggcggtgcttgcggcattgggcgggcgggaaatcgcagcaatggcgggggccatcgcacgggcccgcagcttgcgcattcccgtcgtgctggacggttttatctgttccaccgccgctctggtgctgcacagggtcgattccgacgcggttgcgcattgcgtggccgggcatctgtcggctgagggggcgcatgcacgtatgctgaacgcgatgggtttggagcccgctgctggatctggg

SEQ ID NO: 239613 - DNA, 779 bp, Unknown
  Bacterial polypeptide expressing nucleotide sequence isolated from the Sargasso Sea
aatgaacgaagaactggcatcatcactacagtcgaaactcgatggaaaaaccaaacctccaggatcgttaggggatttggagcaattggcactgaggatcggattgattcaggggactttggaacctcaactgaagagtccgacaatgctgatttttgcaggagatcacggaattaccaacgagggagtcagcccttatccttcggaggtaactgcccagatggtgaaaaacttcctgtccggtggggcggcaatcaatgttttttgcaggcagcagggttttgacctgaaagtgatcgacgccggagtcgcttcagattttgaaaaacaccctcttctggtcgatgagaaaatcgcttacggtactgctaatttccttaaagaaaaggccatgagtgagaatcaggccaaagaatgtatttctcggggagagaaacttgcaaaaaaactcccggatccttcgtgcaatgtgattggttttggcgagatgggtatcggcaacacctcctcttccgcgctgataatgtaccgactcaccgggatcaagctggaatcctgtgtcggacgcgggaccggacttgatgatcagggactttctcataaattcaaggtgcttcaggaagcctcagaaattcacagcggagcccgtggagccatcgaggtcatttcggcttttggcggattcgaaatcgccatgatgtgcggagcgatgatcgcatcctcgagaatgggccgtatccttttaattgacggtttcatcgcatcaacggccctgttgc

SEQ ID NO: 239614 - DNA, 873 bp, Unknown
  Bacterial polypeptide expressing nucleotide sequence isolated from the Sargasso Sea
aaacattgcatataaaatttgcttgattcaaaaatcaaaaaaaccatctttagtaaacccacaaataattatttttgctggtgatcatggaattgcagctgcgggtgtgagtaaatatcctcaagaagttactcatcaaatggttaaaaactttttaaaaggaggagccgctattaatgttttctcacaaaataactctatagggttgcaaatagtagattcgggtgttaattattcttttgacaaaaacaaatatttaattaataaaaaaattgattatggcacaaagaattttttaattgataaagctatgacaaattctcaacttcaaaaatgtttaaaatcaggaaaggaaattattcaaaaaatttcatctactaaatctaatattgtcggttttggcgaaatgggaattgggaacagttcttcagcatcaattattatgagctaccttcttaatattcctctagagaaatgcgttggtagtggaactggattaaataaaaatcaattaaaaatgaagttaagtattttaaaagaagctcaaaattttcacggtgatatagatgatccatatgaagttttagaagcttttggaggatttgaaattgcgcaaatgtgttctgctatgattgaatcttataaaaaaaatatgattatcttagttgatggtttcatatcatcttctgcatttttagttgcatcaaaaattaatcctaaaattattaataacacacttttttcccataaaagttcagaaaatggccaccaatacttattaaaaaaaattaacgaagatccaatattagatttaagaatgcgtttaggtgaaggaacgggttgtgcgcttgcctatccaataattgtaaatgc

SEQ ID NO: 239615 - DNA, 846 bp, Unknown
  Bacterial polypeptide expressing nucleotide sequence isolated from the Sargasso Sea
acctccaggatcgttaggggatttggagcaattggcattgaggatcggaatgatccaggggactttggaacctcaacttaagagtccgacgatgcaggtttttgcaggagatcacggaattaccaaagagggagtaagcccctatccttcggaggtaactgcccagatggtaaaaaactttctgtcaggtggagcggcaattaatgttttctgcaggcagcatggttttgatctgaaagtgatcgacgccggagtcgcttcggattttgaaaaagaccctcttctggtcgatgagaaaatcgcttacggtactgcaaatttccttaaagaaaaggccatgagtgagaatcagaccaaagaatgcatttcacggggagagaaacttgccgaagaactcccggatccttcgtgcaatgtgattggttttggcgagatgggaatcggcaacacctcctcttccgcgcttatgatgcatcgactcaccgggatcaagttggaatcctgtgtcggacgcgggaccggacttgatgataaaggactttcccataaattcaaggtgcttcaggaagcctcagaaattcacagcggagcccatggagccattgaggtcattgcggcgtttggcggattcgaaatcgccatgatgtgcggagcgatgatcgcatcctcgagaatgggccgtatccttttgatcgacggattcatcgcatcgacggccctgttgctggcacgtgaaatggatccgaaagtgatggatcacgcggtattcacccatgtttccggggaacaggggcaccgctctttattggaacatcttcaggtcaaaccccttgctggatctgagcc

SEQ ID NO: 239616 - DNA, 820 bp, Unknown
  Bacterial polypeptide expressing nucleotide sequence isolated from the Sargasso Sea
atgtcaaataccgttgcaatttccaatatgaatatgtttcgcgccctgctgagcaacttgccgagtcgggacgaagccgccgccgaagccgccaaggaacgagagcctcagctgaccaagccaccgggggcgctgggccgtctggaagagatctccctatggctttcagcctggcaaggccgccatccgccggcaaccgatcatgtcgcggtgcgcgtgttcgccgggaatcatggagtggtagctcggggggtttcggcttatccggccgaagtcactactcaaatggtcaaaaacttcgaggccggcggtgccgccattaatcagctttgcgcccaagccggcgccgaattgcaagtcatagctttgagccttgatactcccactgccgacttcaccatgaaaccagccatgaacgaggaggaattcctagacgcattagttcgtggcatggccgccgtgcccaaagatgcagatctcttgtgtgtcggtgaaatggggatcggcaacaccacaagcgccgcagccctatgcatggggctatttggaggcaactccaaggactggaccggaccaggtacgggggtcactgagcatgcgtttgagaccaagatgaaggtggtcgacgacgccgtccgccatcacgccgcgcatttagtggacggcatcaatgccctccaatgcctgggcgggcgcgagttagcggccatcgcgggagcgatcgtctcggcgcggctgaaacgggtgcccgtattactggatgggttaatggcaggggccgcagccgctgcgctaaagtccacgtcagtggatgccatcg

SEQ ID NO: 239617 - DNA, 493 bp, Unknown
  Bacterial polypeptide expressing nucleotide sequence isolated from the Sargasso Sea
aatgaacaaagaactggcatcaccactaaagtcgaaactcgatggaaaaactaaacctccaggatcgttaggggatttggagcaattggcattgaggatcggaatgattcaggggactttagagccgcaactgaagtgtccgacgatgatggtttttgcaggagatcatggaattaccaacgagggagtcagcccctatccttcggaagtaactgcccagatggtaaaaaacttcctgtccggaggggcggcaatcaatgttttctgcaggcagcatggttttaacctaaaagttatcgacgccggagtcgcttccgattttgaaaaacaccctcttctggtcgatgagaaaattagttccggtactgcaaatttccttaaagaaaaggccatgagtgaaaatcaggccaaagaatctatttcacggggagagaaacttgcagaagaactcccggatccttcatgcaatctaattggttttggcgagatggga

SEQ ID NO: 239618 - DNA, 577 bp, Unknown
  Bacterial polypeptide expressing nucleotide sequence isolated from the Sargasso Sea
gttgcgcgcagtttcagagaatatggatctaataacattgggagaaatggggattggtaacacaacaattgcatcagcattatgctattacttttttaaccatgatgtaagttcatgggtaggaccaggaactggatctaaccaagatcaggtgatacataagggcaaaataattgaaagagcagtagagacaaatcggcctggtattgtaagacctcttgatgcaggagtatccctgggcggtagagaacaagcagcgatttgtggagctgtagtagctgcgaagcattattcggtgccagtaattttagatggttttatttgtactgcagcagtattaccgattttcttcgaaagaaaggatatccttgaccattgtttaattgggcactgctcaaaggaaccagggcatcagttgctactaaagatgttaaacaaaaagcctattttgagactagatatggccttaggggaagggtccggtgctgccttagctacctccatagtcaaagcggctttcaagtgtcatttagaaatggccacttttgaagatgcaggagtttctggaaaacaataa

SEQ ID NO: 239619 - DNA, 861 bp, Unknown
  Bacterial polypeptide expressing nucleotide sequence isolated from the Sargasso Sea
catgaaaaaagatataattcctagtactttggtagacttcagggaaatattgactaaattacctggccccgatctaaatgcgttcgccgccgcgggcttgcgggaaccgcagcttactaaacctccgggctcacttggcaagcttgaggaaatagtggggtggttggcttcctggcaaggccgtcatccaccagccatggaggaaatagccgttcgcgttttcgcgggcaatcatggaattgtagagcatggtgtctccgcctatccccaagatgtcactcaacaaatggtgactaattttaaggctggcggcgctgccatcaaccagctttgcgctgcaacaaatgcggaacttcaggtaattccaattgatctggaccgtcccacccgtgactttagcaaagagtccgcaatggatgaaccagaatttatggatgccattagacgtggaatagactctgtaccagaaaacaccgatttactttgcgtgggcgagatgggtattggcaatacaaccagcgcctcagccctttgttttagtcttttcggaggcaacgtcgaagattggaccggaccaggaactggtgtaacaggaaaaaactaccagacaaaaatacaagtggttagtaattcagttcgttaccatgcccctttaataactgacggtctggatacattacagcgtctgggtgggcgagagcttgctgccatggctggtgcaattatcggagcaagacttaaatatatcccagttattcttgatggtttcgtagccggggccgcagctagtactctgaagtgtatgcactctgatgccttgagtcattgtcttgccgcgcatgtttcagcagaacccggaca

SEQ ID NO: 239620 - DNA, 756 bp, Unknown
  Bacterial polypeptide expressing nucleotide sequence isolated from the Sargasso Sea
aatgtctgatatgagcgtgctccgcgccctgctgagcaatctgcctagccaggacagtggcgccgccaaggccgccaaggaacgcgagccccagctcacgaaaccgcttggatctctgggccgcttggaggagatcgccctatggcttgctgcctggcaaggccgccatccgccggcaaccgacaagatcgtggtacgggtgttcgccggaaatcatggcgtggtcacacgcggggtttcggcttatccagccgaagtcaccgcgcaaatggtcggcaactttgaggctggcggcgccgcggtgaatcagctttgcgccgaggcaggcgccgaattacaggtcatcgccctggaccttgattaccccaccgccgacttcaccatgcaaccagccatggatgaggccgaattcctaaacgcttttagccgtggcatggccgccgttcccgagaatgctgatctcctgtgtgtcggtgaaatggggatcggcaacaccaccagcgccgcagccctttgcatgggcctttacggcggcgacgctaaggactggactggatccggtacggggatcaccgagctcgcgtttgagaccaaaattaaggtggtcaaagaagccgtccaccgccacgcgccgcattcgatcgacggcatgagggccctgcagtgcctgggcggacgcgagttagcggccatggcgggcgcgatcatcgcggcccggcttagccgggtgcccgtattactggacgggttcatggc

SEQ ID NO: 239621 - DNA, 1015 bp, Unknown
  Bacterial polypeptide expressing nucleotide sequence isolated from the Sargasso Sea
ggacgagccggccatgcagctggcccgccatcatatcgatggcctgttcaaccggtgggaagcctagggcgccttgaagagctggccgtgcaactggccgggatctatcgcacccccgatattcaccccggcgccaaggagatcatcgtcatggcggccgatcatggcgtctttgacgaggggattgcggttacgccacgtgaggtgacggcgagccaggcgctcaacatgacgcgcggcctgaccggcgtctgcgccttggctgcggccagtggcgtcaaggtgcagattgtcgatatcggtatcgacagcgagccgttgcccgggatgccgagtctcaagcttgcccgaggctgcgccaatattgccaaaggcgccgccatgagccgccatgatgccgagcatctgctgctggcgagcgcccggtttgccatggacaaagtggcctctggcgtgcgggtgctgggtgtcggggagctcggcattggcaacaccaccccggcggccgccatggtcagcgtgatgactggcgccgcgcccgagcaggccgtgggccttggcgccaacttcccgagtcaccgcctgcatcacaaggtggaggtggtgcgaagcgccattgcggtcaatcgtcccgatgccagcgatggtattgatgtgctggccaaggtgggcgggtttgatctggtcggcatgactggtgtgatcctgggcggtgcggcagcaggggtgccggtggtgctcgacgggtttctctcttatgcctgcgccctggcggcgtgtcgcattgcgcccggcgcctggcactatctggtgccctctcaccactcggccgagaagggctcgcagctggcgttggcgcaccttgaccttaagccctttatccaccttgaactgcgcttgggggaagggagcggcgccgccatggccatgccgtttatcgacgccgcctgcgccatggtccagcggatgggccgcatggctgacaaccatgtggagctgccccgaccggcttgat

SEQ ID NO: 239622 - DNA, 1021 bp, Unknown
  Bacterial polypeptide expressing nucleotide sequence isolated from the Sargasso Sea
aatgaacgaagaactggcatcacaacttcagtcgaaactcgatggaaaaaccaaacctccaggatcattaggggatttggagcaattggcactgagggtcggaatgatccaggggactttggaaccgcaactgaagagtccgacgatgctggtttttgcaggagatcacggaattaccaaagagggggtcagcccctatccttcggagataactgcccagatggtaaaaaacttcctgtccggaggagcggcaatcaatgttttctgcaggcaaaatggttttgacctgaaagtgatcgacgccggagtcgcttccgattttgaaaaacactctcttctggtcgatgagaaaatcgcttacggtacagcaaatttcattaaagaaaaggctatgagtgagaatcaggccaaagaatgcatttcacggggagagaaacttgcggaagaactcccgaatccttcgtgcaatgtgattggttttggcgagatgggaatcggcaacacctcctcttctgcgctgatgatgcatcgactcaccgggatcaagttggaatcctgtgtcggacgcgggaccggacttgatgacaaaggactttctcataaattcaaggtgcttcaggaagcctcagaaattcacagcggagcccgtagagccatcgaagtcattgcggcgtttggcggattcgaaatcgccatgatgtgcggagcgatgatcgcctcctcgagaatgggccgtatccttttgatcgacggattcatcgcatcgacggccctgttgctggcacgtgaaattgatccgaaagtgatggatcacgcggtattcacccatgtttccggggaacagggtcaccgtcctttactggaacatcttcaggtcaaacccctgctggatctgagcctcaggcttggagaggggaccggagcagccttggcctatccgctcctgatttcagcagttgcttttttgaatgagatggcttctttcgaatcggcgggcgtcagtgatcgcagcgatgcctga

SEQ ID NO: 239623 - DNA, 1057 bp, Unknown
  Bacterial polypeptide expressing nucleotide sequence isolated from the Sargasso Sea
gatgacgaccccgacccacttcccgccgccgatcgcgccgctcgacgaggtgctgcgcaagcgcctgcagcacgtgatcgaccacaagaccaaaccgcccggcagcctcggccagctcgaggcgatcgcgttgcagatcggcctgatccagcataccgagcggccggtcgtgcagcgtcccgtgatgatcgtgtttgccggcgatcacgggatcgccgccgagggcgtgagtccttatccgcaagcggtgaccgcacagatggtcgcgaacttcctcgcgggcggcgcggcgatcaacgcattctccggtgtcgcgcagagtacgctcgagatcgtcgatgcgggtgttgcgtcgccgctgccgctgtccgaccggctggtgtcgctgccggtcgcgcgcggcacgcgcaacttcgcggcggagccggcgatgacgcgcgacgaggcgatgacggcgctcgcggccggcgcggcacgcgtgcgcctgcatgcgtcgctcggcacgaacgtgatcggtttcggcgagatgggaatcgcgaatacgtcgtcggctgcgtgcctgatgagccgcctgctcagcgtgccgatcgacgcgtgcgtcgggcgcggcacgggcctcgacgaccagggcctcgcgcacaagcgcgcggtgctcggacgcgcgctcgtcaagcactcgcacgcgattgcgccgctcgacgtgctcgcaacgttcggcggcttcgagatcgcgatgatgacgggcgcatatctcgcggccgcgagcgagcggatgacgatcctcgtcgacggcttcatcgcgacggccgcgctgctggttgccgagcgcatcgcgcccggcgtgcgcgactactgcgtgttctcgcatgcgtcgcacgaggccgggcaccggcgcatgctcgagcatttcggcgcgaagccgctgctcgcgctcgacctgcggctcggcgaaggcacgggcgccgcgctcgcgctgccgctcgtgcgtgcggccgccgcattcctcacggagatggcgagcttcgaatccgccggcgtcgacaatcgtgacgcctga

SEQ ID NO: 239624 - DNA, 466 bp, Unknown
  Bacterial polypeptide expressing nucleotide sequence isolated from the Sargasso Sea
cgtggtactggtatcagtgatgcacaatttgaattaaaactggcgttaattcagcaggctttgcaacgaccttatgccaaagatccgctgtccattctggctgaatttggtggctttgaaatagtccagctttgtggtgctatcttaggtgcagctgcactacaaaaacctgtactcattgatggctttattgtctcagtcgcggctttattggcctgtcagatggcgccgaattgccgtgactatttaatttttgcgcatcagggtgctgaagctggtcataaggcggtgttaaaggctctggatgcctctgtgttactggatttaggtttacgtttaggcgaaggcacaggagctgctttggcggtaccattactcaaagccgccattagtttttacaacgatatggcaagttttgctgatgccggcgtgactcaagtggtggaagccggagctcttgagtgaa

SEQ ID NO: 239625 - DNA, 1021 bp, Unknown
  Bacterial polypeptide expressing nucleotide sequence isolated from the Sargasso Sea
aatgaaccaagaactggcatcacaactacagtcgaaactcgatggaaaaaccaaacctccaggatcgttaggggatttggagcaattggcattgaggatcggaatgatccaggggactttggaaccgcgactgaagagtccgacgatgctggtttttgcaggagatcatggaattaccaaagagggagtcagcccctatccttcggaggtaactgcccaaatggtaaaaaacttcctgtctggaggggcggcaatcaatgtcttctgtagacagcatggttttaacctgaaagtgatcgacgccggagtcgcttcggattttgaaaaacaccctcttctggtcgatgagaaaatcgcttacggtactgcaaatttccttaaagaaaaggccatgagtgagaatcaggccaaagaatgcatttcacggggagaaaaacttgccgaagaactcccggacctttcgtgcaatgtgattggttttggcgagatgggaatcggcaacacctcctcttccgcgctggtgatgcatcgactcaccgggatcaagctggaatcctgtgtcggacgcgggaccggacttgatggccagggactttctcataaattcaaggtgcttcaggaagcctcagaaattcacagcggagcccgtggagccatagaggtcattgcggcttttggcggattcgaaatcgcaatgatgtgcggagcgataatcgcttcctcgagaatgggccgtatccttttgatcgacggattcatcgcatcgacggccctgttgctggcaagtgaaatggatccgaaagtgatggatcacgtggtgttcacccatgtttccggggaacagggacaccgtcctttactggaacatctacaggtcaaacccttgctggatctgaacctcaggcttggagagggtaccggcgtagcactggcctatcctctcctggtttcagcagttgcatttctgaatgagatggcttctttcgaatcagcaagagtcagtgatcgcagcgatgcctga

SEQ ID NO: 239626 - DNA, 928 bp, Unknown
  Bacterial polypeptide expressing nucleotide sequence isolated from the Sargasso Sea
cgatcatgttgcgcggctcaaggccgagacacgtcagcagcaattgaccaagccggcgggttcgctggggcggctggagagtctcgcgatccatctggctgcattgcaggggcgcgagcggccgagcctggacacactgtcgatcgccatctttgccggtgaccatggcgtggtggccgaagggatttccgcctacccacaggcggtgacggggcagatgctggccaacttcgtcactggcggtgcggccatcagtgtgctcgcgcgtcagttggatgcggcgctcgaggtgatcgacctgggtactgccgaacccttgccgccgctgccaggcgtgcgtcatctgcaggtcggtgccggtacgcagaactttgcccgtgatccggcgatgaccctggcgcaggtgatgatctgcctggaggccggtcgcgacagcatccagcgtgcgcgcgccagcggttgcgatctgttcgtcggtggcgagatgggcatcggcaataccaccgcggcggcagcgctggcctgctggctgctgggttgcccggcgagccagctggcagggcccggcaccgggctggataacgcgggtgtggcgcacaaggcgcgggtgatcgatgccgcattggccctgcactgtgcgcagatcgacgggccattgcaggcgctgatccacctgggtggcttcgagattgcggcgctcaccggcgcctacctggccgccgcgcagcagggtatcgcggtattggtcgatggctttatctgcagcgttgcggccttgctcgccgtgcgcctgaaccctggctgccgcgactggctgctgttcgcccatcacggtgccgagcccggtcatgtgcgcgtgctgcaggcgctggcggccgagcctctactggagctgggcttgcgtctgggtgagggcagcggcgccgcg

SEQ ID NO: 239627 - DNA, 940 bp, Unknown
  Bacterial polypeptide expressing nucleotide sequence isolated from the Sargasso Sea
gtacagtttggaagaattcagaacagccttaatcctgaacttataaatcccacaatcttggtttttgccggtgatcatggaattacagaagagcgagtgagtccatatccacaggaagtaacaacgcaaatggtaatcaattttctcaacggaggagccgcaattaatgttttttgtcatcagaacaacattagtttacatgttattgatgcaggtgtgaaagctgatttccccgaatgtaatgaattaataaatgcaaaaataggaagaggtacaaaaaatttctgtaaagaagcggcgatgagctttgatgaatgtgaaagggcaattgagaagggagccgagctaagccgtactgttccattgtctacttgtaatgtgattggatttggcgagatgggaattggtaatacatcttctgcggcggccttgacacatcgatttacagggcttcctgttgaggattgtgttgggaaaggaaccggacttgatgatcaaggacttgagcacaaacaaaatactattcgtcaggcacttgaaaaacatgctgaaattaaagaacctcaagcagtattgtcaacttttggaggatttgaaatcgctatgatggtcggggctatgctggaatcagcagttttaaagaggataattctaattgatggatttattgcaacagcggcatttcttgctgctttaagaattgttccggaaataaagcagtatgctgtctttgctcataagtctgatgaacagggacacggtaaaattctaaaatatatgcaggtagagcctctcatttcattaggaatgcgtctgggagagggaacaggagcggcagtcgcgtttcctattttacagtcggctgtttcattcttgaatcaaatggcatcctttgaatctgcgggtgtgagtagtcgtactgatgttaaaaaatcttaga

SEQ ID NO: 239628 - DNA, 1063 bp, Unknown
  Bacterial polypeptide expressing nucleotide sequence isolated from the Sargasso Sea
tatgacttttttatcagctgtgccgggattgaccgatgtcgaaccgctcgaccaaacgctgcgtgccgaactgcaacgcatcatcgacaccaagaccaagccgcccggcagcctcgggcggctcgagacactcgcacgccagttggggctgatccagcggacgacgcatcccacggtcgaacgcccggcgatgatcgtgtttgccggcgaccacggcattgcacaggagggcgtgagtccttatccgcaagcagtgaccgcgcaaatggtcgccaactttctggcgggcggcgcggcgatcaatgccttgagccgcgtgtgcggcgtcgaactcgaagtggtcaactcaggcattgctacgccgctgccgtccactgaagggctcatcgatatcccggtcgcggccggcacgcgcaacttcgcgcatgaacccgcgatgacgcgcgaacaggcgctggccgcgatgcagtcgggcgcggcacgcgtgcggcatcatctggcgctcggcaccaatgtgatcggcttcggcgagatgggcattgcgaatacgtcgtcggccgcttgtctgatgagccgcctgtgtggcgtgccgatcgacgaatgcgttggacgcggcacgggtctcgacaacgccgggctggcgaaaaaacgcaacgtactggcttcggcactcgcgcatcatgccgcttccagcgatccgctcgacgtgctcgccaccttcggcggcttcgaaatcgccatgatgaccggcgcatatctcgccgccgcgcaggcgcgtatgacaatcctcgtcgacggtttcattgcgacgtcggcattgctggtagccgatgcgttcgcaccgacggtacgcgagtattgtgtgttcgcgcatgcgtcgaacgaggcggggcatcggcgcatgctcgatcatttcggcgcgttgccattgctttcgctcgatatgcgtctcggcgaaggcacgggcgcggtgctcgcggtgccgttgctgcgggcggcggtggcgttcgtcaatgaaatggcgagcttcgaatcggccggggttgcgaatcgcgatgcttga

SEQ ID NO: 239629 - DNA, 1054 bp, Unknown
  Bacterial polypeptide expressing nucleotide sequence isolated from the Sargasso Sea
aatgtctcaatcaagcctgtcatttcaaatcgagcctgtgagtaaagcgcaggatcaggttattcaacaaaaaatcgatcttaagaccaagccgccaggtgcattgggacaactcgaatccttagcattacaaattgctcgcattcaagggccacaacaattgcagatagtcaaaccgaccatgttggtatttgcaggggatcacggcattgccgctgaaggggtttcgattgccccaagtgaagtcacccaccaaatggtgcaaaactttgcccacggcggcgcggccattaatgtgttttgtcgccaattaggttttacgcttgaagtgatcgattgcggtattttgacacccgttgaggggctagaagggattatcgatcaacgtcttggcgcgggtactgctgcaattcatttggagccagccatgcctttaacgagtgtggataagggctttgatatggcgcgcgagcttattgagcgtcaccatcaagcaggctgtaatctggttgcgtttggtgaaatggggattggcaacacgtcctctgccgcggcaattatggcggcgattatgcaattagatgtagctgactgtgtggggcgcggtacaggcattaatagcgacactttagcgcgtaagttaaccttggtagaactggcgttgctatcgcatcaaagtgcgcttagtgggccaaaacaagtgcttgcttgtcttggcgggtttgaaattgtgcaaatgactggtgccatgctggctgcagctgagcgcaagatgttggtagttgtggatggttttattgcgaccgccgccgcattagtcgcggtgacgatcaatgctaatgtgcgggattatctgattttcgcccattgctccgaggagcaaggccatcaacgtatgttggaatatttgcaagctaaacccttgttatctttggggcttagattaggtgaaggcacgggggcagctttagcattgccgttaattcaagccgcagtaaatttttacaatcaaatggcgagttttagtgatgcagggattgaggctgttgtatga

SEQ ID NO: 239630 - DNA, 1009 bp, Unknown
  Bacterial polypeptide expressing nucleotide sequence isolated from the Sargasso Sea
tatgaacaactttaaaaacttggcaactatctacgacataataaaagaaatgcctgttaaagacattgaagcagaggctaaggcgattgcccaccaaaaccaacttacaaagccacctggagcacttggaattcttgaagaattagctgtatttttggcaagttggcagagaaaaacaaagccttcgttaaattcggtacaagcaatagtttttgccggcaatcatggtatttgctctcagggagtgaacccattccctcaagaagtaacaattcaaatggtcgaaaactttaaagctggaggagcggctataaaccaactttgtgaagtaaatggagcaaatttaaatattgtaccactttccctcgatacacctactgctgactttactaaagaagaggcaatgagcgaactagagctttgtgaagctatggcgattggtgctaaatcagtaaatttagagtctaatttgatattgttgggggaaatgggaattgggaattccacaatttcatccgcactagccgcttcagtttttggtggtagtgtagaacgttgggtaggagcgggaacaggttcagatcaaaaaggccaagcccataaaaccgcggtaattgaattagggatcaaaaaacatggctcaataagagatttaagagccctgcaagcattcggtgggagagaacaagccgccatttgtggggctattttggctgcaagaaatgcacgcatccctgttctacttgatggctttatttgtgctgcagctgcggctcctttatttggtacatcacgcggtagtcttgatcactgtttaattgggcatttatctgtagagccaggacacaaacttcttctggaagcaatggaaaaatctgcaatacttgatttaaatatgagactgggagaaggcacaggagcggctctagctttgtcaataattcgtggagctattgcttgtcataataatatggcaactttcgattctgcaggagtttcaagtaaatga

SEQ ID NO: 239631 - DNA, 1054 bp, Unknown
  Bacterial polypeptide expressing nucleotide sequence isolated from the Sargasso Sea
atgcctcaatctgtcccgttatttcaaatcgagcctgtgagtaaagcgcaggatcaactcatccagcaaaagatcgatcttaagactaagccgcccggcgctctgggacagttagagtccttagcgttgcaaattgcccgcattcaaggggctaagcagttgcagatagttaaccctaccatgttggtgtttgccggagatcatgggattgctgccgaaggggtgtcgattgccccgagtgaagtcacgcggcagatggtgcaaaactttgcccatggcggcgcggccatcaatgtgttttgtcgtcagttaggcttcaatctcgaagtgattgattgcggtatcttaaccccagttgaagatgccgaaggcattatcgaccaacgccttggtgcaggaacggctgcgattcacttagagcctgccatgacgttagcctgtgtggataagggctttgccatggcgcaggcattaatcgagcgtcaccatcaggcgggctgtaacttggttgcctttggtgagatgggcataggtaatacttcgtcagctgcggcgattatggcggccattatgcaactcgatgtagccgactgtgttggccgtggtacgggcatcaatagcgaaaccttagagcgtaaacagatgcttatcgaactcgcgctgctgttacaccagagtgcgatgactgggcctcggcaagtgctggcctgtttgggtggctttgaaattgtgcaaatgacgggagccatgctcgccgcagccgagcgcaagatgctggtcgtggtggatggttttattgcgaccgcagcggctttggttgccgtgaatatcaacgcgaatgtgcgggattatttgatttttgcccaccgctccgaggagcaaggtcatcagcgtatgttggaacatttaaaggctaagcccttgttatctttagggctgagattaggcgaaggcacgggcgctgccttggcattgccgttaattcaagccgctgtaaatttttacaatcaaatggcgagttttagtgatgcggggattgaggctgttgtatgat

SEQ ID NO: 239632 - DNA, 460 bp, Unknown
  Bacterial polypeptide expressing nucleotide sequence isolated from the Sargasso Sea
atgagcgaaaaatacgtcgtcacctgggacatgttgcagattcacgcccgcaaactggccaatcgtctgatgccttctgaacaatggaaaggcattattgccgtaagccgcggtggtctggtaccgggtgcattactggcgcgtgaactgggtattcgtcatgttgataccgtttgcatttccagctacgaccacgataaccagcgcgagctgaccgtcctgaaacgcgctgaaggggatggtgaaggtttcatcgtgatcgatgacctggtcgataccggcggtaccgccgtcgctattcgcgaaatgtacccaaaagcacacttcgttaccatttttgctaaaccggctggtcgtccgctggttgatgattatgttgttgatattccgcaggatacctggattgaacaaccgtgggacatgggcgtggtgttcgtaccgccgatctcaggtcgttaat

SEQ ID NO: 239633 - DNA, 247 bp, Unknown
  Bacterial polypeptide expressing nucleotide sequence isolated from the Sargasso Sea
ttggcatctatattttcaataaaatataaagataaaaatacgtcagcccgatctggagtcttaacaacagatcatggaaatatacaaacccccttttttatgccagtaggaacttatggagctgttaaaactcaatcctcagaagaaataaattttttaccgagtaaaattctgttaagtaatacttatcatctatatttaagacctggtatggaaattgtttctcaagctgggaggattgcataaa

SEQ ID NO: 239634 - DNA, 235 bp, Unknown
  Bacterial polypeptide expressing nucleotide sequence isolated from the Sargasso Sea
atggcattaaaaaattttgcctttaaagttttaaataaagatagatttgctagacgtggtgtaatagaaactcatagaggtgaaattaatactccaacatttatgcctgttggaacacaagcaacggttaaagcttgcacaatcgacgatataaagaaaactggatcagaaataattctttctaatacatatcatttaatgatccgtccaggcgtagaaagaattgaggcagcag

SEQ ID NO: 239635 - DNA, 375 bp, Unknown
  Bacterial polypeptide expressing nucleotide sequence isolated from the Sargasso Sea
ggccatctgatattgtagcggcagttagacgcggtgttgatatgtttgattgtgtcatgcctacgcggaacggtagaaatggacatatattcacatcaaaaggtgtgataaatataaggaatgaaaaatataaagatgatatgtctccattagataatgaaagttcacacccttgggggcagaaattttcaagatcatatgttaggcatctttttaatatcaatgaggtcctaggactaagaatttcatctacactaaatcttgtctattatcatgatttaatggataagatcaagaatgaaattgagaaaaacaattttaatacctggtcagaatcaatattgaatagaatgaaagatatgaaaggaatgtgat

SEQ ID NO: 239636 - DNA, 273 bp, Unknown
  Bacterial polypeptide expressing nucleotide sequence isolated from the Sargasso Sea
aatgacaaaattttcatggcagattacacatcaatcgaaaaaaaataaagctagaactggcatattaactacaccacatggcaaaattaataccccggcatttattttttgtgcaactaagggtgctttaaaatcatcaaccacaagtacagctaaagaaaataatactcagattattctatcaaatacatatcatttgatgcttcagccaggaagtgacttgattgcaaatcatggtggattgcataaatttttaaattggaaaagcccaat

SEQ ID NO: 239637 - DNA, 339 bp, Unknown
  Bacterial polypeptide expressing nucleotide sequence isolated from the Sargasso Sea
gagcagtaaaaagaggggttgatatgtttgattgtgtattaccttctagatctgggagaaccggtctagcttttacgtggagtggacctataaatattaagaatgccaagtatcagtatgatacaaagcccatcgatgaaaaatgtgaaaaattcaacttaaataagtattcaaaaaattacctaaatcacttattcaataccaatgaaatattggcttcaatgcttttaactctccataacataaatttttaccatgagctcatgaatgaaataagaataaacataaataatggaacttttgaccatttttttgatgaatacattggtaagttgtaat

SEQ ID NO: 239638 - DNA, 888 bp, Unknown
  Bacterial polypeptide expressing nucleotide sequence isolated from the Sargasso Sea
aatggtagaaaatggatctattttttatactacttccgatactgagactatagtaaagttaattgcaaagtctaagagatcaacaacaatcgataaaataattgagactttatttcaaattcaaggtggatatgcacttgttatgattgctcaaaatactttaattggagtaagagatccatatggtattagacctttagtaattggaaaattaaaaaattcatatgtatttacctcagaaacgtgtgctttagatattattggtgcaaagtttgttagggaagtagaaaatggggaaattgtttacatagaaaatgatgaattaaaaagtcttaaaccatttcccaagagaaaaaaacgtccctgtgtttttgaatatatatacttctcaagacctgatagtttgatcgatgggacaactgcatatgaatacagaaagaagctaggttcagaattatcaaaagaagacgacattaatgcagatttagttgtacctgttccagactccggaaatgcagctgcgcttggatattcacagaacaaaaatattaaatttgatttaggactaataagaaatcattatgttggcagaacctttattgagccagctcaaaaaattagaagtcttggtgtaaaactaaaattaaacgcaaataaatcatcaattaaaaataaagtaattgtattggttgatgactctcttgttagaggcacaacttcttataaaattgtaaacatgttatacgaagcaggtgctaaagaagttcatttaagaatagcatctcctgaaattaaatttcctgatttttatggaatagatatgccatcaaaaaaagagttgttggcagcaaatatgtcagtggatgaaatttgcaattatgttaaagc

SEQ ID NO: 239639 - DNA, 193 bp, Unknown
  Bacterial polypeptide expressing nucleotide sequence isolated from the Sargasso Sea
atggaagacataaaaaagaatttttcttttagcgtaaaacatcaaaataaaaattatcgagtcggattaattcaaactcatagaggtgaaataaatactcctgcatttatgcctgtaggcactcaagctacagttaagggagtttttattgatgatattattaaaacaggaagtgaaataattctctcaaaat

SEQ ID NO: 239640 - DNA, 226 bp, Unknown
  Bacterial polypeptide expressing nucleotide sequence isolated from the Sargasso Sea
atgccccaagaaaatttttcttttaatttattaaaagaaaatcaagaagcaagacttggaaaaataaaaactcgtagaggatatatagataccccagcatttatgccagtcggaactcaagcttctgtgaaatctgtatttattgatgatttaattgatactggaacacaaataattttatctaacacttatcatgtaatgttaagacctggtatgaaagaataat

SEQ ID NO: 239641 - DNA, 358 bp, Unknown
  Bacterial polypeptide expressing nucleotide sequence isolated from the Sargasso Sea
tgtaggcacaccttcggatattttaggagcagtaaaaagaggagttgatatgtttgattgtgttttacccactagatctggaagaacaggattagcgtttacttggaatggaagaataaatattagaaatgctaaatatcaatttgataatacaccaatagataaaaataattctattttaaacaaatattccaaaaattatataaatcatttgttcaatactaatgaaattcttgcttcaatgattctaactcttcataatattaatttttaccaagaattaatgactgcgattagagaaaatattaaaaaaggtaattatgatgcatttcacgataagtatattggtaagttataa

SEQ ID NO: 239642 - DNA, 862 bp, Unknown
  Bacterial polypeptide expressing nucleotide sequence isolated from the Sargasso Sea
aattaaaagaaaaaactctaaccgaaaaaaatctcttttaaacatttctgaagagggagctttatttaaatcctttattgatggtagaaattatttgttaacacctgaaaaatcaattgcaattcaaagagatataggtgcagatctcattcttgtttttgatgaatgcactccctttcatgtagataaatcttatactgaccaatctatgaaaagaagtcacaattggtctactagatctatgaatagtttccaaaaaagaaataaatatttaccaatgaaaggatcttcaggaattcaaaaactttatggcatcattcagggaggtatttataaagatttaagagatgaaagtattgagtttaatataaattcaaaaaatttttttggtttagctattggtggaagtttgggatctacaaaagaagaaatgcatgaaatagttgattatactgcttcaagattgggaaatatgcatccgatacatttattaggtataggggatcctgaagatatatggaaattagttaagtcaggggttgatacatttgattgtgtaagtccaacaaggttggctagacatgggtctgctttagtaaaaggtaaaaaaggtaaaataaatattaaaaataataaatttagtgaaaaccttagtccaatagataaaaattgtcattgtaatacatgtaaaaactattccttggcataccttcatcatttattaaaagctgaagagctaattgttttaaattatattactactcacaatatatattttatgaattctctaatgaagtatattcgcgaaagtattaaagaagataaaatattcgaggctgaaaaaaattggtacttagactag

SEQ ID NO: 239643 - DNA, 454 bp, Unknown
  Bacterial polypeptide expressing nucleotide sequence isolated from the Sargasso Sea
gcggttggtgaaactcaaaaacaaatgtttaaaactttagaggatttggaaaattttttacctgtaaataagcctcgatatttaatgggtgttggaacacctagcgatatactaggagcagtaaaaaggggagtggatatgtttgactgtgtaatgccaacaagagcaggaagaacaggtttggcatttacatgggaaggaaggttaaatttacgaaatgcaaaatataagaaagatgataccccgattaacaaagacacaaacgttagaaatcttaactgctattccaaaagctatgttaatcatctaattaatactaacgaaattttagcctctatgattctaactataaataacatagttttttatcagcaattaatgggaaaaataagggaagcaattaaaagtaacacatttaacactttttataataaatatatcaagttaatttaat

SEQ ID NO: 239644 - DNA, 334 bp, Unknown
  Bacterial polypeptide expressing nucleotide sequence isolated from the Sargasso Sea
aaatctggaattgatacttttgactgtgttagtcctacgcgtctagctcgtcatggagcagctttggttagaacaaaaataggaaaagttaacttaaaaaatagtatttataaaaacagtatagatcctattgataaaagttgcaaatgttctacttgtaaaaattattcaactgcatacttgcatcatcttttaaaatctcaagagctattggcattaaatcttattacaggacataatgtttactttatgaattctttgatgaaatatataagagatggaattgaaaaagataatttagatgaagctgaaaaaaaatggtattcaaattaat

SEQ ID NO: 239645 - DNA, 335 bp, Unknown
  Bacterial polypeptide expressing nucleotide sequence isolated from the Sargasso Sea
taatttaggaatagatatgtttgattgtgtgttgccaactagatctggaagaactgcgctagcttttacttggggaggtaaaataaatctcaaaaattctaagtatcagaatgatttatcgccattagatgaaaattgtaaaattaggaacttaagaaattattctaaaagttatttaaatcacttaattaaatctaacgaaatgatggcttctatgcttatttctcttcataatatcaatttttaccaagaatttatgcttgaaattagaaataatattaaccgtggcactttttcaactttttataaaaaatatattgattattttaattaat

SEQ ID NO: 239646 - DNA, 677 bp, Unknown
  Bacterial polypeptide expressing nucleotide sequence isolated from the Sargasso Sea
taaagattatacttataactccatgcaaagaagtcatagatggtcacaaagatcaataaatgcatttaattcaaaccttaattataaagcaaaggaaggatcttctggtactcaagagatatatggaattatacaaggtggaatttacaaagatatgagagaagagagtatagaatttaatcaaaataatattaatacatttggagtagcaattggaggtagtttgggatctagtaaagcagaaatgcaagaaatagttaatttcactgcttcaaaattaaataatattcgaccagtacatttattaggaataggtgacccaatagatatctggacatttgttgagcaaggtattgatacatttgattgtgtaagcccaactcgtttagcaagacatggctcagctttagttaaaggaaagcatggaaaaataaatttaaaaaataaaaaatataacgaaaatttaaatccaattgataagaattgtctttgttatacttgcagaaactttacactttcttatcttcatcatttatttgcatcacaggaattacttgctctacaattactaacaaatcataatattttttttatgaataacctaatggagactataagaatagcaattaaagaaaacaattttgaaaataagaaaaatgaatggttaaatttataat

SEQ ID NO: 239647 - DNA, 157 bp, Unknown
  Bacterial polypeptide expressing nucleotide sequence isolated from the Sargasso Sea
atgctaaatactgaattttcttttgagttaatagctcaggatgataaagcaagacttggtaaaatttatactacaaaaggtacaatagagacccctgcattcatgccagttggtactcaaggaacaataaaaagtgtttttactgaagatatttaaa

SEQ ID NO: 239648 - DNA, 283 bp, Unknown
  Bacterial polypeptide expressing nucleotide sequence isolated from the Sargasso Sea
aatgactgatttttcttggaatataaaaaaaaaatctaaaaattctaatgctagaattggtgtcatatcaacacctcatggtaatattaaaacaccagcatttatattttgtgcaactaagggagcgttaaaatcattttcaactgctgatgctaaaagtaataatagtcaaataattttatccaacacatatcatttaatgctccagccaggcagtgaacttgtagcaaaacatggaggtcttcataaatttagtggatggaatggacctatgttaacagat

SEQ ID NO: 239649 - DNA, 714 bp, Unknown
  Bacterial polypeptide expressing nucleotide sequence isolated from the Sargasso Sea
ttcttgtttttgatgaatgcactccgtttcatgtagataaatcttatactgatctatctatgaaaagaagccacaattggtctattagatctataaacagttttctaaaaagtaataaatatttaccaatgaaaggatcttcaggaagtcaaaaactttatggcatcattcagggaggtatttataaagatttgagagatgaaagtattgattttaatataaatttaaaaaatttttttggtttagctattggtggaagtttgggatctacgaaagaagaaatgcatgaaatagttgattatactgcttcaagattgggaaatatgcatccgatacatttattaggtataggggatcctgaagatatatggaaattagttaagtcaggggttgatacatttgattgtgtaagtccaacaaggttggctagacatgggactgctttggtaaaaggtaaaaagggtaaaataaatattaaaaataataaatttagtgaaaaccttagtccaatagataaaaattgtcattgtagtacatgtaaaaactattcgctggcatatcttcatcatttattaaaagctgaagagctaattgttttaaattatattactactcacaatatatattttatgaattctctaatgaagtatattcgtgaaagtattaaaagggaaaaaatattcgaagctgaaaaaaattggtattcagactagt

SEQ ID NO: 239650 - DNA, 199 bp, Unknown
  Bacterial polypeptide expressing nucleotide sequence isolated from the Sargasso Sea
tatgacattaaaaaaatttaattttaatgttttgaataatgaaaattatgccagagttggtttaataaaaaccaaaagaggcaatattaatacaccagcatttatgcctgtaggcacacaagcttcagtaaaaagtgtggttattgaagatatagtaaaaactgggagtgaaattatattaagcaacactaccatttga

SEQ ID NO: 239651 - DNA, 160 bp, Unknown
  Bacterial polypeptide expressing nucleotide sequence isolated from the Sargasso Sea
aatgcaaaataatgatttttcatttgagttagttgctcaagatgaacaagctagactaggtaaaataaacacatctagaggaaaaatagataccccagcttttatgcctgttggtacacaaggaactattaaaggaattttcacagatgatatgttaaaa

SEQ ID NO: 239652 - DNA, 124 bp, Unknown
  Bacterial polypeptide expressing nucleotide sequence isolated from the Sargasso Sea
atgtcattaacaaaattctcttttaaagtattagcggaagaaaaatatgcaagaactggagtaattaatacacatagaggaaaaatacatacaccagcttttatgccagtcggtactcaagcaa

SEQ ID NO: 239653 - DNA, 179 bp, Unknown
  Bacterial polypeptide expressing nucleotide sequence isolated from the Sargasso Sea
aatgacattaaagaattttaattttaatgttaatcatacagaaaattattcaagagtaggcgttatagaaacaagtagagggaatataaacacgcctgcatttatgcctgttggtactcaagctacaattaaaggtgcatttattgatgatatagtaaaaactggtagtgagataatcc

SEQ ID NO: 239654 - DNA, 347 bp, Unknown
  Bacterial polypeptide expressing nucleotide sequence isolated from the Sargasso Sea
tattttgggggcagttaaaagaggtattgatatgtttgattgtgttatgcctactagatcgggtagaactggtcttgcttttacgtggaatggtagaataaatattaagaataataaataccaaaatgatgactctgctttagatgaaaaatgcagcaaccttgatttaaataaatactctaaaaattatcttaaccatctctttaataccaatgaaattcttggatctactctattaactcttcataatattaatttttatcaggaattaatgacagcaattagaaaaaatataaataatagaacatttgacgattttcatgataaatacattgataagttgtaaa

SEQ ID NO: 239655 - DNA, 430 bp, Unknown
  Bacterial polypeptide expressing nucleotide sequence isolated from the Sargasso Sea
atgaaaaaatttaactggaaagtaatcaaaacgtcaaaagatactagagctcgagtgggtttaatatccactcctcatggtgaagttgaaacaccagcatttgttttttgtggcactaagggtgctttaaaatcttgtagtgcagtggatgcaaaaaataataatactcaaataattttatctaatacttttcatttaatgcttcaaccaggtagtaatattatttccaaacatggaggaatacataattttatgaattggcaaggtccaactttaactgacagcggaggctttcaaattttttctttaggttatggctctgtagcagatgaaattaaaagaaaaaatactaatcaaaataaatctcttttaaatatttctgaagagggcgctctatttaaatcctttatagatggaagaaatcatttat

SEQ ID NO: 239656 - DNA, 187 bp, Unknown
  Bacterial polypeptide expressing nucleotide sequence isolated from the Sargasso Sea
tctcgagcatatttgcatcatctaattagaaatgacgaaatattaggcctaactctcataagtttgcataatattgctcacttaataagatttaccaatgcaatttctgctgcaattagagataattgttttacaaatgatttcgctccttggaaaacatcctctattgctcaccatacgtggtaac

SEQ ID NO: 239657 - DNA, 955 bp, Unknown
  Bacterial polypeptide expressing nucleotide sequence isolated from the Sargasso Sea
ggcgaaggtcaaggcgataccgacaacggcacggtgaccgaagatggcgacagcgataccgatgttgccaccgtgcaaaccgttggcggcaagctcgatgtgaccgacgtcgataacggcgaagccgtgttccaagtccaaaccaatgtcgccgatggcaactacggtaccttcagcattgatgctgacggcaactggacctatgtccttaacaacagccatattgatgtgcagtcactcgccgccggcgaaaccctgacccgcaacatcacagtgaccagcgccgatggcacggcaacacacaccgtcaccatcaccatcgttggtgccaatgaccctgccgacatcaccgtgggcgaaggtcaaggcgataccgacaacggcacagtgaccgaagatggcgacagcgataccgatgttgccaccgtgcaaaccgttggtggcaagctcgatgtgaccgacgtcgataacggcgaagccgtgttccaagtccaaaccaatgtcgccgatagcaactacggtaccttcagcattgatgctgacggcaactggacctatgtccttaacaacagccatattgatgtgcagtcactcgccgccggcgaaaccctgacccgcaacatcacagtgaccagcgccgatggcacggcaacacacaccgtcaccatcaccatcgtcggggccaatgaccctgccgacatcaccgtgggcgaaggtcaaggcgataccgacaacggcacggtgaccgaagatggcgacagcgataccgatgttgccaccgtgcaaaccgttggcggcaagctcgatgtgaccgacgtcgataacggcgaagccgtgttccaagtccaaaccaatgtcgccgatggcaactacggtaccttcagcattgatgctgacggcaactggacctatgtccttaacaacagccatattgatggcagtcactcgccgccgg

SEQ ID NO: 239658 - DNA, 246 bp, Unknown
  Bacterial polypeptide expressing nucleotide sequence isolated from the Sargasso Sea
ccaagcacaagagcagcactgaacccgtggacggtagttgcgactgttatacctgtgaaaactttccccggggatatctcgcgcacctcgataagtgcaacgaaattttgggttcccaattggctaccattcataacttacgcttttatcagaaccacatggcgggtattagacaagcgattgaggcgggtgaattggacgagttcgctcgcggtttctatgccgcgcaggccgaggaggaatgag

SEQ ID NO: 239659 - DNA, 928 bp, Unknown
  Bacterial polypeptide expressing nucleotide sequence isolated from the Sargasso Sea
cgagacgctcctgagctccgcggaggcggcgctcggcggccgccgccgcggcgcgggcgcctccgcgctcgacgtccccgacgccgaggacgcgccttccggcgagacgtacctcgccaagccgacgtccctgcacgagcgcgtgctggcgttccagtacgagcgcgcgagcggtgccggcgcgagctcgcgtttggtcggggcttcgcgtcttctcgcggacgcgcccgggttcgatcaccccgggtacgcgcgaagtctgcgcgaggcgagcgagagcctggacgagacgcacaacgcgtcgacgcccggctcggtgttgaccgtggtcatcacgccgacgccactggacgcgaacgacgacgcgaacgacgtaggacccgaaatcgacccgaaatcgtcatcgggttcctcgggttccttcccgtcgcgccttttcggcggcgagacgcgcgtgcgggcgttcgagtgccggtgggagtggccccggtcagcggagatcctcccgatggagaccatcctgtgtgtgtgcggcgcgatgcacgagtggctggccggggacgacgcgcgcgtggtgtgtctgcacgcgaggggcggtttccgttcggggaccgcttcgctgctccgcttcctaaccgcgtgctacctgtgctacgccggcgagcacgagttcgccgcggacgcgctcgacgcggtgagctcggcgccgccggggtgggtcgccgggcgactgcagcgcgacaagaattcgaacgacggcggcgattcgcgaataatcgacggcggcttcgtgcctccgtccgcgagatccgccattcgccgcgggttctcgtacttggcgtctccgaccaaaccgcggcgattcgacgcgtcgtcgcgctcgggcggaagcgcgctggccaccgccgcgcaacgacggtacgcgcag

SEQ ID NO: 239660 - DNA, 688 bp, Unknown
  Bacterial polypeptide expressing nucleotide sequence isolated from the Sargasso Sea
tgtgcagcgtgtgccacgtgcagcccctcggcctcgaggcctggacgcagacgccgctcgctcgagaggtcgagcgcatgcgcggcgtgtgcgcgaagatcgcgctcgagaatgcggcgatcagcgcgctgatcgccaagctgcgcgccgagtgcaccgacacgcagaggagcctgagcggagccaaggccgatcaggacggcgcgttcgccgagatgagcgccgcgcttcgagccgaggtcgcgcgcgtcgagggcgccttcagcgaggtgcgccgatcgggggccgaggcgatccagtcgctcgagcaggccaaggccgacgtcgccgagcgcgaagccacggcggccgcgcgccgcgaggccctgatggagctggtcgacaagctcgaggccggccagcaaaggctgcaggaggagctgcaggcggcggagcgagcggcgcgcgcctcgctcatgtcgtcgctcgcggggctggaggcgcgcgtcgaggccgcgcgccaggagctgcatcggagcctcggcgcgcagctcggcgcgcacgacgccaggctgggcgaggcgttctcgcgtctcgacggcgcggagagggaggcgcgcgaggcgcgaacggcgctcgaggagctcgcgagcaaggcgcgcggcaccgactccaaggtgggcgcggcgcagtcggccctcgcgcgcct

SEQ ID NO: 239661 - DNA, 205 bp, Unknown
  Bacterial polypeptide expressing nucleotide sequence isolated from the Sargasso Sea
atggcattaaaaaaatttgcctttaacgttttaaaaaaagataaatttgctaggtgtggtttaatcgaaacacatcgtggcaatatacaaactccagcttttatgcctgtaggaacacaggcaactgtaaaagcttgcacaatagacgatattaaaaaaacaggatctgaaataatactctcaaaatacttatcacctaatggat

SEQ ID NO: 239662 - DNA, 169 bp, Unknown
  Bacterial polypeptide expressing nucleotide sequence isolated from the Sargasso Sea
atggcattaaaaaattttgcctttaaagttttaaaaaaagataaatttgctcgatgtggtttaattgagactcatcgtggaaatatacaaacacccgcttttatgcctgttgggacacaagctaccgttaaagcttgtacaattgatgatattaaaaaaacaggttcag

SEQ ID NO: 239663 - DNA, 250 bp, Unknown
  Bacterial polypeptide expressing nucleotide sequence isolated from the Sargasso Sea
ctcgtttttcttcgacaatatccattagatatactgtgcgaatgtcatacttgtaaaactttctcaagagcttatttgcatcatttatttaaatgtaaagaaattttaggtttatctttgttaacatggcataatttgcatttttatttagatttggtaaaaaaagcacgtaattcaattgtaaaaaagaattttttagaatttgaaaaaagttttttaactaaatattattcaaaaaatggaacttaaa

SEQ ID NO: 239664 - DNA, 550 bp, Unknown
  Bacterial polypeptide expressing nucleotide sequence isolated from the Sargasso Sea
tagtattgttcagggaggtatttatgaagatcttcgagaggaaagtatagactttaatttaaataaaattgactcatttggaatagctattggaggcagccttggctcatcaaaggaagagatgtacaaagttgttaattttactgctcaaagattagggaataatcatccaatacatcttctaggaataggagacccaagagatatttggaacttagttaaaactggtattgatacatttgattgtgtgagccctacaagactagctaggcatggttcggcattaattagaggaacaccaggaaagaaaaatattaaaaataatgagttttcaaatgatatgtctccaattgatacttcttgcaattgttcaacatgtaaaaattattcattagcataccttcatcatttatttaaagcaggtgaattactaggtcttcaacttattactgctcacaatatttattttatgaatgaattaatgaaactaataagaaactctataaaaaatgactctttagataaggcagaaaaagattggtttagttaa

SEQ ID NO: 239665 - DNA, 419 bp, Unknown
  Bacterial polypeptide expressing nucleotide sequence isolated from the Sargasso Sea
aagcgagacatctgattatttgcctaaaaataaacctagatatttgatgggagttggcaccccctctgacatactcggcgcagtaaaagagggtattgatatgtttgattgtgtaatgcctacaaggtctggtagaactggtttagcttttacttggcagggaaaattgaaccttaaaaattcaaaattttcgagtgataattcaccactagatcagaaatgcgacataagagatctaaataagtattctaaaagttatctaaatcatttaatcaaagctgatgaaatgctagcttcaatgcttatttctttaaacaatttatatttttatcaacaatttatgctagaaattagaaaaaatattaaaaataggacatttgctcggttctataaaaaatatataaaattttttgattaat

SEQ ID NO: 239666 - DNA, 340 bp, Unknown
  Bacterial polypeptide expressing nucleotide sequence isolated from the Sargasso Sea
ggcgctgttagcaaaggcgttgatatgtttgactgcgtacttccaacaagatctggaagaactggattagcatttacttggaaaggaaaaatcaacatacgtaattctgaatataaaaatgataattctccattagatcaaaatgttacaaaatttgatctaaataaatactcaaaaaattatataaatcatttattcaataccaatgaaatgctaggttctatgctattaactttaaataatatcaatttttatcaagagctgatgttagaaataagaaaacatataaaaaatggtacttttgaggacttctacaataaatatatacatattttataat

SEQ ID NO: 239667 - DNA, 178 bp, Unknown
  Bacterial polypeptide expressing nucleotide sequence isolated from the Sargasso Sea
gatgaaaaaagatttttcttttaagttaatatcgaaaaataaaaaagcaagactaggaaagataattacgcacagaggatccattgatacacctgcctttatgccagtagggactttaggcactgttaaaggtgtatttgttgacgatctaaaaaaactaatactcaaatcattttag

SEQ ID NO: 239668 - DNA, 139 bp, Unknown
  Bacterial polypeptide expressing nucleotide sequence isolated from the Sargasso Sea
catggagttttcactgttaaagacggagggttcggcaaggcttgggcaattaagttttgataggggagtagtggatactcccgcatttatgcccgttggtacctacggtacggtcaaatcattaaccccagaggaagta

SEQ ID NO: 239669 - DNA, 280 bp, Unknown
  Bacterial polypeptide expressing nucleotide sequence isolated from the Sargasso Sea
gggtctgctttagtaaaaggtaaaaaaggtaaaataaatattaaaaataataaatttagcgaaaaccttagtccaatagataaaaattgtcagtgtagtacatgtaaaaactattctctggcataccttcatcatttattaaaagctgaagagctaattgttttaaattatattactactcacaatatatattttatgaattctctaatgaagtatattcgtgatagtattaaaattgacaaaatatttgaagctgaaaaaaattggtattcaggctagt

SEQ ID NO: 239670 - DNA, 727 bp, Unknown
  Bacterial polypeptide expressing nucleotide sequence isolated from the Sargasso Sea
aatgactcccgaattatcaattcaaatacaagagaccttaaatagtaatattgcaatgatacttgatcaattaatagatattaatgcttcaaaagatatgcaaaaacaagcaataatcaatacaaatatttgggcaaaaaaagcacgtgacattcacaacaataaaaatcaatcattatttggaatcattcaaggtggtaaatataaagatttaagagaaatttctacaaaaaatatgatagagaatggctttaatggttatgcaattggtggacttgctataggtgaaactgaaaatgagagaaatgagattgtttcatttactacagatttaatacctgttgataaattacgatacgttatgggtgttggagatattaaaagcctgataaatttaattgagtttggtgttgacatgtttgattgtgtttggcccgcaagaattgcacgtcatggaaaaattattaatagagcaaaatattttaatttaaaaaacagtaaatataaaaatattaaagaaccgttagtgcaagattgtaactgcaatacgtgtctaaatttttctacttcttatatgagacacttgttaattaatgagcccacttcatcatggcagtatttaacaatacacaatatatatcagactcaaaatatcattaacgaagtaagagaaagtatattaaactcagattttgataattataaagaaagacttttaaatgaatga

SEQ ID NO: 239671 - DNA, 554 bp, Unknown
  Bacterial polypeptide expressing nucleotide sequence isolated from the Sargasso Sea
ttatggtattgtccagggaggtatttatgaagatcttcgtgaagaaagtatagattttaacttgaataaaattaatacgtttggaatagcaattgggggaagtcttggatcatcaaaagaagaaatgtatgatgttgtaaattttacagctccaaaattaggaaataaaaatccgatacaccttttgggaattggagacccaactgatatctggaaattagttaaaagtggaattgatacatttgattgtgttagcccaacaaggttggcaagacatggatcagcactagtaaaaggaaaaataggaaaaaaaaatattaaaaacaatgaatattctaatgatttatctccaattgatataaattgtgcttgttcaacatgtaaaaaatattcaatagcttatctccatcatttatttaaatcaggtgagttacttggtttgcaacttattactgcacataatatatattttatgaatgaattaatggagctaataagggattctattaataatgattgtttggaagaagcggagaaggattggtttagttaat

SEQ ID NO: 239672 - DNA, 191 bp, Unknown
  Bacterial polypeptide expressing nucleotide sequence isolated from the Sargasso Sea
aatggcatcaaaagattttgcctttaaaatcattagcaaagacaaatttgctagacgaggtttaattgaaactcatagaggaaatataaatacaccagcttttatgccagttggtactcaagccacaattaaagcttgtaccattgatgatatcaaaaaaactggttcagaaataattttatctaatacta

SEQ ID NO: 239673 - DNA, 331 bp, Unknown
  Bacterial polypeptide expressing nucleotide sequence isolated from the Sargasso Sea
tgtgttaccgactagaaatgctaggaatggacaattgtttacatctgaaggcgtaattaatatcagaaacgcagaattcaaaaacagcgatgaaccaattgataaaaattgtgagaacaaggtgtctcaaaaatatagcagggcatatcttaatcatctccaaagaaccaatgaaatgttaggttcaatgttagctacttatcacaatatttattactatcaatctttgatgcaaggaataagagactcaattaaaaataatttattcgcgaagtttgtaaaagacttttataataagcgaaatttagatgtgcctgaagggcctttatag

SEQ ID NO: 239674 - DNA, 190 bp, Unknown
  Bacterial polypeptide expressing nucleotide sequence isolated from the Sargasso Sea
cctggtttgcaatacatactcagccgcttatcttcatcacttatttaatgcaaaagaaatgttaggtggcatgcttttatccttacataatatttatttttatcaaaatttgatgaaagagatcagggcatcaattgaagaaaaaagatttcaacgtttttctgaagagtttctaagtaattataattaa

SEQ ID NO: 239675 - DNA, 427 bp, Unknown
  Bacterial polypeptide expressing nucleotide sequence isolated from the Sargasso Sea
atgaataaatgggatcttctaagggtatttttaatgtccttacttctactgctgttattatctttttactatgttcaaggtttttttagctttaattatgcagaaattaacgaagaattgcctaaaccaataatttcagataattcttttgaggagttcaaatcaagagatattgacgttagtactgccaacaaatcaaatttaggttttgaacttgtgggaattaggggaaataatccagaaagtacaataattattcttgaaagagatgattatcgattagttgaacagggtcaaaatattaattcaagcgttattttttctcatattgatggttcaagagcttatttttttgatggacaaacctatacatttttagacataattggcacagagacctcttttaataaaaataggattaattaaa

SEQ ID NO: 239676 - DNA, 409 bp, Unknown
  Bacterial polypeptide expressing nucleotide sequence isolated from the Sargasso Sea
aatgaaaaaatttaactggaaagtaacaaaaacatcaaaatatactagagctcgattgggtataataaccactcctcatggtaaagttgaaaccccagcatttattttttgtggtaccaagggtgctttaaaatcttgtagtactggtgaagcaaaaaatcataatactcaaataattttatccaatacttatcatttaatgcttcaaccaggtagtgacattatttctaaacatggtggaattcacaatttcatgaattggcaaggaccaatcttaacagacagtggaggatttcaaattttttccttaggtcatggttcagtagctgatgaaattaaaagaaaaaactctaatcgcaaaaaatctcttttaaacatttctgaagaaggggctttatttaaatccttt

SEQ ID NO: 239677 - DNA, 391 bp, Unknown
  Bacterial polypeptide expressing nucleotide sequence isolated from the Sargasso Sea
atgattaattttaatattaaaaagaaaataggtaaagcaagagtaggggaaatggtagtgaataatcatactattgaaacgccagtatttatgccagtaggaacagcagcgacagttaaaagtattaccccccaagatttaaaagacattggatataaaatcattttatcaaacacataccacctctatttgaggccaggcaccgaagtgatctcgcatcataaggggttgcatgattttatgggttgggagaatgctatcttaacagattcaggtggttatcaggtttatagtttatcaaagttaagaaaaatttctcaagacggagttaaatttaattcacctgtggatggaagtactttatttatgtcaccagagaaatctatggaaa

SEQ ID NO: 239678 - DNA, 493 bp, Unknown
  Bacterial polypeptide expressing nucleotide sequence isolated from the Sargasso Sea
atgataaataaatttaattttaaattattatccaaagacaaaaatgctcgtttaggcaagttagaaacagctcatggagatatagatacaccaatttttatgccagtgggtacagctgctactgtgaaagcaatgcatttaagagatataaaagcttctggcgctcaaattattttagccaatacctatcatttaatgctaaggcctggtcaagaaaatataaaaaaaatgggcggggtaagaaaatttatgggatggaataaacctcttttgacagactcaggtggttttcaaattatgagtttgggcaaattaagaaaaattcaaaatgatggagtcacttttaaatctcatttagatggaacaaaatactttttatcaccagagataagtacagacattcaaaattcattagatgcaactattacaatgcagttagatgagtgtattccttttccagcttcatatgaagaatcagaaagagctatgaaat

SEQ ID NO: 239679 - DNA, 901 bp, Unknown
  Bacterial polypeptide expressing nucleotide sequence isolated from the Sargasso Sea
cctgttaaggttaataatatactcgatcataaaatgcacaaagaatggggtagtgtaagtgatataacttcgaacattattaacaaggcaatagcaaataataatcgtataatatcagtaggtactacgagcttaagaatattagaaacgatagcaaaaatcaataatgggaaaattaaaccatggtctggttttacagatcttttcataacaccaggtttcaagtttgaaattgtaaacttgctcataacaaactttcacttaccaaaatcaacattgctaatgcttgtttcagcttttcatggacaggaaaatatttttaaaaaatatcaacacgcaatcgaacaaaaatatagatttttttcttatggagattgttgtattttttcaagagataataataatgatatgataaataaatttaattttaaattattatccaaagacaaaaatgctcgtttaggcaagttagaaacagctcatggagatatagatacaccaatttttatgccagtgggtacagctgctactgtgaaagcaatgcatttaagagatataaaagcttctggcgctcaaattattttagccaatacctatcatttaatgctaaggcctggtcaagaaaatataaaaaaaatgggcggggtaagaaaatttatgggatggaataaacctcttttgacagactcaggtggttttcaaattatgagtttgggcaaattaagaaaaattcaaaatgatggagtcacttttaaatctcatttagatggaacaaaatactttttatcaccagagataagtacagacattcaaaattcattagatgcaactattacaatgcagttagatgagtgtattccttttccagcttcatatgaagaatcagaaagagctatgaaat

SEQ ID NO: 239680 - DNA, 266 bp, Unknown
  Bacterial polypeptide expressing nucleotide sequence isolated from the Sargasso Sea
aatgacattaaaaaaatttaattttaatgttaattatactgaaaattattctagagcaggggtcattgaaactagtagaggaaatataaatacaccagcatttatgcctgttggaactcagggcactattaagggtgcgtttattgacgatataattaaaactggaagtgaaataattctttcaaacacatatcatttaatgattagaccaggtgttgaaagaatatcatctattggcggacttcatcaatttatgaattgtaatt

SEQ ID NO: 239681 - DNA, 639 bp, Unknown
  Bacterial polypeptide expressing nucleotide sequence isolated from the Sargasso Sea
catggcatataaattaatttcaaatgacacaaatgctcgtgctgggatactttctataaataatattgaagtacagactcctacatttatgcctgttgctacaagaggtgcaattaaatctactcctcatcaatacttagataagacctcaatacttctagcaaatgcataccaccttcttctaagacctggtgcggagttaataaatgatttaggtggattacataaatttatgaactggaataaattaatactcactgactctggaggttttcaagcttggtcattaccaaccaaattattagatgatggtattgaatttaaaaatgtatatgatggatccttttttaaaatgactcctgaagaatcaatcaatacacaaaatcttttaggcagtgatattgcaatgatatttgattatttaatagattatgacagatcagatgatgatcaaatgaaagcaatagaaataacaagtcagtgggctgaaaaagcaaaaagtgtacataaaaacaataaacaagatttgtttggcatagttcaaggtggtttaaatcttgatttaagagaaacttcagcaaaatcaatgatcgaattagattttgacggatatgcaattgggggattagcaatcggcga

SEQ ID NO: 239682 - DNA, 993 bp, Unknown
  Bacterial polypeptide expressing nucleotide sequence isolated from the Sargasso Sea
tatgatatacatttctgaagattatgagattaataaaacaacttacaatgaaataattaacaaaaaaaagaacggatataatattgtttgtgttggtacgacaacattgagaactttagagcatgtatataatacttctacttttaaagggaaaacaaatttatttataacaaaaggattcaaatttaatgttgctgactatctaataacaaattttcatgctcctaagagttctttactttcaattgttcaaactatttatggcgactcctggaaaaaactttatgcttttgctttagaaaataacatgaagttcctaagttttggtgatgcagtaatgtttaaaataaaaaacatggcatataaattaatttcaaatgacacaaatgctcgtgctgggatactttctataaataatattgaagtacagactcctacatttatgcctgttgctacaagaggtgcaattaaatctactcctcatcaatacttagataagacctcaatacttctagcaaatgcataccaccttcttctaagacctggtgcggagttaataaatgatttaggtggattacataaatttatgaactggaataaattaatactcactgactctggaggttttcaagcttggtcattaccaaccaaattattagatgatggtattgaatttaaaaatgtatatgatggatccttttttaaaatgactcctgaagaatcaatcaatacacaaaatcttttaggcagtgatattgcaatgatatttgattatttaatagattatgacagatcagatgatgatcaaatgaaagcaatagaaataacaagtcagtgggctgaaaaagcaaaaagtgtacataaaaacaataaacaagatttgtttggcatagttcaaggtggtttaaatcttgatttaagagaaacttcagcaaaatcaatgatcgaattagattttgacggatatgcaattgggggattagcaatcggcga

SEQ ID NO: 239683 - DNA, 355 bp, Unknown
  Bacterial polypeptide expressing nucleotide sequence isolated from the Sargasso Sea
aatgtctaaattttcatggacaattttaaaaacatcaaaaaaaaataaagcaagaatcggcaaaattacaactccgcatggagacattgaaacacccgcctttattttttgtgctacaaaagcggctttaaagtcttttacaactaaggatgcaaaaaataacaatactcaaatcattttatctaacacttatcatttaatgcttcaaccagggagtaatttaatatctaagcatggaggattacacaaatttattggatggaatggtccaatgctaacagatagtggtggatttcagatattttctttaggatatggatcggttgctgatgaaattaagggaagaaaacaaatt

SEQ ID NO: 239684 - DNA, 343 bp, Unknown
  Bacterial polypeptide expressing nucleotide sequence isolated from the Sargasso Sea
attgggtgctgtaaaacgtggtattgatatgtttgactgtgttctacctactagatcggggagaacaggtttagcttttacctggaatggtcgaattaatataagaaatgctaaatacaaaaatgataaaaatccactagataaatcagtatcaaaatttgatttaaacatgtattccaagaattatcttaatcatttatttaataccaatgaaatgcttggatcaatgcttttaactttacataatataaatttttatcaggagctaatgactgaaattaggaaaaatattaaaaatggtacttttaatgtctttcatgataaatatataaataaattgtaa

SEQ ID NO: 239685 - DNA, 233 bp, Unknown
  Bacterial polypeptide expressing nucleotide sequence isolated from the Sargasso Sea
aatggcatcaaaagattttgcctttagaattattagcaaagataaatttgctagatcaggtttaatagaaacccatagaggaaatatcaatacacctgcatttatgccagtcggcacacaagctacaattaaagcttgcactattgatgatatcaaaaaaactggttcagaaatcatcctatctaatacttatcatttaatgataagaccaggtgttcatagaattgaaagtg

SEQ ID NO: 239686 - DNA, 372 bp, Unknown
  Bacterial polypeptide expressing nucleotide sequence isolated from the Sargasso Sea
taatgggcgttggaacaccttcggatatcctcggatcagtaaaaagagggattgacatgtttgattgcgtattaccgtctagatctgggagaactggtttagcttttacgtggaatgggcctataaatattaaaaatgccaagtatcaaaatgatacaaaacccattgatgaaaaatgtgagaaatttaacttaaataaatattcaaaaaattacttaaatcacttattcaataccaacgaaatactggcctcaatgcttttaactctccataatataaatttttatcatgagcttatgaatgaaataagaattaacataaataatggaacttttgaccagttttttgatgaatacattgctaagttgtaat

SEQ ID NO: 239687 - DNA, 630 bp, Unknown
  Bacterial polypeptide expressing nucleotide sequence isolated from the Sargasso Sea
tttcaaatacatatcacttaatgatacgccctggtgttgaaagaatagaaactgccggtggtcttcataattttatgaattgtgatttacctattttaactgactgtggtggttttcaagtaatgtctctttcaaaattgaataagattgatagagagaagggtgcaatatttaactctcatgttgatggtaaaaaattttatttaagtccagaggagagtataagaatacaattaggtttaaattcagatattgtaatgattatggatgaatgccccaagaaaactaatgactataatcttatcaaaaaatcaatggatttgtcactttactgggctgaaagatctaaagtagcttttggaagtaatcctcataaggctttatttggaattgttcaaggaggtctattcaaagatttaagacttaaatcacttcaagaattagttaaaattggttttgatggttatgctattggaggattagcagtaggtgagacacaaaatgaaatgtttaatgttttagatgatatcaaagaatatttgcctatagaaaaacctcactatttaatgggtgttggaactccgatcagatattttaggtgccgtcaaaagaggtatagatatgtttgat

SEQ ID NO: 239688 - DNA, 337 bp, Unknown
  Bacterial polypeptide expressing nucleotide sequence isolated from the Sargasso Sea
ttcagttggtgtggatatgtttgattgtgtgattccgactaggcatgcaagaaatgggcaaatttatacccattctggcgtagttaagattaaaaatgctagatatatcaatgatctaggacctcttgatgatgaatgcggatgctatacatgcagtaactttactcgttcatacctgcgtcatttgttcaactgcaatgaaatcttgggattgagattggcgactatccataatctcagtttctatatcaaattgatggatgatataagaaagtctattcaatcagaaacgtttgaaaaatttgccaaaaacttcattcaaagttatcagcagtaa

SEQ ID NO: 239689 - DNA, 214 bp, Unknown
  Bacterial polypeptide expressing nucleotide sequence isolated from the Sargasso Sea
catgattcaatttgaaattgtcgccctaaacaataattcccgtgcaggtatattaaaaactccagatggattaatccacacacctgtttttatgcctgtagggacaagtgcaacagtgaagggaatgacaacagaagaaattaaggaattaaatagcggaaataattttatgggaatacttaccatttacatcttcgtccaggagattcaataa

SEQ ID NO: 239690 - DNA, 391 bp, Unknown
  Bacterial polypeptide expressing nucleotide sequence isolated from the Sargasso Sea
tatgataagccaagatatttaatgggtgtaggaactccatctgatatattgggagctgtaaaaagaggcatagatatgtttgattgcgttttgccaacacgttcaggtagaactggtttagcttttacatggaatggaagagttaatataagaaatgcaaaatataaaaatgataatactcccttaaatgtagataccaataaatttaatctgaataaatattctaaaaattatcttaatcatttatttaatacgaatgaaatgcttggttcaatgttgttaacattgcataatattaatttttatcaggagttaatgaactcaataagaggaaatattaaaaatggcacatttcatgaatttcacgataaatatattggtaagctgtaac

SEQ ID NO: 239691 - DNA, 494 bp, Unknown
  Bacterial polypeptide expressing nucleotide sequence isolated from the Sargasso Sea
aatgatttttgatattaaagaacattgtggaaaggccagaactggtttaataaaaactaagtttagtgaaattgaaacacctgcattcatgcctgtggggacactagctaccgttaaaggaattgataaagctaatttagaggaactaaattacaatataattttagctaatacttaccatttaatgttaagaccgggtatagaaactatagataaacttggcggtttaaataaatttatgtcgtgggataaatctattttaaccgactcaggaggctatcaagtaatgtccttaggagataatgtaaaggttgataaagagggagttacttttagatctcaccttgacggaaaattagaaaggctaaatgcagaaaaagcgataaatatacaacataaattagattcaactattacaatgatatttgatgaatgcatggcacatcctgcttcttatgatgatgtagagtcttcattatatagatctatgtcat

SEQ ID NO: 239692 - DNA, 565 bp, Unknown
  Bacterial polypeptide expressing nucleotide sequence isolated from the Sargasso Sea
aatgcttcagcctggcagtgaactagtagctaaacatggaggtcttcataaatttacgggttggaatggacctatgttaactgatagtggtggttttcaaattttttctcttggacatggctcagttgcagatgaaataaaagggcgaaaaacaaattcaaaaaataaaaaaactttaataaatttgaatgaagagggtgcattattcaagtcttatatagatggttctactcatatgttatctcctgaaaaatcaattcaggttcaaagaaatcttggagcagatttcatcttagtttttgatgaatgcactccttataatgttgataaaacatatacatctgattctatgttaagaagtcatagatggtctctaagatccatcaatgcatttaattctaaacttaattataatcctaaaaatggctcagctggtagacaagaaatgtatgggataattcaaggaggtatttacagagatttaagggaagaaagcattgaattcaatacaaaaaaaattaacacttttggggttgctattgggtggaagtttaggatcaaataa

SEQ ID NO: 239693 - DNA, 259 bp, Unknown
  Bacterial polypeptide expressing nucleotide sequence isolated from the Sargasso Sea
taaaaatgatgattcaccgatagatgaaaattcagattctaaggtttgtaaaaattattcaaaagcttatttacatcatttagataaaactaatgaaatgttaggatcaatgcttgccagctatcacaatatttattactaccacgagcttatgaagcaaattagacaatcaattgatgacgatatattcgtaaactttgcaaaagacttttataataatcgaaatttaccaattccagattatttggagggcttataa

SEQ ID NO: 239694 - DNA, 283 bp, Unknown
  Bacterial polypeptide expressing nucleotide sequence isolated from the Sargasso Sea
atggcattaaaaaaattttcttttaatgtagttgaaaaaaataaacattccagatgtgctcagataaaaacacatagaggaataataaatacacctgcctttatgccagtaggaactcaggcaacaattaaagctgcatttatagacgatattatcaaaaccggttcggaaatcatattgtcaaatacgtaccatttaatgttaagacctggtgttgatagaataaaagaagcaggtggtctccattcatttatgaactgtcctcttccaaatattaactgat

SEQ ID NO: 239695 - DNA, 280 bp, Unknown
  Bacterial polypeptide expressing nucleotide sequence isolated from the Sargasso Sea
aatggcattaaaaaattttaattttaatgttaattatacagaaaatcattcaagagtaggagttatagaaacttctagaggaaaaattaatacaccagcttttatgccggttggcactcaagcaactgtcaaaggagcatttattgatgacattaaagaaactggaagtgagattattttatcaaacacttatcatttaatgatcagacctggtgttgatagaatatctacgttgggcggacttcatgaatttatgaattgtagtttgccaatattaacg

SEQ ID NO: 239696 - DNA, 826 bp, Unknown
  Bacterial polypeptide expressing nucleotide sequence isolated from the Sargasso Sea
tcatggtaaagttgaaaccccagcatttattttttgtggtaccaagggtgctttaaaatcttgtagtactagtgaagctaaaaataataatactcaaataattttatccaatacttatcatttaatgcttcaaccaggtagtgacattatttctaaacatggtggaattcacaatttcatgaattggcaaggtccaattctaactgacagtggaggatttcaaattttttccttaggtcatggttctgtagcagatgaaattaaaagaaaaaactctaaccgcaaaaaatctcttttaaacatttctgaagagggggctttatttaagtcctttattgatggtagaaactatttattaacacctgaaaaatcaattgcaattcaaagagatataggtgcagatctcattcttgtttttgatgaatgcaccccgtttcatgtagataaatcttatactgatcaatctatgaaaagaagtcacaattggtctgttagatctataaacagtttcctaaaaagtaataaatatttaccaatgaaaggatcttcaggaagtcaaaaactttatggcataattcagggaggtatttataaagatttaagagatgaaagtattgagtttaatataaattcaaaaaatttttttggtttagctattggtggaagtttgggatctactaaagaagaaatgcatgatatagttgattatactgcttcaagattgggaaatatgcatccgatacatttattaggtataggagatcctgaagatatatggaaattagtcaagtcaggggtagatacatttgattgtgtaagtcctaca

SEQ ID NO: 239697 - DNA, 442 bp, Unknown
  Bacterial polypeptide expressing nucleotide sequence isolated from the Sargasso Sea
aatgaaaaattttgcatggaatgttgagtataaatcaaaaaaaaataacgcaaggaccggaacgataataacacctcatggtaaaataagtacccctgcatttattttttgcgcaactaagggagctttaaaagcatcatctactaatttagctagagaaaataatactcaaattattttatctaatacctatcatttaatgttgcaaccaggaggtgatttaattgcaaatcatggtggattacataaatttttaaattggaatgggcccatgcttacagatagcggcggttttcaaattttttctttaggtcatggttcagtttcagatgaaattaaaggtagagcaaatactaaaagaaataaaacacttcttagtataagtgaagaggggtgtttatttaaatcatatttggatgggtcattcaaactattatcacct

SEQ ID NO: 239698 - DNA, 256 bp, Unknown
  Bacterial polypeptide expressing nucleotide sequence isolated from the Sargasso Sea
aatgacattaaaaaaatttaattttaatgttcttaaaaaagaaaaatttgcaagacttggaaaaataattactagccgtggtacaatagatactccagtatttatgccagttggaacccaggcaactgttaaaggtacatttattaaagatgttattaaggctggaagtcaaattgttttatctaatacctatcatttaatgattagacctggtgcagatagagtaaaaaagctggtggtctacataattttatga

SEQ ID NO: 239699 - DNA, 487 bp, Unknown
  Bacterial polypeptide expressing nucleotide sequence isolated from the Sargasso Sea
gcaattgggggccttgcagttgggagaagagaaaaacgctatgtttgacactatagaattctgtgattcgttactaccaaaagataaacctagatatctcatgggggttggaagaccaactgatatagtaaaagcaatacagcgtggagttgatatgtttgattgtgttttaccaaccagaaatggtagaaatggccagatttttacatccaatgggacgataaatattacaaacgagaaatataaagatgatcactcctacatagataagaatagtaatcatgcctttggacgtatgtttactaaagcgtatataagacatctttttggaattaaagaaatacttggtttgcgaattgcatcgaccctgaacttgtcattttacatttccttaattaaaaaaatacaacaggtgattcaacttggtcagtttgatagttggtctaatagttggttaaatgatatgaagcatcataaggacatgtaa

SEQ ID NO: 239700 - DNA, 709 bp, Unknown
  Bacterial polypeptide expressing nucleotide sequence isolated from the Sargasso Sea
atggaagatttttttaaaattttaaatactgatggtaatagcagaacagctataatgagtataaataatatcaaaattcagactccgtgctttatgcctgttgctactcaggcatcagtgaaatccttagattcttttgatctgaaggaaataggttacaatttaattttatctaatatttatcatatggctgtaaggccaggtataaattatttaaatcaatttggtggaattcataaatttatgaactgggatggattgatacttaccgatagtggaggatttcaaggatatagcttggctcatagagttaaaattaaaaatgatggaattatttttcaaagtcatttagatggaaaagagatttattttaaaccaaaagaagtagttaaataccaagaaaatataggttcgaatattatgatgcctttggatatttgtttaccaaaaggatcaagtgaaaaaaaattgattgatgctttagaaacaacatatgagtgggcaaaacaaagtatctctgctcgttcttcaaatagctctaagttgtttgggataattcagggtggtaataatttggaacttagagaactttcagcaaataaaatgacaggattaaattttgacggatttgcttatggaggactttctgttggagaaaacaaagaattaatgataaacacgcaactatcagcaaacaaactttaccaga

SEQ ID NO: 239701 - DNA, 527 bp, Unknown
  Bacterial polypeptide expressing nucleotide sequence isolated from the Sargasso Sea
tgaagatttaagaaaaaaatcactagaacagcttattaaaattaattttgatggttatgccattggtggattggctgtgggtgaaacacaaaaagaaatgttcaatacacttgattttttaaaagatttaatgccaactgataaacctaggtacctcatgggagtcgggacaccctcagatattcttggagctgttaaaagaggtgttgatatgtttgactgtgttttaccaacaagatcaggtagaacaggccttgcattcacgtggaatggtagaatcaatataagaaatgcaaagtatcaaaaagataatagcccattagataaaaaatgtaaaaattttggtctaaataaatactcaaaaaattatttaaatcatctttttaataccaatgaaattctagcgtcaatgttattaactttacataatattaatttttatcaagaattaatggggtcaataaggatgcacattaaaaacggtacttttgatgatttccatgatagatacttggacaaattgtaat

SEQ ID NO: 239702 - DNA, 441 bp, Unknown
  Bacterial polypeptide expressing nucleotide sequence isolated from the Sargasso Sea
atgaaagaatgatggttttggaatcattaatgcctcaaatgtccgaaaatatcccgagatacttaatgggtctaggaactcctattgatatcattaaagcagtttcagttggtgtggatatgtttgattgtgtgattccaactaggcatgcaagaaatggacaaatttatacccattctggcgtagttaagattaaaaatgcaagatatatcaatgacctagcacctcttgatgatgaatgcggatgctatacatgcagtaactttactcgttcatacctgcgtcatttgttcaactgcaatgaaatcttgggattgagattggcgactatccataatctcagtttctatatcaaattgatggatgatataagaaagtctattcaatcagaaacgtttgaaaaatttgccaaaaacttcattcaaagttatcagcagtaat

SEQ ID NO: 239703 - DNA, 853 bp, Unknown
  Bacterial polypeptide expressing nucleotide sequence isolated from the Sargasso Sea
catggacgtcagcgaccgtacggtcgacgatgttgtcgcgccgggtaaggaccgactcgctcatgtggatgacgacggagtgaccttcacctctcacctcgatgggtctcgccaccgcttcaccgcggaagtctcgatgcaggtgcagcatgctctaggggccgacatcatcttcgcgttcgacgagtgcaccacgttgatgaactctcgcgactatcaacaggttgcgatgcgcagaactctcgaatgggccaagcggtgcatcgcggagcatcgccgcatcaccgccgatcgaccggagcgggcgtaccaggctctcttcggcgtcattcagggcgcgcagtacgaggacctgcgccgtcaggccgcttcagacatcgccgcattgccgttcgacgggttcggcataggtggtgccatagagaaggagcggatggcagacatcgtgcgttgggcgtgcgaggaattgcccgaaggcaaaccgcgtcaccttctcggcatcggtgagccgcaggacttcttcacggctattgcctcgggtgccgataccttcgattgcgtatcgccggcgcgagtcgcgcgaaacgctgctctgtatacctcgcgcgggcgcttcaacgtgactgccagcatcaatcggcgaaccttcgcgcctatcgaggagggctgcacctgttacacctgtcagaactacacgcgcgcctatctccaccacgcattcaaggctaaggagtcgatcgcggcaacgctcgccaccattcacaaccagcacttcatcgtgaacctcgtcaacaatattcgcgtcgccatcgaggcgggagatttccacgcctaccgcgaagcgttcctcggg

SEQ ID NO: 239704 - DNA, 295 bp, Unknown
  Bacterial polypeptide expressing nucleotide sequence isolated from the Sargasso Sea
attacttcctttggtgaattgaatattagaaatagtgagcataaaacttcttcagagccaatcgatccagattgtgcctgcaaggtatgcaaaaattattcgagagcctaccttcatcatctggataaaaccagagagattttgggatcaattttatcgagttatcacaatatcttttattatcaaactttgatgtctcagattagagaggccatcgaaacagaatcattcgctaagttcataaaagacttctataataagcgtcaaaaattagtgcctgagcacttacaataag

SEQ ID NO: 239705 - DNA, 367 bp, Unknown
  Bacterial polypeptide expressing nucleotide sequence isolated from the Sargasso Sea
aatgttaaataattttttttcatttgagttaatagctcatgatggaaaagcgagacttggaaaaataaacacttctagaggaataatagatacaccaacttttatgccagttggcacccaaggtacagttaagggaatttttcctgatgatattttaaaaactaaaactcaaataatattaggaaatacttatcatttacttttaaggccaggaatagaagtacttaataaatttaatggtttacacggatttatgaattggaacaaaccaatattaactgactcaggaggataccaaattatgtcattatcaaaactaaataaaatagatataaaattagggagctatcttcaaatctcatcttga

SEQ ID NO: 239706 - DNA, 829 bp, Unknown
  Bacterial polypeptide expressing nucleotide sequence isolated from the Sargasso Sea
aatgacaaatttctcatggaagattaaatatcaatcaaaaaaaaataaagctagaactggaacattaactactccacatggtaaaataagtactcctgcatttattttttgcgcaactaagggtgctttaaaatcatcaacaacaagtacagctaaagaaaataacacacagattatactatctaatacttaccatttgatgcttcagccaggaagtgatttaattgctaatcatggaggattacatagatttttaaactgggaaggaccaatgttgacagatagtgggggttttcagatattctcattaggttatggttctgtagcagatgagataaagggaagttctaatattaaaagaaacaagacattgttaagcattagtgaagaggggagcctgtttaaatcatatcttgatggatcattgaaatttttatctccagagaaatcaattgaaattcaaagaaatcttggtgctgatttaatattagtttttgatgaatgtaccccctttcatgtagataaatcttatactgaaagctcaatgagaagaagtcatagatgggcaacaagatcattgaatcgttttaattcagaaattaaatttaaacctcattttggttccgcaggggaacaaaaattatatagtattgttcagggaggtatttatgaagatcttcgagaggaaagtatagattttaatttaaatatgatcaattcttttggcatagctattggaggtagtttaggatcatcaaaggaagagatgtacaaagttgtcaattttactgccccaagattagggacaaacatccaattcatcttttag

SEQ ID NO: 239707 - DNA, 387 bp, Unknown
  Bacterial polypeptide expressing nucleotide sequence isolated from the Sargasso Sea
aaaagccacgttatttaatgggtgttggaacaccagccgacatcttaggagctgttaagcgtgggatagacatgtttgattgtgttttacctacaagatctgggcgaacaggtttagcttttacctggaatggtagaataaatataaaaaataagaaatatcaaaatgacaacacaccattggatagtaaatgtaataatttaaatttaaacaaatattcaaaaaattatttaaatcatttatttaatactaatgagattttagcttcaatgttgctgacactccataatattaatttttatcaagaactaatgacatctattagagctgctattaataatggcacttttgacgaatttcatgataaatacattgacaagttgtagc

SEQ ID NO: 239708 - DNA, 744 bp, Unknown
  Bacterial polypeptide expressing nucleotide sequence isolated from the Sargasso Sea
tatgtcatttaaaattataaataaagaccttttatcaaatgccagaactggtgaacttaagctaaaaagattaacagtaaaaactcccttttttatgccagtttgtacaaatgctactccaaaagctgttacgtttgaagttttaaataacataggttatgaaatgattgttagtaatgcatatcatttatttttacgccctgggagcgaatttataaaaaaaaattttactaatttacatagattttgtggttgggagaaaggaattttaacagatagtggaggctttcaaatttggagcctcggatctttagtgaaaattgaatcagatggagtaattattaaatcccatattgacggtaagctcaataaattatccccagaattatccattcaaattcaagaggatttaggatctgatataatgatgatttttgatgactgccctaagcctgatgtagattattcacatcttttaagttcaataaacagaaccaaagtttgggctgaaaaatcaaaaaaaataaaaaaaacagagaatttaatatttggcattgtccaaggtggaatttacaaaagtcttagaaaaatttcggcaaaacacatgattgatttggattttgatggcattgctataggagggctaggattaggtgagggtgctcaaaaaacttatgaaattactaacgatgtctgtgaaatattacttttaaacaagccaagatactctatgggtattggtaa

SEQ ID NO: 239709 - DNA, 490 bp, Unknown
  Bacterial polypeptide expressing nucleotide sequence isolated from the Sargasso Sea
atgagccaatttagctggaaaataaaaaaaaaacttaaaaataataatgcaagaataggaataatatcaacaccacatggcgatatagaaacaccagcatttatattttgtgctactaaggctgctttaaagtcctttacaacaagagatgctaaagaaaataaaactcaaataatattatcaaatacatatcatttaatgcttcaacctggtagtcagataattgcaaaacatggaggtctgcataaatttattggttggaatggccctatgctaactgacagtggtggttttcaaatattttcattaggtcatggatccgttgctgatgaaataaaaggtagaaaatcaaattcaaatataaaaaaaactttattaagtatttcagaagagggagctatttttaaatcatatattgatggcgctaatcttttattatctccgagaaaaatcaatccaaatacagagggatctcggggcagattttatt

SEQ ID NO: 239710 - DNA, 143 bp, Unknown
  Bacterial polypeptide expressing nucleotide sequence isolated from the Sargasso Sea
tatgccaaaagaaaaacctagatatttaatgggtgtaggaacaccttctgatatattgggtgctgtcaagcgtgggattgatatgtttgattgtgttatgccaactacatcaggaagaactggattagcttttacttggaatg

SEQ ID NO: 239711 - DNA, 277 bp, Unknown
  Bacterial polypeptide expressing nucleotide sequence isolated from the Sargasso Sea
aatgacattaaaaaaatttaattttaatgttaattatactgaaaattattctagagcaggggtcattgaaactagtagaggaaatataaatacaccagcatttatgcctgttggaactcagggcactattaagggtgcgtttattgacgatataattaaaactggaagtgaaataattctttcaaacacatatcatttaatgattagaccaggtgttgaaagaatatcatctattggcggacttcatcaatttatgaattgtaatttacctatacta

SEQ ID NO: 239712 - DNA, 263 bp, Unknown
  Bacterial polypeptide expressing nucleotide sequence isolated from the Sargasso Sea
gatgtttaaacttatagcaaaagatggagaagctcgaaggggggaagtgtctacagaacatggaacattccagactccagcttttatgcctgttggtacctatggtgctgtaaagtctataagtcctgaaatcttacattcaataaatgcagagataattttatctaatacctatcatctaatggagcgacctggtgttgatattattaaattgaatggaggattgcataattttatgtcatgggacaagccaattttaactg

SEQ ID NO: 239713 - DNA, 424 bp, Unknown
  Bacterial polypeptide expressing nucleotide sequence isolated from the Sargasso Sea
aaagttttagactacataaagagctatatgcctataaataaacctagatatttaatgggtgttggtacacctacagatatacttggatctgttatgcgtggtgttgatatgtttgattgtgtattacctactcgtgccggaaggactggtttagcttttacttggaatggaagaatgaatattaggaacgcaaaatataaaaaagataacgaaccattagataaatcagtaaaaatttttgatttaaataaatattccaaaaattatattaatcacttatttaacactaatgaaatgttgggctctatgattcttacattaaataatattaatttttatcaagaattaatgtttgaaattagaaagaatattaaaagaggcacttttaccaaattttataggaaatatgctaataagttataaa

SEQ ID NO: 239714 - DNA, 418 bp, Unknown
  Bacterial polypeptide expressing nucleotide sequence isolated from the Sargasso Sea
ttagattgtataaaaaattgtttgccaattgataaaccaagatatttaatgggtgtaggaactccatcagatatactaggagctgtcaagagaggtgtagatatgtttgattgtgtccttcctacaaggtcaggcagaacaggattagctttcacttggaatggtagaattcaaataagaaattctgaaaataaatttgataatacacctctagatagaagtgtgacaaagtttgatttaaataaatactctaaaaattatttaaaccaccttcacaacactaatgagattttatcatcaatgattttaacattaaataatataaatttttatcaagaacttatgtatgaaattcgaaaaaatatcaaaatgggaacttttgatcaatttcatgacaagtatattaatattttgtaaa

SEQ ID NO: 239715 - DNA, 961 bp, Unknown
  Bacterial polypeptide expressing nucleotide sequence isolated from the Sargasso Sea
  misc_feature (944)..(944): n is a, c, g, or t
catttatgccagtgcaaacaaggggtgcaattaaatctctccctctttaattatttagaaaaaactgatgtacttttagctaatacctaccatctctatcttcggcctgggcttgatgtaattaaagagttcgaaggactgcataattttattggttgggataatttaatactgtctgattctggtggttttcagggatggtcaattccaaataagtttaatgaagatggtatagagtttaaaaatatttatgacggatctaaattttttatggatccaattctttcaatggatatacaaaatactttaaatagtgatatcgcaatgattctagattctttagtagatatagataaagattacaacaatcagctccaatcaataaatacaacaaaaaaatgggctgaaattgctcgtgattatcattcgaataataatcaatcattgtttggaatagtgcagggaggcaagtttctcgaattgagagaaaagtcatctatcgatatggtttcattaaattttgatggttatgcaataggtggtctagcaataggtgaaacaccagaggagagaaaaaacatagtagattttactgtagattttcttccaaaagataaattaaggtatgtaatgggcttaggtgatatcgaaggaatgttaaacctaatagattcaggaattgatatgtttgattgtgtatggcctgctcgactcgcacgacacggaaaaataattaataaaggtaaattttttaatcttaaaaatagtcaatttaaaaacgatacagaacctttggttttagaatgcgaatgttttgtatgtaaaaaatattcaaaagcatatttacgacatttacttataaatgaatcaacttcagcatggctatatttaactttacataatatatttcagactgaaaatatactttccgaagttagaaaaangtatattaaactcagaa

SEQ ID NO: 239716 - DNA, 470 bp, Unknown
  Bacterial polypeptide expressing nucleotide sequence isolated from the Sargasso Sea
tgtggaatttaaaaatccaagaaatggtagtcatgtttttttatcacctgaaaaagtaatacagattcaaatggatcttggatcggatgttgcgatggcttttgatcattgtcctccgcatacagctaacgaaaatgatattgaggactctctgcaaagaactcattcatggttgaaaaaatgtgttgagactcatcagaaatccaatcaagcattattcggtatagttcaaggtggaaagtatccgagattgagagaatatagcgcaaaatatacaagttcttttgatctgcctggaatagcagtgggaggtgtaagtgttggcgaggcagtcgaagaaatacatggtgtaattaattacgttccgaaattcttaccaataaataaaccaagatatttaatgggaattggctctttaaaagaaatttctctagctgttgctaatggattcgatatatttgactgtgttt

SEQ ID NO: 239717 - DNA, 336 bp, Unknown
  Bacterial polypeptide expressing nucleotide sequence isolated from the Sargasso Sea
agtcaaaaagaggtattgatatgtttgattgtgtcttaccaacaagatcaggtagaactggtttagcttttacttggagcggaagaattaatcttaaaaatcaaaaatatcagaatgataacacaccattagatgctcaatgtaataatttgaatttgaataaatattcaaagaattatctaaatcatctttttaacacaaatgaaattttagcttctatgttattaacacttcataatattaatttttatcaagagcttatggcagctattcgaaaaagtattaatagaggtgcatttgatgaatttcatgacaaatacattgaaaaattgtaaa

SEQ ID NO: 239718 - DNA, 329 bp, Unknown
  Bacterial polypeptide expressing nucleotide sequence isolated from the Sargasso Sea
gagaggaatcgatatgtttgattgtgtattaccaacaagatcaggtcgtactggtctagcatttacttggcaaggaagagttaatataacaaataataaatacaagaaagataatactccattagatccaaattgctcaaatttaaatttaaataaatattgtaaaaattatctaaatcatttatttaatactaatgaaatacttgcttcgatgcttttgactcttcataatataaatttttaccaagaactaatgagtaatatccgaaaaaatatcaataatggtacttttgatgagtttcatgataaatacgttgataagttgtaaa

SEQ ID NO: 239719 - DNA, 826 bp, Unknown
  Bacterial polypeptide expressing nucleotide sequence isolated from the Sargasso Sea
ttttcccttgcaaggctaaataagatatcggatgaaggagttgcattccaatctcatttagatggtagtaagcatttgttcacaccagagatatctatgaaaattcaacgagatctagggtcggatataataatggcatttgacgagtgcccttcgggtaaatcaagccttgaaacggtcaaaaatgccgtacgaagaacaactgattggatgagtcgttgccataaatggctctcgaaaaatccagaaagatatagtcatgaacaagcaatctttcccatcatacagggagggactcatcactcccttagacttcaaagtgcagaacaattaataccatattcaactattggtatggccatagggggccttgctgtgggagaggaaaaagacgctatgcttgatacagtggagtattgtgatagtatcctaccaaaagatcaggctagatatctgatgggtgtaggtaaaccatccgatatcctggctgcagtaaatcgcggcgttgatatgtttgattgtgtaatgcccacgcgcaatggtaggaatggacatatctttacctcaaaaggtgtaatcaatataagaaatgaaaaatttaaagaagatctgggtcctatagatactgaaagctctcatccttggggacagaaattttcaaggtcatatgttcgacacctttttaatatcaatgaagtgctgggacttagaattgcatcaacacttaaccttgtttattatcatgatctcatgaaaagaattaagaatgagattgtgaaaggcaattttaataattggtctaaagaaacattaaataaaatgaaag

SEQ ID NO: 239720 - DNA, 759 bp, Unknown
  Bacterial polypeptide expressing nucleotide sequence isolated from the Sargasso Sea
aaaacatcaaaagactctagagcacgaacaggtataataactactccacatggggaagttgagactccagcatttattttttgtggcactaaaggtgctttaaaatcttgtagtaccgaagaagcaaaaaataataatactcaaataattttatctaatacttttcatttaatgctccaaccagggagtaatattattgctaaacatggaggaattcataattttatgaattggcaaggtccaatattaactgatagtggagggtttcaaattttttccttaggcaatggttcagtagcagatgaaattaaaagaaaaaactctaatcgaaataaatctcttttaaatatttctgaagaaggggctttatttaaatcctttattgatggaagaaatcatttattgactcctgaaaaatcaattgaaattcaaagagatataggcgcagatatcattctagtttttgatgaatgtacaccatttcatgtagacaaatcttatactgaccaatctatgcaaagaagtcacaattggtctactagatctacaaatagtttccaaaaaagaaatagatatttaccaatgaatggatcttcaggaagtcaaaaactttatggtatcattcaaggaggtatttataaagatttaagagaagaaagtattgaatttaatataaattctaaaaatttttttggtttggctataggtggaagtttggggtctacaaaagaagaaatgcatgaaatagttgattatact

SEQ ID NO: 239721 - DNA, 565 bp, Unknown
  Bacterial polypeptide expressing nucleotide sequence isolated from the Sargasso Sea
aatgtttgaagaaaaattttcttttaatcttttaaatgaaaatataaaggctcgtttaggtcaaattcatacacacagaggaaatatagacactccaacatttatgccagttggtactcaagctacgattaaatctgcttttatagatgatgtaatatcatcaggcgctcaaataattttatctaacacatatcatctaatgatcagaccaggcactgaaagaattaaaagagcaggcgggttacatcagtttatgaactgcaatcttccaattttaacggactctggtggatttcagattatgtctttatcaaaatttgttaaaattgataaaaataagggtgcaatttttaattctcatttagatggtaaaaaatttatattaagtccagaagaaagcattaaaattcaaaaagatttgaattccgatatagttatggttttagacgaatgtccaaaattgtcgagaaataaatctgcaattcataaatccttaaaactatctcatcattgggcagaaagatcaaaaaatgaatttggtaataatcctaaaaaagctctattg

SEQ ID NO: 239722 - DNA, 505 bp, Unknown
  Bacterial polypeptide expressing nucleotide sequence isolated from the Sargasso Sea
ctaaatgaattaattaatatagatttcgacggttatgccttaggaggacttgctgtaggtgaaactcaagaggaaatgtttaaagttttagacgacgttaaagaatatttacctgatgacaaacctcattatttaatgggtgtaggtacaccatctgatattcttggtgctgttaaacgtggtattgatatgtttgattgtgttttacctacaagatctgggagaactggcctcgcttttacttggaacggaagattaaacatcaaaaataataaatttcgaaatgataatacacctttagattcttattgtgacaatctaagcttgaataaatattcaaagaattacttaaaccatctttttaatacaaatgaaatactaggctcaatgcttttaacactccacaatatcaatttttatcaagaattaatgtctgaaataagagatcatatagagaaagggacatttgataaatttcatgataaatacattaataagttgtaga

SEQ ID NO: 239723 - DNA, 456 bp, Unknown
  Bacterial polypeptide expressing nucleotide sequence isolated from the Sargasso Sea
tagcagttggtgaaccccaaaaagaaatgtttgatgtattagactgtataaaggataaattaccaatcgataaaccaagatatttaatgggtgtgggaactccatccgacatattaggagcagttaagaggggaatagatatgttcgattgtgttttaccaacaagatcaggaagaacgggtctagcatttacttggaatggtagaattcaaataagaaattctgaaaataaattagataatacacctctagatagtaacgttactaaatttgacttaaacaaatactctaaaaattatttgaatcaccttcataacaccaatgaaatattagcttcaatgatcttaacattaaataatataaacttttatcaagaactgatgtacgaaattcgaaaaaatatcaaaatgggaacttttgaagaatttcatgacaagtatattaatattttgtaaa

SEQ ID NO: 239724 - DNA, 412 bp, Unknown
  Bacterial polypeptide expressing nucleotide sequence isolated from the Sargasso Sea
aatgcctcaaatgtctgaaaatatccccagatacttaatgggtttaggaactcctattgatatcattaaagcagtttcagttggtgtggatatgtttgattgtgtgattccgactaggcatgcaagaaatgggcaaatttatacccattctggcgtagttaagattaaaaatgctagatatatcaatgatctaggacctcttgatgatgaatgcggatgctatacatgcagtaactttactcgttcatacctgcgtcatttgttcaactgcaatgaaatcttgggattgagattggcgactatccataatctcagtttctatatcaaattgatggatgatataagaaagtctattcaatcagaaacgtttgaaaaatttgccaaaaacttcattcaaagttatcagcagtaa

SEQ ID NO: 239725 - DNA, 355 bp, Unknown
  Bacterial polypeptide expressing nucleotide sequence isolated from the Sargasso Sea
aatggcattaaagaattttgcctttaaagtaataagcaaagataaatcttctagatgtggcataattgaaactcatagaggaaatattcaaactccaacatttatgccagtaggaactcaagcaacaataaaagcttgtaccatagatgatataaaaaaaactggttctgaaataattttgtcaaacacatatcatttaatgataaggcctggtgttgaaagaattaaaagagcaggtggacttcacacatttatgaattgtgatttaccaatccttacagattctggaggatttcaggtaatgtctttatcaaaattaaacaagatagatcgtgaaaagggtgcattatttaat

SEQ ID NO: 239726 - DNA, 328 bp, Unknown
  Bacterial polypeptide expressing nucleotide sequence isolated from the Sargasso Sea
gatgagtagtaatatttataaactaattgctaaagacggtcttgccagaaggggtgaaattaagactattcatggcaaatttcaaacccccgctttcatgcccgttggaacctatggagctatcaaatctgttagtccacttactttagaaaatttggaagctgagattgttctttccaatacttaccatcttatggagagacctggtatagagattattaaatctcacggagggctacataatttcatgggctggagtggcccaattttgactgactccggaggctaccaagtattcagcctctcaaaaaaaagaactataaacgaa

SEQ ID NO: 239727 - DNA, 676 bp, Unknown
  Bacterial polypeptide expressing nucleotide sequence isolated from the Sargasso Sea
gcctgccccatacgaaaaaatcgcagatagcatgaagctctcaatgaggtgggcgcagcgttcaagagatgcttttggagatcgcccgggatatgcactgtttggaatacagcaaggtggtctagagcatgagttgagggctcaaagtgccgaaattcttcggtcgattgaatttgatggatacgcaataggtgggctagcagttggagaggggcaggaggcaatgttccgagttttagactttgctccaggtatgtttccagccgacaagccaaggtatttgatgggtgttggcaaaccaagtgatatagttggagcagtcaagaggggaatagatatgatggattgtgttcttccctcacgatctggaaggacaggacaagcttttactcaccgaggcgtagtaaatataaaaaatgcgaggcaccaaaatgatcccagacctctcgacgcttcgtgccaatgccccgcgtgtaaaaattattcaagagcgtacctccaccatgtatttaaatcacaagaaataatctcctcaatgctcataacttggcataatttacactattatcaggaacttatggaaaaaatgagaaaagctgtattaaatcaaagcttttcagactttgagttagaatttaatgaaaatttgagccttggagacctagatccaatttaa

SEQ ID NO: 239728 - DNA, 367 bp, Unknown
  Bacterial polypeptide expressing nucleotide sequence isolated from the Sargasso Sea
atgaataaagaaaaattttctttcaatcttttgaaagaagatggtctagctcgcttaggtaaaatcagtacacatcgaggatcaattgatactccagcttttatgacagtaggcactcaagcaacaataaaatctgcttttatagatgatgtaatattgtcaaaagctcaaataattttgtccaatacataccatttaatgattaggccaggcgtcgaaagaatcaaaagagttggtggtttgcatgaatttatgaattgcaaacttccaatacttactgattcaggaggttttcaaattatgtctctatcaaaactagttaaaattgatgaaaaaaaagggagcaaatttttaattctcacataga

SEQ ID NO: 239729 - DNA, 394 bp, Unknown
  Bacterial polypeptide expressing nucleotide sequence isolated from the Sargasso Sea
aaatattccgagatatctcatgggccttgggacaccaattgatatcataaaagccgtatcagtcggcgttgatatgtttgactgtgtgattcccactcgacatgcgagaaacggacaaatttatacacattctggtgtattaagaataaagaatgcacgatatatcaatgacttagaatctttagatgaaaaatgtgaatgttacacatgcaataacttctcacgttcctatttgcgtcacttattcaattgcaatgaaatcctaggagcacgattggcaacaatccacaatctcagcttctatatcaaattgatggctgacataagaatgtcgatacagtctgataattttgaagaatttgccaaaaacttcatacaaagttatcagcaataa

SEQ ID NO: 239730 - DNA, 712 bp, Unknown
  Bacterial polypeptide expressing nucleotide sequence isolated from the Sargasso Sea
atgaatgattacagttggcaaattacaagtacatcttcaacaaaagctagaactggaattatttcaactccacacggtagaataaaaacaccagcttttattttttgcgctactaaaggagcattaaaatctttatctgttgaggatgctaaaaatgctggaacgcaaattattttatctaatacctatcacttaatgcttcaaccaggtggagaaataatttctaaacatgggggtattcataaatttattaattggaatggccccatgttaactgacagcggagggtttcaaattttttcattaggtcatggttctgtcgcaaatgaaattaaaggcaaaactaattatgttaaaaataaatcacttataaaaatttcagaagaaggagcactttttaaatcttaccttgatggttcaaatatacttctgactcctgaaaaatccatagaattacaaaggcaaataggagctaacttaattttagtctttgatgaatgtaccccatttaatgttgataagaaatatacttctgattcgatgcatagaagtcatagatggtctgatagatcattgaaaacattcaatacaagatctaattttgaaccaacctttggttcttcagggcagcaaaaattgtatggtataattcaaggtggaatttacaatgatttaagggaagagagtattgagtttaatttaaaaaatgatt

SEQ ID NO: 239731 - DNA, 457 bp, Unknown
  Bacterial polypeptide expressing nucleotide sequence isolated from the Sargasso Sea
catggacaataaatttaattttaaattactatcaaaagataaaaatgctcgtttaggtaagttagaaacagctcatggagatatagatactccaattttcatgccagtgggtactgcagcaactgtgaaagcaatgcatttaagagatgtaaaagcttccggtgctcaaattattttagctaacacatatcatttgatgttaaggcctggtcaaaaaaatataaagaagatgggtggagttagaaaatttatgggatggaataaacctcttttaactgactcaggaggtttccaaattatgagtttaggcaagttaagaaaaattgaaaatgatggagttacttttaagtctcatctagatggtacaaaatactttttgtcaccagagataagtacagacattcaaaatgctttagatgcaactataacaatgcaattagatgagtgtattcctttt

SEQ ID NO: 239732 - DNA, 441 bp, Unknown; identical to SEQ ID NO: 239702
  Bacterial polypeptide expressing nucleotide sequence isolated from the Sargasso Sea

SEQ ID NO: 239733 - DNA, 469 bp, Unknown
  Bacterial polypeptide expressing nucleotide sequence isolated from the Sargasso Sea
gttggagaagagaaggaagcgatgtttgatactattgaattttgtaatactatgcttcctatagatcagccaagatacttaatgggagttggaaggcctacagatctaataaaagctgtacttagaggagtagatatgtttgattgtgtaatgcccacgcggaatggaaggaatggacatattttcacttccaaaggtgtcattaatattagaaatgaaaaatataaaaaagatttttcttcattggatttaaacagtagtcatatttggggaaagttatattcaaaatcatatgtacgacacctttttaatattaatgaaattttaggattaagaatagcttcaactttaaatcttgttttttatatcgatttaatgttagaaattagaaagcaaattaattctaaaaattttgagtcttggtcaaaaaaaactttaaataaaatgtcactttataaggggatgtaat

SEQ ID NO: 239734 - DNA, 148 bp, Unknown
  Bacterial polypeptide expressing nucleotide sequence isolated from the Sargasso Sea
catgaataattatcggttgcaacaattagatggttttgctcgtgctggagaattggagttaaatcatggcaagattcaaacacccgtatttatgcctgttggcaccaatggaacggtaaaaggtttaacagttgaagatctagattct

SEQ ID NO: 239735 - DNA, 322 bp, Unknown
  Bacterial polypeptide expressing nucleotide sequence isolated from the Sargasso Sea
atgaattcaaaaaaagttttttttgaattaatcaaaactcataaagaagcacgacttggacaaattagtacatcaagaggtttaattgatacacctgcttttatgcctgttggtacacagggtactgtaaaaagtatttttgttgatgatattatcaagacaaattctcaaataattttgggaaacacttaccatctttttttaagaccaggattagaaatcttaaaaaatattggtggtcttcatcaatttatgaattggcataaaccaattttgacagattatggaggttttcaaataatgtctttatcgaagtttagaa

SEQ ID NO: 239736 - DNA, 368 bp, Unknown
  Bacterial polypeptide expressing nucleotide sequence isolated from the Sargasso Sea
gatggcattaaaaaaatttagttttaatgttacaaaaaaaaatggttacgcaagacttggtaaaatagttactcatagaggaataatcgatacacctgcatttatgcctgttggtacacaaggtaccattaaaggagcatttttaaatgatgtttttaaaacaggcagtcaaataattctttgtaatacatatcatttaatgatcagacctggtgctgaaagagttaaaaaatacggtggcttacataacttcataaattgtaaaaaacctatattaacagattcaggtggttatcaaatcatgtctctttcaaagttaaataagatagatagagaaaaaggtgctatatttaactcacatattgatg

SEQ ID NO: 239737 - DNA, 430 bp, Unknown
  Bacterial polypeptide expressing nucleotide sequence isolated from the Sargasso Sea
aatgtttgatgttttagatgatatcaaagaatatttacctatagaaaaacctcactatttaatgggcgttggaacaccatcagatattttaggtgccgtcaaaagaggtatagatatgtttgattgtgtgttacctaccagatctggaaggacaggtttagcttttacatggaatggaagggtaaatattaaaaataataagtatcaaaaagataacactccacttgatcctaattgtaaaaatcttaacttaaacaaatattcaaaaaattatctaaatcatttgtttaacactaatgaaatattagcttcaatgcttttgacacttcataatattaatttttatcaagaattaatgtcacaaattagaaaaaatattaattctggtacatttgatgattttcataataaatacatagataagttgtag

SEQ ID NO: 239738 - DNA, 392 bp, Unknown
  Bacterial polypeptide expressing nucleotide sequence isolated from the Sargasso Sea
gggggtaggcaaacctgaagacttggtaggagcagttcaacggggcattgatatgtttgattgtgtgctaccaacgcggtccggacgtactgatcaagcttttacccgtcgcggcacagtcaatatgagaaacgcccggcatcgggaagacccgcggcctatcgatccagagtgcagctgctacacctgcaaaaattattcgcggggttacgtcaaccacttaattatggccagagagatcttagcagcaacgcttctgacctggcataacctttattactatcaggaaattatggttaacatccgtgatgctattgctaaaaataaccttgatgccttcgtctcagattttactattgagcaggccgcgggagatattgaacaaatttgac

SEQ ID NO: 239739 - DNA, 365 bp, Unknown
  Bacterial polypeptide expressing nucleotide sequence isolated from the Sargasso Sea
gttggtaccccattcagatattcttggtgctgtgaaaagaggtattgatatgtttgattgcgtgttacctactagatcaggccgtacaggtatggcttttacatgggaaggaagaataaatattaaaaataacaaatatcaaaatgataatagcccaatagatcctaaatgtgacaatttaaacttaaataaatactctaaaaattatttaaatcatttattcaatactaatgaaattttggcatctatgttgttaacacttcataacatcaatttttatcaagaattaatgagtaatataagaacgaatattaataagggtacttttgatgaatttcacaataaatacataaataagttgtaaa

SEQ ID NO: 239740 - DNA, 274 bp, Unknown
  Bacterial polypeptide expressing nucleotide sequence isolated from the Sargasso Sea
taggaatgcgaaatataaaaatgatgattcgccgatagatgaaaattcagattctaaggtttgtaaaaattattcaaaagcctatttacatcatttagataaaactaatgaaatgttaggatcaatgcttgccagctatcacaatatttattactaccatgagcttatgaagcaaattaggcaatcaattgatgacgatatattcgtaaactttgcaaaagacttttataatagtcgaaatttaccaattccagattatttggagggcttataa

SEQ ID NO: 239741 - DNA, 853 bp, Unknown
  Bacterial polypeptide expressing nucleotide sequence isolated from the Sargasso Sea
aatgaataatatagacctaaaaacaatcgctactgatggtaaagccagggttaatgaggttaatatcaatggtaagaattttcaaacaccatcttttatgcctgtagcaacaagaggatcgataaaatcccttccgctagattatttgaaaaaaacagatgttttattagcaaatacataccatctttttttacgtccaggacttgatgttataaaagagttcgatgggctacataattttattggatgggataaattgatactaactgattctggtggatttcaaggatggtctatccctaataaattcaaagaagatggtatcgaatttaaaaacatatatgatggttcaaaattttttatggatcctattctttcaatggatatacaaaatacactaaacagtgatattgctatgattttggactctttagtagatatagataaagattatgacaaccaactgcaatctataaatataacaaaaaaatgggcagagatagcaaggaattaccattcaaatgagaaacaatcattattcggcatcgtacaaggtggtaaatttaacgagttaagagagaagtccgcattagatatgacttcactagattttgatgggtacgcaattgggggattagcaataggtgaaacaccaacggaaagaaaaaatattgtagattatacagttgatatgcttccagaagataaattacgatatgtaatgggtctgggagatattgagggtatgttagagcttatagaattaggaatagatatattcgattgtgtgtggccagcacgacttgctcgtcatggaaaaataatcaataaaggtaaatttttcaatctaaaa

SEQ ID NO: 239742 - DNA, 677 bp, Unknown
  Bacterial polypeptide expressing nucleotide sequence isolated from the Sargasso Sea
tttagatgaatgtccaaaacttacatctgacaaaaaaattttatcaaaagctattgacgtttcaacaagttgggctaaaagaagtaaaacagaatttggtaacgataaatccaaagcattatttggtattgctcaaggtggactttataaagatttaagaattgaaagcattgagaaattaattgaaatcgattttaatggttatgcaatgggaggtctagctgttggagaaaaacaatctgacatgttcaagattttaaatgaaactactgattatttccctaaaagcaaaccaagatatttaatgggtgtaggaactccatcagatattttaggtgcagttaaagaaggcatagatatgttcgattgtgtgatgccaactagatcaggaagaacaggtttagcattcacctgggaaggaaaggttaatcttaaaaactctaaatatcaaaaagatagatcaccaattgatgaaaattgtaatatgagagatttaaataagtattctaaaggctatttaaatcacctcattaagtctaatgaaatgatggcttcaatgttaatttcattacataatatatatttttatcaacaatttatgcgcgaaattcggaagaatattcataatggcacatttcaatcgttctacaaaaaatatataaatttgtacgattaat

SEQ ID NO: 239743 - DNA, 420 bp, Unknown
  Bacterial polypeptide expressing nucleotide sequence isolated from the Sargasso Sea
aatgaaaaatttttcatggaaggtcgaatataaatcaaaaaaaaataaagcaagaacaggaacattaactactcctcatggtaaaattagtacccctgcatttattttttgtgcaactaagggagctttaaaagcatcaactactaatttagctaaagaaaacaatactcaaattatattatctaatacctaccatttaatgctgcaacctggaggtaatctaatttcaaatcatggtggattacataaatttttaaactgggatggaccaatgctaacagatagtgggggttttcaaattttttctttgggccatggctctgtcgcggatgaaattaaaggcagaacaaacaccaaaagaaataaaacgcttcttagcatcagtgaagaaagatgtttatttaaatcgtatttagatgg

SEQ ID NO: 239744 - DNA, 352 bp, Unknown
  Bacterial polypeptide expressing nucleotide sequence isolated from the Sargasso Sea
tgttgcaaatgggttcgatatatttgactgcgttttgcctacaagactaggaagacatgggactgcattttttaatgatgaaagattgaatttgcgaaatgctcgatttaaaaatgacttctctccaattgacaaaacttgtaaatgtgagacatgtacatcctattctcgagcatatttgcatcatctaattagaaatgacgaaatattaggcctaaccctcataagtttgcataatattgctcacttaataagatttaccaatgcgatttctactgcaattagagataattgttttacaaatgatttcgctccttggaaaacatcctctattgctcaccatacgtggtaa

SEQ ID NO: 239745 - DNA, 430 bp, Unknown
  Bacterial polypeptide expressing nucleotide sequence isolated from the Sargasso Sea
aatgtttaaggttttagatgatataacttatttgatgcctagcgacaaaccattatatttaatgggagttggaactccatctgatattttgggtgccgttaaaagaggtattgatatgttcgactgtgttttgcctacacgatcaggtagaactggtctcgcttttacttggaatggtcggattaatattcgcaattcaaaatatcagcaagataacgaacctatagatattaataccaaaaatttttctttaaataaatattctaaaaattatctaaatcatttatttaatacaaatgaaatgctcggttcaatgttattaacgttacataatattaatttttatcaggagttaatgagtgcaattagagaaaatattaaaaatggtacatttcaacaatttcatgataaatatataaataagttataa

SEQ ID NO: 239746 - DNA, 397 bp, Unknown
  Bacterial polypeptide expressing nucleotide sequence isolated from the Sargasso Sea
attgaaaaagcccttatttgatttccaaataaaaagtagatgcaaaacgacattagctcgtgtctgttcttttaaaactccaaatggaattgtaaatactccaaaattcatgcctgttgggactttaggaacagtcaaaggagttacatctcagcaacttgagaaaacaggagctgaaatgattcttgcaaatacttttcatcttcatcttcaacctggagaaaaaatagttcaagatgcagggggactacataaatttatgagttggaataaaccaattcttactgactcaggaggctttcaagtatttagtttggcaaaattaaataaaatagatgatcaaggagtctcgttttcaagtccaagagatggtaaacatatttatttgactccctga

SEQ ID NO: 239747 - DNA, 448 bp, Unknown
  Bacterial polypeptide expressing nucleotide sequence isolated from the Sargasso Sea
aggtgaatctcaagatgaaatgttttctgttttagatgatattaaagaatttttaccaaatgaaaaaccgcactatttgatgggtgttggtactccttcagatatattaggtgctgttaaaagaggcatagatatgtttgattgtgttttaccaacaagatctggcagaactggtttagcttttacatggaatggaagaattaatattaaaaataaaaaatatcaaactgataattcgccattagatattaattgtaaaaacttaaatttaaataaatattcaaaaaattatttaaatcatttatttaatacaaatgaaattttggcatcaatgattttaactcttcacaatattaatttttatcaagaattaatggaatcaatcagaaaaaatattatggcaggtagttttaatgaattctatgagaaatacattgataagttgtaa

SEQ ID NO: 239748 - DNA, 354 bp, Unknown
  Bacterial polypeptide expressing nucleotide sequence isolated from the Sargasso Sea
gatattgaggactctttacaaagaactcattcatggttgcaaaaatgtgttgagactcatcagaaatccaatcaagcattattcggtatagttcaaggtggaaagtatccgagattgagagaatacagtgcaaaatatacaagttcttttgatcttcccggaatagcagtgggaggtgtaagtgttggcgaggcagtcgaagagatacatagtgtaattaattacgtcccgaaattcttaccaataaataaaccaagatatttaatgggaattggctccttaaaggaaatttctctagctgttgctaatggattcgatatatttgattgtgttttgcctacaagactaagaaga

SEQ ID NO: 239749 - DNA, 94 bp, Unknown
  Bacterial polypeptide expressing nucleotide sequence isolated from the Sargasso Sea
gggtgctgtaatgagaggtattgatatgtttgattgtgttttgccacaagatcaggcagaacaggtcttgcttttacctggaatggaagaataa

SEQ ID NO: 239750 - DNA, 265 bp, Unknown
  Bacterial polypeptide expressing nucleotide sequence isolated from the Sargasso Sea
gatggcattaaaaaattttgcctttaaagttctaaaaaaagataagtttgcaagatcaggtgttatagaaactcatcgtggtagtataaacacaccagcctttatgcctgttggcacacaagcaaccgtaaaagcttgtacaattgaggacataaaaaaaacaggttcacaaataattttgtctaacacttatcatttaatgattagaccaggtgttgaaagaattaaatctgctggtgggcctcataaatttatgaattgtgat

SEQ ID NO: 239751 - DNA, 118 bp, Unknown
  Bacterial polypeptide expressing nucleotide sequence isolated from the Sargasso Sea
atgaaattcgaattaataaaaaaagttaataatgcaaggcgcggtagacttgagctctctaatggcacagtagagacgccagtttttatgccagtaggaacatatggcgcagtcaaaa

SEQ ID NO: 239752 - DNA, 397 bp, Unknown
  Bacterial polypeptide expressing nucleotide sequence isolated from the Sargasso Sea
ttgcctattgaaaagccgcactatttaatgggtgttgggacaccatctgatattttgggtgctgttaaaagaggtatagatatgtttgattgtgttttgccaaccagatcaggacgaacaggtttggcatttacctggaaaggaagaattaatattaaaaataataaatatcaaaatgacaacactcctctagatccagattgtgaaaatcttaatttaaataaatattcaaaaaactatttgaatcacttatttaatactaatgaaattcttgcttcaatgttactcactctacataatattaatttctatcaagaattaatggccttgatcagaaaaaatattaatgacggtacttttgatcaatttcacgataaatacattgataagttgtaga

SEQ ID NO: 239753 - DNA, 544 bp, Unknown
  Bacterial polypeptide expressing nucleotide sequence isolated from the Sargasso Sea
ccctcatttaagggaattgagtgcaaaaattgtctcaggattcggtttgccagggattgctattggaggagtaagcgtaggtgaacccatacatcaaatgcacaaaatcgtacgagaaacctgtcctttattacctcaagatcgacctagatacttaatgggaattggaaccttgagagaaatggctattgcagtagcaaatggagttgacatgttcgattgtgtaattcctacgcggctgggaaggcatggaagcgcattagttaatggagagacatggaatctaaggaattcacgttttaaagacgattacagaccattagactcaaaatgtacttgtgaagcttgtacaggatattcaagggcatatattcatcatttaattcgcaataaagaattactaggtcttacacttttgagtatccacaatcttacgcatttgatccgttttacaggtgctatgaggcaagcaattacggaaggttgtttttcagaggatttcgctccgtggcagagtgactctaaagcgcgtcatacgtggtag

SEQ ID NO: 239754 - DNA, 376 bp, Unknown
  Bacterial polypeptide expressing nucleotide sequence isolated from the Sargasso Sea
aatgtcatttcaaatcacagctcaagattccaattcaagtgcaagatgtggagtattgaaattaaatagaatgaatttaactacaccattgttcatgccggtttgtacaaatgcaacgccaaaagcattggatttcatcaaattaaaggaaatcgggtttgagatggtagtttgcaatgcttaccatttattcttgaggccaggtagttcgtatataaaagacaagtttaatagcttgcatgaatttagcagttgggacaatgcaatattaactgatagtggcggctttcaagtttggagcttaggttcttcggttaagattcatgatgatggagttttgatcaaatctcatattgatggttccttaaatgatata

SEQ ID NO: 239755 - DNA, 256 bp, Unknown
  Bacterial polypeptide expressing nucleotide sequence isolated from the Sargasso Sea
atggcattaaaaaaatttaattttaatgttaaatatactgaaaattattctagagtaggaattatcgagactagtaggggaaatataaatactcctgcatttatgcctgtcggaactcaggccactgttaagggtgcatttattgaagatataattaaaactggaagtgaaataattctttcaaatacatatcatttaatgattagaccaggtgttgaaagaatatcatcaattggaggattcaccaatttatgaa

SEQ ID NO: 239756 - DNA, 432 bp, Unknown
  Bacterial polypeptide expressing nucleotide sequence isolated from the Sargasso Sea
aaatgtttaacgttttagatggattaaaaaatcatttacccactgaaaaaccaaggtatttaatgggagtcggtacaccctcagatattttaggtgctgtaaaacgtggtatagatatgttcgactgtgttatgcctaccagatcaggtcgaacaggtttagcttttacttggaatggcaggattaatattagaaacgcaaaatataaaaaagataataagccattagactcatcagttgaaaaatttgatttaaataaatattcaaaaaattatctaaatcacttattcaatactaatgaaatgttagggtcaatgttattaactttaaataacattaacttttatcaagaactaatgttcgaaataagaagaaatataaaaaagggtacttttcttaaattttacaaaaaatatgcaaataagttataaa

SEQ ID NO: 239757 - DNA, 820 bp, Unknown
  Bacterial polypeptide expressing nucleotide sequence isolated from the Sargasso Sea
ataatgtctttatctaaattaaacaaaatagatccaaaagtgggtgcgatatttaaatcacatttggatggtaagaaaattattttaagtcctgaaaaaagtattcaggtacagaaagccataaattcagatataataatggtgttagatgaatgtccaaaacttacaaaagataaaaaaactttatcaagtgcgataaaaacatcaatcaattgggctaaaagatgtaaaattgaattcgggaacaacaaaattaaagctttatttggaattgcacaaggaggtctttacaaagatttaagatcagaaagtatagataaattaagagaaattaactttgatggatatgctatgggtggattagcagttggtgaaaaacaagaggatatgtttaagattcttaatgaaactactaatatgttacctaaagataaacctagatacttaatgggtgtaggcactccttccgatatactaggtgctgtaaaagagggtatagatatgttcgattgtgttatgccaacaagatcaggaagaactggattagcatttacttggaatggaaaattaaatattaaaaattcaaaattcaaaaatgataaattacctttagatgaaagctgcgacattagagaactaaataaatactctaaaggttatttacaccatctaataaaatcagatgaaatgctggcttcaatgttaatttcattacataatatatatttttatcaacaatttatgcgcgaaataaggaataatataaaaaatggtacttttcataaattttacaaaaaatacataaagttttttgattaaa

SEQ ID NO: 239758 - DNA, 430 bp, Unknown
  Bacterial polypeptide expressing nucleotide sequence isolated from the Sargasso Sea
gaacgctgtaggatgctctttgatccgagtcattatgttctccaatgtttggactaccttcatcacctggatctttaccacgatctgatcaaggtgttccatgttaaggacgccgagttcaatcctgatggcagaaatggagtttatggaggatttcaatcctggactgaaagggcgggaagatttcggtcactaggagacggccaggtggatttttccgcaattttctcgaaaatggcacaatatgattttccaggctgggccgttttggaatgggaatgctgcctcaaacatcccgaacagggtgctgcagaaggagcacctttcatcagggaccatatcattcgcgtgactgagaaggcttttgatgattttgcggattccggaaccgaccaagcagccaatcgtcgattactcggcatggcataag

SEQ ID NO: 239759 - DNA, 361 bp, Unknown
  Bacterial polypeptide expressing nucleotide sequence isolated from the Sargasso Sea
aatgtcaaatttttcttggaaaattaattttatttcaaaaaaatctaatgcaaggagtggacaaattaaaacacctcatggaattgttaatacgccagcatttattttttgtggaacaaaggcagcattaaaatcttgctccactactgaagcaaaaaaaaataacactcaaatcattttatctaatacttaccatttgatgttgcagccaggaagcaatatcatagcaaatcatggaggactccacaaatttatgaattggaaaggacctatgctaacagatagtgggggttttcaaatattttctttaggtcatggatcagttgctgatgaaattaaaggtagtgcatcaaattcaaaa

SEQ ID NO: 239760 - DNA, 266 bp, Unknown
  Bacterial polypeptide expressing nucleotide sequence isolated from the Sargasso Sea
gatggaagacataaaaaagaatttttcttttagcgtaaaacatcaaaataaaaattatcgtgttggattaattcaaacacatcgtggagaaataaacactcccgcttttatgccagtgggtacacaagctactgttaaaggtgtttttattgatgacatcattaaaacaggaagtgagataattctatcaaatacataccacttaatgataagacctggcactgaaagaatagaagctgttggtggactacataaatttatgaatt

SEQ ID NO: 239761 - DNA, 274 bp, Unknown
  Bacterial polypeptide expressing nucleotide sequence isolated from the Sargasso Sea
atgagctctaatcaattttcttttgagttaattactcaaaatgataacgcaagattaggaaaaattattacttcaagaggaattatcgaaaccccagcttttatgccggtaggtactcaagggacagtaaaaggcatttatcctgaggatattttaagtacaaatactcatataattttaggtaacacttatcatttattattaagacctggtattaaagttttaaaagaatttcatggattacataactttatgaactggcaaaaaccaattt

SEQ ID NO: 239762 - DNA, 265 bp, Unknown
  Bacterial polypeptide expressing nucleotide sequence isolated from the Sargasso Sea
actgaattattagaatttatgtctgacaaattacccgatgataagcctagatttcttatgggtgttgggacgccggaggatattgttgaagccgttaggtatggaattgatatgtttgattgtgttcttccacccagaaatgctagaaatggacaattattcacttcagaaggagttattaatattagaaatgctgagtataaaaatagtcctgaccctattgatataaattgtgactctaaagtttctcaaaactatagccggg

SEQ ID NO: 239763 - DNA, 404 bp, Unknown
  Bacterial polypeptide expressing nucleotide sequence isolated from the Sargasso Sea
ttacttgccaaaaaataaacctcgttatttaatgggtgttggtacaccttctgatattttaggtgcagtgaaagagggtattgatatgtttgattgtgttttaccaacccgatcaggcagaaccggtttagcatttacatggaaaggaaaaataaacctaaaaaattctaaatttcagagcgacaaatcacccttagatgaaaaatgcgacataagagatctaaataaatactcaaaaagttatttaaatcatctaattaaaaccaatgaaatattagcatccatgttgatttctcttaacaatatatatttttaccaacaatttatgcgggaaataagaaaaaatatcaaaaatggtacatttaataattttcataaaaagtatattaacttttttgattaat

SEQ ID NO: 239764 - DNA, 394 bp, Unknown
  Bacterial polypeptide expressing nucleotide sequence isolated from the Sargasso Sea
tgttatgggtgttggactcctgaagagctggttgaaggtgttaggtatggaattgatatgtttgattgtgttattcctactagaaatgggcgaaatggatatatttatactgaaaagggaattttaaaaataagaaattcagagcataagaattcaaataagcccttagatgaaaattgtgattgttacacctgtagaaactttacaagaggctatattcatcacttagatcgttgcaatgagatgttagcaagcactttgatgaccatttgtaatctttcgcactttcataaattaatgaaaaatataagagactctcttgaagaaaataaatttgaagaatttgtcgaatacttttacgatatgaggagcttaaaaaagccaaaactttagg

SEQ ID NO: 239765 - DNA, 256 bp, Unknown
  Bacterial polypeptide expressing nucleotide sequence isolated from the Sargasso Sea
gatgaaaaaaaaagagttttccttcaagttaatttcaaaatttaaaaaagcaaggttaggattaattaagtcatccagaggaaacatagatacccctgcattcatgcctgtaggtactttgggaactgttaaaggtttatttgtagacgaccttaaaaaaacaggatctcaaattattttaggaaacacttatcacttaatgttaagaccgggatctaccattttagaaaaatttggcggtctgcataattttatg

SEQ ID NO: 239766 - DNA, 279 bp, Unknown
  Bacterial polypeptide expressing nucleotide sequence isolated from the Sargasso Sea
gatgaaaaaaaaagagtattcttttaatttaatttcaaaattcaaaaaagctagactaggaaagattaaaacacctaagggaagtatagacacaccagcatttatgccagtaggtactttaggaactgtaaaaggtttatttgttgatgatctaaaacaaacaggctcacagattattttaggaaatacttatcatttaatgttaagaccaggaacaaacattttagaaaaatttgatggtcttcataaatttatgaattgggaaaaacctattttaac

SEQ ID NO: 239767 - DNA, 166 bp, Unknown
  Bacterial polypeptide expressing nucleotide sequence isolated from the Sargasso Sea
atgcacgtgcaggaaaattggactcccccccacggcagcattctgactccgatcttcatgcccgtcggtactctgggaacggtcaaagccgcaactcctgaagaactgaaaaaacttgggactcagattcttttaggaaacacctaccatcttcatttgcgtccag

SEQ ID NO: 239768 - DNA, 553 bp, Unknown
  Bacterial polypeptide expressing nucleotide sequence isolated from the Sargasso Sea
tttggaattgtgcaaggtggtctttttgaagatttagaaaaaaaatcactagaacagcttattaaaattaattttgatggttatgccattggtggactagctgttggagaaacacaaaaagaaatgttcaatacacttgattttttaaaagatttaatgccaaccgataaacccagatatctcatgggagttgggacaccgtcagatattcttggagctgttaaaagaggagttgatatgtttgactgtgttttgccaacaagatcaggcagaactggtcttgcattcacgtggaatggcagaatcaatataagaaatgcaaagtatcaaaaagataacagcccattagataaaaaatgtaaaaactttaatctaaataaatactcaaaaaattacttaaatcatctttttaatactaatgaaattctagcatctatgttattaactttgcataatattaatttttatcaagaattaatggactcaataaggatgcacattaaaaacggtacttttgatgatttccatgatagatacgtggacaaattgtaat

SEQ ID NO: 239769 - DNA, 787 bp, Unknown
  Bacterial polypeptide expressing nucleotide sequence isolated from the Sargasso Sea
tttagatggaagtaaacatatgttcacgcctgagatctctatggaaattcaacgcgatcttggatcagatattatcatgtcatttgatgattgccctccaggagatgcggatcatgaaaccataaaaaatgctgtaaataggacaactgagtggatgaagcgctgtcataaatggttgtcagataatccagaacgatacggtcatgaacaagtagttttccccattattcaaggtggtacagatcataaattaagacgcattagtattgagcaattatctccatattcctctgcaggtatggcaataggtggccttgctgttggagaagaaaagagtgcaatgcttgatacagtagaatattgtgatgaaatattgccaaaagatcagccacgttaccttatgggtgtaggaaggccatctgatattgtagcggcagttagacgcggtgttgatatgtttgattgtgtcatgcctacgcggaacggtagaaatggacatatattcacatcaaaaggtgtgataaatataaggaatgaaaaatataaagatgatatgtctccattagataatgaaagttcacacccttgggggcagaaattttcaagatcatatgttaggcatctttttaatattaatgaggtcctaggactaagaatttcatctacactaaatcttgtctattatcatgacttaatggatatgatcaagaatgaaattgagaaaaacaattttaatacctggtcagaatcaatattgaatagaatgaaagatatgaaaggaatgtga

SEQ ID NO: 239770 - DNA, 1105 bp, Unknown
  Bacterial polypeptide expressing nucleotide sequence isolated from the Sargasso Sea
atttttttgtggtactaaggccactgtcaaatctgtactcccctctcaattaaaattagcaagaacacaaattattctttcaaacacataccatttaatgcttcaacctggtccagagatcatatcaaaagaagggggtttacagagttttactgattggaatggacctatgatgactgatagtgggggatatcaaatattttcacttggatatgggtcagtttcagaggaaattaaaggaaaaaacaataatgcaaagagcaaatctctcataaaaataaccgaggatggcgcatcatttagaaattatataaatggggataaagtattcttatcacctgagagatcaattgaattacaacgtgactttggcgctgatctgatttttgtcttagatgaatgtaccccctttaatatttcaaaaaaatatacagaaaagtctatgtatatgagtcatcgctgggcagcaagatgtaaaaattctttcgaatcaaaatttaaaaagtataactcaacttttggttcctcaggaaaacagtcactatatggtattatacaaggtggtgtttatgaggatttaagaaagattgcatgtgaagaaacatgctccaaaaattttgatggacttgcaataggtggctctttggggagcacaaaaaatcagatgtacgatatcttttctatctgtgaaaattatatagataaatccaaacctattcatattctaggaattggaggactagatgatattttgcatggtgtaagttctggatatgatacatttgattgtgtatcacccacaaggatcgctagacatggtattatgatgtcaaaatcaagtagtaaaggaattaatttaaacaactcaaaatttaaagacgatcaatctagtattgatgaagggtgtgaattaaatgaaatcaataaattttcaaaatcttatgtacatcatttgtttaaagctaatgagattctcggtatgaccatcttatcaatatataatatttggtttatgaataagttttttgaagaaataagatcgtctataaatgatgatagatttgaagagtataagaataaaattttatctaatttagtcgaataa

SEQ ID NO: 239771 - DNA, 574 bp, Unknown
  Bacterial polypeptide expressing nucleotide sequence isolated from the Sargasso Sea
aggaggcacttccagagatctaagactaaagtctctggaaaatctttctgcgctagacttcaaggggtacgcaataggtggattagctgtaggagagagcaaatctacaatgtacgaacttgtgaatctctgcaatcaatatttgccacccggaaaacctaggtacctaatgggagttggatcaccagaagatttgattgaaggagttgcttcaggagtggatatgtttgattgcgtcatgccgactagggtcgcgagaaatgggtctctttatactagatcaggaagaattaacattactaaccaaaaattcaaatccttggatgcccctattgatgatgaatgtgaatgcatgctatgtgccaattattcaacggcttatatacatcatttgtttaaagctaaggaattactcgcacttaggttagctagtatccacaatctgacctttatggctaatcttatgaaagaaatcagacaatcaatcactgaaaatactttcgaaacttacaggaatactttttggggaacctataaaaccgcaaataacataaaaaatgatgctcggtcttaa

SEQ ID NO: 239772 - DNA, 1100 bp, Unknown
  Bacterial polypeptide expressing nucleotide sequence isolated from the Sargasso Sea
tttattttgcgcaacaaaagctgcactaaaatcattttcaactattgatgctaaaagaaataatactcaagtaattttgtctaatacatatcatttaatgattcaacctggtagtgaacttattgctaaacatggcggattgcacaaatttattggatggagcggacctatgttaacagatagtggaggttttcaaattttctctcttggtcatggttctgttgctgatgaaataaagggaagaaaatcaaattcaaaaataaaaaaaacgttattaaatataaatgaagaaggtgcagtttttaaatcatatattgatggatctaatcttttactaactcctgaaaaatcaattaaaatacaaagaaatcttggtgctgatttaattgtagtttttgatgaatgtacacctttcaatgttgataaagactatacatcaaaatcgatgttaagaagtcatagatgggcgagtagatctgtaaattcattcaattccaatataacttttgagccaaaaacaggctcttcgggcaaacaagaaatctatggcattattcaaggaggaatatatgaagacctaagagaagagagcattgatttcaatcaaaataatattaatacatttggcattgctattggtggaagtcttggatcgaacaaagaagaaatgagaaaagtagtaaattttacagcatctagattagataatactcgaccagttcatttgttaggaataggagatccaactgatatatgggaatttgtagagagaggtattgatacgtttgattgtgttagtcctactcgtttagcaagacatggttcagccttgataaaaggaaaaataggaaaaataaatttaaaaaatgctcaatatagggagcagtttgttccaatagaacaagattgtgaatgttatacatgtaataattttacgttatcttatttgtatcatttgtttgcttcagatgaattacttggtcttcaattattaacatgtcataatatcttctttatgaataacttgatgaaaataattagaaattcaattgaggaaaatacttttgaagatacaaaaaaagaatggttaaataattaat

SEQ ID NO: 239773 - DNA, 397 bp, Unknown
  Bacterial polypeptide expressing nucleotide sequence isolated from the Sargasso Sea
catgcctaaggataaacccagatatttaatgggtgttggaacaccttctgacatattgggagctgtaaaaagaggtgttgatatgtttgattgcgtattaccaactagatcaggtaggactggattagcttttacatggaatggaagagttcagattagaaattctaagaatcaaaatgataattctcctttagattctagtgtgacaaaatttgatttaaataaatattcgaaaaattatttaaatcatttatttaatacaaatgaaatgttggcctcaatgatactgactttaaataatatcaatttttaccaagaacttatgcatgaaattagagaaaatataaaaaaaggtacctttaaacaatttcataataagtactttaatttactataa

SEQ ID NO: 239774 - DNA, 440 bp, Unknown
  Bacterial polypeptide expressing nucleotide sequence isolated from the Sargasso Sea
gatgtcctttgaattattaacttcatcagggtatgcacgtagaggcaccctaacaaccaaaacatcgaaaatacaaacacctgtatttatgcctgtaggaacttatgggactgtaaaaggtttaactccagatcagttacatgacattggatttgaaataattctaggtaatgcatttcatctatttcaacgaccaggattagaaacaatcaagaaattcaacggattgcataaatttatgggctggaataaatcaatcttgactgattctggtggatttcagatatggagtttgaaggagctaagaaaaatttcagaagagggagttgaatttaaatcaccccttgatggttcaaaaatatttatgtctcctgaagactcaataaatactcagcttattttaaattctgatattgttatggcttttgatgaatgcacca

SEQ ID NO: 239775 - DNA, 186 bp, Unknown
  Bacterial polypeptide expressing nucleotide sequence isolated from the Sargasso Sea
aatgtcattcaaagtcttaaataaatctagttacgctagaagaggagagttagtaactaaaacttctaaaattcaaactccagtttttatgcctgttggaacatatggaactgtaaagggcttaacacctgaacatctaaaggaaataggctttgaaataattttaggcaaatgcattccattaaa

SEQ ID NO: 239776 - DNA, 550 bp, Unknown
  Bacterial polypeptide expressing nucleotide sequence isolated from the Sargasso Sea
aatggctaaattttcttggaaaataaaatcatctagtacgaaatctaaagcaagaataggatgtattactacacctcatggcaaaattgaaactccagcatttatattttgtgcaactaagggggctttaaagtcatttactactattgaagcaaaaaaaattaatacacaaataattttatcaaacacttaccatttgatgttacatccaggcagcaaattaattgctaatcatggaggtttgcataattttatgaattgggatggacccatgttaactgatagtggagggtttcaaatattttcacttggtcatggctcagtagcaaatgaaattaaaggcaataaaactcaatatttaagagacaaatctttgctaaaaataaatgaagagggggctttgtttaaatcatatttaaatggaaaaaattatttattaaccccagaaaaatctattcaagtgcaaagagatttaggagctgatttaatattagtatttgatgagtgcactcctttttatatagaaaaaaatatactgaacaatcaatga

SEQ ID NO: 239777 - DNA, 210 bp, Unknown
  Bacterial polypeptide expressing nucleotide sequence isolated from the Sargasso Sea
aaacttgtaattgttatacatgcaaaaattattcacgcgcctatttacaccatctttcaaaaactaacgagattttaggggcgcgcttaaataccaaacataacctctattattatcagagcctaatgaagggattgcgattagctattgaagaagaacggctagacgaatttaccgccgatttttattcgaaacgcgagagtgactaat

SEQ ID NO: 239778 - DNA, 316 bp, Unknown
  Bacterial polypeptide expressing nucleotide sequence isolated from the Sargasso Sea
atggataaatttaagtttaaagttttaaaaaaagatggctatgcccgcaaaggtcttattgaaaccaaaagaggcaatattaaaacacctgcatttatgcctatagctactcaaggagcagttaagtttactcccatagagtttatagaacagattggatatgaattaacgctctcaaatacctatcacttactattaagacctggattagaaagactttctagtgttgatggtatttcagagtttatgggatggaataagccagtattaacagactctggaggctttcaggtgatgtctctatcaaaattaagaa

SEQ ID NO: 239779 - DNA, 886 bp, Unknown
  Bacterial polypeptide expressing nucleotide sequence isolated from the Sargasso Sea
tcagtttcagaggaaataaaaggaaaaaataacaacacaaaaaggaagtctcttataaaaataacagaagagggagcttcttttaggaattatattaacggtgataaagtattcctttcacctgaaaggtctattgaattacaacgtgactttggtgctgatttaatatttgttttagatgaatgcacaccttttaacgtttcaaaaaaatatacagaaaagtctatgtatatgagtcatcgttgggctgtaagatgtaaaaattcatttgattcgaaatttagaaattgtgaaccaacttttggctcctctggaaaacagtctctgtatggaataatacaaggtggtgtttatgaagatttaagaaagattgcatgtgaagagacttgctcaaaagattttgatggacttgcaatagggggttctttgggtagtacaaaaaaccaaatgtacgatattttttctttgtgtgaaaactatttggataaatctaaacctatacatattttaggaattggaggattagatgatatcttacacggtgtaagttcaggatatgatacgtttgattgtgtgtcaccaactagaattgcaagacatggtatcatgatgtcaaaactaagtagtaacggaattaacttaaataattcaaaatacaaagatgatcactccagtttagatgaggattgtgaaatacaggaaattaataaattctcaaaatcgtatttacaccatttatttaagtcgaatgaaatgttagggatgattattttatcaatttataatatatggtttatgaataaattttttgaagaaataagaaagtcaataaatgagaataagtttgaagagtataagcgtagtattttatctaattttagctaaa

SEQ ID NO: 239780 - DNA, 248 bp, Unknown
  Bacterial polypeptide expressing nucleotide sequence isolated from the Sargasso Sea
ttcaccgatagatgaaaattcagattctaaagtttgtaaaaattattcaaaagcctatttacatcatttagataaaactaatgaaatgttaggatcaatgcttgccagctatcacaatatctattattaccatgagcttatgaagcaaattaggcaatcaattgatgacgatatattcgtaaactttgcaaaagacttttataatagtcgaaatttaccaattccagattatttggagggctcataaa

SEQ ID NO: 239781 - DNA, 280 bp, Unknown
  Bacterial polypeptide expressing nucleotide sequence isolated from the Sargasso Sea
tatgtctcaaaacgggttttccataaaacatatagaagggaaatcccgggtaggtactttagaaactagtaggggcataatcaatacaccagcattcatgcctgtaggcacggcaggaacagttaaagcaatgattccagaaaatcttaaaacaataggagcagatgttttgctctgtaatacatatcacctaatgttgagacctggagaggaaatagttaataaattaggaggattaaataagtttatgaattggaaaggacaaatattgaccgatagc

SEQ ID NO: 239782 - DNA, 445 bp, Unknown
  Bacterial polypeptide expressing nucleotide sequence isolated from the Sargasso Sea
atgaaatacaaacttttaaaaaaagatggatacgctagaaggggtttcttagaacttcaacatggcaatattcaaacaccagtatttatgcctgttggaacaaatgcaacagttaagggcttaactgtagaggatcttgaagaaacaggctcacaaataattctttcaaatacttatcatttaatgcttcgtccgggtgatgagatcataaagcagcttggcggccttcataatttttgtaattggcaaaaacctattcttacagattcaggtggctttcaggtttggagtttaggcgatctagcagaagtctcagagaaaggggtaagttttaaatcaccttatgatggaaagaatattttcatgagtccagaagattccattcaaattcaagaaaatcttggttcggatattgtgatggtatttgatgaatgtacaaactatc

SEQ ID NO: 239783 - DNA, 853 bp, Unknown
  Bacterial polypeptide expressing nucleotide sequence isolated from the Sargasso Sea
ccaaataatattaggaaacacttatcatcttttattaagaccccgaataaaaataattgagaaatttagtggaatacataatttgatgaattggcaaaaaccaatattaactgactctggaggctttcaaattatgtctttagcaaaatttaataagatagataaaaatataggtgcaattttttcttcccatatagatggaaaaaaaattatcttaagtcctgaaaaaagtatccaaatacaaaaaagtataaattcagatattttaatggttcttgatgaatgtcccgtattaactagcgataaaaaaaaaattagcaaagcgatagacgtatcaactcattgggcaaagagatgtaaagttgaatttggaaaaaataaaaagaaagccttgtttggtatagttcaaggcggactgttcaaagacttaaggcacgaaagccttgatagattactagaaatcaattttgatggatatgcgataggcggtttagcagttggagaaactcaagaacaaatgtttaaagttttggaaaatacagttcatttacttccacaaaataagcctaggtatttaatgggtgttggaacaccttctgacattttaggggcagtaaaaaatggaattgacatgtttgattgtgtattacctactcgatctggtagaactggtcttgcatttacttgggaaggaaaattaaatcttaaaaattctaaatttaaatttgataaaactcctcttgacaaaacgacaaaacttagaaatttaaatctatattcgaaaagttacctaaatcatttaatcaaaactaatgagattcttgcttctatgattatttctctccacaaatgt

SEQ ID NO: 239784 - DNA, 649 bp, Unknown
  Bacterial polypeptide expressing nucleotide sequence isolated from the Sargasso Sea
atggaatctaatatctataggttaatagcagaagatgggcttgccagaaggggtgagataaaaacccaacatggtaaatttcaaacacccgcttttatgcctgtagggacttatggcgctgttaaagcattaagtcctagaattttaggagacttagaggctgaaattatcctctctaacacctatcatctgatggaaagaccaggtgtagatattattaaagctcatggcggtctacataattttatgggatggaattctcctattttaacagactcaggcggatatcaagttttcagcctttcaaaaaaaagaactataaccgatgaaggagttcagtttttctctctcttgaatggagataagagatatttaacgccggaatcatgcatgcaacttcaactggattatggtgtcgatatcgctatggtccttgatgaatgcacgccttatccaatagcagaagacgctgccaaaaaatccatgcaactatcacttagatgggcagatcgttgtcgtaaggcttttaaaactgaaaacgcgtctctatttgggatagtccagggaggtgtttttaataatctaagagaagattcattaggagaattaatagagataaattttgaaggatatgcaatcggaggtcttt

SEQ ID NO: 239785 - DNA, 1006 bp, Unknown
  Bacterial polypeptide expressing nucleotide sequence isolated from the Sargasso Sea
atggcatataaattaatttcaaattatgaaaatgctcgagctggattattgtctattaataatattgaagtacagacacctacatttatgcctgttgctacaagaggttcaattaaatctactcctcatcaatatctagataagacctcaatacttctagcaaatgcatatcatcttcatctaagaccaggagcgcagttaataaatgatttaggtgggttacataactttatgaactgggataaattaatactcactgactctggaggtttccaagcttggtcattaccaaccaaattattaaatgatggtattgaatttaaaaatgtatatgatgggtccttttttaaaatgactcctgaagaatcaatcaacacacaaaatctattaggcagtgatattgcaatgatatttgattatttaattgattatgacagatcagatgatgatcaaaagaaagcaatagaaataacaagtcagtgggctgaaagagcaaaaagtgtgcataaaaacaataaacaagatttgtttggcatagttcaaggaggtttaaatcttgatttaagagaaacttcagcaaaatcaatgatcgaattagaatttgatggatatgcaattggtggactagcaatcggcgaaacaagtactgaaagaaaaaagatcgtagaacatttaaattcaatacttccaatagataagccaagatatgttatgggcttaggtgacactgtaggtttaattgatttaattgattctggtgttgacatgtttgattgtgtttggcctgcaagacttgcaaggcatggtaaattaataactcgtaatacatacatcaacataaaaaatcaaaaatttaaaaatgatgacaatcccatagatattaattgcaaatgctttacctgtttaaatttttcaagagcttatttacgtcatctttttacaaatgaaatacaactttcttggttatatttaactgttcataatataattcaaactgaaacaatta

SEQ ID NO: 239786 - DNA, 300 bp, Unknown
  Bacterial polypeptide expressing nucleotide sequence isolated from the Sargasso Sea
aatgacattaaaaaatttttcttttgatgtcataaagaaagataaaaatgcaagattaggtagaatatcaactcatcgaggtgatattgatacacctgtattcatgcctgttggcactcaagctactattaaaggcgcttttataaatgatattaaaaatacgggcgctcaaataattttatgtaatacatatcatctaatgatcagaccaggagttgaaagagttagttctcaaggcggactccataaatttatgaattgttcattaccgatacttactgactctggaggatttcaggt

SEQ ID NO: 239787 - DNA, 842 bp, Unknown
  Bacterial polypeptide expressing nucleotide sequence isolated from the Sargasso Sea
aatgtcatttcaaatcacagctcaagattctaattcaagtgcaagatgtggagtattgaaattaaatagaatgaatttaactacaccattattcatgccggtttgtacaaatgcaacgccaaaagcattggatttcataaaattaaaagaaattgggtttgagatggtagtttgcaatgcttaccatttattcttgaggccaggtagttcgtatataaaagacaagtttaatagcttgcatgaatttagcaattgggacaatgcaatattaactgatagtggcggctttcaagtttggagcttaggttcttcggttaagattcatgatgatggagttttgatcaaatctcatattgatggttccctaaatgatataactccagaactttcaatacaaactcaagaagaattaaattctgatataatgatgattttcgatgattgcccaaatcctgactctgaatattcattattattgaaatctatcaatagaactaaagattgggctagacgatgtaaagatgccaagaaaactaagaaccttttgtttgggatagtgcagggtggaatttatgatgatttaagagaattatctgcaacacatatgattgaaataggttttgacggctatgctataggcggtctaggtttgggagagggtcaaagcaaaacttatgaaataaccagaaatcttgataagatactgcctacaaataaaccaagatattcaatgggcattggaaagcccgaggatattctagaatctgttgagcatgggatagatatatttgattgtgtagttcctacaagaaatgcgagaaaatggaactttattctcgttt

SEQ ID NO: 239788 - DNA, 828 bp, Unknown
  Bacterial polypeptide expressing nucleotide sequence isolated from the Sargasso Sea
aatgaagtttaaaactaaaaatacagccaattttgcaagagcatctgaaatacaactatcaagaggcaaaatcaatacgccagcatttatgccagttggcactaatggaactgtaaaaggcttaacagtagatgacttaaatgagactggttcagagataatcctcggaaatactttccatcttatgctgaggcctggcgatgaattaattaagaatataggtggactgcataaatttattaattgggataaacctattcttactgactcaggaggattccaggtatggagccttggcgatttggctaaaatttctgaagatggtgttaaattcagctctccatatgatggtaaaaaaattttcatgcgacctgaagattcaattatgattcaggagaaccttggctcagatattattatggtatttgacgagtgcactgattatccttcaacttacgaagatgcaaaaaaatcaatggaactttctatgagatgggcaaagagatgcaaagcagcgcaaaaatctaaatcagcattatttggaattgttcagggaggcatgttcaaagatttaagagaagagtctttaaacaaattaattgaaattgatttcgatggaattgcacttggtggattaagtgttggtgaatctaaacaggagaaaactgaaatattagagtttatgtgtgataagttgcctgaggataaaccaagatatctaatgggcattggcactcctgaggatattgttgaagctgtgaggtatggcatcgatatgtttgattgtgttcttccaactagaaatgccaggaatggacaactatttac

SEQ ID NO: 239789 - DNA, 739 bp, Unknown
  Bacterial polypeptide expressing nucleotide sequence isolated from the Sargasso Sea
atgaattcaaaaaaagatttttttgaattaataaaaactgaaaatcaagccagattaggaaaaatcactacatcaagaggtattattgatactccaacctttatgcctgttggtacccaaggtacggttaaaagtatttttgtagatgatattttaaaaacaaatacacaaataattttaggtaatacctatcacttatttttaaggcctggtttagatattttaaaaaacattgggggtttgcatcaatttatgaattggcataaaccaatattaacagactcaggtggttttcaaataatgtctctttcaaaatttagaaagattgataaaaaagaaggtgcaattttcacatctcatttagatggaaaaaaaatagttttaagtcctgaaaaaagtattcaaatacaaaaaacaattaactcagatatccttatggttttagatgagtgtcctactttaaccaatgataagaaaattatagctaatgcaattgatgtttctacagaatgggcagaaagatcaaaaaaagagtttaacagcgcagataaaaaatttttgtttggaattgttcagggaggtttatttagcgatttaagagtcgaaagtcttgaaaaattattagaaattggtttcgacggctatgctattggtggacttgctgtaggagaaaagcaagatgaaatatttaatgttttagatgttattacaaaaaagctgccaaatgataaaccaagat

SEQ ID NO: 239790 - DNA, 613 bp, Unknown
  Bacterial polypeptide expressing nucleotide sequence isolated from the Sargasso Sea
tatgaaatttgatttaaaatgtattgataaattttcccaagctagagctggaagtatttataccgaacgtggtcttattaagactccaatatttatgcctgttggtacttctgctactgtaaaaggagttcatcaaagggaactagaaaatgatataaaaccagatatcattttagctaatacatatcatttatatttaaaacccaatacaaaaatcatagaggcctctggagggattcataaatttatgaattggaacaaaccaattctaactgattcaggtggatatcaagtttattcactttcagcaaatcgaaaaatcaaagaagaaggtgtaaaatttaaatcgcatattgatggatcatttcattttttttcaccagagtcagctatttccatccaaagaaaaataggtgctgacataataatggcttttgatgaatgcacaccatatccttgtaattttaaatatgctaaattatcaatgaaaagaacacatagatggctaaataggtgtatgattcaaaataaaaaagaaaattttaattattcatatccacaaattttttttccaattgttcaaggaagtatttacaaagaattaagaaaagaa

SEQ ID NO: 239791 - DNA, 673 bp, Unknown
  Bacterial polypeptide expressing nucleotide sequence isolated from the Sargasso Sea
ttgtttctcaagctgggaggattgcataaatttatgaattgggatggcgctatcttaactgattcgggaggctttcaaatttttagtttagaaggttttagaaagctatcggatgacggagtgacatttcgttcacatttggatggatcaaagcatcattttactccagaaaaaattgtggatattcagcgacaaataggttcagattttatgatgatgctagatgtatgtccctcaggtggtggcagtaaaaaaatatggctagatgctttaaaaactacgacaaattgggcaaagcgtagtttaaattatttcaaaaatactgagtcaatgtataatcataatcaaatattaattcctattgttcaaggaggaacggattttgaattgcgcaaacggtcagctaatgaattatgtgagctagatactgaggcatatgctattggagggttagctgttggagaaccaaaacctgaaatgttagatacagtagaatatatgaatgaattattgccatttgataaacctcgttatttaatgggggttgggacacccgcagatttagttagaaatgtttcgagaggtgttgatatgtttgattgcgtaatacctactagaaatgctagaaatggtcagctatttacctttaatggaaagctccacattaaaaata

SEQ ID NO: 239792 - DNA, 616 bp, Unknown
  Bacterial polypeptide expressing nucleotide sequence isolated from the Sargasso Sea
atgaaattaaaaaatttcaaatttaatgttcatcatactgaaaattattcaagagtaggtttaatagaaacacacagaggaaatattaatacgccagcatttatgcctgttggcactcaagcaacaattaagggagcgtttattgatgatgttatcaaaacaggaagcgagatcattttgtctaatacttaccatttgatgattagaccaggcgtagaaagaataaaaaatattggaggtttgcataaatttatgaactgtaaattgcctatattaacagattctggtggtttccaagtaatgtcactttcaaatcttaataaaattgattatgaaaaaggtgcaatatttaaatctcatttagatggtaaaacttttgtattaagtccagaagaaagtattaaaattcaaaaaggtttaaattcagatattgttatggttatggatgaatgtccaaaaaattcaaatgattatgataaaataaaaaaatcaatgaatctctcaagttattgggcacaaagatcaaaaatcgaatttggtgataatccacacaaaggtttatttggaatagtccaaggtggtttatttaatgatttaagaaataaagtcacttaac

SEQ ID NO: 239793 - DNA, 810 bp, Unknown
  Bacterial polypeptide expressing nucleotide sequence isolated from the Sargasso Sea
gatggaagacataaagaatttttcttttagcgtaaaacatcaaagtaaaaattatcgtgtaggattaattcaaacacatcgtggtgaaattaatactcctgcatttatgccagtaggcacccaagctacggtcaaaggagtttttatcgatgatattattaagacaggaagcgaaataattctatcaaatacctatcatttaatgattagacctggcacagacaggatcgaagcagtaggtggattacataaatttatgaattgtaaacttcctattttgactgactctggtggttatcaagtgatgtctttgtcaaaatttaacaaaattgataaagacaaaggagcgatttttcaatcacatatcgatggaaaaacttttattttaagtcctgaggaaagtattaaaattcaaaaaaaactcaactcagatattgtgatggtaatggatgagtgtccaaaaaatacgaatgattataatataattaaaatttctatggatttatctactgaatgggctagacgatcaaaagcagaatttggaacaaatccacacaaagctttgtttggtattgttcaaggtggattatttaaagatttaagaaatgagtcccttaataaattaatagacatagaatttgatggatatgctattggtggtctagcagttggagaaactcaaaaagaaatgtttgatgtattagatggcatcaaagacaatttaccaattgataaaccaagatatttaatgggtgtaggaactccatcagatatattaggagcagttaagaggggaatagatatgttcga

SEQ ID NO: 239794 - DNA, 919 bp, Unknown
  Bacterial polypeptide expressing nucleotide sequence isolated from the Sargasso Sea
cctgggagaaaaactagttaaagaatccggcggaatacataagttcatgaattggcctcgtcctattcttactgattcaggaggatatcaagtttttagtttggccaaattaaataatatttctgataagggtgtggaatttaaaaatccaagaaatggtagtcatgtttttttatcacctgaaaaagttatacagattcaaatggatcttggatcggatgttgcgatggcttttgatcattgtcctccgcatacagctaacgaaaatgatattgaggactctctgcaaagaactcatttatggttgaaaaaatgtgtcgagacccatcagaaatccaatcaagcattattcggtatagttcaaggtggaaagtatccgagattcagagaatacagtgcaaaatatacaagttcttttgatctgcctggaatagcagtgggaggtgtaagtgttggcgaggcagtcgaagaaatacatggtgtaattaattacgtcccgaaattcttaccaataaataaaccaagatatttaatgggaattggttctttaaaagaaatttctctagctgttgctaatggtttcgatatatttgactgtgttttgcctacaagactaggaagacatgggactgcattttttaatgatgaacgattaaatttgcgaaatgctcgatttaaaaatgacttttctccgattgacaaaacttgtaaatgcgaaacctgtaaatcctattctcgagcatatttgcatcatctaataagaaatgatgaaatattaggactaactctcataagtttgcataatattgctcacttaataagatttaccaatgcaatttctactgcaattagagataattgttttacaaatgatttcgctccttggaaaacatcctctattgctcaccatacgtggtaa

SEQ ID NO: 239795 - DNA, 493 bp, Unknown
  Bacterial polypeptide expressing nucleotide sequence isolated from the Sargasso Sea
aatggcattaaaaaattttgcctttaaagtcttaaaaacagataaatttgcaagatgcggtttaattaaaactcatagaggcgatattaatacccctgcattcatgcctgttggaacccaagcaacagttaaagcctgtacaatagacgatataaaaaaaacaggatctgaaataattttatctaacacatatcatttaatgataaggcctggtgttgagagaatacaacttgctggaggtttgcataattttatgaattgtgatcttcctattctaactgattcaggtggatttcaggtaatgtctttatctaaacttaataaaattgacagagaaaaaggtgctatatttaattcacacgttgatggtaaaaaattttttttaagtcctgaagaaagtattagaattcaattaggtcttaattcagatatcgtgatgattatggatgaatgtccaaaaaaatcagatgattacaatttaattaaaaaatct

SEQ ID NO: 239796 - DNA, 658 bp, Unknown
  Bacterial polypeptide expressing nucleotide sequence isolated from the Sargasso Sea
atgaaattctctataaagaaaaaatataaaaatgcaagaagcggttatctagaactgaaaaatggaaatgttcaaacacctacatttatgacaattgggacatatggttctgtcaaatctttatcaagtgaagatttattaagatgcggatgtgaaatcttactctgtaatgcatatcacctcatgcttagacctggtttggatgttataactaggggcggacatcttcataagtttatgaattgggataaacctatactaactgattctggaggctatcaagttttcagtctaagcaagaatgttaaagtcaataaggatgctgcggtatttaaatcaccatataatggtgatgagatcattatgactccagaaaaatcaataaaaactcaaattgctcttggaagcgatatcatgatgatatttgatgagtgtactccgtatcctgttgacaaagacaaagcaaatgaatctatgagattgtcactagattgggcagagttatctaaaaaggctaacgactcacagtcaccgctttttggtattgttcaaggtggtatgtataaagatttaagagaagaatctatgaaaaatttaaacaagctagattttgatggatatgcccttgggggactatctgtaggtgagccccagtaaa

SEQ ID NO: 239797 - DNA, 628 bp, Unknown
  Bacterial polypeptide expressing nucleotide sequence isolated from the Sargasso Sea
ttgagtttaaaaaatttttcttttaaagtaaaaaataaagataaattttctcggacaggaacgattattacttctagaggtaacattgatactcctgtttttatgcctgttggaacccaagcaacagtaaaagcaacttttatcgatgacttaattaaagctggaagtcaaataattttatctaacacatatcatttaatgattagacctggtgaagaaagagtagcacttcaaggaggattacacgaatttatgaattgtccattaccgattttaactgactcaggcggttatcaagttatgtctctttcaaaattaaataaaatcgatagagagaggggagctatatttaattctcatgttgatggaaagcaatatactcttagtccagaagaaagcataagaattcaaaaaaaacttaattcagacatcgttatggttatggatgagtgtccaaaaaaaactacagacagaaaaattattgaaaactccttagacttatcgactgaatgggcattaagatcaaaaaattcttttggaaaaaatcctcacaagggtctttttggaattgttcaaggtggtttattaaatgatttaagaaaaaaatccttagaggatctaattgata

SEQ ID NO: 239798 - DNA, 892 bp, Unknown
  Bacterial polypeptide expressing nucleotide sequence isolated from the Sargasso Sea
tatgcccgtgggtactttggctaccgttaaaggtatttcatctaagcagttaacctcgacagggtcagaaatgattctctcaaatacatttcatcttcatttacagcctggagaaaaattagttaaagaatctggcggaatacataagttcatgaattggcataagcctattcttactgattcaggaggatatcaagtttttagtttggccaaattaaataatatttctgataaaggtgtggaatttaaaaatccaagagatggtagtcatgtatttttatcacctgaaaaagtaatacagattcaaatggatctaggatcggatgttgccatggcttttgatcattgtcctcctcatacagctaacgaaaatgatattgaggactctttacaaagaacgcattcatggttgcaaaaatgtgttgaaactcatcagaaatccaatcaagcactattcggaatagttcaaggtggtaagtatccgagattaagagagtacagtgcaaaatttacaagtgcttttgatttgcctggaatagcagtcggaggtgtaagtgttggcgaggcagttgaagaaatacatagtgtaattaattacgtccctaaattcttaccaatcaacaaaccaagatatctaatgggaattggctctttaagagaaatttctttagctgttgctaatggattcgatatatttgactgtgttttacctacaaggctaggaagacatggaactgcattatttaataatgaaagattgaatttgcgaaatgctcgatttaaaaatgacttttctccgattgacaaaacttgtaaatgcgagacatgtaaatcctattctcaagcatatttgcatcatctaattagaaatgaagaaatattaggcctcacc

SEQ ID NO: 239799 - DNA, 868 bp, Unknown
  Bacterial polypeptide expressing nucleotide sequence isolated from the Sargasso Sea
tatgctgaggcctggcgataaattaattaagaatataggcggactgcataaatttattaattgggataaacctattcttactgattcaggaggattccaggtatggagccttggtgatttggctaaaatttctgaagatggtgttaagttcagttctccatatgatggtaaaaaaattttcatgcgacctgaagattcaattatgattcaggagaatcttggctcagatattattatggtatttgacgagtgcactgattatccttcaacttatgaagaagcaaaaaaatcaatggaactttctatgagatgggcaaagagatgcaaagcagcgcataaatctaaatcatcattatttggaattgttcagggaggcatgttcaaagatttgagagaagagtctttaaacaaattaattgaaattgattttgatggaattgcacttggtggattaagtgttggtgaatctaaacaggagaaaactgaaatattagagtttatgtgtgataagttgcctgaaaataaaccaagatatctgatgggcgttggtactcctgaagatattgttgaagctgtaaggtatggcattgatatgtttgattgtgttcttccaacaagaaatgccaggaatggacaattatttacctctgaaggcgtaataaatattagaaatgcagaatataaagactgtgatgatcctatcgatatgaattgtaataataaagtatctcaaaattacagcagggcatacctcaaccatttacatagaactaatgaaatgcttggagcaatgttggctacttatcataatatctcttattaccagtcattaatgaatgatattagaagtgcaataaaagataattta

SEQ ID NO: 239800 - DNA, 475 bp, Unknown
  Bacterial polypeptide expressing nucleotide sequence isolated from the Sargasso Sea
gatgcaatttaaagtttcatctttatccggttatgcaaggcggggagaattaagtttttcaagagggaaagtgcaaactcctgcttttatgccagtcggtacaaacggaactgtaaaggctttggaggttgagaaccttgaagaaactggttcagaaattatccttggaaatacctatcacctaatgcttagactaggagatgagctggtgaaacaattcggcggtttgcacaaattttctaattgggataaaccaattttgacagattcaggaggttttcaggtttggagtcttggagatcttgcaaaaattaccgaagagggcataagttttcaatctccctatgatggaaataagtgttttatgagaccagaggattcaatgcgcattcaagcaaaccttggctcagatattgttatggtacttgatgaatgcaccccatatcctgctgaatatgagcaagcaaaagcttca

SEQ ID NO: 239801 - DNA, 802 bp, Unknown
  Bacterial polypeptide expressing nucleotide sequence isolated from the Sargasso Sea
ggggttgaattcttctccccactgaatggagataaaaagtatctaacgccagaatcgtgcatgcaattacagcttgattacggtgttgatattgcaatggtgttagatgaatgcactccatatccagtcacagaagatattgctaaaaaatcaatgcaactatcacttagatgggctaaaagatgtcgttcatcatttaaatccgagagctcttctctgtttgggataattcaaggaggagtctttaataatcttagagaagattcactggctgagttaatagaacttaattttgaaggttatgcaattggaggtctttcagtaggcgaaccaaaaggagaaatggataaagttgtaaatcacataatgccaaaaatgcctgaggataagccaaggtatttgatgggggtaggtactcctttagatatagttaaagccgttcaactaggggtagatatgtttgattgtgtaattccaacaagacacgcccgcaatggctatctgtacacttcgaaaggtatagtcaaaataagaaatagtgagaataaaaataatcttgaacccctggacgcacattgttcttgttacacatgcagtaacttttcaagaagttacttgcaccatttagataaaacaaaagagatgcttggatctatgcttcagacaattcataatctgcattattatttaagtcttatgagaaatttgcgactatctattgaaacaggtacattgcaaacctttatcaaagaatttgaagatacttggaataatattgataaccccaacatagttatttaag

SEQ ID NO: 239802 - DNA, 420 bp, Unknown
  Bacterial polypeptide expressing nucleotide sequence isolated from the Sargasso Sea
ttacttcagttctcccatttaataagcctagatatcttatgggagttggaactccaataaatttacttgaaaatatagctttaggaattgatatgtttgactgtgtaatgccaactagaaatgctagaaatggaatgatttttacaaaaaatggtactattaacatcaaaaacaaaaaatgggaattggatttttcagtattagatcctgacaactattgttttgttgatattaattattctaaatcttatgtcaggcatttgtttactgttaatgaaatgctaggtaaacaaatatgtactatacataatcttgcattttacatgtggttggttcgagaatcaagaaaacatatattagtaggagattttgtttcttggaaagaaaaaatgataaaaaatttgggtcaacgcatataaa

SEQ ID NO: 239803 - DNA, 784 bp, Unknown
  Bacterial polypeptide expressing nucleotide sequence isolated from the Sargasso Sea
tagagaaaaaggagcaatcttcaactctcatatagacggaaaaaaattttatttaagtcctgaagaaagtatacgcatacaacttggattaaattcggatattgtaatgattatggatgaatgcccaaaaaaaacgacagattataatacaattaaaaaatctatggatttatctctatactgggctgaaagatcaaaaaaggcttatggtaaaaatccacacaaagcattatttggaataatacaaggaggtctatttaaagatttaagacaacagtctttagatggattaatgaaaattaattttgatgggtatgctctaggaggactggcagttggggagtctcaaaaagagatgtttgaggtgcttgacaatatcaaatctaatttaccaataaaaaaacctcgttacttaatgggtgttggaacaccttcagatatattaggtgcagttaaaagaggtatagatatgttcgattgcgtattgccaactagatcaggtagaacaggtttagcttttacttggaatggaagaataaatatcaaaaatcgtaaatatcaaaaggataattcacctttagatctaaattgtgataacttaaatctaaacaagtattcaaagaactatttgaaccatttatttaatactaatgaaatactagcatctatgcttctaactttacataatattaatttttatcaacaattaatggagtctattcgtgagaatatacacagaggaacgtttgatcaatttcacgataaatacataaataagttgtaa

SEQ ID NO: 239804 - DNA, 844 bp, Unknown
  Bacterial polypeptide expressing nucleotide sequence isolated from the Sargasso Sea
tgatttacctatcttaacagactcgggtggttttcaagtaatgtctctatctaaattaaataaaattgataaagaaaaaggagcaatttttaattcacatatagatggtaaaaaatattatttaagtcccgaggaaagtattaaaatacaattaggtttaaattcagatattgtgatgattatggatgaatgtccaaagaaaagtagagattataaacttatagaaaaatccatgaatttatctctttactgggctgaacgatcaaaaaaagcttttggccacaatccccacaaagctttatttggaattatacaaggtggtttatttaaagatttaagagaaaaatctttagaggaattaataaaaataggatttgatggttatgctatcggaggacttgctgttggtgaaagtcaaaacgaaatgtttaaagttttagacaacattaaagatcttttacctgataataaacctcattatttaatgggtgttggtacaccttctgacatactcggagcagttaaaagaggaatagatatgtttgattgtgtattaccgacaagatcaggtcgcacaggtttggcgtttacgtgggagggaagggttaatataaagaataataaatataaaaaagataacaatcccctagacctaaattgttcaaatttaaatttaaataaatattctaaaaattatctaaatcatttatttaatactaatgaaatacttgcttctatgcttttgactcttcataatataaatttttatcaagaattaatgagcgctattagagaaaatatcaataatggcacttttgacgagtttcatgataaatacattgat

SEQ ID NO: 239805 - DNA, 518 bp, Unknown
  Bacterial polypeptide expressing nucleotide sequence isolated from the Sargasso Sea
atccaaggtgggacaagtaaaaaatttagagaaatttctgcaaaacaactttgtgcattagaagattatgatggttttgctattggtggattaagtgttggtgaaccaaatcaagatatgtatgatacagttgagtggactacacaatttatgcctgaagataaaccaagatacttaatgggagttggaacacctgaagacttgattgagaacatcgaaagaggtgttgatatgtttgattgtgtaatgccaactagaaatgcaagaaatggtggattatttacatcatttgggaaacttcatattaaaaatgcaaaattcaaagaagatccaaacccaatagatcctgaatgcgattgttatacttgtcaaaactttacaagagcctatataaaccacttatttagagctggagaaattacatattatagattagcttcaatccataatttacactactatttaagtttaatgaaacaagcaagagctgctattttagaagatagatggactgagtt

SEQ ID NO: 239806 - DNA, 946 bp, Unknown
  Bacterial polypeptide expressing nucleotide sequence isolated from the Sargasso Sea
ttcatctaagcagttaacctcgacaggatcagaaatgattcttcaaaatacttttcatcttcatttacaacctggagaaaaattagttaaagaatctggtggaatacataaattcatgaattggcctaagcctattcttactgattcaggaggatatcaagtgtttagcttggccaaattaaataatatttctgataaaggcgtggaatttaaaaatcctagagatggtagtcatgtatttttatcacctgaaaaagtaatacagattcaaatggatcttggatcagatgttgccatggcttttgatcattgtcctccgcacacagctaatgaaaatgatattgaggactctttagaaagaactcattcatggctacaaaaaagtgttgaggttcatcataaatccaatcaagcattattcggtatagttcaaggcggtaagtatcctagattaagagaatatagtgcgaaatttacaagttcttttgatctgcctgggatagcagtggggggtgtaagtgttggcgaggcagtcgaagaaatacatagtgtaattaattacgtcccgaaattcctaccaataaataaaccaagatatttaatgggaattggctctttaaaagaaatttctttagctgttgcaaatggattcgatatatttgactgtgttttgcctacaagactaggaagacatgggactgctttttttaatgatgaaagattgaacttgcgaaatgctcgatttaaaaatgacttttctccaattgacaaaacttgcaaatgcgaaacctgtaagtcgtattctcgtgcatatttgcatcatctaattagaaatgacgaaatattaggcctttccctcataagtttgcataatattgctcatttaataagatttaccaatgctatttctcttgcagttaaagataattgttttacaattgatttc

SEQ ID NO: 239807 - DNA, 688 bp, Unknown
  Bacterial polypeptide expressing nucleotide sequence isolated from the Sargasso Sea
agagctagaaatggaatattaactactccacatggcaaaattaataccccagcatttattttttgtgcaactaaaggtgctttgaaatcatcaacaactactgcagctaaagataataatacgcagattattttatcaaatacataccatttgatgcttcagccaggaagtgatttgatagcaagtcatggtggcttacataaatttttaaactggaacggcccaatgttaacagatagtggcggcttccagatattttcattaggtcatggctcagtagcagatgagataaaaggaagttctaatattaaaagaaagaaaacattattaaatattagtgaagaggggagtttattcaaatcttatgttgatggatcaattaaatttttatccccagagaaatcaattgaaactcaaagaaatcttggtgctgatttagtattagtttttgatgaatgtactccttttcatgtagataaatcttatactgaaagatcaatgagaagaagtcatagatgggcaaccagatcattaaatcgtttcaattcagatattaaatttaaacctagttttggttcagcaggagaacaaaaattatatagtattgttcaaggaggtatttatgaggaccttagagaggaaagtatagattttaatttaaatgaaattgatacatttggtatagcta

SEQ ID NO: 239808 - DNA, 769 bp, Unknown
  Bacterial polypeptide expressing nucleotide sequence isolated from the Sargasso Sea
tcaagccacagttaaaggcgtttttattgacgatattattaaaacaggaagtgaaataattctttcaaatacttatcatttaatgattagacctggaactgagcggatagaggcagttggcgggttacataaatttatgaattgcaaacttcctattttgaccgactccggaggttatcaagtgatgtctttatcgaaatttaataaaattgatagagataaaggagcaatttttcagtcacatatagatggaaaaacttttattttaagtcctgagcaaagtattaaaattcaaaaaaaacttgattcagacattgttatggtgatggatgagtgtccaaaaaatactaacgattataatgtaattaaaacctctatggatttatcgacagagtgggctttacgatctaaggaagaatttggaataaatccgcaaaaagctttgtttggtatagttcaaggtggattatttaaagatttaagaaatgaatctcttgataaattaatagatatagaattcgacgggtatgctattggtggcctagcagttggagaaactcaaaaggaaatgtttgatgttttagattatatcaaagataacttaccaattgataaaccaagatatttaatgggggtgggaactccatctgatatattaggtgccgttaagagaggaattgatatgtttgattgtgtcttaccaaccagatcaggacgaactggattagcttttacttggaatggcagaattcaaataagaaattctgaa

SEQ ID NO: 239809 - DNA, 625 bp, Unknown
  Bacterial polypeptide expressing nucleotide sequence isolated from the Sargasso Sea
atgattcagtttgaaattgaggccctaaacaataattcccgtgcgggagtattactcactccagacggatcaatccacacacctgtatttatgcctgtaggaactcttgcaacagtaaagggcatgacgacagtagaaattaaggaactgggcgccgaaataattttggggaatacttaccatttgcaccttcgtccaggtgattctgtaattagaaagatgggtggtcttcaaaagttcatgaactgggacagacccattttgactgacagtggaggattccagatattttcattggcaagactgctcaatcttaatgaagaaggtgtgataattcgcagccatattgatggatcaaaaataaaactaactcctgaaatttcgattgctattcagcaaaatcttggatccacaatcatgatgtgcctagatgaatgtctgaaaatgccttcatcgcgccaggaggtagaacgctctataggcttaaccgcaaaatgggcaaggcgtagcaaagaagccagcctgaatgaatctgatgtgtttaaagaacaggctctttttggcatcatacagggaggtcatgagcttgacttacgtgaacaatccatgcatcaaattgtgagat

SEQ ID NO: 239810 - DNA, 886 bp, Unknown
  Bacterial polypeptide expressing nucleotide sequence isolated from the Sargasso Sea
ggtatagaaattttaaaaaaatttaaaggacttcataaatttatgaattggaataaaccaatattgacagactctggtggatttcaaattatgtcattatcaaaattgactacaatagataaggaatacggtgctatttttaaatctcatattgatggtaaaaaaattattctaagcccagaaaaaagtatacaagtacagaaattcattaactctgatattttaatggttttagatgaatgtcctaaactaacttggaataagaagacactatctagcgcaatcgaggtttcgactaattgggctaagcggagcaaagtagaatttggaagaaataaaaaaaagggtttatttggtattgtccaaggaggtttatacaaagatctgagacaagaaagcattgaaaaattaattgaaattaattttgatggttatgctatgggaggattagctgttggtgaaactcaagatgaaatgtttaaaattcttaacgaaacaactaaatttttacctaaagaaaaaccaagatatttaatgggtgccggaactccttcagatattcttggtgccattaatgaaggaatcgatatgtttgactgcgttttaccaactagatctggaagaactggattagcgtttacatggaaaggaaaaattaatcttaaaaattccaaatatcgctcagatttgtcacctttagacccaagctgcaatgtaagaaatcttaaaaaatattcaaaaagttatcttaatcatctaatcaaaactaacgaactcatggcatcaatgttaatttctttacataatatcaatttttatcaacaatttatgagtgaaataagaaaaagcataaagagcggcactttttccagattttataaaaaat

SEQ ID NO: 239811 - DNA, 814 bp, Unknown
  Bacterial polypeptide expressing nucleotide sequence isolated from the Sargasso Sea
aattagtgaagagggtgttaaatttcagtctcatattgatggatcttatcatttttttaatcctgaaaaagtcattgatattcaaagaaagataggtgcagacattataatggcctttgatgaatgtacaccttatccttgtgattacaaatatgctaaaaattcaatgcaaatgactcacaggtggttagatagatgtattataaaagaaaaaaatactccttatttgtatgattttaaccaaacattatttccaattgttcaaggcagtacttataaggatttaagaattgaatcagctgaatatatttgttcaaagaatatgaaaggaaatgcaattggtggtttgtcggtaggagaacctcatgaagaaatgtattctatgacagaattagtttgctctatattacctgaagaaaaacctcgttatttaatgggagttggaactccaattaatttattagaaaatatttccctgggtgtagatatgtttgattgtgttattcctacaagaaatgctagaaatggaatgctttttacttcagatggggtaattaatattaaaaacagaaaatgggagtcggatttctcgccaattgatgaagaatctaatacttttgtagacatcaattattctaaatcgtatttaagacatttatttagtgtaaatgaaattcttggtaaacaaatagctacaattcataatcttggattttatagaagattagttaaagatgccagaaaaagaattattaaaggggattttcaagagtggaaaggaaaaatgataaaaaaaatgaataatagattataa

SEQ ID NO: 239812 - DNA, 965 bp, Unknown
  Bacterial polypeptide expressing nucleotide sequence isolated from the Sargasso Sea
tgtgggtactttggcaacggttaaaggaatttcatctaagcagttaacttctacaggatcagaaatgattctctcaaatacctttcatcttcatctacaacctggagaaaaattagttaaagaatctggtggaattcataagttcatgaattggcctaagcctattcttactgattcaggtggatatcaagtttttagtttggccaaattaaataatatttctgataaaggtgtggaatttaagaatccaagagatggtagtcatgtatttttatcacctgaaaaagtaatgcagattcaaatggatcttggctcggatgttgcgatggcttttgatcattgtcctccccatacagctaacgaaaatgatattgaggactctttacaaagaactcattcatggttgcaaaaatgtgttgagactcatcagaaatccaatcaagcactattcggaatagttcaaggtggtaagtatccgagactaagagaatatagcgcgaaatttacaagttcttttgatctgcctggaatagcagtaggaggtgtcagtgttggagaggcagtagaagaaatacatagtgtaattaattacgtccctaaattcttaccaataaataaaccaagatatttaatgggaattggctctttaagagaaatttctttagctgttgctaatggattcgatctatttgactgtgttttgcctacaagattaggaagacatgggactgcattttttaatgatgaaagattgaatttgcgaaatgcacgatttaaaaatgacttttctccgattgacaaaacttgtaaatgcgaaacctgtaattcctattctcgtgcatatttgcatcatctaattagaaatgacgaaatattaggcctcaccctcataagtttgcataatattgctcatataataagatttaccaatgcaatttctactgcaattaaagataattgtttta

SEQ ID NO: 239813 - DNA, 742 bp, Unknown
  Bacterial polypeptide expressing nucleotide sequence isolated from the Sargasso Sea
atgtataaacttatagcaaaagatggagaagctcgaaggggggaagtgtctacagagcatggaatattccagactccagcttttatgcctgttggtacctatggtgctgtaaagtctataagccctgaaatcttacattcaataaatgcagagataattttatctaatacctatcatctaatggagcgaccaggtgttgatattattaaattgaatggaggattgcacaattttatgtcatgggacaaaccaattttaactgactcaggaggttatcaagttttcagtcttgcgaaaaagaggaaaataagcgaagagggagtggaatttaactcagctttgaatggaaataaattattcttaaatccagaaaaatgtatggaactacagcagtcttatggggttgatatagctatggtccttgatgaatgtacaccttatccagcggagatatcggtagcagagaaatctatgcaattgtccttaagatgggcggaaagatctagaaactcctttaaaagcaataaatcaagtttgtttggaataatacaaggcggtgtttatggtgatcttagagagcagtctttagaggggctgaaaagaatggattttgagggatatgccataggaggattatctgtaggagagcctaaagatgacttacgtaaaattactaatttaattgccccaaaaatgccagtagataaaccccgcttatttaatgggagtaggcacgcccctt

SEQ ID NO: 239814 - DNA, 532 bp, Unknown
  Bacterial polypeptide expressing nucleotide sequence isolated from the Sargasso Sea
agtcttcgaaaaactatctgagttaaattttgaaggctatgcaataggaggcttggctgttggagagggtcaagaattaatgtttgaaactttagataatacaacaaaatttatgttggaaaataaaccaagatatttaatgggtgtaggtaagccggatgatcttataggggcaataaaaagaggtgttgacatgtttgattgtgttttgcccactcgctcgggaagaactggacaagcattcacttctaaaggtcaagtaaatataaaaaattctaggcatagtttagatacaagacccttagacataaattgtagttgtgacacttgtagaaattattcaagagcttatcttcaccatcttttcaaagctcaagaaattttagggcttatgctcttaagtttacacaatattcatttttatttgaatttgatgaaaaatattagagagtctataaagaatagtgattttgataagtttgaaaaaacttttctagaaaattattattcaggtgatattgatataatctag

SEQ ID NO: 239815 - DNA, 787 bp, Unknown
  Bacterial polypeptide expressing nucleotide sequence isolated from the Sargasso Sea
tctacatcaattcatgtcgtggaacaaactttttttaacggactcaggcggttatcaagtgtttagtctagcgaagaatcgaaaaattacggaagaaggagttgaattcaattcttctttaaacggaaataaacttactctaacacctgagatttgtatggatcttcaaacaggttatggcatagacatagctatggtgttagatgagtgcacaccgtatccagcaaccaatatagaagctgaggaatcaatgaacttgtctataagatgggcccaacgctcaagagatgcttttaaaagcaataaggcaagtctatttggaattatacagggtggtgttttcgaagagcttagagaaaaatctttagaagagcttttaaaaatagaatttgaaggttatgcattaggtgggttgtctgttggagagcctaaagaagacctctatcgtattgttaaacacatagcgcccaagatgcccgagaataagcctaggtatttaatgggagttgggactcctttggatatagtgaaatctgttgaaagcgggattgatatgttcgattgtgttatccccacaagacatgcaagaaatggctatctctatacttctaagggggttataaagataagaaatagtcaacatcgagaatctcttaagcctctggacgaaagctgtgattgttatacctgtaaaaacttttcaagaagctatttacaccatttagacaagactaaagagatgttaggttccactcttcaaactattcacaatctcactttttatatt

SEQ ID NO: 239816 - DNA, 642 bp, Unknown
  Bacterial polypeptide expressing nucleotide sequence isolated from the Sargasso Sea
ttaaaaaaattaataaatcgatggatttatcaatgtattgggccgaaagatcaaaaaaagcatttggaaaaaatccacataaggccatttttggaatagttcaaggtggtttatttaaagatttaagaattaaatcattagagggattaattgatattgattttgatggttatgctgttggtggattggctgtaggtgaaagtcagaatgaaatgtttaaagttttagatgatataacttatttaatgcctaatgacaaaccaagatatttaatgggtgttggaactccatctgatattttgggtgctgttaaaaggggtattgatatgttcgactgcgttttgccaacacgatctggtagaactggactagcttttacctggaatggaagaattaatatacgtaattctaaatatcagcatgataatgaacctattgatgttaaaacaaataattttgatttaaataaatattctaaaaattatctaaatcatttatttaatacaaatgaaatgcttggttcaatgttattaactttacataatattaatttttatcaggagctaatgatggcaattagaaaaaatattaaaaatggtacatttcaacaattccatgataaatatgtaaataagttataat

SEQ ID NO: 239817 - DNA, 481 bp, Unknown
  Bacterial polypeptide expressing nucleotide sequence isolated from the Sargasso Sea
aggaggcgtaagtgttggagaggaagtcgaagaaatacatagtgttattaattacgtcccgaaatttttgccgataaataaaccaagatatttaatgggaattggctctttgagagaaatttctttagctgttgctaatggattcgatatatttgactgtgttttgcctacaagactaggaagacatggtactgcattttttaatgatgaaagattgaatttgcgaaatgctcgatttaaaaatgacttttctccgattgacaaaacctgtaattgcgaaacctgtaagtcctattctcgtgcatatttgcatcatctaattagaaatgatgaaatattgggtcttaccctaataagtttgcataatattgctcatttaataagatttaccaatgccatatctaatgcaattaaagataattgttttacaattgatttcgctccttggaaaacatcctctattgctcaccatacgtggtaa

SEQ ID NO: 239818 - DNA, 481 bp, Unknown
  Bacterial polypeptide expressing nucleotide sequence isolated from the Sargasso Sea
ttttgacggttatgctgtaggaggattggcagtaggtgaaacacaaaatgaaatgtttaatgttttagatgatataaaacaatatttaccaattgaaaaaccacattatttaatgggtgttggtacaccatcagatattttgggtgctgtaaaaagaggcatagatatgtttgattgtgttttgcctactagatctggaagaactggcttagcgtttacatggaatgggagggtaaatattaaaaataataagtatcaaaatgataatactccacttgatcctggttgtgaaaatctaaacttaaacaaatattcaaaaaattatctaaatcatttatttaatactaatgaaatattagcttcaatgctattaacgcttcataatattaatttttatcaagaatttatgtcgcaaattagaaaaaatattaattctggcacatttgatgattttcacaataaatacatagataagttgtag

SEQ ID NO: 239819 - DNA, 592 bp, Unknown
  Bacterial polypeptide expressing nucleotide sequence isolated from the Sargasso Sea
caaaattgagtttgataattccaaaaataaatttcttttcggaattgtgcagggtggattgtttgacgacctaagaattgaaagcttagaaaagttgttggaaattaattttgacggatatgctttaggcggattggctgttggagaaaaacaaaatgaaatgtttgaggttctagataatattacaaataaaatgccaaaaaacaaaccgagatacctcatgggtgttggaaccccatcagatttattgggtgctgtcaattcaggtatagacatgtttgattgtgttttaccaaccagatcagggagaactggtcttgcttttacttgggatggaaaagtaaatataagaaattcaaaatataaaaaagatttgaagccactagatgagaatacaaatttgagaagtttaaataaatattcaaaaagctatctaaatcatttaattaatactaatgaaatattagcgtccatgttaatctctttacataatataaacttttaccaagaatttatgaaaaaaattagaacctcaataaaagatggtactttcgatgatttttataaagaaaatatttttaaatttaattag

SEQ ID NO: 239820 - DNA, 598 bp, Unknown
  Bacterial polypeptide expressing nucleotide sequence isolated from the Sargasso Sea
atggaagacataaaaaagaatttttcttttagcgttaaacatcaaaaaaataactatcgtgttggattaattgaaactcatcgtggagtaatcaacacacctgcctttatgcctgtaggcactcaagctactgtgaaaggggtttttattgatgatattattaaaacaggaagcgaaataattctctcaaatacttatcacttaatgattagacctggaacagagaggatcgaggcagttggtggattacataaatttatgaattgtaagcttcctattttaaccgactctggtggttatcaagtgatgtctttatcaaaatttaacaaaattgataaagataaaggagctatttttcaatctcatatagatggtaaaacctttattttaagtcctgaggagagtattaaaattcaaaaaaaacttaattcagatattgttatggtgatggatgagtgtccaaaaaataccaaagattacaacaaaattaaaaactctatggaattgtctacagaatgggcaaaaagatctaagaatgaattcggcaatgaccctcataaagctttgtttggtattgttcaaggtgggtttatttaat

SEQ ID NO: 239821 - DNA, 622 bp, Unknown
  Bacterial polypeptide expressing nucleotide sequence isolated from the Sargasso Sea
actgaaactttcactacattgggcggaacgttctaaaaaagcttttggaaaaaattctaagaaagcactttttggtataattcaaggtggcttatttcatgatttaagactcagatctttattagaattagaaaaaattgggtttgatggttatgctctaggaggtttggctgttggagagtctcaagaagaaatgtttgacgttttagataatatccaaaaacatatgcctattaataaaccacattacctaatgggtgtagggacaccatcagatatactaggagcagtaaaaagaggtattgatatgtttgattgcgtaatgcctacaagatctggaagaactggtttagcatttacttggaatggtagaattaatataaagaataaaaaatttcagaatgacaacgagcctttagatcttaactgctcaaattttaaattaaatcaatattcaaaaaattatttaaatcatttgtttaataccaatgaaattttaggttcaatgcttttgacactcaataatatcaatttttaccaggaattaatgaaagcaataagagaaaatatcaaaaatggaacatttgatcagtttcacgataaatacataggtaagttgtaa

SEQ ID NO: 239822 - DNA, 847 bp, Unknown
  Bacterial polypeptide expressing nucleotide sequence isolated from the Sargasso Sea
attgaaaaattttgaatttaaagttttaaaaaaaaataaattcgcaagacttggcttaatcaaaacccgtagaggtaacattgaaacaccagcttttatgccagtgggaactcaagctacagtaaaagcatgtacaatagatgatattaaaaaaacaggctcgcaaattattctatccaatacttatcatttgatgatacgaccaggtgttaaaagaattgaagatgctggtggacttcacaaatttatgaattgtgatttacccatacttactgactcaggtggttttcaagttatgtctttatcaaaactaaataaaatagataaagaaaaaggtgcaatttttaattcacatattgatggaaaaaaattttatctcagtccagaggaaagtattaaaattcaattagggctcaactcagatattgtaatggtgatggatgaatgccccaaaaaaacaaatgactatcaaattatagataaatcaatgaatttgtctttgtactgggctgaaagatctaagaaagcttttggatccaatcaacacaaagctttatttggtattatacaaggtggtttattcaaagatttaagagaaaaatctttaaaaggacttctagaaattggatttgatgggtatgcattaggaggtttagctgtgggtgaatctcaagatgaaatgtttactgttttagacgatattaaagaacttttacctgaaaataaacctcactatttaatgggtgttggcactccaaatgacattctgggtgctgtcaagagaggtgttgatatgttcgattgtgttcttccaacacgatcaggtagaacaggacttgcttttaca

SEQ ID NO: 239823 - DNA, 712 bp, Unknown
  Bacterial polypeptide expressing nucleotide sequence isolated from the Sargasso Sea
aatgaattcaaaaaaatttttttttgaattgatcaaaactcataaatctgcaaggttaggaaaaattaatacttcgaagggcgaaatcgacacaccagtattcatgcctgttggtacacaaggaactataaaaagtatttttactgacgatgttttaaaaaccggaacacaaataattcttggtaatacttatcatttatttttaagacctggtataaaaatattagaaagttttggtggtctacataattttatgaattggaaaaaaccaatactaacagactctggcggttttcaaattatgtcactatctaaatttactcaaattgataggaataaaggcgcctttttttcttcgcatattgacggtaaaaaatttcttttaagcccagaaaagagtattcaaatacaaaaatcaattaattcagatatcttaatggttttagatgagtgtccaaaattaactacagataaaaaaattatttcaaattcaattgatacatcaacctcttgggcactcagatcaaaaaaagaatttaataatgaaaaagaaaaagctttattcggaattatacaaggtggattatttttagatctgagagaagagagtttaaaaaaattattagatataggttttgatggttatgctattggtggacttgctgttggagagtcgcaggatgaaatgttcaacacagtagaggcaattacg

SEQ ID NO: 239824 - DNA, 310 bp, Unknown
  Bacterial polypeptide expressing nucleotide sequence isolated from the Sargasso Sea
tttgaattttttaattaccacgcaagataaaaagacctcagccagaactggagtaataaaaacagaacatggagatattcaaaccccagtatttatgcctgttgggaccattggcgctgtaaaaacattttctccacacgagctagaaggacttggggcagatataattttaggcaacacatatcatctttatttaaggccagggacagaaataataaatcatgcaggcggtcttcataaattttcaaattggacaagacctattttaacagacagcggaggatttcaagtattttctttggcaatttaa

SEQ ID NO: 239825 - DNA, 802 bp, Unknown
  Bacterial polypeptide expressing nucleotide sequence isolated from the Sargasso Sea
ggtttacatgattttatgaattggaacaagcctatacttactgactctggaggttttcaaataatgtcattatcaaagttaaataaaattgataaagatattggagcaacatttagatctcatattgatggaaaaaaaattattcttagtccagaaaaaagtataaaaattcaaaaatcaattaattcagatattcttatggtattggatgaatgcccaaaattgactagtaatcgagatacattaaaaaaagcaattgatgtttctactgaatgggcaaaaaggtctaaaattgaatttggatataataaaaacaaggccttatttggaatcattcaaggaggcttatataatgatctaagagttgaaagtttacagagactaatagatattgattttgacggttatgcgataggcggattggcagttggagaaactcaagacgaaatgtttgaaacggtaaaagatataactaaaaaaatgcctgaaaacaaaccaagatatttgatgggtgttggaacgccttcagacatactaggagcaattaaagaaggagtggatatgtttgattgtgttatgcctacgagatcaggtagaacaggtttggcttttacctggaatggaaaaataaaccttaaaaattcaaaatttaaaaatgacaaatcaccactggataaaaattgtactctgagaaatttgaacaattactcgaaaagttatttaaaccatttaatcaaaactaacgaattactggcctctatgcttatttctttgcacaatgttaatttttatcaacaattta

SEQ ID NO: 239826 - DNA, 732 bp, Unknown
  Bacterial polypeptide expressing nucleotide sequence isolated from the Sargasso Sea
aatggcattaaaagattttgcttttaatgtattgaataaagataaatacgctaggcatggtttaattgaaacgcatagaggcaacattagaacgcctgcctttatgccggttggaactcaagcaacagttaaagcatgcacaatcaatgatataatcaaaacaggttctgagattattcttggaaatacttatcacttaatgattagacctggagttgatagaattaaaaaagctggaggcttacataaatttatgaattgtgatttgcctatacttactgactctggaggctttcaagtaatgtcattatctaaattaaataaaattgatagagaaaaaggagctatttttaattcacatgttgatggaaaaaaattttatttaagccctgaagaaagtataaaaattcaacttggattaaattcagacattgtaatgattatggatgaatgtccaaaaaaaactgataattatgaatttatacaaaaatctatggagttatcattatattgggccaaaagatcaaaaactgcctttggtaaaaatccacacaaagctttatttggtataatacaagggggcctttttaaagaccttagattaaaatcattacatgaattagaaaaaattaattttgatggatatgctattggtggattagctgtaggagaaacccaaaaagaaatgttttcagttttagataatataaaagattatttaccaaaagataa

SEQ ID NO: 239827 - DNA, 220 bp, Unknown
  Bacterial polypeptide expressing nucleotide sequence isolated from the Sargasso Sea
aatgcaaaaagaagaattttcttttgagttattagctcaagagaataaagcaagattgggtaaaatctctacacctagaggaaaaatagacactcctgcttttatgccagttgggacactaggaacagtaaaaggagtatttgttgatgatcttttgaaaactgggactcaaattcttttaggaaacacttatcatttattacttcgacctgggattgat

SEQ ID NO: 239828 - DNA, 517 bp, Unknown
  Bacterial polypeptide expressing nucleotide sequence isolated from the Sargasso Sea
attgttaaaaaccgacggcaaggcccgtcgtggtcgtctcgtattcgagcgcggcattgttgaaactcctgcatttatgcctgtgggcacttatggcacagtcaaaggtatgacgcctgaagagctggaagcgacgggtgcacaaatctgtttaggtaatactttccacttaatgctgcgcccaggcacagaaatcatcaaaaaacacggtgatttgcatgattttatgcactggcacaaacctattctgacggattctggtggtttccaggtattcagcttgggtgaactgcgtaaaatcaaagaagaaggtgtgactttccgttcaccactcaatggcgaaaaaattatgttaacacctgagcgctccatgcaggtgcaacgtgatttaggctcagacatcgtgatgatttttgatgaatgtacgccatacccggcgacagagcagcaagccaaaaaatcaatggaaatgtcattgcgatgggctaagcgcagtaaagatgaacatggcgataat

SEQ ID NO: 239829 - DNA, 676 bp, Unknown
  Bacterial polypeptide expressing nucleotide sequence isolated from the Sargasso Sea
ggggtggacgaagccgcggcggcggattcaatgcacctgtcgatgcgctgggtcgaccggtgccgggaagcctttgaaagacggccggggtacgggttgttcgggatcgttcagggcagtgtctttccaaacctccgcatcgaatcggcggcggccctgacggatatcggtttcgacggatacgccgtcggcgggctcgcggtcggagagggacaagacaagatgttctcggtcctcgacgttaccgtcccggcgctgcccgcaagccacccgcgttacctgatgggggtcggtacgccggccgatatcattggcgcagtacagcgcgggatcgacatgttcgattgtgtattgccgacccggtcggggcgcacggggcaggccttcacacggcgcgggctgctgaatattcggaatgcccggcacgccgaggacccgcggccgctcgatcccgacagcgactatccgcatgtcggcggtgtcagccgtgcatacctccaccatcttttcaaggcaaaggagatgctaggcccgatcctgctgactttacacaatctgcactactatcaggaactgatggacgggatacggggcgcgattgaagcaggccaactggacgaattcgccgctgcctttcatgaagaacaggcccgcggcgacttcgacccgatctgac

SEQ ID NO: 239830 - DNA, 298 bp, Unknown
  Bacterial polypeptide expressing nucleotide sequence isolated from the Sargasso Sea
tatgataaattttgaaattgaggccttaaacaattattcccgtgcaggaatattacgaactccagacggatcaatacaaactcccgtttttatgccggtaggaacacttgcaacggtgaagggcatgacgacagaagaagttaaggatcttggagcggaaataattttgggaaatacttaccatttacatcttcgtccaggtgatttagtaattagaaagatgggtgggctgcaaaaattcatgaactgggacagacctatcttgactgacagtggaggattccagattttttcattg

SEQ ID NO: 239831 - DNA, 877 bp, Unknown
  Bacterial polypeptide expressing nucleotide sequence isolated from the Sargasso Sea
aatgtcattaaaaaggttcgcctttaaagtaaaaaaaaatgacaagtatgccagatctggtttaattgaaactcataggggtaatattgaaactccagcttttatgcctgttggtacccaagctacagttaaagcttgcacaattgatgatgtaaaaaaaacaggttcacaaattatattagggaatacttaccatttaatgatacgtcctggtgtagaaagaatccaaagattaggcggtctacataaatttatgaattgtgatttacctattcttacagattctggaggttttcaggtaatgtcattatctaaattaaataagatcgatagagaaaaaggtgcaatattcaattctcatgttgatggaaaaaagttttatctgagtccagaggaaagtatacgaatacaattaggcttaaactctgacattttaatgataatggatgaatgtccaaaaaaaactgaagattataatctaattaaaaagtcaatggagttatctatatattgggcaaaacgttcaaaaaaagcttttggttccaatcctcataaggctctttttgggatagttcaggggggtctttttaatgatcttagaattaaatctttaaatgctttattaaagatagatttcgatggttatgccattggtggattggcagtaggtgaatctcaatttgaaatgttcaaagttttagatgacattaaggataaacttcctaaaaacaaacctcattacctgatgggtgttggcacaccatcagatattttgggtgccgtcaaacgaggaattgatatgtttgattgtgttttacctacaagatcaggaagaactggtcttgcttttacgtggaatgggagagtaaacatcaag

SEQ ID NO: 239832 - DNA, 862 bp, Unknown
  Bacterial polypeptide expressing nucleotide sequence isolated from the Sargasso Sea
tgccggtgggccctacggctcggtgaagggcgtactgcccgagcagattcgcgcgctcggcgccgagatcatcctcggcaacaccttccacctgtatctgcgcccgggcctggaggtgatcggcgaccacggtggcctgcatggcttctgccgctggaacgggccgatcctgaccgactccggcggcttccaggtgttctcgctggcgcaccgccgcaagatcaccgagcagggcgtcaccttcgcctcgccgaccgatggcgcccgcgtgttcctggggccggaggagagcatgaagatccagaaggtgctcgattcggacgtcgtgatgatcttcgacgaatgcaccccgtacccggccaccgaggacgtggcgcggcgctcgatggagctgagcctgcgctgggcgcgacgctcgcgcgatgcccatgacgcgctgggcaacgacgcggcgctgttcggcatcgtccagggcggcgtgcacaccgacctgcgcagccgctcggccgagggcctgcagcagatcggcttcgacggctacgccatcggcgggctggcggtgggcgagcccgagcacgagcgcaacgccatgctcgagcacatgcacccgatcctgccggccgaccgcccgcgctacctgatgggcgtgggccgcccggaggacctggtcgagggcgtggcccgcggcgtggacatgttcgactgcgtgatgccgacccgcaacgcgcgcaacggccattacttcacctccaccggcacggtgcgcatccgcaacgcccgctacgagcgcgacatggacaccatcgagccgggctgcggctgccatgcctgcagcagcggctacacccgcgcctacctgcgc

SEQ ID NO: 239833 - DNA, 337 bp, Unknown
  Bacterial polypeptide expressing nucleotide sequence isolated from the Sargasso Sea
atgaagtttaaaactaaaaatacatccaattttgcaagagcgtctgaaatacaactatcaagaggtaaaatcaatacgccagcattcatgccagttggcactaacggaactgtaaaaggcttaactgtagaagacttaaatgaaactgattcagagataatccttggaaatactttccatcttatgctgagacctggcgatgaattgattaagaatattggcggacttcataaatttattaattgggacagacctattcttactgattcaggaggatttcaagtatggagcctcggagatttggctaaaatttctgaagatggcgttaagtttattc

SEQ ID NO: 239834 - DNA, 814 bp, Unknown
  Bacterial polypeptide expressing nucleotide sequence isolated from the Sargasso Sea
aatgatacgtccaggtgttgagagaattcaaagagctggcggattacataaatttatgaattgtgatttaccaattttaacagactcaggaggttttcaagttatgtctctttctaaattaaataaaatagatcgtgaaaaaggagcaattttcaattctcacgttgatggaaaaaaattttatcttagtcctgaggaaagcattagaatacaattaggtttaaactcagatattttaatgataatggatgagtgcccaaaaaaaactgataattatgatttaataaaagaatctatggatctatctttatattgggcagaaagatctaaaaaatcgtttggaaataatccacataaggcaatttttggaattattcaaggtggtctttttaaagatttaagaattaattctttaaaaggtttattaaaaatagattttgatggatatgctataggaggattagcagtaggtgagtctcaaaaagaaatgttttcagttttagatgggcttaaagataaactaccatatgataaacctcactatttaatgggtgtgggcactccatctgatattttaggagctgtaaaaagaggtattgatatgttcgattgtgtattgcctactagatctggccgaacaggccttgcttttacatggaatggaagaattaatattaaaaataaaatatatcagaatgatgaaacgcctctagataaaaactgtaaaaattttaatcttaatagatattcaaaaaattatttaaatcatctttttaatactaatgagattttaggctcttatgcttttaactct

SEQ ID NO: 239835 - DNA, 747 bp, Unknown
  Bacterial polypeptide expressing nucleotide sequence isolated from the Sargasso Sea
attgaatttaaaaaatttttctttcaaattaaaaaataaagataaattttctcgaacaggaacaattttcacatctaggggcatcatagatactccagtttttatgccagttggaactcaagcaacggtaaaagcgacatttattgatgatttaattaaagcaggaagtcaaataattttatctaacacatatcatttaatgattagacctggtgaggaaagggtggcacttcaaggaggactacatgaatttatgaattgtcctttgccaattttaactgactcgggtggttaccaagtgatgtctctttcaaaactgaacaaaattgatagagaaaaaggagctgtatttaattctcatgttgatggaaaagaatatgttcttagtccagaagaaagcataagaattcaaaaaaaacttaattcagatatcgttatggtcatggatgagtgtcccaaaaaaaccacagatagaaaaactattgaaaactctttggatctatcaacagagtgggcattaaggtctaaaaattcttttggaaaaaatccacataagggactttttggaatagtccaaggtggtttatttgatgatttaagaaaaaaatctcttaaagatctcttggatattgggtttgacggatatgctttgggtggtttagctgttggagatacccaagaggagatgtttagggttttagacggtattaaagaatttttacctgaagataaacccaggtatttgat

SEQ ID NO: 239836 - DNA, 622 bp, Unknown
  Bacterial polypeptide expressing nucleotide sequence isolated from the Sargasso Sea
atggcattaaaaagatttagttttaatgttacaaataaaaatggatacgcaaggcttggtaaaatatcaactcgtaggggagtaattgatacaccagcattcatgcctgtaggaacacaaggcaccataaaaggagcattcttaaatgatgttttcaaaactggtagtcaaataattctttgtaatacatatcatttaatgattagacccggcgccgatagagttaaaaaatatggaggcttacataattttataaattgtaaaaaacctatattaacagattcaggtggttatcagatcatgtctctttcaaaattaaacaaaatagatagagaaaaaggagctatatttaactcacacattgatggaagcaaatttatattaagccctgaagaaagtataaaaattcaaaaaaaattaaattcagatattgttatggttttagatgagtgtccaaaaaaaacattaaattataaattaatctcaaaatctgtagatttatcaacatattgggccttaaggtcaaaaaaagcatttgggaaaaaccctcataaagcgttgtttggaataattcaaggaggtttatttaaagacttgagacttaaatctttaaaagattaac

SEQ ID NO: 239837 - DNA, 464 bp, Unknown
  Bacterial polypeptide expressing nucleotide sequence isolated from the Sargasso Sea
agacttctatcgaattgttaaacacatagcgcccaagatgcccgagaataagcccaggtacttgatgggagttgggactcccatggatatagtgaaatccgtggaaagtgggattgatatgttcgactgtgtcatccccactagacatgcaagaaatggctatctctatacttctaagggggttataaagatcagaaatagtcaacatcgagaatctcttaagcctctggacgaaagctgtgattgttatacctgtaaaaacttttcaagaagctatttacaccatttagacaagactaaagagatgttaggttccactcttcaaactattcacaatctcactttttatattaatttgatgagaaatttgcgagtctccattgaaacaggtacattgcaatcctttattagggaattcgaacttacttggaataattccgacaatcccaatataaatatttaga

SEQ ID NO: 239838 - DNA, 708 bp, Unknown
  Bacterial polypeptide expressing nucleotide sequence isolated from the Sargasso Sea
aaattaattctgatatattaatgtttttggatgactgtccgaaactaactaatgataaaaatttattaaaaaaatcattagacacctctttatattgggccaagagatgtaaaattgaatttggtaataataaaaaaaaagcgttatttggtattattcagggaggtttgtataaagatttgagaattgagtctttagagaagttgaaagaaatagattttcaaggctacgctatgggtggtcttgctgttggagaaacacagtctcaaatgtttaatatattgagtgccactgtcaaatatatgccaagaaataagcctagatatttgatgggggttggtacacccgcagacttgcttggggcaataaaatatggaattgatatgttcgattgcgttctaccgaccagatctggaagaaccggtttggcatatacttgggaaggaaaacttaatttaaggaactctaaattcaaatatgacaaaagtccaattgataaaaattgccacataaggaaccttaattgttattctaaaagttacttgcaccacctgattaaatctaatgaaatgttggcatcgatgcttatttcattgcataatatttacttttatcaacagtttatgatcaaaataagaaaagaaattaaaaacggcaattttaatattttttataaaaagtatatgagtatatttcaaaaaaattgat

SEQ ID NO: 239839 - DNA, 439 bp, Unknown
  Bacterial polypeptide expressing nucleotide sequence isolated from the Sargasso Sea
atgaaatttaaaattatcaatacttcagaaaatgctcgagaagcagaaatcgatactgcaaggggagtaattcaaactcctgcttttatgcctgtaggtacaaacggaacggtaaaaggactcactgtcgatgacttgaaagaaacacattcacaaataatcctcggtaatacttttcacttaatgttacggcctggtgataagttgattaaagaattgggtggattacataagttcattaattgggataaacctattcttactgattcaggtggatttcaagtatggagtcttggagagttaaataaagtttctgaggaaggtgtgaaatttagttctccatatgatggaaaaaaaatatttatgactcctgaggattcgataatgattcaagagaatcttggttctgacattgtgatggcatttgatgaatgtacag

SEQ ID NO: 239840 - DNA, 745 bp, Unknown
  Bacterial polypeptide expressing nucleotide sequence isolated from the Sargasso Sea
atgttcaatgtcataaaaaaagtttcttttaatgtcagtaaaaaatgtgaattcgcaagaactggtctaatagaaactcatcgcggaaatatacaaaccccagccttcatgcctgttggtactcaaggaacagttaaagctacatttattgatgatataattaaaactggaagtgaaataattttatctaatacttatcatttaatgttaaggcctggtgttgatagaattattaatgcaggtggtttacataaatttatgaattgcaaacttcctattcttactgactcaggcggatttcaagttatgtcattatcaaaattaaataaaattgatcgtgaaaaaggtgctatttttaaatcacatatagatggtaaagaatttattttgagtccagaagaaagtataagaattcaaaaaggattagactcagacatagtaatggttatggacgagtgtccaaaaaacaatagcgataaaaacattataaatgaatcaatggatctctcgatgtattgggcaaaaagatcaaaaattgcctttgggaataacccacaaaaaggcttatttggaatagtgcagggtggtctatttgaagatttaagaaaagaatctttagataggttggtaaaaattaattttgatggatatgcaattggtggattggctgtcggtgagtcccaaaaggaaatgttttcagtacttgattcacttaagagccaaaaccagagagcaaacctaggta

SEQ ID NO: 239841 - DNA, 852 bp, Unknown
  Bacterial polypeptide expressing nucleotide sequence isolated from the Sargasso Sea
ctgggggatttcaaattatgagttatcaaaaactgacaaaattatccgagtctggagtgaaatttaaatcacacattgatggtacaaaatattttttaacaccagaaaaaagtactgagattcaagaaatacttgatgctacaatttctatgcaattagacgagtgcgtatcttatcctattgaaaaacaaaaggcttataagtctatggaactctcattaaattgggcaaaaaggtctagagatgcattttcaattagagatggttatggtcaatttgggattgtacaaggttcagtgttttctgaatttagagaaatatcagctctaggactgaaaaatatcgactttgatggttttgccataggagggcttgcagtgggagagtctcagaatataatgtttgaaactattaaaaatactacaaaacatttaccctttaataaaccaagatatttaatgggtgttggtaaaccagatgatattatcggtgcaataaaaagaggcatagatatgtttgattgtgttttaccaactagatctggcagaaatggtcaagcattcaccagttttggcgctataaatataaaaaattcaagatttattcaagatgaaaaacctattgatttaaattgcagttgtcatacctgtaaaactttttctagagcttatttaaatcatcttttcaaatgcaaagaaattttaggagcatcacttctaacacaacataatttacatttttatttaaacctagttaagaaagctagaaattctataattgaaaataattttgaacaatttgaaaaaaattttttaaatatgtattattctggtaaagagatttatgactaaa

SEQ ID NO: 239842 - DNA, 724 bp, Unknown
  Bacterial polypeptide expressing nucleotide sequence isolated from the Sargasso Sea
atgtcactgaaaaaattctcttttaatgtcataaacaaagaaggttttgcaagagtaggacaaatccaaactcatcgaggcaacatagatacgccagtatttatgccagtaggtactcaggctactataaagggtgcgtttataaaagatatagtccaaacaggcgctcaaataatcttagccaatacttatcaccttatgattagacctggtgtagatagagttaagtcacaaggtggtctccatcaatttatgaactgtcctttacctattttaactgactctggaggctttcaggtaatgtctttatcaaagttaaataaaattgatcgagaaaagggtgcgatattcaattctcatatagatggcaaaaaatttatattaagtccagaggaaagtattaaaattcaactaggtttaaattcagatattttaatggttatggatgagtgtcctaaaaaaacaaatgattataatttaatcaaaaagtcaatggagctttcaatgtattgggcagagagatcaaaaaaacaatttggtaaaaatccacataaggctctctttggaattgtgcaaggtggactatttaatgatttgagagaaaaatcattgaatttattgaaagatattgattttgatggatacgcaattggaggattagcagtaggagaaagccaaactgagatgtttaatgtattagatggtttaaaaaatattctacctg

SEQ ID NO: 239843 - DNA, 613 bp, Unknown
  Bacterial polypeptide expressing nucleotide sequence isolated from the Sargasso Sea
acataattttatgaattgcaaacttccaattttgactgactctggaggttatcaagtgatgtctttatcgaaattcaataaaattgatagagataaaggagcaatttttcaatctcatatagatggcaaaacctttgttttaagtccagaggagagtattaaaattcaaaaaaaacttaactcagacattgttatggtgatggatgaatgtccaaaaaatactaatgattataatgtaattaaaacctctatggatttatctacagagtgggctagacgatctaaggaagaatttggaataaatccacaaaaagctttgtttggtatagttcaaggtggattatttaaagatttaagaaatgagtctcttaataggttaatagatatacaatttgatggctatgctattggtggtctagcagttggtgagtctcaacaagaaatgtttgatgttttagacggcatcaaagataacttaccaattgataaaccaagatatttgatgggtgtagggaccccatcggatatattgggagcagttatgaggggaatagacatgtttgattgtgtccttccgacacgatcaggaagaacaggattaagcttttacttt

SEQ ID NO: 239844 - DNA, 925 bp, Unknown
  Bacterial polypeptide expressing nucleotide sequence isolated from the Sargasso Sea
aatgaagttttctttattagctaaagacagcaatagctctgggagatatggcgaaatttctacagatcacagtacattcaaaacacctgtatttatgcctattggcacatcagctgcagttaaaacaattgatccaaaattcttaaaaaatcaagatattgggattatactctccaacacttatcatttatacattagaccgggacatgaaattataagctcagcaggaggtcttcacaaattcatgaattgggataatagtattttgactgatagcggagggtttcaagttttttcactcgctaaattaaataaaatttctgatgatggagttaaatttcaatctcatattgatggaagtacacactttttttccccagagctatctatggatattcaacgcgcacttggtacagatataatcatggcatttgatgaatgtcctccagcaaacgtggaaaaatcagtagtttcaagcgctgtagatagaacttatgcttggatgaaaaaatgtaaagcacatttaaaaaaaagcaaaccattatatagttggagccaaaatctctttccaatagttcagggcggcatatatccggatttaagaaaaaaaagtctggagcaattaagctcctatgctgattgcggtatagctattggtggacttgcagttggggaagataaaacagctatgtttgatattatagaattcatggatgattatctgcctaaagatcagccgcgatatcttatgggtgtagggcgaccaactgatctaataaaagcaatacagcgcggcattgatatgttcgactgtgtaatgccaacgagaaatgcgagaaatggccagctctttacgagcgacggcattataaatataggtaacggagaatataaaaaatcctttgagcggatagataaaaaatgt

SEQ ID NO: 239845 - DNA, 835 bp, Unknown
  Bacterial polypeptide expressing nucleotide sequence isolated from the Sargasso Sea
aatgctaaggcctggtactaaaattcttgatagattttccggcttgcataattatatgaattggaaaaaacctatactcactgactctggtggtttccaaattatgtctttatctaaattaaataaaatagatatatctctaggtgctatctttaattcccatattgatggaaaaaaatttattttaagtccagaaaaaagtatccaaattcaaaaatcaattaactcggatatactaatggtcttggatgaatgtccaaaattaacaaaagataaaaaaataatatcaaatgcaatcgatgtttccactgtatgggcaagaaggtcaaaggttgaatttggctccgataaatcaaaagccttgtttggaattatacaaggtggattatttaaagatcttagaatagaaagcttagaaaaactaaaagaaatcggatttgatggttatgcaatgggtgggctcgctgttggggaaaaacaggatgatatgttttttatcttaagtcaaattgtagaattaatgcctaaaaataaaccaagatatttaatgggtgtaggcacaccgtctgatattttaggagcagttaaaagaggaatagatatgtttgactgtgttttgcctacaagatctggaagaactggtttggcttatacttggaaaggtaaaattaatttaaaaaattcaaaatttaaaaatgatcaaacgcctttagacgaaagatataatatatttggccttaataaatattcaaaaagctaccttaatcatctcacaaaaagtaatgaaatacttgcctcaatgttaataacccttaataatatcaatttttaccaa

SEQ ID NO: 239846 - DNA, 913 bp, Unknown
  Bacterial polypeptide expressing nucleotide sequence isolated from the Sargasso Sea
atactaaaacgcggattaattaaaactcctgcatttatgccagttggcaccgcagcaacagttaaagcaatgcttccagaaaatgtaaaagctttgggagcagacattattctttgtaatacttatcatctaatgttaagacctggtgaaaatttaataaataatttaggaggcctacacaaatttatgaattgggaaagaccaatacttacagatagtgggggctttcaagttatgagtttaagtggtttatctcgaaagtctgaagaaggagtggaatttcgttctcatatagatggtaaaaaatattttttatctccagaatattccataaaaatacaaaagactttgggtagtgatataattatgtgctttgatgattgcgcaagttttcaatcaaaaaaaaatgatgttgcagacagtatgaaaagatctattaaatgggctttaagatcaaaagaagaatttgaattaacaaattctggaatattatttggtattcagcaaggtggaatttacaaagatttgagagatgaaagtattaaaagactattggatattgattttcaagggtatgctgtgggaggtttagcagtgggtgaaccgcaaaccgaaatgtttaaagttttagattctacagctgataaatttcctaataataaaccaagatacttaatgggtgttggtaaaccagatgacattgtaggagctgtattaagaggaattgatatgtttgactgtgttctaccaactagatctggaagaacagggcaagctttatctaggagaggacctattaatataaaaaattcaaagcataaaaaaaattcaagtcctttagatcccgattgtaaatgttatacttgtcttaattattcaagatcctatctacatcacgtatcaaatcaggaga

SEQ ID NO: 239847 - DNA, 534 bp, Unknown
  Bacterial polypeptide expressing nucleotide sequence isolated from the Sargasso Sea
catgggcgagcgtgaggacgtcgtcgcgcgaggcgacgggagcgaaccgtccacgtcgacctccccacttgaatttaaggtgctcgcgaccgatggacgcgcgcgcgcgacgacgttaaagcttccgcactacgagtgtcgcacgccgatgttcatgcccgtggggacgcaaggttccgtcaagggcctcacgagcaagcaattggaggaaatcgagtgtcaagtcatcttgggcaacacgtatcatctcgggaaccgtcccggagcggatgttttagcgaaagccggcgggttgcacggattcatgaactggcgccgcgccatgctcaccgacagcggcggctttcagatggtttctctgctcagcctggcggatatcacggaggaaggggtcacgtttcagtcgcctaccgatggtaaacaaatgttactcacgccggagaagagcattcacattcagaacgatatcggtgcggatatcatcatggctctggacgacgtcgtgtcgagtgtgacggctgaccgggcgaggtt

SEQ ID NO: 239848 - DNA, 779 bp, Unknown
  Bacterial polypeptide expressing nucleotide sequence isolated from the Sargasso Sea
aagttcgcattttatctctcccgaagcgtcgatggatattcagcgccatctaggttcagacattgtcatggcatttgatgaatgtccctcggcaaatgttaaagaaagcattgtgtcaaaagctgttgaaagaacaaataaatggacacgtatttgctatgaccatctaaaaaaaacaggtccaatttattcatggagtcaaacattatttccgatcgttcaaggcgggacatttcaaaacttgagaaaacagtcagctgaatcattgattcaattttcatcctgcggaatggctataggtggtctcgctgtgggtgaagataaatcagctatgtttgatactatagcactaatggatgaagtattgcctaaagatcagccaaggtatttaatgggggtgggtagacctactgatcttgtaaaagcaatgagacatggtgtagatatgtttgactgtgttcttccaacccgaaatgctcgaaatggtcaactatttacaagcaatggaataataaatatcaccaatacagaacataaggattcttttgaccctcttgatgaaaactgtaactgctatacatgtacaaactactcgagagcctatcttcgacacctttttaatataaaagaggttctcggtttgcgattagcaacaattcataatttgacatattataatgatttgatgataaaagcaaaagagcaaatcaattcaggagggtttgataaatggtctaaatcatatttaagttcaatgttgcatcatgaaaacatgtaag

SEQ ID NO: 239849 - DNA, 598 bp, Unknown
  Bacterial polypeptide expressing nucleotide sequence isolated from the Sargasso Sea
atggcattaaaaacttttaattttaatgttaattatacagaaaatcattcaagagtaggggttataaaaacttcaagaggaaatattaatacaccagcttttatgccagttggcacccaagcaactgttaaaggtgcatttattgatgatattatagaaactggaagtgagattatattatcaaacacttatcatttaatgatcagaccaggtgttaatagaatatctacgttaggtggacttcatgaatttatgaactgcagtttgccaatattaacggactctggaggttttcaggtaatgtcactttccaaattaaataaaattgacagagaaaaaggtgctatttttcaatctcatattgatggaaaaaagtatgttttaagcccggaagaaagtatacgaattcaaaaatctttaaattcagacatagttatggttatggatgaatgtcctaagaaaactaatgattatgagaaaatcaaaaaatctatggaactttcaatggagtgggctcaaagatctaaagatgcatttggttcaaatccacacaaagctctatttggaatcgtacaaggaggtttgtttgatgattaaa

SEQ ID NO: 239850 - DNA, 589 bp, Unknown
  Bacterial polypeptide expressing nucleotide sequence isolated from the Sargasso Sea
atgtcattaaaaaattttagttttaatgttaattgtacagaagattattcaagagtagggattatagagacaagtaggggaaatataaatacaccagcatttatgcctgttggcactcaagctacaattaaaggtgcctttatcaatgatatagtaaaaacaggtagtgaaataatactttcaaacacatatcatttaatgattagacctggtgttgatagaatatcggctgttggtggtcttcatgaatttatgaattgtgatttgccaatattaacagactctggaggatttcaggtaatgtctctttcaaaattaaataaaattgatagagaaaaaggagctatatttcaatctcacgtagatggaaaaaaatttattttaagtcctgaagaaagtataagaattcaaaaatctttaaattccgacattgtaatggttatggacgaatgtcctaaaaaaactactgattatactaaaataaaaaaatcaatgaatttgtctatggaatgggctcaaagatctaaaaatgcatttggattaaatacaaagaaaggtctttttggaataattcaaggaggtttatttg

SEQ ID NO: 239851 - DNA, 639 bp, Unknown
  Bacterial polypeptide expressing nucleotide sequence isolated from the Sargasso Sea
ggtctttacgttgggctacattatcaaaaactgcaaactataacaacatcccaatatttggaatagtgcaaggaggaatgtttatggatctccgtgagcaatccttacaagaattaaagtctaataactttgatggttatgcaataggcggtttatctgttggagaatcatcagaacaaaggaatgaaatagttaatcatattgcaccacaattaccggaaactaagcctagatatttaatgggtgttggtaagccgctcgatattgcttatgctgttaaagatggaattgatatgtttgattgtgtcatacctactagaaatgcaaggaacggccatcttttcactaataaaggcataattaggatacggaataatcaatatattaatgataccagtccaatagaattatcctgtcaatgcttcacatgtaagaattatactaaatcctatataagacatttagatagatgcaatgatatattagcggcgagacttatgacaatacataatgtatacttctatcaggaatttatgagcaaattgagaaaagctattactgaaaagaatcttgaaaattatatagaagaattagagaatatatattctacttcggagagacaaaatggagataattagt

SEQ ID NO: 239852 - DNA, 346 bp, Unknown
  Bacterial polypeptide expressing nucleotide sequence isolated from the Sargasso Sea
aatgtcattaaaaaagttttattttaatgtcagtaaaaaatacgaattcgcaagaactggtctaatagaaactcaccgtggaaatatacaaaccccagccttcatgccagttggcactcaaggaactgttaaagcaacatttattgatgatttaattaaaactgggagtgaaataattttatctaatacttatcatttaatgctaagaccaggtgttgatagaattattagtgcaggcggcttacataaattcatgaattgtaaacttcctattcttactgattcaggtggctttcaagttatgtcattatcaaaattaaataaaattgaccgtgaaaaaggtgct

SEQ ID NO: 239853 - DNA, 558 bp, Unknown
  Bacterial polypeptide expressing nucleotide sequence isolated from the Sargasso Sea
gcggaatgtatgacgacttgaggctgcaaagtctcgaagggctagtagaaataggttttgacgggtacgcaattggtggtctctctgttggcgagacgaaagaggaaatgctgtctgttatgcataatttacttcccgctatgcctaaatctgcaccgagatatcttatgggtgtcggcacgccaggagatttagttcgcggtgtctctatgggtgtcgatatgtttgattgtgttatgccgactcggaatgcaaggaatggttatgtgttttgtcgagatggcatactaaagatcagaaatgcgaggcatagactgtctgatttgccactggatgagagttgtggatgttatacctgccagaattactcccgcgcttatctccatcacttagatcgatgtaaagaaatgttgggtgctatgcttttaacagagcataatttgcatttctatcatcgattgatgtcggaattgcgcgaggcaatagaacacggtacattcggcgcgctcgctaaggagcttttgaagagttggaaagaagactatggatttatttgaa

SEQ ID NO: 239854 - DNA, 745 bp, Unknown
  Bacterial polypeptide expressing nucleotide sequence isolated from the Sargasso Sea
atgaaatttgaaataaataattccagtgagtttgctcgaaatgcagaactaaagctcacaaaaggaacaatacagactccagcatttatgccagttggcacgaatgggacagtgaaagctcttacagttgaagatcttcatgaaactaattcagaaatcatactaggaaatacttttcacctaatgttaagacctggagataagctaataaaagaattaggcggacttcacaaatttattaattgggataaacctatactaactgactcaggaggatttcaagtatggagcttgggcgatttggttaaaatctctgaagaaggcgttaaatttagttctccttatgatggtaaaaaaatatttatgacaccagaagattccattgagattcaggaaaatcttggttcagatatcattatggtattcgatgagtgtactgattatccatcaactcacgagcaagcaaaaaaatcgatggagctttctatgagatgggcaaaaagatgcaagaatgctcataaaacacaatctgctttatttggaatcgttcaaggaggaatgtacaaagatttaagagaagaatctcttaatagattaatggatatcggttttgatggcattgctctaggtggcttgagtgttggtgagtcacaacaagaaaaaaatgaaatattagagttcatgtctgataggttgcctgaggataaacccaagatatcttatgggagttggaacacccagagga

SEQ ID NO: 239855 - DNA, 725 bp, Unknown
  Bacterial polypeptide expressing nucleotide sequence isolated from the Sargasso Sea
aatgaaatttaaaactaataattttacagaaattgcaagagaatctgagattaaaacttcaagaggaattatacatactcctacttttatgccagttggtacaaatggaactgttaaaggactaacagttgatgatctaaacgaaactaactcagaaattattttaggtaacacttttcatcttatgttaaggcctggcgatgaattaataagagatcaaggcggacttcataaatttatgaactgggaaaaacctatattaactgattctgggggttttcaagtttggagtttaggagatttagctaaaatttctgaagaaggcgtaaaatttagctctccatatgatggaaaaaaaatatttatgaaaccagaggactcaataatgattcaagaaaatcttggttcagatatcattatggcctttgatgaatgtactaattacccgtcaagtcacgaagaggcaaaaacatcaatggagctttctatgagatgggcaaaaagatgtaaggctgctcataaatctcaatccgctttatttggtattgttcagggaggaatgtataaagatttaagagaagattcactaaatagattaatagatattgactttgatggaattgccctaggtggtttgagtgttggggagtcaaaacaagaaaaaactgaaatactagaattcatgtctgataagttgccaaaagataaaccaagttatcttatgg

SEQ ID NO: 239856 - DNA, 808 bp, Unknown
  Bacterial polypeptide expressing nucleotide sequence isolated from the Sargasso Sea
tatgaattcaaaaaaaagtttttttgaattaatccaaatatgtggtcaagcaagattaggaaaaattaaaacctctcacggagacatcgatactcctacttttatgccggttggaacacaaggaaccgtaaaaagtatttttgtggacgatttgatatctacaggaacacaaattattttaggtaatacttatcatttgtttttaagaccaggtttgaatattttagaaaaatttggtggcttacaaaattttatgaactggaataaaccaatacttactgattcaggaggcttccaggtgatgtcattatcaaaatttaataaaattgacttaaaagaaggagctttattttcatcacatattgatggaaaaaaatttattttaagtcctgaaaaaagtattcaaattcagaaaacaattaactctgatattttgatggttttagatgtttgtccaaaacttacaaacgataaaaaaagcttattaaaatctattaatatatcaagtttgtgggccaaaagatgtaaggacgaattcaaagacgaaaaaaataaatttctttttggaattattcagggaggattattcgaagatttaagaattgaaagccttaaaaatcttgaagaaattggttttgatggttatgcaatgggcggtttagctgtaggggaaaatcaaaatcaaatgttttcaattttacacaaaacagtaaaagcaatgcctgcaaataaaccacgatattttatgggtgtaggaactccatctgatattttggggagccgtgtattatggattagacatgtttga

SEQ ID NO: 239857 - DNA, 922 bp, Unknown
  Bacterial polypeptide expressing nucleotide sequence isolated from the Sargasso Sea
acttattggtgctgtaaaaggagtaaagccgcacgaacttagtgaattaggagcggatattatcttatctaatacatatcatttaatggaaagacctggaaaagaagttattaagaaacaaggagggttaagaaagtttatgaattgggatgggccaatattaactgattctggtgggtttcaagtgatgtctctttctaaaattgcaaaactagataaaaatggtgttacttttaattctcatattgatggatcagtaattaggttgactccagaagaatctatcaatattcaaaatgcctttgattcaactattacaatggtgtttgatgaatgtacatcttacccagtagaattcgatgtggctagaaaatctatgaatttatctatggaatgggcagtaaaatctaaacagaaatttataaatagagatggttatggattatttggaatagtccaaggttctacttacaaggatctaagatttgagtcttctaataaacttatagatattggctttgacggatatgcaataggaggattggctgttggtgagggacacaatattatgataaaaactattaaagacagtattaatttcttaccaaaagataagcctagatatttaatgggcgtaggttacccaaaagatattattgaggcggtaagattgggtgtagatatgttcgattgcgttattcctactcgatcaggaaggacagggaaaatttttactaaacaaggagaaattaatattaaaaatgctagacataagtttgaccctaggcctattgaaaacggctgtttatgtcatacatgcagtaataatatttctcgatcttatcttcatcatttatttaaaacaaatgagatgttaggaactatttattgtacacttcataatttatttcattatatagaa

SEQ ID NO: 239858 - DNA, 874 bp, Unknown
  Bacterial polypeptide expressing nucleotide sequence isolated from the Sargasso Sea
ttgcatcaatatatgaattgttctttgcctatactaacagactctggtggatttcaagtgatgtcactttcaaaattaaacaaaattgatcgtgatatcggcgctatttttaaatcacatatagatggtaaaaaatttattttaagtcctgaggagagtataaaaattcaattaggattaaactcagatattgttatggtaatggatgaatgtccaaaaaaatctaacgattatgaattaataaaaaaatcaatggatttatcaatgttttgggccgaaagatctaaaaaagaatttggttctaatccccataaagctcttttcggaatagtacaaggtggtttatttaatgatttaagagaaaaatctctaaattcattgataaatattggttttgatggctatgctattggaggattagctgttggggaaagtcaaattgaaatgttcaacgtacttgatgctcttaaagaaattctacctacaaataaaccaagatatttaatgggtgttggcactcctttagatattcttggagcagtcagcaaaggtattgatatgtttgattgcgttttacccactaggtctggaagaacaggcttagcttttacatggaaagggaaaataaatataagaaattcagaatataaaactgataatacgcccttagataaaaatatttcaaaattcgatcttaataaatattcaaaaaattatctaaaccatttgtttaataccaatgaaatgcttggttcgatgttattgaccttaaataatatcaatttttaccaagaactgatgtttgaaataagaaaacatataaaaaatggtacttttgaagatttctacaataaatatattaatattttataat

SEQ ID NO: 239859 - DNA, 312 bp, Unknown
  Bacterial polypeptide expressing nucleotide sequence isolated from the Sargasso Sea
aatggcattaaaaaattttgcctttaaagttttaaacaaagataaatttgctagacgaggtgttataaaaacacataggggtgagattaatacaccagcatttatgcctgttggcacacaagcaacagttaaagcttgtacaatcgacgatataaagaaaactggatcagaaataatactatctaatacatatcatttaatgatccgtcctggagtggaaagaattgagttagcaggtggtttgcatgagttcatgaattgtgatttaccaatacttacagactcgggtggttttcaagtaatgtctctgtc

SEQ ID NO: 239860 - DNA, 607 bp, Unknown
  Bacterial polypeptide expressing nucleotide sequence isolated from the Sargasso Sea
gatggaagacataaaaaagaatttttcttttagcgcaaaacatcaaaataaaaattatcgtattggattaattcaaactcatcgtggagaaatagatacacctgcttttatgcctgtaggaactcaggccacagtaaaaggtgtttttattgatgatattataaagactggtagtcaaattattctttcaaatacttatcatttaatgattagacctggcactgaaagagtcgaggctgttggtggtcttcacaaatttatgaattgtaaacttcctattcttactgactcaggaggttatcaggtcatgtctttatccaaatttaataaaattgatagagagaagggagctatttttcagtcacatatagatggaaaaaaatttattttaagtcctgaggaaagtataaaaattcaaaaaaaacttaattcagatattgttatggtaatggatgagtgtccaaaaaataccaaagattacaacaaaattaaaaattctatggaattgtctacagaatgggcaaaaagatctaagaatgaatttggaaataactctcataaagctttgtttggtatggtccaaggtggtttatttaatgatcttaga

SEQ ID NO: 239861 - DNA, 662 bp, Unknown
  Bacterial polypeptide expressing nucleotide sequence isolated from the Sargasso Sea
cccaaaaaatactaatgattttaataagattaaaagttcaatggatttatctatagattgggcaataagatctaaacaagaatttggaaaaaatcctcacaaagctttatttggtatagttcaaggaggcttatttaaagatttacgaaacgagtcacttaataaattaatcgcgatagagtttgatggctatgctatcggtggattagctgttggagaaactcaaaaggaaatgtttgacgtattagatggtataaaagatagtttaccaattgataaaccaagatatttaatgggtgtaggaacgccgtccgatatattaggcgcagttaagagaggtatagacatgtttgattgtgttttaccaactagatcaggaagaacaggattagcttttacttggaatggtagaattcaaataagaaattctgaatacaaattagataacacaccattggatagcagtgtgacaaaatttgatttaaacaagtattccaaaaattatttaaatcacctgcaaaatactaatgagatgttagcctcaatgattttgacattaaataatattaatttttatcaagaacttatgtatgaaattagaaaaaatatcaaaatgggaacttttgatcaatttcatgataagtatattaaaattttgtaaa

SEQ ID NO: 239862 - DNA, 510 bp, Unknown
  Bacterial polypeptide expressing nucleotide sequence isolated from the Sargasso Sea
aatggcattaaaaaaatttgcctttaaaataattaataaagataagtttgctagacaaggtgttattaaaactcatcgaggtaatattaatactccagtatttatgcctgtcggtactcaagcgacagttaaagcttgtacaatcgatgatataaaaaaaactggttctgaaattattttatcaaatacttatcatttaatgataaggcctggtgtagagagaatacaacttgccggaggtttacacaaatttatgaattgtgatttaccaattttgacagactcaggtggttttcaagttatgtctctttccaagcttaataaaatcgatagagaaaaaggagcgatatttaattctcatattgatggtaaaaagttttttttaagtccagaggaaagtatacgaattcaacttggtttaaactctgatattgttatgataatggatgaatgtccgaaaaaatcagatgattataatcatattgaaaagtcgatgaatttatctcttta

SEQ ID NO: 239863 - DNA, 738 bp, Unknown
  Bacterial polypeptide expressing nucleotide sequence isolated from the Sargasso Sea
aatgacattaaaaaagttttcttttaatgttaaagaaatagataataaggcaagattaggtttaattaaaactcatagaggaaatattaataccccagcttttatgcctgtcggcactcaagcaacagttaaaggaacatttattgaggatataattaaaactggtagtgaaattattttatctaacacatatcatttaatgattagacctggcgccgatagaattgaatctttgggtggtttacataaatttatgaattgtaaattacctattttaacagactctggtggttttcaagttatgtccttatctaaacttaataaaatagatagagagaaaggtgctattttcaactcccatattgatggaagaaagtttatattaagcccagaagagagcataagaatccaaaaatctctaaattcagatattgtaatggtaatggatgaatgtccaaaaaaaagtaaagattttaaaaaaataaataaatctatggatctttcaagttattgggcagagagatcaaaaaaagcttttggaaacaatccacataaagctatttttggtattattcaaggagggctgtttaaagatttaagaattaaatcattagagcaattaattgatattgattttgatggttatgctttaggtggattggctgttggtgaaagtcaaagtgaaatgtttaaagttctagatgatataacttatttaatgcctaatgataaaccaag

SEQ ID NO: 239864 - DNA, 216 bp, Unknown
  Bacterial polypeptide expressing nucleotide sequence isolated from the Sargasso Sea
aatgagcgattttaaaatactaaaaacagatggaaatgccagaagaggtaaattaataacctctcatggagagataaatacgcctgcttttatgccagttggaacagctgcaaccgttaagggcgtttttacaaaggacctaattgaaacaggctcggaaatccttttaggtaatacttatcatttaatgctcaaaccaggatctgaactaataaa

SEQ ID NO: 239865 - DNA, 662 bp, Unknown
  Bacterial polypeptide expressing nucleotide sequence isolated from the Sargasso Sea
aatgtcattaaaaatttttaatttcaatgttaattttacagaaaattgttcaagagtaggggttatagagacaagtaggggaaaaataaatactccagcatttatgccggttggtacccaagctacagttaaaggtgcctttatcaatgacatagtaaaaacaggcagtgaaataatcctttcaaacacatatcatttaatgattagacctggcattgatagaatatcagctgttggtggtcttcatgaatttatgaattgtgatttaccaatattaacagactctggtggatttcaagtaatgtctctttcaaaattaaataaaattgatagagaaaaaggagctatatttcaatcccacgtagatggaaaaaaatatattttaagtcctgaagaaagcataagaattcaaaaatctttaaattccgacattgtaatggttatggatgaatgtcctaaaaaaactactgattatgctaaaataaaaaaatcaatggatttatcaatggaatgggctcaaagatctaaaaattcatttggattaaatccaaagaaagctctttttggaataattcaaggaggtttatttgatgatttaagaaatatttctttagaaagattaaccgatataggttttgatggttatgcaattggagggcttg

SEQ ID NO: 239866 - DNA, 539 bp, Unknown
  Bacterial polypeptide expressing nucleotide sequence isolated from the Sargasso Sea
acaaggggggatgttcaaagatctccgggaacagagcgcttgctacctcaataacgttgggtttgatggctatgctgtaggggggctagcggttggagaacctcaagaaaagatgtttgaggttttagactattctacagatttttttcctgaagatagacctaggtatttaatgggggtaggtaaacctagtgatataataggcgcggttctaaggggcgtagatatgtttgattgtgttattcccacgcgatctggcagaaatggtcaagcttttgtacaaaatagaacaattaatttaaaaaatgccaaacatcaattggataaaaatccaattgatgaaaattgtagttgctattgttgttccaattattctagaggatatctcagtcatttagttcgttctaatgagattttaggatctatgcttctgacatggcataatttacatttttacgttaacttgatgaaaaaaattagagaacttataaaaaaacgagagtttactgcatttgctgacaaatttctcaatttgtaac

SEQ ID NO: 239867 - DNA, 601 bp, Unknown
  Bacterial polypeptide expressing nucleotide sequence isolated from the Sargasso Sea
tatgaaatttaaattaatcaaatcagataagagcgctaggataggcgaacttcagttcaggaaagggctgattcaaacccctgtattcatgcccgtaggaacgtatggatctgtgaaaacaatgacgccagatgagcttatagacattggtgcagaaatcattctcgcaaatacttatcacctgatgattagaccaggaaaagatattctttcctcacatgggggattacataaaatgatggcatggccaaagccaattctgactgactcaggtggttatcagatttggagcttatcaaaaaagagaaagatcaatgatgagtatgtcgagtttgactcaccagtcaatggtgacatgattcgcttaacaccagagatcgctatgcagatgcagaaagtcattggaagtgatatccaaatggttctcgatgaatgcactcattatcctgccacgaaagaagaggcggagctttcaatgaaaagatctgagaagtgggccttgagaagtcatgaatcttttttgcagcagaaaggggatgatgacagcgcttgttttgggattattcagggcggtatgtatccagaccttcgtctacaaaat

SEQ ID NO: 239868 - DNA, 335 bp, Unknown
  Bacterial polypeptide expressing nucleotide sequence isolated from the Sargasso Sea
aatgaaatttgaaataaataattccagtaagttcgctcgaaatgcagaactaaagcttgcaaaaggaacaatacagaccccagcatttatgccagttggaacgaatgggacagtgaaagctcttacagttgaagatcttcatgaaactaattcagaaatcatactaggaaatacttttcatttaatgttaagacccggagacaaactaataaaagaattaggcggacttcacaaatttattaattgggataaacctatacttactgactcaggaggatttcaagtatggagcttaggcgatttggttaaaatctctgaagaaggcgttaaattta

SEQ ID NO: 239869 - DNA, 566 bp, Unknown
  Bacterial polypeptide expressing nucleotide sequence isolated from the Sargasso Sea
attgaaaaaatttgaatttaaagttttaaaaaaaaataaatttgcaagacttggtttaattaaaacccatagaggtaaaattgaaactcctgtttttatgcctgtaggaacccaagctactgtaaaagcttgtacaattgatgatatcaaaaaaactggttctcaaattattttatctaatacttatcatttaatgatacgaccaggtgtaaaaagaattgaagatgcaggcggactccataaatttatgaattgtgatttaccaattcttacagactcgggaggttttcaagttatgtctttatcaaaacttaacaaaatagatagagaaaaaggggcaatatttaactctcatattgatggaaaaaagttttatcttagtccagaggagagtataaaaattcagttaggactaaattcagatattgtaatggtgctggatgagtgtccaaaaaaaactgataattatcaaattatagataactcgatgaatttatctttgtattgggctgaaagatctaagaaagcatttggacataatccccacaaagctttatttggaattg

SEQ ID NO: 239870 - DNA, 654 bp, Unknown
  Bacterial polypeptide expressing nucleotide sequence isolated from the Sargasso Sea
tggcattgtcgatgcgctgggccaaacgatcacgggcggcgttcaggccgcgtattggctatggtcaatttggcattgttcaagggtctgtttttgctgatttgcgcgcagaatcagtggccatgctgacagatatagggtttgaaggttatgcggtcggcggtctagcagtcggtgaaggacagcaaaatatgttcgaaaccctcgagtccacaaccccactgatgcagacggacaagccacgctatttaatgggtgttggcaagcccgccgatcttgttggtagtgtggctcgtggcattgatatgtttgactgtgttctgccgacgaggtcggggcggactgggcagggctttaccaggcgcgggccagtaaatttaaaaaacgcacgtcacgccgaggacccgcgccccctcgacgcagaatgcggttgtccagcgtgttcaaattatagtcgtgcatatcttcaccatctgtttaaagctgaagaggtgctttctctgatgttgctgacttggcataatatccaatactatcaggatttgatggcagaaatgcgggcggctattagcgctgggaaatttgccgcatttgagactggttttcacgcccagcaggcccgcggtgatattgatccggttggaacagaataat

SEQ ID NO: 239871 - DNA, 769 bp, Unknown
  Bacterial polypeptide expressing nucleotide sequence isolated from the Sargasso Sea
atgtcattaaaaaattttaattttaatgtcattaataaggacggatttgcaagagtaggccaaattcaaacaaatagaggaaatatagataccccagtatttatgcctgttggtacgcaggccaccataaaaggcacatttatagatgatgtaataaaaacaaaagcacaaataattttatcaaatacatatcatttaatgataaggccaggagttgataggattaaatctcatggaggaattcatgaatttatgaattgtcctttaccaatactgactgattctggaggttttcaagttatgtctctatcaaaattaaataaaattgatcgtgaaaaaggtgcaatttttaactcacacatagatggaaaaaaatttattttaagtcctgaagaaagtattaaaattcaactcggattaaattcagatatagtcatggttatggatgaatgtcctaaaaaatcaactgattacaagtttataaaagattcaatgaatctttcaatgtattgggcggaaagatcaaaaaaaaaatttggaaaaaaaccacaaaaaggtttattcggaattgttcaaggcggtctgtttatcgatttaagattaaaatcaataaatatattaacagacataggttttgatggatatgcaataggtgggttagccgttggcgaaaatcaaatggaaatgtttgaagtacttgaggcattaaaagatgtaatgcctcaagataaacctagatatcttatgggagttggaactccattctgat

SEQ ID NO: 239872 - DNA, 841 bp, Unknown
  Bacterial polypeptide expressing nucleotide sequence isolated from the Sargasso Sea
caagtttatagtttaaaagggatgaggaaaattaattccgagggagttacttttcaatctcatttagatggatcaaaacattatttttcacctgagaaagtaatagatattcaacgaattattggttcagacataatgatgatgcttgatgtttgccctcccggtgatgcaaatcaaaaaaaatggattgatgcacttcaacacacaacaaattgggcaaaaagagcaaaaaaatattttgatcaaacagaatctctatatggatacgaacaaattatttcgccaattgttcaaggaggtacagatttaaaactaagaaaacaatcagctttagagctgatggaacttaactgtgatatgcatgctattggaggactggctgtaggagagccaaaagaagagatgctaaaagtggtaaattatttagattctattttacccaaagaaaaacctagataccttatgggtgttggaactcctgcagatttagtagaaagcgtactaaatggagtagatatgtttgattgtgtaatccctacaagaaatgcaagaaatagtcaattgttcagctttgatggaaaaataaatattagaaatgcaaagtatgcggatgattttttaccaattgataaaaataattttagtcctatatcaagtaaatattcaaaagcttatttgcatcatttatttaaaaccaatgaaattttaggtttacgtattgcaacagaacataacttgaaattttatatacatcttatgaaattaataagagataatattcaatctgatagctttgaagagtgggcaaaatcatttttaaggaaatataataatgaataaa

SEQ ID NO: 239873 - DNA, 508 bp, Unknown
  Bacterial polypeptide expressing nucleotide sequence isolated from the Sargasso Sea
caagattttgatggaattgcgttaggaggcctgagtgttggtgaatcaaaagaagaaaaaacaaaaattttaaagcatttagcccctttattgcctgaagataagcctcattatgtgatgggtgtgggaacgcctgaagagttagtagaaggagttagatatggaattgatatgtttgattgtgttattcctactagaaatgctagaaatggttttgtgtatacctctacaggcatagtaaaaataagaaattcagaacataagaagtccacaaaacctatagatgaaaattgtgattgctatacctgcagaaatttttccagagcatatttgcatcatctagataaagccaatgagatattagctagcactttaatgagtatttgcagcttacatacatttaataaactaatgcaagacattagatcatcactggaagaaaataaatttgaagaattcgttgattccttttacgatatgagggacttgaaaaagccaaacttataaa

SEQ ID NO: 239874 - DNA, 331 bp, Unknown
  Bacterial polypeptide expressing nucleotide sequence isolated from the Sargasso Sea
gatggcattaaattttagttttaatgttttatctacagataaagattcaagattaggtcaaatcaaaacacatagaggctctattgatacgccagcttttatgccagtgggtactcaagctacaataaaaggaacttttattgatgatataattaaaactggtagtcaaataatactagctaatacatatcatttaatgcttagacctggcactaaaagagttgcctcacaaggtggtctgcatgagtttatgaattgtaaattgccaatattaactgattcagggggttttcaagttatgtcattatcaaaattaaacaaagttgataaa

SEQ ID NO: 239875 - DNA, 883 bp, Unknown
  Bacterial polypeptide expressing nucleotide sequence isolated from the Sargasso Sea
tttctcaattggaataggccaatactaacagattcaggaggttttcaagtttggagtcttggagatttagtaaaaataaccgaagaaggagttagattctcttcaccttatgatggtaaaaagatttttatgtctcctgaagattcaatgaaaatccaagaaaatttaggatcagacatcgtaatggcgtttgatgaatgtactgattacccttcaacatatcaacaggcaaaacaatcaatggaactctcaatgagatgggccaaaagatgcaagaaagctcataaatcagattcagcattatttggcatagtccaaggtgggatgtataaagatttgagggaggagtccttaaaaaaattaattcaaataggttttgatggtattgcgcttggaggattaagtgttggtgagccaaaagaagaaaaaactgcgatattagagttcatgtctgataaatttcctgaagataaaccaagatacctaatgggtgttgggacaccagaggatattgttgaagctgttaggtatggaattgatatgtttgactgtgttttaccaacaagaaatgcaagaaatggtcaattattcacctcagaaggagttataaatataagaaatgcagaatttaaaaatagtgatgaccctattgataaaaattgtgactctaaagtttctcagaattacagtagagcatacctaaatcaccttcacagaacaaatgaaatgttaggatctatgttagctacatatcacaatatttattattatcagtctttaatgagggatataagagactccattaacaataatatattcgcgaagtttataaaagacttttataatagtcgaaatttagatatgcccgatgggccaatatagg

SEQ ID NO: 239876 - DNA, 739 bp, Unknown
  Bacterial polypeptide expressing nucleotide sequence isolated from the Sargasso Sea
aatggcattaaaaaaatttaattttaatgttaattatactgaaaattattctagagtaggtgtcatagagactggcagaggaaatataaatacacctgcatttatgcctgttggaacccagggtaccattaagggtgcgtttattgatgatataattaaaactggaagtgaaataattctttcaaacacatatcatttaatgattagaccaggtgttgaaagaatatcatcaattggaggacttcatcaatttatgaattgtaatttacctatattaaccgactctggtggatttcaagtaatgtctctatctaagttaaataaaattgatagagaaaaaggcgctatatttcaatcacacatagacggaagaaagtttattttaagtcctgaagaaagtatacgtattcaaaaggcattaaattctgacattgttatggttatggatgaatgtcctaaaaaaacttctgattataataaaattaagaaatctactgaactttcaatggaatgggcacaaagatctaaagactcatttggatcaaatccaaataaaggtctttttggtattgtccaaggaggtttatttgatgatttaaggaatgattctttagaagttttaacaaatattggttttgatggttatgctataggggggttagcagttggagatactcaggaagaaatgtttaaagtccttgatggtttaaaagaaaaaatgccaattgataaaccaagg

SEQ ID NO: 239877 - DNA, 655 bp, Unknown
  Bacterial polypeptide expressing nucleotide sequence isolated from the Sargasso Sea
aaatactaaagattataatataattaaaacttctatgcatttatctatggagtgggccagacgatctaaagaagaatttggaaaaaattcacacaaagctttgttcggtatagttcaaggaggtttgtttaaagatttaagaaacgaatcacttaataaattaattgatataggattcgatggatatgctatcggtggtctcgccgttggagaaacacaaaatgaaatgtttgaggttttagatggtatcaaggataacttgccaattgataagccaagatatttaatgggtgtgggaacgccatctgatatattgggagctgttaagaggggaatagacatgtttgattgtgtacttccaacaagatcaggaagaactggattagctttcacttggaatggcagaattcaaataagaaattctgaaaataaattagataatacacctctagatagtagtgttactaaatttgacttaaacaaatactcaaaaaattatttaaaccaccttcacaatactaatgaaatgttagcttctatgatcctgacattaaataatataaacttttaccaagaacttatgtatgaaattcgaaaaaatatcaaaatgggaagttttgaggaatttcatgataagtatattaatattttgtaa

SEQ ID NO: 239878 - DNA, 625 bp, Unknown
  Bacterial polypeptide expressing nucleotide sequence isolated from the Sargasso Sea
atgaaatttaaaactaataattttgcagaaattgcaagagaatctgagattaaaacttcaagaggaattatacatactcctgcttttatgccagttggcacaaatggaactgtaaaaggactaacagttgatgatcttaaagaaactaactcagagattattttaggtaacacttttcatcttatgttaaggcctggcgatgaattaataagagatcaaggcggacttcataaatttatgaactgggaaaaacctatattaactgattctgggggttttcaagtttggagtttaggagatttagctaaaatttctgaagaaggcgttaaatttagctccccatatgatggaaaaaaaatatttatgaaaccagaggactcaataatgattcaagaaaatcttggttcagatatcattatggtctttgatgaatgtactaattatccgtcaagtcatgaagaggcaaaaacatcaatggagctttctatgagatgggcaaaaagatgtaaggctgctcataaatctcaatctgctttatttggaattgttcagggaggaatgtataaagatttaagagaagattcactaaatagattaatagatattgattttgatggaattgccc

SEQ ID NO: 239879 - DNA, 838 bp, Unknown
  Bacterial polypeptide expressing nucleotide sequence isolated from the Sargasso Sea
gatgtctttgtctaaatttaataaaattgatagagttaaaggagcaatatttcaatcacatattgacggaaaaacttttattttaagtcctgaggaaagtattagagttcaaaaaaaacttgattcagacattgttatggtaatggatgaatgtccaaaaaataccaaagattataaaaaaattaaaatttccatggatttgtcttcagagtgggcaaaaaggtctaaagaagaatttggaaaaaatcctcacaaagctttatttggtattgttcaaggaggcttattcaaggatttaagaaatgagtcccttgataaattaatagatatagaatttgatggatatgctattggtggtctagcagttggagaaactcagaaagaaatgtttgaagtgttagatggtattaaagatagactaccaattgataaaccaagatatttaatgggtgtaggaactccttctgatatattgggggcagttaagcgtggcatagatatgtttgactgcgttcttccaacaagatctggaagaaccggtttagcttttacatggaatggtagaattcaaattagaaattctgaaaataaatttgataatacacctctagatagtaatgttacaaagtttgacttaaataaatactcaaaaaattatttaaaccaccttcacaataccaatgagatgctgtcatctatgattttgacattgaataatataaatttttatcaagaacttatgtatgaaattcgaaaaaatatcaaaatgggaactttcgaccagtttcatgacaagtatattaatatttttgtaaatttttaccattgccaaatataa

SEQ ID NO: 239880 - DNA, 835 bp, Unknown
  Bacterial polypeptide expressing nucleotide sequence isolated from the Sargasso Sea
tgactcaggtggttttcaaattatgtcactggctaaattaacaaaaatagacagggataaaggagcaacttttagatcacatattgatggtaaaaaatatattttaagcccagaagaaagtattaaaattcaaaaatccataaattctgacattatgatggtattagatgaatgcccaaaactatcaaatgataaaaaaaaaatagaacaatccttaattttatcaatagaatgggcccaaagatcaaaaaatgaatttggtaaaaatgataaaaaagcactttttggaattatacaaggcggaatgtttgacgatttaagaattaaaagtttaaaagaacttataaaaattaattttgatggatatgccttaggaggacttgctgttggcgaaagtcaaaaacaaatgttttcaatgatagatgttctaaagaatgaacttcctgtcaacaaacccagatatttgatgggagttggaactccttcagacatacttggtgcggtaaaaagaggtatagatatgtttgactgtgttttacccactagatcaggaagaactggtttagcctttacttggaaaggaagaataaatataagaaattctaaatacaagaatgacaagagtccacttgataatgacaatcaaattaaacaaataaataactatagcaaagcttatttgaatcatttattttctactaatgagattttagcttctatgcttttgactttgcacaatttgagtttttatcaagaattaatgaaaagtataagagtttctattgaaaatggaacttttgatcatttttatgataagtttattaataaaatttaa

SEQ ID NO: 239881 - DNA, 640 bp, Unknown
  Bacterial polypeptide expressing nucleotide sequence isolated from the Sargasso Sea
aatgacattaaaaaaatttagttttaatgttaataatactgaaaattattcaagagtaggagtcatagagacaagtagaggaaatattaatactcctgcattcatgccagtaggtacacaagcaactattaagggtgcatttattgaagatataataaaaactggaagtgagataattctttcaaacacttatcatttaatgatcaggccaggaattgatagaatatcaattgtaggtggactccatgaatttatgaattgtagcttgcctatattgactgactcaggcggttttcaagtaatgtctctctctaaattaaataaagttgatagagaaaaaggcgcaatatttcaatctcatattgatggaaaaaaatacattttaagtccagaagaaagtataagaattcaaaaatctttaaattccgacattgttatggttatggatgaatgtcctaaaaaaacaactgattttaataaaataaaaaaatctatggagctttcaatggaatgggctcaaaggtcaaaaaatgaatttggatcaaatcctcacaaagctatttttggtattgtacagggcggattatttgatgatttaagaaatgaatctttagaaaaaataacaaatataggtttttga

SEQ ID NO: 239882 - DNA, 234 bp, Unknown
  Bacterial polypeptide expressing nucleotide sequence isolated from the Sargasso Sea
atgctgagtgtgattgctacacctgtcgcaattattcgcgcgcttacttgcatcatctcgaccgttgcaacgaaatattgggcgcgcgtctcaacacgattcataaccttcgctactaccagcgtttgatggcgggtttacgcaaggctattgaagagggtaaattagagagcttcgtgactgatttttaccaacgtcagggtagaccagttccacctgtgaacgttgattaat

SEQ ID NO: 239883 - DNA, 484 bp, Unknown
  Bacterial polypeptide expressing nucleotide sequence isolated from the Sargasso Sea
aaattttgatggatatgcaattggtggattagctgttggagaaacccaggaggaaatgtttaaagtattagagaatctaaaaaagtacttacctaaacataaacctagatatttaatgggagtaggtacaccatctgatattttgggagcagtaaaaagaggtatagacatgtttgactgtgttctgccaactagatctggaagaacaggcctggcttttacatggaatggcagagttcaaataagaaattcttcaaataaacatgataactctcctctagatttgaacataactaaatttgatttaaataaatattcaaaaaattatttaaatcatttatttaatacaaatgaaatgcttgcttcaatgattttaaccttaaataatatcaatttttaccaggaactaatgactgaaataagaaaaaatataaaaaaaggaacttttgaacaatttcatgacaagtatattaacattctgtaa

SEQ ID NO: 239884 - DNA, 874 bp, Unknown
  Bacterial polypeptide expressing nucleotide sequence isolated from the Sargasso Sea
tttacataaatttatgaattggccttttccaatattaacagactctggaggttttcaagtaatgtcattatctaaattaacaaagattgatcgcgaaaaaggtgcaatatttaattcacacattgatggcaaagagtttattctaagtcccgaagagagtattaaaattcaaaaaggactaaactccgatattttaatggtattagatgagtgtcctaaaaaaactgtggataaaaataaaattaaggaatcgctttctttgtcaacatattgggccgaaagatcaaaaaaagcttttggtttgagtccacacaaagcattatttggaataattcaaggaggattatttaacgatttaagaaaagagtcattagaacaattagttaaaatagatttcgatggatatgctgtaggaggattagcagtaggagaaacccaaacagaaatgtttaatgttttagatggtattacaaaatttatgcctactaataaaccacgatatttaatgggtgttggaacgccagcagatattttgggtgctgtaaaacgaggtatagatatgtttgattgtgtcatgccctctcgatcaggtagaacaggattagcatttacttggcaaggaagaataaatttaagaaattcaaagtatcagaaggacaatatgcctctagatgctaattgtgacaaatttaaccttaataaatattcaaaaaattatttaaatcatttatttaatacgaatgaaatattagcatcgatgttgttaactcttcataatattaacttttatcaagaattaatgcactctataagagataatattaaaaaaggaacatttttaaagtttcacgataaatatatagatatcttgtga

SEQ ID NO: 239885 - DNA, 692 bp, Unknown
  Bacterial polypeptide expressing nucleotide sequence isolated from the Sargasso Sea
ttcagatattgttatggttttagatgagtgtccaaaattgtctaatgataagaataaaatttgtgaatctttaaaactttctcacaattgggctgaaagatcaaaaaatgagtttggaaataatcccaaaaaagctttgtttggcatcattcaaggtggcatatataaagatttaagattagagagtttagacggtttatctaagcttgatttcgacggatatgctttgggtggtttagctgttggtgaaagtcaaaaacaaatgtttaaagttcttgatggtattgttccatctatgccaaaaaataagccgagatatttaatgggagtaggtacaccatcagatatacttggagctgtaaaaagaggcatagatatgtttgattgtgtcattccaacgagatcaggtaggacaggattagcttttacttgggaaggtaaacttaacttgagaaactccaaatataaaaaggacgacacacctataaatagagaagctgatgttagaaatcttaatatctactcaaagagttatataaaccacttaataaactcaaatgagatattagcatcaatgattttaacattgaacaatatatttttttatcagcaattaatgaaaaaaattagagaggcaattaaaacgaatagttttgatgaatttcatgataaatacatcaatatcatataag

SEQ ID NO: 239886 - DNA, 877 bp, Unknown
  Bacterial polypeptide expressing nucleotide sequence isolated from the Sargasso Sea
gtaaaaggtgtggatatagctcgtgttgccgaaactggtgccacaatgctgttagcgaacacgtatcatctgcacctcaggccgggtgaagaactcgtatctcggtcaggtggtgtcggacactttatgggatggtccggtccaaccctcactgacagtggtggctatcaagtgtttagccttgctcagcaagttaaggtgactgatcacggggcaatgtttcggtcgcacctcgatgggtctcaggtggacctcactccagagaaggcagttgcgattcaagaatcactaggagctgatgtcgcaatgcagcttgatcatgtgattggccttcctgccgaacgaaatgacgtcgctgaggcaatggaacgatctctcgcgtgggcagagcgttgtttggctgcgcgtcaaaaatcagaccaggcgatgttcggaattgtgcagggagggcttgatcctgaattacgagcaaacagtgccaagcaccttcggtcactgccttttgagggttttgcagtcggagggctgtctgtgggagaagggccggaggcaatggcatcaacgcttcaggcgacagtgccacacttaccagcagacaagccgcgatatcttatgggagtcggaaagccagaggatattatcaatgcggttgcggtaggaattgatatgtttgactgtgttttaccaacacgctgcggtcgtaatgcattgctgtatacgtttgacgggccattacgtttaagaaatgctcaatatctgacggacaaacgcccaattgaaagtgactgcccatgtgtggcttgtggctatacacgggcgtatatgcggcatctttttctggcgggggaaatgctcggtcctattttagcctcgattc

SEQ ID NO: 239887 - DNA, 945 bp, Unknown
  Bacterial polypeptide expressing nucleotide sequence isolated from the Sargasso Sea
aggtagtgaaattatcctatctaatacatatcatttaatgattagacctggtgttgaaagaataattaatgccggcgggttgcataaattcatgaattgtaaattgccaatattaactgactctggaggatttcaaataatgtcactttcaaaattaaataaaattgatagagaaaaaggtgcaatatttcaatcacatgttgatggaaaaacattcgtgctaagccctgaagaaagtattaaaattcaaaaaggattaaattcagatatcgtcatggtaatggatgaatgtccaaaaaaatcaaatgactatgaaaaaattaaaaaatcaatgaacctttcagcatactgggcaagaagatccaaagattcatttggcaaagaacctcttaaaggtctttttggtatagtacagggcggtttatttaaagacctaagaattgagtctttaaataatttactgactatagattttgatggatatgccattggaggacttgctgtaggagagtcacaatctgaaatgtttaaagttttagatgatattaaagatcatctaccaaaagacaaaccaagatacttaatgggagtaggcacaccttcggatatattaggtgctgtaaaaagaggtattgatatgtttgattgtgttttaccaactagatcaggtcgtaccggtttagcttttacttggaatggaagagtgcagttaagaaattccaaacataaaaatgacaattctcctctagatttaaatatttcaaaatttgatttaaataaatattcaaaaagttatttaaatcatttattgaatacaaatgaaatgttagcttctatgattataacgttgaataatattaatttttatcaggagttaatgagcgaaataagaaaaaatattgaaaaaggaacttttgatcactttcatgataagtatataaaaat

SEQ ID NO: 239888 - DNA, 622 bp, Unknown
  Bacterial polypeptide expressing nucleotide sequence isolated from the Sargasso Sea
atggcattaaaaaaatttagttttaatgttttaaaaaaaaataaatatgcaagattaggggttattaagactcatagaggaaatatagatacgccagcatttatgcccgtgggaactcaggcgacagtaaaaggaacatttatagatgatattataaaaaccggcagtcaaatcatattatctaatacttatcatttaatgataaggccaggtcctgatagaattaaaaagtcaggaggcttacataagtttatgaattgtgaacttccgatacttacagattcaggaggatatcaaattatgtctctatcaaaattaaataaaattgatagagaaaaaggagctatatttaattcacatattgatggagcaaaatttgtactgagcccagaagaatgtattaaaattcaaaaaaaacttaactctgatatagttatggttttagatgaatgtccaaaaaaaactttgaattataatcttatttcaaaatcagtagatctctctacatactgggccaaaagatcaaaaaaagcttttggaaaaaatcctcataaagctctattcggaatagtccaagggggtctttttaatgatttaagattaaaatcattaaacgattaac

SEQ ID NO: 239889 - DNA, 886 bp, Unknown
  Bacterial polypeptide expressing nucleotide sequence isolated from the Sargasso Sea
aaagctggtggattacatcaatttatgaattgtaatttacctattttgacagactctggtggatttcaagttatgtctctttctaaattaaatgaaattgatcgagaaaaaggagctatttttaaatcacatattgatggtaaaaaattttgtttaagcccagaagaaagtattcgaattcaacttggtttggactcagatatcgtaatgattatggatgaatgtccaaaaaaaactgacaactatgaaaaaattaaaaaatcaatggaattatctttatattggggaaaaagatctaaaaaagcttttggagaaaatcctcataaagcattatttggaatagtacaaggaggtctttttaaagatttaagattaaaatctttgaatgaattgatcaaaattgaatttgatggttatgcattaggggggcttgcagttggagaaagtcaagaagaaatgttcaaagttttagacgatgttaaatctactttaccatttgaaaaacctcattacttaatgggtgttggaactccatctgatatcttgggagctgtgaaaagaggtatagatatgtttgattgtgttttgccgactaggtctggaagaacaggtttagcttttacttggaacggaagattaaatattaaaaacaataagtatcagagtgataattcacctctcgatcctgattgtgacaattttaacctaaataaatattctaagaattatttaaaccacttattcaatacaaatgaaatattggcatctatgttattaacactccataatattaatttttatcaagaattaatgagtgcaatacgtgataatataaataaaggtacatatgataaatttcatgataaatacattgataagttgtaaa

SEQ ID NO: 239890 - DNA, 810 bp, Unknown
  Bacterial polypeptide expressing nucleotide sequence isolated from the Sargasso Sea
gagctgatatcatattgtgcaatacgtaccacttaatgttgagaccaggagaatcaataattcaacaggtaggcggattacacaagtttatgaattggcccagacctatattaacagatagtggcggtttccaggtcatgagccttgcagctctttctaaaaggtctgacgatggagtggagtttaagtctcacattgatggaaagaaacatttcttgagtccggaatactcgataaagattcaacaaaccctgggtagtgacattattatgtgcttcgatgaatgcaccagttttgaagccacagaacgtgaagtgcatgaaagtatgacgagatccatggaatgggcatttagatcaaaaaatgcgtttcaaaactctttgggtagtaccttatttggtatacagcaaggaggtgttttccatgatgcaagagaagagagtgccaagaggttaattcaaatagattttgaaggatatgctgttggtggattggcagtgggagaacctcaagatataatgtttgatgtacttgataactcaattcctcatttcccagataacaaacctaggtacctgatgggagtaggtaaaccaggggacatattaggggcagttttgagaggtgttgacatgtttgactgtgtcttaccttctcgatctggtagaacaggccaagccttaacccggatgggagcaataaatataagaaatgctaggcatgctaaagacccaaggcctctcgatccaaaatgtggatgcccaacctgtaaaaattattctagagcttatttacacacatgtgtgtaaa

SEQ ID NO: 239891 - DNA, 662 bp, Unknown
  Bacterial polypeptide expressing nucleotide sequence isolated from the Sargasso Sea
taacgaaaatgatattgaggactctttacaaagaactcatttatggttgcaaagatgtgtcgagactcatcagaaatccaatcaagcattattcggtatagttcaaggtggaaagtatccaagattgagagaatatagcgcaaaatatacaagttcttttgatctgcctggaatagcagtgggaggtgtaagtgttggcgaggcagtcgaagaaatacataatgtaattaattacgtcccgaaattcttaccaataaataaaccaagatatttgatgggaattggctctttgaaagaaatttctctagctgttgctaatggattcgatatatttgactgtgttttgcctacaagactaggaagacatgggactgcattttttaatgatgaaagattgaatttgcgaaatgctcgttttaaaaatgacttttctccgattgacaaaacttgtaaatgtgaaacttgtaaatcctattctcgagcatatttgcatcatctaattagaaatgacgaaatattaggcctaactctcataagtttgcataatattgctcacttaataagatttactaatgcaatttctattgcaattagagataattgttttacaaatgatttcgctccttggaaaacatcctctattgctcaccatacgtggtaac

SEQ ID NO: 239892 - DNA, 878 bp, Unknown
  Bacterial polypeptide expressing nucleotide sequence isolated from the Sargasso Sea
tgaaactcatagaggtaaaattgaaacaccagtttttatgcctgtgggaactcaagcaacagtaaaagcttgtacaatagatgacataaaaaaaactggttctcaaattattctatcaaatacttatcatttaatgatacgaccaggtgttaaaagaattgaagatgcaggtggacttcacaaatttatgaattgtgatttaccaattcttacagactctggtggctttcaagtcatgtctttatcaaaactgaacaaaatagataaagaaaaaggggcaatttttaattctcatattgatggaaaaaaattttatcttagtccagaggaaagtataaaaattcaattaggactaaattcagatattgtaatggttatggatgagtgcccaaaaaaaacaaatgactaccaaactatagataaatctatgaatttgtctttgtattgggctgaaagatcaaagaaagcttttggacataaccctcataaagctttatttggtattgtacaaggaggtttatttaaagatttaagacaaaaatccttaaaaggacttttggaaattggatttgatggttatgcattaggtggtctagctgtaggagaaactcaagatgaaatgtttactgttttagacgacattaaggaacatttacctgatgataaacctcactatttaatgggtgtaggtactccaaatgatatcttgggcgctgtcaaaagaggtgttgatatgttcgattgtgttcttccaactagatcaggtagaactggacttgcttttacttggcagggaagagtaaatattaaaaataataaataccaaaatgataatactcctctagatccagagtgtaaaaatctaaatttgaataaat

SEQ ID NO: 239893 - DNA, 696 bp, Unknown
  Bacterial polypeptide expressing nucleotide sequence isolated from the Sargasso Sea
catttgatgaatgtacagattatccatcaacgtatgacgatgcacaaaaatctatggagctttcaatgagatgggctaaaagatgtaaagaagctcataaatcaaaatctgcattgtttggaatcgttcaaggtgggatgtataccgatttaagaaaagagtcattagatagattgatagatatagactttgatggcattgctcttggcggcttgagtgtaggtgaatcaaaacaagaaaagactgaaatattagaattcatgtcagacaaattacccgatgataagcctagatatcttatgggtgttgggacgcccgaggatattgttgaagcagtaaggtatggaattgatatgttcgattgtgttcttccgaccagaaatgccagaaatgggcaattatttacttcagaaggcgttattaatattagaaatgctgaatataaaaatagtgatgatcctattgatataaattgtgactctaaagtttctcaaaattatagtagggcataccttaatcatctccaaagaactaatgaaatgttaggctcaatgttagccacttatcacaatatttattactaccaatctttaatgaaagaaataagagagtcgattaaaaataatttattcgcgaagtttgtaaaagacttttataatagacgaaatttggatatgcccgaagggccattatagg

SEQ ID NO: 239894 - DNA, 494 bp, Unknown
  Bacterial polypeptide expressing nucleotide sequence isolated from the Sargasso Sea
cgctattggtggtttagctgttggtgaagggcaagaaaaaatgtttgaaactatagaatacaccgagccatttatggatacagacaaaccaagatatttaatgggtgttggcaaaccagaggacattataggcgctgttaaaagaggtatagacatgtttgattgtgttttaccaactaggtcaggaagaaatggccaagcttttacttctagaggtgagataaatataaaaaatgctaggcatactaaagatccaagggcacttgacgaagcatgtgactgtaacacttgtaaaaactatagcagagcgtatttacaccacttatttaaagctaatgaaatattaggtcttatgctcttatctgatcataatataaacttttaccaaaatatgatgatgggtataaggaaatcaattaaaaatgggaattttgaaaacttttcagagacttttttattaaaaagggccggtggtgatattttagaatcttgat

SEQ ID NO: 239895 - DNA, 720 bp, Unknown
  Bacterial polypeptide expressing nucleotide sequence isolated from the Sargasso Sea
aaagtataagaattcaattaggtttaaattcagatatcctaatgatcatggatgagtgcccaaaaaaaacaaacgattatgatttaataaaaaaatctatgaatctttctttattttgggcagaaagatctaaaaaggcatttggtaaaaatccacacaaagctttatttggtattgttcaaggaggcctttttaaagatttaagaattaagtcactgaatgaattaattaaaatagattttgatggttatgctttaggaggacttgctgttggtgaaactcaagctgaaatgttttcagttttagacgatattaaaatgtatctacctgaggataaacctcattatctaatgggtgttggtacaccatctgatcttcttggagctgtaaaacgtggtatagatatgtttgattgcgttttacctacaagatctggaagaactggtctcgcctttacctgggaaggaagaataaatattaaaaataataaatatcaaaacgataatacaccacttgattccaattgtgacaatttaagcttgaataaatattctaaaaattatctaaaccatctttttaatacgaatgaaattctagcttcaatgcttttaactcttcacaatatcaatttttatcaagaattaatgtcttctattagagatcatatagagtctggtacatttgataaatttcacgataaatacattgataagttgtagt

SEQ ID NO: 239896 - DNA, 807 bp, Unknown
  Bacterial polypeptide expressing nucleotide sequence isolated from the Sargasso Sea
atctgttggaggtcttcatgaatatatgaattgcaaaattccaatattgactgactctggtggttttcaagttatgtctttatctaaatttaataagattgataaagaaaaaggtgcaatatttcaatctcatatagacggtaaaaaatttgtattaagtcctgaagaaagtataaaaattcaaaaaaaattaaactcggatattgtgatggttatggatgaatgtccaaaaaaatcaaacgattatcaatcaattaaaaattcaatggagttatctagttattgggcaaaaagatcaaaagatgaatttggacaaaatgacactaaagcactatttggtattgtacaaggtggattatttgatgatttaagagaaaaatccttaaagaatttaattgatataggttttgatggatatgcactaggtggtttagctgttggtgaaacgcaaaatgaaatgtttaaagttttagataacataaaagacaaactacctaaaaataaacctcgatatcttatgggtgttggtaccccttctgatattattggtgcagttaaaagaggtgtggatatgtttgattgtgttatgccaacaagatcaggaagaactggtttagcatttacatggaatgggagaattcaaattagaaattctcaatatcaaaacgataacactccattagatccaaatgtatcaaaatttgacttaaacaaatatacgaagaactatttaaatcatttatataataccaacgaaatgttagcatcgatgctacttacattaaataatataacttttatcaagag

SEQ ID NO: 239897 - DNA, 268 bp, Unknown
  Bacterial polypeptide expressing nucleotide sequence isolated from the Sargasso Sea
atgttcgaattgattcaaagcgatggcgcggctagaaggggtcgactgaatctagggcacggtgtggttgagacgcctgtgtttatgccctgcggcacgtatggaacggtgaagggcatgacccctttggatctttctgagataggaacacagattttacttggcaacacttttcacttgatgctcaggccaagtgaccagtcgattcggaagcttggaggattgcatcgttttatgaattggagcaagcctatcctgaccgacagcg

SEQ ID NO: 239898 - DNA, 709 bp, Unknown
  Bacterial polypeptide expressing nucleotide sequence isolated from the Sargasso Sea
atggcattaaaaaaatttaattttaatgttaattatacagaaaatcattcaagagtagggctaatagaaactagcaggggaaatataaatactcctgctttcatgccagttggcactcaagctactattaagtgtgcatttattaatgacatattaaaaactggaagcgagataattctctcaaacacataccatttaatgataagaccaggtacagatagaattgaagctgttggagggttacatgaatttatgaattgtagtttaccaatattaacagactcaggtggatttcaagtaatgtcactttctaaattaaataaaatagatagagaaaaaggcgctatatttcaatcacacatagatggaaaaaaatttattttaagtccagaggaaagtataagaattcagaaatctttaaactcagatattgttatggtgatggacgaatgtccaaaaaaatctactgattatcaaaaaataaagaaatctatggaactatctattgaatgggccgagagatcaaaaattgcttttgggtcaaatccacacaaagctctttttggaattgtacaaggaggtttgtttgatgacttgagaaataaatccctaaaagcattaatcgatatagattttgatggttatgcaatagatggattagctgtaggtgatacacaagacgaaatgtttaaagttcttgataattaaa

SEQ ID NO: 239899 - DNA, 815 bp, Unknown
  Bacterial polypeptide expressing nucleotide sequence isolated from the Sargasso Sea
attgagtttaaaaaatttttcttttaaaataaaaaataaagataaattttcccgaacaggaacaattattacttctagaggtaacattgatacccctgtttttatgcctgttggaactcaagccacagtaaaagctacttttgtagacgatttaattaaagcaggaagtcaaataattttatctaatacatatcatttaatgataagacctggagaagaaagagtagctcttcaaggaggactgcacgaatttatgaattgtccactaccgattttaactgactcaggtggttaccaagttatgtctctttcaaaattaaataaaatcgatagagagaagggcgctatatttaattcccacgtagatggaaaggaatatatacttagtccagaagaaagtataagaattcaaaaaaaacttaattcagacatcgtcatggttatggacgaatgtccaaaaaaaacaacagatagaaaaattattgaagactctttaaatttatcaacagagtgggctttaagatcaaaaaattcttttggaaaaaatcctcacaagggtctttttggaatagtgcaaggtggattatttgatgatttaagaaaaaaatcacttaatgatttaataaaaattgggtttgatggatatgccttaggtggtttagctgttggagatacacaaagtgaaatgtttaaggtattagacggtataaaaaatcacttacctgaagataaaccaagatatttaatgggtgttggaaccccttccgatatccttggagcagtaaaaagagggattgatatgtttgattgtgtat

SEQ ID NO: 239900 - DNA, 649 bp, Unknown
  Bacterial polypeptide expressing nucleotide sequence isolated from the Sargasso Sea
tctatgcatctttcgatgcgctgggcggatcgctgccggtctgctttttccgaacgatccggatacggcctcttcgggatcgtccagggcagcgtctttcctaatctgcgtctggaatcggcggcggcgctgaccgatatcggtttcgacggatacgccttaggcggtctggccgtgggcgaggggcaaacggagatgttttccgtgctggatgttactgtgccggcgctgccgcaggaccggccacgctatctaatgggggtcggtacgccggacgatatcgtcggcgcggtacagcgggggatcgatatgttcgattgcgttctgccgacaaggtccggccgcaccggacaggctttcacccgccggggcacggtgaatatccgcaacgcccgacatacggaggatccccggccgctcgatcccggcagcagctatcccggcgtcggcgatgtcagccgggggtatctgcatcatttgttcaaggccaaggaaatgctgggtccggttctgctgactatgcacaacctgcattattatcaggaggtgatggccggcattcgggctgcgatcgaagccgggttgctggatcaattcgctgccgacttccgggcgcagcaggcggaaggggatatagagcccctatgac

SEQ ID NO: 239901 - DNA, 673 bp, Unknown
  Bacterial polypeptide expressing nucleotide sequence isolated from the Sargasso Sea
aatggacgaatgttcaaaaaaaactgaagattataatttaataaaaaaatctatgaatttatctttgtattgggccgagagatctaaaaaggcatttggaaataatcctcacaaagcgttatttggaattattcagggtgggttgtttaaagatttaagattgaaatcaattgaaggacttacaaatattggatttgatggttatgcagtaggaggtttagctgtaggagaaactcaaaatgaaatgtttactgttttagatgatattaaagaatatttaccagaggaaaaacctcattatttgatgggtgttggtacaccctcagatattttaggagccgtaaaaaggggtattgatatgttcgattgtgttctcccaacaaggtcaggaagaacaggtctagcttttacgtggaatggacgtttaaatatcaaaaataataaataccaatatgacaacactcccttagatcccaattgtgagaatttaaatttaaataaatattcaaaaaactatttaaatcatttgtttaatactaatgaaatattagcatccatgttattaactcttcacaatataaatttttatcaagaattaatgtcagaaatcagaaaaaatattatgaataataccttcgatgaatttcatgataaatacattgataagttgtag

SEQ ID NO: 239902 - DNA, 902 bp, Unknown
  Bacterial polypeptide expressing nucleotide sequence isolated from the Sargasso Sea
ttaaaatcgcttacacctcaacaaattgaagatactggtgctgaaatcattttaggtaatacctatcacctaatgcttagacccggagttgaaattattgaatcacatggaggccttcatcaatttaatggatggagtaaattaatcctaacagattcaggtggatttcaagtatttagcctatctgcatttagaaaagtgactgaagaaggcgtgacattcaaatcccctatcaacggcagtcagtatcaaatcacacccgagcacgccattgcactccaagagggttttggcagtgatatcatgatggcttttgatgagtgtgtaggatatccatcaacaccacaggatgtcgcatcagccatggagcgatcactgagatgggcaaaaagatgtgttgatgctcgtaaaaaaccatcttcacacctttttggtatcatacaaggtgggtttgatcataaactgagaatggagtcattagaacgaaccgttgatcttccttgcgatggatttgcacttggtggattatctgttggtgagccaaaagacaagatgtatgccatgattgaggctttcgcaccaaaaatgccaaatgaccacccaagatacctcatgggagttggaacaccttctgatattatgtttgcggtcaaacatggtatagatatgtttgattgtgtgctaccaagtagaaacgcaagaaatggtcatcttttcacaagtcaaggtattgtaaaaattcgaaatcaaaaatataaaaatgatactacaccgttagacccggaatgcccttgttacacgtgtaaacatttttcaaagtcatatcttcaccatcttgataaatgtaaagaaatgactggagcaactctcaacaccatacataacctcactttttatcaaac

SEQ ID NO: 239903 - DNA, 620 bp, Unknown
  Bacterial polypeptide expressing nucleotide sequence isolated from the Sargasso Sea
aatgcaaactcatgaattttcatttgagttagttactcaagatgaacaagctagattaggtaaaatacttacaccaagaggaaaaatagacactcccgcctttatgccggtaggaactcaaggatctattaaagcagtttttacagatgatattttaaaaactgaaacacaaattattctaggtaatacttatcatctattacttcgaccaggtattgatgtaataaagaaatttaatggacttcataatttcatgaattgggaaaaaccaattttaacagactctggagggtatcaaattatgtctttatctaaatttaataaaatagataaagatattggagctatatttaaatcacatttagatggaaaaaaaattattctaagccctgaaaaaagtattcaagttcaaaaagctataaactctgacataattatggttttagatgaatgtccaaaattaactgaagataaaaaaattttatctaattcaatcgatatatctactcactgggcaaaacgttgtaaaactgaatttggctatgacaaatctaaaggcttattcggtattgttcaaggtggattatataaagaccttcgagaagaaagtataaataaac

SEQ ID NO: 239904 - DNA, 361 bp, Unknown
  Bacterial polypeptide expressing nucleotide sequence isolated from the Sargasso Sea
gttagatatggaatagatatgttcgactgcgttcttccaacaagaaatgcaagaaacggacaattatttacctctgagggggtcataaatataagaaacgcagaatataaaaactcagatgagcctattgataaaaattgtgactctaaagtttctcaaaattacagcagggcttaccttaatcatttgcagagaactaatgaaatgctggggtctatgctagctacataccataacatttattactatcaatccttaatgaaagatattagaaatgcaataaatgataatttattcgcgaagttcttaaaagacttttataatagacgaaatttagatatgcccgatgggccaatatagg

SEQ ID NO: 239905 - DNA, 319 bp, Unknown
  Bacterial polypeptide expressing nucleotide sequence isolated from the Sargasso Sea
atgacattaaaagactttgcttttagtgtttctaataaagatagatatgctagatgtgggattattcaaactaatcatggcaatattaatactccggcatttatgcctgttggtactcaagccactgttaaagcgtgtactattgaagatataaaaaaaacaggttcagagataatcttaagtaacacttatcacttgatgatacgtcctggtgttgagagaataaaaagattaggtggattacaaaagtttatgaattgtgatttaccaattttaacagactctggaggttttcaagtcatgtctctctctaaataaa

SEQ ID NO: 239906 - DNA, 565 bp, Unknown
  Bacterial polypeptide expressing nucleotide sequence isolated from the Sargasso Sea
aatggttaaagaagacttttcttttgagttattagctcaagatgggaaagcaagattaggtaaaattaaatcatcaaaaggttatattgatactcctgtgttcatgccagtagggactcaaggtacaataaaaggtgtttttacttcagatattttaaatactaatactcaaataattttgggtaatacttatcatttacttttaagaccaggtatagaaattttaaaaaaatttggtggattacataattttatgaattggaataaaccgattttaactgattctggcggataccaaataatgtcattatcaaaatttaatagaatagatataaatttaggtgcgatatttaaatctcatatagatggtaagaaaattattttaagcccggaaaaaagtataaaagttcaaaaagctataaattcagatattattatggtcttagatgagtgtccaaaattaacgagagataaaaaaatattatcaaaagcaattaatgtatctacagaatgggctagaagaagtaaaatagaatttggcagcgataaatcaaaagctttattt

SEQ ID NO: 239907 - DNA, 706 bp, Unknown
  Bacterial polypeptide expressing nucleotide sequence isolated from the Sargasso Sea
tatggcttttgacgagtgtccaccttatccgtgtgattatagttatgcaaaaaattcaatgaatttgactcatcgttggttaaatagatgcataaatcagtttaaagatactccagcaaaatatggttacgaacaaatattttttccaattgttcaaggtagtacttttaaagatttaagaaaggagtccgcagattttatatcttcaaaaaattgttttggtaatgcaattggtggtctttctgttggtgaacctcatgatgaaatgtatgaaatgacttcaatagtttgtgaaagattacctgaggataaaccaagatatcttatgggtgttggtactccagtgaatctacttgaaaacattgctctaggaattgatatgtttgattgtgtaatgccaacacgaaatgggagaaatgggatgttattcacttctgaaggaataattaatatcaaaaataaaaaatgggaatttgattattctttaatcgatgataatggtactacatgggtagatagaacttattcaaaatcttacttaagacatttattctctgttaatgaaatgcttggaagacaaatagcatcaatacataatttgggtttttactgttttctcatgagtgaggccagaaaaaaaataattgatggagattttttaaattggaaggacaaaatggtaaaaaaattaaataacagattatag

SEQ ID NO: 239908 - DNA, 916 bp, Unknown
  Bacterial polypeptide expressing nucleotide sequence isolated from the Sargasso Sea
aatgttaagaccgggcactgaaactattaaacgcttcggtggtctacataaatttatgaactgtaaacttccaatattaactgactctggaggttttcaaattatgtctttatctaaacttgttaagattgataaaaaaaaaggcgcaatttttaattctcatcttgatggaaaaaaaattatcttaagtccagaagaaagtattcgaattcaaaaagatttaaattctgatattgttatggttttagatgagtgtcctaaacttactaaggataaaaataagttaagcgaatcactaaaactttcaaaccattgggctgaaagatcaaaaattgaatttggtttaaatcccaagaaagctttatttggaatagtacaaggtggaatttacaaagatctacgtttagaaagtttagaagggttagaaaaaattggatttgacggatacgctttaggtggtttagctgttggtgaatctcaatctcaaatgtttaatgttttagaaaatataacatttaaaatgccaaaaaataaacctagatatctcatgggtgttggcacaccatcagatattttaggtgcagtgaaaagaggcattgatatgtttgattgtgttatgccaacaagatcgggcagaaccggactggctttcacatgggagggaaggcttaatttaagaaactcaaagtataaaaaagatgatagtcctataaataaatacatccaattaagaaacagcaacttatattctaagagttatatcaatcaccttattaattcaaatgagatactagcctcaatgcttcttacattaaataacataattttttatcaggatttgatgaataaaatcagagaagcaatcaaaaataatacttttgatcaattttataacaaatatatcaatataatttag

SEQ ID NO: 239909 - DNA, 872 bp, Unknown
  Bacterial polypeptide expressing nucleotide sequence isolated from the Sargasso Sea
tgggccaattttgactgactctggtggtttccaaattatgtctctggctaagctcaggaaactaaccgatggtggggttacatttaagtcccatattgatgggactgagcactttctgtcacctgagaaaagcattggaatccaggagacattgaatgcaactatttctatggttcttgatgagtgcactgcttatccgtgttccaaggaagaagcagaaaagtctatgaaattatccatgggttggtctgcccagtcaaaagatgccttcaatccgcgcccaggttttggacttttcggaattgtgcagggtggtatccattttgacctccgcagggaaagtgcgacctttcttgaagaacaaaaattcgatgggtatgccattggcgggcttgcagtaggggagggttcagaaattttgcacgaggtggctggtttcactgcagggcttcttccatgtgataaaccgcgatatttaatgggggtgggaaggccagaggatttggttcaggctgtctcagttggttgcgatatgtttgactgtgtattgccgacccgctctggtcgaacagggcaggcgtttacccatcgaggtaccgtcaatatcaggaatagtcggcacagatcggatgcgcgaccattagacgaactgtgtgattgtcctacttgtctaagttacactcggggttacttgcatcatttagttcgatcaggcgagatattgggatcgatgcttatgacatggcacaatattcactattatcagggtttgatggcatcgatccggagacatatcttaggtggagaattcagcaggtttgaggctagttttagggaattatacttggagggcgacattgagcccctgactt

SEQ ID NO: 239910 - DNA, 583 bp, Unknown
  Bacterial polypeptide expressing nucleotide sequence isolated from the Sargasso Sea
atgacattaaaaaaatttacttttaatgttgaaagcaatgatcatttagcacgaactggtataataagtactcataggggcgatattagaacaccggcttttatgcccgtaggaacgcaagctactgttaaggcaacttttatggatgacataaaagaaactggttctgatgtaattttaggtaatacatatcatttaatgataagaccaggggtcgatagagtggttagtgctggaggtttacataaatttatgaattggccttatccaatattaacagactctggtggttttcaagtaatgtcattatctaaattaacaaagattgatcgagaaaaaggagcaatatttaattcgcacattgatggcaaagagtttattctaagtcccgaagagagtattaaaattcaaaaaggactaaactcagatattttaatggtattagatgagtgtcctaaaaaaactgtagataagaataaaattaaggaatcactttctttgtcaacatattgggctcaaagatcaaaaaaagcttttggtttgaatccacacaaagccattatttggaataatccaaggagga

SEQ ID NO: 239911 - DNA, 702 bp, Unknown
  Bacterial polypeptide expressing nucleotide sequence isolated from the Sargasso Sea
gatgaaaaaaaaagagttttcttttagtttaattacgaaatttaaaaatgctaggctaggaaaaataaaaactcctagaggaaatatagatacacctgcatttatgcctgtaggaacgcttggtacagttaaaggtttatttgtagaagatgttaaaaaaacaggtgcacaaattattttaggtaatacttatcacttgatgttaagacccggacctaatgtattagaaaattttggtggtttgcataattttatgaattgggacaaaccaattctaacagattcaggtggttttcaaataatgtcattatcgaagcttaacaaaatcgataaagatatcggtgctacttttagatcacatattgacggaaaaaaaataatattaagtcctgaaaaaagtataaaaatacaaaaatcaataaattccgatatattgatggttttagatgagtgtcctaaattaactagagatcgagataaattaaaaagagcgattgatatatcaacaaattgggcaaaaagatcaaaagtagaatttgggaataacaaaaaaaaggcattgtttggcattatacaaggtggattacataaagatttgcgaaaagagagtttacaaagacttatcgaaattaattttaatggttatgctatcggaggtttggctgtgggtgaaagtcaagccgaaatgtttgaacggttaaa

SEQ ID NO: 239912 - DNA, 673 bp, Unknown
  Bacterial polypeptide expressing nucleotide sequence isolated from the Sargasso Sea
aatgaagaataataaattctcttttgagctgataactcaaaatggtaaggctagattgggaataatatctacaccaaaaggaaaaatagatacccccacatttatgcctgtagggacccaaggaactgtaaaaggaatttttacggatgatatcataaagactggcactcaaattattttaggaaatacctatcatctgctattacgtccaggaatagaaattttagataaatttaatggtcttcatagattcatgaattgggataagccaattcttacggactcaggggggtatcaaattatgtctttatcaaagttaaataaaatagataaaaatattggagcagtatttaattctcatatagatggtaaaaaaattattttaagtccagaaaaaagcatccaagttcaaaaagctataaattctgatataattatggttttagatgaatgtccaaaattaacagatgataaaaaaattttatcaaaagcaatagatgtgtcctctcattgggctaaacgtagcaaaattgaatttggtcaagacaattcaaaagctttatttggaattgctcaaggtggcttacataaggatttacgagaagaaagtattagtaaattaatagaaataggctttgatggttatgcaatggggtggtcttgcagtaggtga

SEQ ID NO: 239913 - DNA, 386 bp, Unknown
  Bacterial polypeptide expressing nucleotide sequence isolated from the Sargasso Sea
catgaaactaaatacctttaattttaaggtgttaaaaacctgcagaaatgcccgaaccggcattttgtcaactgctcatggattgatagatactccaacatttatggcagtgggaactgcgggcaccgtaaaagctctgacccccgaagctgttgccaaaaccggaactcaagtaattcttggcaacacctaccatctaatgcttcggccaggagccgatagagtggaaaaatttggcggattacataaatttatgaattgggataattcgattctgactgactctggggggtttcaaatcatgtcgctggaaggattaagaaaacttgaagaaaacggcgtcacttttcgttctcacattgatggctcaagccaccatttaacgc

SEQ ID NO: 239914 - DNA, 617 bp, Unknown
  Bacterial polypeptide expressing nucleotide sequence isolated from the Sargasso Sea
aatgtttaaactactaaaaactgatactcattctcgggcgcggctcggcgctcttatgacggcacacggcatggtggaaacgccggtgtttatgccagtgggcacgagggccaccgtcaagacactcgataatgcagaccttcaaaacattggagtgagaactattcttggtaatacctaccacttaaatcttcggccgggaatggacgtggttcgtgcggcaggtggtttgcattcgttcatgaactgggatggcccgatattaactgatagtggagggttccagatatttagtttgtccaagattgccaaaatccgggaagatggggtggaatttaaatcacacattgatggaaaaaagctcttccttgggcctgaggagtccatggagatacagcggcatctggctagtgacatcgctatggtctttgacgattgccctccgtacggtgcctcaaagaaagatgtcagttttgcaattgatagaacgcatcgttgggcagttaagtgttttaatcagcctcgggcagatggacagttagtcttcggcattattcaaagtggttgttatgaagatttaaaggagcaaagtgctgcagaattacgggtatcgaatt

SEQ ID NO: 239915 - DNA, 709 bp, Unknown
  Bacterial polypeptide expressing nucleotide sequence isolated from the Sargasso Sea
aatgaaatttaaagaaattaattcttcagaatttgcaagagtttctgaaattcatacagctagaggtgtaattcacactccagcatttatgcctgttggtactaatggaactgtcaaaggacttacaactaatgacctaactgaaactaactctgaaatcatacttggtaatacttttcacttaatgttacgacctggtgataagctcattaaaaatttaggtggccttcataaattcattaattgggaaaaacctattttaactgactcaggaggttttcaggtatggagtttaggtgatttagcaaaaatttctgaagaaggagttaaatttagctctccttatgatggaaaaaaaatatttatgacacctgaagattctataatgattcaagaaaatcttggttcagatattattatggtatttgatgagtgcacagactacccatcaagtcatgaccaagctcgtaaatctatggagctttctatgagatgggcaaaaagatgcaagattgctcataaatctgactcagcattatttggaattgcacaagggggaatgtataaagatctaagagaagattctctaaataaattaatagacatagattttgatggtattgcacttggtggtttaagtgttggtgaatcaaaacaagaaaaaactgaaatattggaatttatgtctgataagttgcctaaggataaa

SEQ ID NO: 239916 - DNA, 872 bp, Unknown
  Bacterial polypeptide expressing nucleotide sequence isolated from the Sargasso Sea
aatgacattaaaaaaatttacttttaatgttgaaaacaatgatcatttagcacgaacaggtataataagtactcataggggtgatattagaacaccagcttttatgcccgtaggaacccaagctactgttaaggcaacttttatggatgacataaaagaaactggttctgatgtaattttaggtaacacatatcatttaatgataagaccaggagttgatagagtggttagcgctggaggtttacataaatttatgaactggccttatccaatattaacagactctggtggttttcaagtaatgtcattatctaaattaacaaagattgatcgcgaaaaaggagcaatatttaattcgcacattgatggcaaagagtttattcttagtcccgaagagagtattaaaattcaaaaaggactaaactccgatattttaatggtattagatgaatgtcctaaaaaaactgttgataaaaatattattaaggaatcgctttctctatcaacatattgggcccaaagatcaaaaaaagcttttggtttgaatccacacaaagcattatttgggataattcaaggcggattatttaacgatttaagaaaagagtcattagagcaattagtaaaaatagatttcgatggatacgctgtaggaggattagcagttggagaaacccaaacagaaatgttcaatgttttagatggtattacaaaatttatgcctaccgataaaccacgatatttaatgggtgttggaacgccagcagacattttgggtgctgtaaaacgaggtatagatatgtttgattgtgtcatgccctctcgatcaggtagaacaggattagcatttacttggcaaggaagaataaatt

SEQ ID NO: 239917 - DNA, 595 bp, Unknown
  Bacterial polypeptide expressing nucleotide sequence isolated from the Sargasso Sea
tatggataaatttaaattagtagccacgtcaggtacggctcgcgctgcggagtttaacacgcagcacggccgggtatcaactccagtattcatgccagtaggcacacaagcgactgttaaagcattgtcgcctgaagagataaaaaataccggagcctccattatattaggtaacgcatatcacttatcattacaacccggagtgaagctaatccatgattttggaggacttcactcatttatgaactgggataaacccattctgaccgacagtggaggcttccaagcttttagtttaagcgaaaccaacaaaataaccgacgacggaataacttttaaatcaccatcagatggttcctctcattttattaatcctgagcaagccacattaaaccaaatacaaataggagccgatataataatgtgttttgaccactgtatagaatacggtgcgtcattaattgaagtagaagcagctatggatagaactcatagatgggcttctctttgccaacaaacattccagaattatgggaatgaagatagacaatcactatttggaattattccaggaggcacttccagagatctaaga

SEQ ID NO: 239918 - DNA, 592 bp, Unknown
  Bacterial polypeptide expressing nucleotide sequence isolated from the Sargasso Sea
aaaaagacggggattttttttgtttggaatagttcaaggaggtatgtttagtgaattaagaaaaaaatgtgcggaagaacttgtaaaaatagggtttgatggatacgccataggtggtttatctgtaggagagagtcataataaaatgatcagtgtaattgattcaacattatcttttttaccatcagataaaccaagatacttgatgggtgttggaagaccagttgatatatttgaagccattgaaagaggtgtagatatgtttgattgtgttttaccgactagatttggtagaaatggaagagcatttacatcaaatggtgagattaatttaaaaaattctaggtttgcaaaagataagaaaccattagatgaaagtagtatttgtgaaatatcatcaaagttttctaaaggttatttacatcacttaacaaagaataatgaaattttatcttctatgattcttagcttgcataatattgctttttacaagaaaatgatgactgaaattagagcctctataaaagaaaaaaaatttttgcaactcaaagaaaaatatttaaataatcatggcaaattcaaaaaaaactag

SEQ ID NO: 239919 - DNA, 727 bp, Unknown
  Bacterial polypeptide expressing nucleotide sequence isolated from the Sargasso Sea
tacattggtgcagatataatcatggcttttgatgaatgtacaccttatccttgtgattatcgctatgcacaacgaagcatgcacatgacgcatcgttggttaaatagatgcataagtcatttagaaaaagtgcctacaaagtatggctataatcaaacttttttcccaatagttcaaggaagtacttttaaagatttacgacaacaatctgctgaatatattgcaaatgctggtgctcaaggaaatgctattggtggattatctgttggtgaaccagccgaagaaatgtatgcaatgaccgaagtcgttactgcaattcttccaaaagataaaccaagatatttaatgggtgttggtacgccaattaatatcttggagaacattgcattgggaattgacatgtttgattgtgtgatgccaactagaaatgcaagaaatggaatgttatttacagcaaatgggaccataaatatcaaaaataaaaaatgggaagatgatttttctccaattgatgaaatgggtcatacttgggtagatacggaatataccaaagcctatttaaggcatttatttgctgccaatgaatatttaggaaaacaaattgctacgattcacaatctagggttttatatgtggttggttcgtgaagctagaaaacatatcttagcaggagattttagaacttggaaagatatgatggtaaaacaaatggatcaacgattataag

SEQ ID NO: 239920 - DNA, 469 bp, Unknown
  Bacterial polypeptide expressing nucleotide sequence isolated from the Sargasso Sea
atgaaaataaccaacttttcttttgagctaatatctcaaaacgacaaagctaggttaggaagaattctaactagtagaggaacaatagatacacctgcatttatgccagttggaacacaaggcacaataaaaggtgttaatacagaagatattttagaaactggtactcaaattattttaggcaatacttatcatttattgttgagacctggtgtagaaattttaaaaaaatttgatggtcttcataaatttatgaattggaataaaccaattttaaccgactccggaggctatcaaattatgtcattatcaaaatttaataaaattgacaaagatatcggcgctatatttaaatctcatatagatggaaaaaaaattattttaagtcctgaaaaaagcattcaagttcaaaaaaacataaattctgatataattatggtgttagatgaatgcccggaaattaactaaa

SEQ ID NO: 239921 - DNA, 289 bp, Unknown
  Bacterial polypeptide expressing nucleotide sequence isolated from the Sargasso Sea
atgaagaaatttgaattaatccatcaagatggcaatgccagacgaggaaaattatttactcaacatggagaaattaatacccctgcctttatgccagttgggaccgctggaacggttaaaggggtatttactagagaccttaaagaaacaggttcagagattattttaggaaatacttatcatttaatgcttaggccaggagataagagtatagctgaagcaggagggttgcataaattcatgaattggaacatgcctatcttaactgactccggtgggatatcaagtc

SEQ ID NO: 239922 - DNA, 517 bp, Unknown
  Bacterial polypeptide expressing nucleotide sequence isolated from the Sargasso Sea
agctaattttatttcagaaaaaaattgtaaaggaaatgcaattggaggtttgtctgtaggtgagcctgaagaagaaatgtatgaaatgactgaagtcgtatgttctattctgcctcaagataagcctcgttatttaatgggagtaggaaatcctataaatattcttgaaaatatttctttaggtgtagatatgtttgattgtgttatgcctactagaaatgctaggaatggaatgctttttacttctgagggaacaataaatattaaaaacaaaaaatgggaaaatgatttttcagctatagataaaaataattatacttttgttgacaatcaatattcaaaagcttatttaagacatttgttttcaataaatgagatgttgggaaagcaaattgcatcaattcataatttaggtttttataattggttgttagatgaagcaagaaaaaatattttagagggttcattctctatatggaaatcaaaaatgattagtaaattgaataacagattatga

SEQ ID NO: 239923 - DNA, 796 bp, Unknown
  Bacterial polypeptide expressing nucleotide sequence isolated from the Sargasso Sea
atgtcattaaaaaatttttcttttaatgtcgttaaaaaaaatggatttgctagattaggacttattgaaacccatagaggaaatatagacacacctgtgtttatgcctgtaggaactcaagctacaataaagggcgcatttatcgaagatataattaaaactggtgcgcaaattatattatctaatacttatcatttaatgattagacccggcgttgaaagagtcaagtctcatggggggcttcacaattttatgaattgtccattgcctatattgactgactctggaggatttcaagttatgtcactttcaaaattgaataaaatcgacaaagagattggagcaatttttaattcgcatatagatggtaaaaaattcatcttaagtcctgaagaaagtataaaaattcaattaggtttaaattcagatattgtaatggtaatggatgaatgtccaaaaaaaacaaatgattatgatttaatacaaaaatcaatgaaactttcaatgtattgggccgaaagatcaaaaaaacaatttgggtcaaatccccataaagctctttttggtattgttcaaggtggattatttagtgatttaagagaaagatcattaaatttattaaaggaaattggttttgatggatatgcaattggaggattggctgttggcgaaagtcaaattgaaatgttcaagatattagatggattaaaaaatctaatgccagaagataagcctagatacttgatgggtgtggggacacccattagatattcttggagccagtttacagaggtat

SEQ ID NO: 239924 - DNA, 850 bp, Unknown
  Bacterial polypeptide expressing nucleotide sequence isolated from the Sargasso Sea
gatggcattaaaaaattttgcctttaaagttcttaaaaaagataagtttgcaagatcaggtgttatagaaacttatcgtggtagtataaacacaccagcttttatgcctgttggcacacaagcaaccgtaaaagcttgtacaattgatgacataaaaaaaactggttctcaaataattttgtctaacacttaccatctaatgattagaccaggtgttgaacgaattaaatctgctggtggactacataaatttatgaattgtgatttaccaattttaacagactctggtggctttcaagtaatgtctctttcaaaattaaataaaattgatcgtgaaaaaggtgccatctttaattcacatgtagatggtaaaaagttttatttaagccctgaagaaagtataagagttcaactgggattaaattcagatattgttatgattatggatgagtgcccaaaaaaaactatcgattatgatttaataaaaaaatctatggatctatcattgtattgggcagaaaggtcaaaaaaggcatttggtataaatcgacataaaggtctatttggtattgtacaaggagggttatttaaggatttgcgaataaagtcattaaatgaattaatgaatataggttttgatggctatgcattaggaggacttgctgttggtgaaactcaacaagaaatgttttcagttttagatgatgtaaaagaatatctaccagatgataaaccccattatttgatgggtgttggtacgccgtctgatattcttggagctgtgaaacgtggtattgatatgttcgattgtgttctacctactagatctggaagaactggacttgctttt

SEQ ID NO: 239925 - DNA, 597 bp, Unknown
  Bacterial polypeptide expressing nucleotide sequence isolated from the Sargasso Sea
taagatcaaaaaattcttttggaaaaaatcctcataagggtctttttggaatagtgcaaggtggattatttgatgatttaagaaaaaaatcacttaatgatttaataaaaattgggtttgatggatatgccttaggtggtttagctgttggagacacacaaagtgaaatgtttaaggtattagacggtataaaaaatcacctacctgaagataaaccaagatatttaatgggtgttggaacaccttcggatatcctaggagctgtaaaaagagggattgatatgtttgattgtgtattaccctctagatctgggagaactggtttagcttttacgtggaatggacctataaatattaaaaatgctaagtaccagaatgatacaaaacccattgatgaaaaatgtgaaaaatttaacttaaataagtattcaaaaaactacttaaatcacttattcaatactaacgaaatactggcctcaatgcttttaacgctccataatataaatttttatcatgaacttatgaatgaaataagaattaacataaataatggaacttttgaccagttttttgatgaatacatagctaagttgtaat

SEQ ID NO: 239926 - DNA, 355 bp, Unknown
  Bacterial polypeptide expressing nucleotide sequence isolated from the Sargasso Sea
aatggcattaaaaaaatttgcctttaacgtattaaaaaaagataaatttgctaggtgtggtttaatagagacacatcgtggtaatatacaaaccccagcttttatgcctgtaggaacacaggcaaccgtaaaggcttgtacaatagatgatattaaaaaaactggatctgaaataatactttctaatacttaccacttaatgatacgccctggtgttgaaagaatcgaatctgctggtggactccataatttcatgaattgtgatttacctattttaactgactctggtggttttcaagtaatgtctctctcaaaattaaataagattgacagagagaagggagccatatttaac

SEQ ID NO: 239927 - DNA, 838 bp, Unknown
  Bacterial polypeptide expressing nucleotide sequence isolated from the Sargasso Sea
gatgtataaacttatagcaaaagatggagaagctcgcaggggggaagtgtctacagaacatggaacatttcagactccagcttttatgcctgttggtacctatggtgctgtaaagtctataagccctgaaatcttacattcaataaatgcagagataattttatctaatacctatcatctaatggagcggcctggtgttgatattattaaattgaatggaggattgcataattttatgtcatgggacaaaccaattttaactgactcaggaggctatcaagttttcagtcttgcaaaaaagaggaaaataagcgaagagggagtagaatttaactcagctttgaatggaaataaattattcttaaatccagaaaaatgtatggaacttcagcagtcttatggagttgatatagctatggtccttgatgaatgtacaccttatccagcggagatatcggtagcagaaaaatctatgcaattgtccttaagatgggctgaaagatccagaaactcctttaatagcaataaatcaagtttgtttggaatagtacaaggcggtgtttacggtgatcttagagagcagtctttagaaggcctaaaaggaatggattttgagggatatgccataggaggattatctgtaggagagcctaaagatgacttacgtaaaattactaatttaattgctcctaaaatgccagtagataaaccccgctatttaatgggtgtaggcacacctcttgatattgttaaagccgtcgaaagtggagtagatatgtttgattgtgtaattcctacacgacatgctagaaatggttatctttatacttcagaagga

SEQ ID NO: 239928 - DNA, 467 bp, Unknown
  Bacterial polypeptide expressing nucleotide sequence isolated from the Sargasso Sea
aatgtcattaaaaaaattttcttttaatgtcatttcaaatgatggatttgcaagaattggaaaaattcaaacacctaggggaaatatagatacacctgtatttatgcctgtcggcacacaagccacaataaagggtgcttatataaaggatataattaaatgtggtgcacaaataattttatcaaatacatatcatttaatgatacgccctggtgtagagagagtaagctctttaggtggtcttcatgaatttatgaattgctcattaccgatcttaaccgactcaggtggatttcaagttatgtctctttcgaagttaaataaaattgacagggaggttggtgcaatttttaattcacatatagatggtaaaaagtttattctaagtccggaagaaagtattaaaattcaacttgggttgaattctgatatattaatggttatggacgaatgtccaaaaaaaacga

SEQ ID NO: 239929 - DNA, 818 bp, Unknown
  Bacterial polypeptide expressing nucleotide sequence isolated from the Sargasso Sea
aacacatatcatttaatgattaggcctggtattaaagttttagaaaaatttaacggtttacataattttatgaattggagcaaaccaattcttactgattcaggtggctttcaaattatgtcattatcaaagttcaataaaattgataaagacataggcgcaatattttcttctcatattgatggaaaaaaatttattttaagtccagaaaaaagtattcaaatacaaaaaaaaattaactcggatatcttaatggtgcttgatgaatgtccaaaacttacaaaagataaaaaaaaaatctctgatagcatagatatatcaacccattgggcaaaaagatgtaaagttgaatttggaaaaaataaaaaaaaggcactttttggcatcattcaaggaggtttatataaagatctcagaattgaaagtttagagaagcttaaagaaattaactttgatggatatgctctaggcggattagctgttggagagtctcagtttgagatgtttaaaatattagatgaaattgttcctcttatgccgagggataaaccgagatatttaatgggcgttggcactccctctgatatattgcatgcagttaaaaatggtgttgacatgtttgattgtgttatcccaacgcgttctggcagaactggattagcttttacttgggatggaaaattgaacttaaaaaattcaaagtttaaatatgataagtcacctttagatcaaagttgcaaaattcgaaatttaaacctctattcaaaaagttatttaaatcacctaataaaaactaatgaactgttggcttctatgat

SEQ ID NO: 239930 - DNA, 895 bp, Unknown
  Bacterial polypeptide expressing nucleotide sequence isolated from the Sargasso Sea
aatgttgccggaaaatgttcgcgaaataggtgctgaagttattcttgctaatacgtaccatctcatgttgcgtccaggtgctgaatgcatagacgcgttgggaggcttgcacaagtttatgaattggcacttgccgattcttactgatagtggcgggtttcaggttatgagtctttcgaaactatcgaaagtaaccgaaaacggcgtaaagtttaggtcgcatattgatggttcggaatatcttttaacgcctgagcgatccatccaaattcagcgtttgttagggtctaacattgtaatgtgctttgatgaatgtaccaagtttccagtaacggaggatgtagctgaggccagtatgttgatgtcaatgcgttgggctgaacgttccaaaattgaatttgaaaaaaaccaaggagaggctttgttcggaatagtgcagggcggtacgtataagaatttgagacagcaaagtgtagacatgctaaccaaaattggttttgatggttatgccctgggtggtcttgcggttggagagggccacgatgccatgttagacgtgctcgactatgttccaacaactttacctagaaactttgctcgatatcttatgggagtaggaaaacctccagatattgtggaggcggtaactcgaggagtggacatgtttgattgcgttttgccttcgcgctccggtcgaaccggtcaagcgataacaagaagaggtccgataaatattcgtaattttcgtcacaaaaatgacaatagaccgctagatagcgaatgtaattgtttaacatgtaggagttattctcgagcgtaccttaatcacgttaatagagctcaggagataatctcatcaatattacttacttggcataatcttcattattatcag

SEQ ID NO: 239931 - DNA, 685 bp, Unknown
  Bacterial polypeptide expressing nucleotide sequence isolated from the Sargasso Sea
aatggcattaaaaaagtttacttttaatgttaaagaaaaagataatcaagcgagactaggattaattcaaacacatagaggtaatataaatactcctgtttttatgcctgttggtacacaagcaacagtgaaaggagtttttattgatgatgtaattaaaactggtgctgagattattttatcaaatacctatcatttaatgttaaggcctggtattaaaagaatagagtctttaggtggattgcataaatttatgaattgtaaattacctatcctgacagattcaggtggattccaggtaatgtcattatcaaagcttaataaaatagatagagagaaaggagctatatttcaatcacatatagatggtaaaaaatatattttaagccctgaagaaagcataaaagttcaaaaatctcttaattcagatatcgtaatggtaatggatgaatgtccaaagaaaagtagtgattataaaaagattaaaaaatctatggaattatcaatatattgggctgaaagatcaaaaaaatcttttggtatcaattctcataaagctatttttggaattgtacaaggtggtttgtttaaagatttaagaattaagtcattagagcaattgcttaatattgattttaatggatatgcattgggtggattagctgttggcgaaagccagaaagaa

SEQ ID NO: 239932 - DNA, 484 bp, Unknown
  Bacterial polypeptide expressing nucleotide sequence isolated from the Sargasso Sea
gatggatatgctgttggtggtctgagcgtaggagaatcaaaggaagaaatgtataatgtgacccatcatataacaccaagaatgcctcctgaaaaaccccgttaccttatgggtgttggagatccatcagacttgttggaaggaattgaagctggaattgatatgtttgactgcgtaatgccaaccagaaatgctagaaatggaatgctttttacttcacatggtaagatcattattaagcagagcaaattcaaggaggatccagagcctttagatacagaatgtgaatgtcctacttgtaaaaactattccagagcttatcttcagcatcttttcaaatcaggtgaaattctaggcgtacgtctgaatacataccataatctttttttctttatttcccttttaaaaaaggcaagggaagctatcatcgaaagacgctttatcgaatttaaaaaagattttctaaaaaaatttaacagttaac

SEQ ID NO: 239933 - DNA, 892 bp, Unknown
  Bacterial polypeptide expressing nucleotide sequence isolated from the Sargasso Sea
tatcatctaatgatacgacccggtgaagaaagagttgctcttcaaggaggtttgcatgagtttatgaattgtccattaccaattttaaccgactcaggtggatatcaagtgatgtcactatcaaatttaaataaaattgacagagagaagggagctatattcaattctcatgtggatggaaaattatatactcttagtccagaagaaagtataagaattcagaaaaaactaaattcagacattgtcatggttatggatgaatgtccaaaaaaaacaacagacagaaaagttattgaagactctttaaacttatcaacagagtgggctttaagatcgaaaaattcttttggaaagaatcctaacaagggtctttttggaatagtgcaaggtggattatttgatgatttaagaaaaaaatcacttaatgatttaataaaaattgggtttgatggatatgccttaggtggtttagctgttggagacacacaaagtgaaatgtttaaggtattagacggtataaaaaatcacttacctgaagataaaccaagatatttaatgggtgttggaacaccttcggatatcctaggagcaataaaaagagggattgatatgtttgattgtgtattaccctctagatctgggagaactggtttagcatttacgtggaatggacctataaatattaaaaatgccaagtatcagaatgatacaaaacccattgatgaaaaatgtgaaaaatttaacttaaataagtattcaaaaaattacttaaatcacttattcaatactaacgaaatactggcctcaatgcttttaacgctccataatataaatttttatcatgaacttatgaatgaaataagaattaacataaataattggaacttttgac

SEQ ID NO: 239934 - DNA, 593 bp, Unknown
  Bacterial polypeptide expressing nucleotide sequence isolated from the Sargasso Sea
aatgacattaaaaaagttttcttttaatgttaaggaaaaagataatcaagcaagattaggtataattaaaactcaaagaggcaatatacatacacctgcctttatgccggtaggtacccaagcaacagtaaaaggtacatttatcgatgatataatcaaaactggtagtgaaataatactatcaaatacttatcatttgatgattagaccaggtgtggagagaatagagtcagctggtggtttacatcaatttatgaattgtaatttacctatacttacagattctggaggttttcaagtaatgtccttatctaaattaaataaaattgataaagaaaaaggagcaatttttcaatcacatatagacggaaaaaaatttattttaagccccgaggagagcataagaattcaaaaatcccttaattcagatatcgtaatgtcaatggatgagtgtccaaaaaaaagcagtaattataaaaaaataaaaagttctatggaattatcaatgtattgggccaatagatctaagaatgcttttggaacaaatccacaaaaagctatatttgggtatatacagggaggtttatttaaag

SEQ ID NO: 239935 - DNA, 304 bp, Unknown
  Bacterial polypeptide expressing nucleotide sequence isolated from the Sargasso Sea
atggcattaaaagattttgcctttaatgttttaaaaaaagataaatttgctagatgtggtttaattcaaactcacagaggtagcatcaacactccagcttttatgccggttggaacccaagcaactgttaaagcttgcactatagatgatattaagaaaactggttctgagataattctttccaacacatatcatttaatgattagaccgggtttagatcgtattgaaagctcaggaggtttacatcagtttatgaattgtgacttacctatattaacagattctggaggatttcaagtaatgt

SEQ ID NO: 239936 - DNA, 712 bp, Unknown
  Bacterial polypeptide expressing nucleotide sequence isolated from the Sargasso Sea
atggcattaaaaaaatttgcctttaacgttttaaagaaagataaatttgctaggtgtggtttaatcgagacgcaccgtggaaatatacaaacacctgcttttatgcctgttggaacacaagctacaataaaggcttgcacaatagatgatataaaaaaaacaggttcagaaataatactttcaaatacttatcacttaatgatacgtccaggtgttgaacgaattaaaactgctggtgggcttcataattttatgaattgtgatttaccaattttaacagattccggtggttttcaagtaatgtctctttcgaagttgaataaaattgatagggagaagggcgctatatttaactctcatgttgatggtaaaaaattttatttaagtccagaagagagcattaggatacaattaggtttaaattctgatattgtaatgattatggatgaatgtccaataaaaacatatgattacgagctaatcaacaaatctatggatctttctctttattgggccgaaagatcaaaaaaagcatttggtaaaaatcctcaaaaagcattatttggtattgtacagggtgggctgtttaaagatttaagactcaagtcgttaaaagaacttatgaaaattggttttgatggatatgcaattggtggtttagcagtaggagagacacagaatgaaatgttttgtatattagacaacattaaag

SEQ ID NO: 239937 - DNA, 463 bp, Unknown
  Bacterial polypeptide expressing nucleotide sequence isolated from the Sargasso Sea
ggtggattggcagtaggagaaactcagcacgagatgtttaatgttttagaagatataaaagaatatttaccaaatgaaaaaccacgttatttaatgggtgttgggacaccatctgatattttgggagctgtaaaaagaggtattgatatgtttgattgtgtcttaccaactagatctggaagaacaggcttagcttttacatggaatggaagaataaatataaaaaataaaaagtatcaaaaagataatactccccttgatccaaattgtgagaatttaaacttgaataaatattcaaaaaattatttgaatcatttgtttaatactaatgagatattggcatcaatgttgctttcgttacataatattaatttttatcaagaattaatgttagagatcagaaaaaatattaatttaggtacttttgatgaatttcataataaatacatagataagttgtagt

SEQ ID NO: 239938 - DNA, 643 bp, Unknown
  Bacterial polypeptide expressing nucleotide sequence isolated from the Sargasso Sea
atgggaagtaatatttataaacttataactaaagatggtcttgctagaagaggtgaggtaaaaactgctcatggtaaatttcaaacccctgcctttatgcctgttggaacttacggagcggttaaatctcttagtccagaaactttagaagcattaaaagctgagatcattctttctaatacttaccatctcatggaaaggcctggagttgagataataaaatctcatggaggcttacatcagtttatgggttggcagggacccatattgactgattcaggaggttatcaggtatttagtctgtctaaaaagaggactataagtgaagagggggtagagttcttttcttcgctaaatggagataaaaagtatttaacgcctgaatcatgtatgcagctgcaacttgattatggcgttgatatagcaatggtgctagatgaatgcaccccttatcctgtaagtgaagaaatagccaaggaatcaatgaacttatcgcttagatgggctaagcgctgtcgatcagcttttgcatctgatcaagcttctttatttggaataatacaaggtggtatttttgatcatctaagagaagaatccttactaggcttaatgaagattaatttgaaggatacgctattggggg

SEQ ID NO: 239939 - DNA, 616 bp, Unknown
  Bacterial polypeptide expressing nucleotide sequence isolated from the Sargasso Sea
aaagacgctcataaatctcaatcagcattatttgggattttgcaaggaggaatgtacgaagatttaagagaggaatcattaaaacatactttggcatgtgaatttgatggcattgcgattggaggattaagtgttggtgagcctaaagaagagaaaacaaaaatcctcaggcacctatcaagtatgcttccaaatgaaaaacctagatatttaatgggagttggaaagcctgaagatattgttgaagcagttttctttggcgttgagatgtttgattgcgtcttgcctacaaggaatgcaaggaatggacagcttataacaagtaaagggatgataaacataaggaatgcaaaatataaaaatgatgattcaccaatagatgagaattcaaattctaaggtttgtaaaagctattcaaaagcttatttacatcatctagataaaactaatgaaatgttaggatcaatgctcgctagttaccataatatatattactaccatgagctgatgaaacaaattaggcaatcaattgatgacgatatattcgtaaactttgcaaaagacttttataataatcgaaatttaccaattccagattatttggagggcttataaa

SEQ ID NO: 239940 - DNA, 730 bp, Unknown
  Bacterial polypeptide expressing nucleotide sequence isolated from the Sargasso Sea
atggcattaaagaaatttgcctttaacattttaaaaaaagataaatatgccagatgtggtataatcaagacacatcgtggtaatattcatactccagcttttatgcctgtaggtacacaggctactgttaaggcttgtacaatagatgatataaaaaaaacaggttctgaaattatactttctaatacttaccacttaatgataagacctggtgttaaaagaatagagtctgctggtggacttcataattttatgaattgcgatttacctattttaacagactctggtggttttcaagtaatgtctttatcaaaattgaataagattgatagagaaaaaggagctatattcaactctcatgttgatggtaaaaaattttatttaagtccagaggagagtatcaaaatacagctaggtttaaattcagatattgtgatgattatggatgaatgcccaaagaaaaatgataattataatgtcataaaaaaatcaatggagttatcactttactgggcggaaagatctaaaatagcatttggtaataatccacacaaagctttattcggaattattcaaggaggtttgtttaaagatttaagattaaaatctctccaagagttaattaaaattaatttcgatggttatgctgttggaggattggcggtaggtgagtctcaagtggagatgtttgttgtcttagatgatataaaggattatttacccaattgaa

SEQ ID NO: 239941 - DNA, 967 bp, Unknown
  Bacterial polypeptide expressing nucleotide sequence isolated from the Sargasso Sea
ttttcatttgagttaattactcaggatgatagagcaagacttggcaaaataaatacttctagaggcttaatagatactccagcattcatgccagtaggaactcaaggtacagtaaagggagtattcactgacgatataattaaaacaaagtctcaaattattttgggaaatacttaccatctattactaaggcctggaattgaaacattgaagaaatttaatggtctacataactttatgaattggcaaaaacctattctcactgactcgggggggtatcaaataatgtctttatcaaaattaaataaaactgacatcaaaattggagcaatttttaaatctcacttagatggaaaaaaaattattttaagtcctgaaaagagtattcaagttcaaaaagcaattgactctgatattttaatggttttagacgagtgcccaaaattgactaaagataaaaaaatattatcaaaatctatagcggtatctactaaatgggcaaaaagatctaaaatagagtttggaaataataagcttaaagctttatttggcattgcacaaggcggtctttataaagatttgaggattgagagtatacataaattaatcgaaataggttttgatggttatgcaatgggaggtttagcagttggtgaaaaacaagatgatatgttaaaaattttaagtgagaccgtagatcatttgccaaaagataaaccaagatatttaatgggtgttggaactccttctgatatccttggggcagtaaatcagggtatcgatatgttcgattgtgtaatgccaacaagatctggaagaactggtttagcatttacttgggaaggaaaactgaatcttaaaaattcaaaatttaagaatgatcagacatctttgtgcactaactgcgacattagagatattaatagatattctaaaagctatttacaccatttaataaaatcaaaga

SEQ ID NO: 239942 - DNA, 814 bp, Unknown
  Bacterial polypeptide expressing nucleotide sequence isolated from the Sargasso Sea
catgtctctttctaagttagttcaaattgataaaaaaaaaggagcaattttcaaatctcacattgatgggaaaaaaattactttaggtcctgaagatagtattaggattcaaaaagatttaaattcagatatagtaatggttttagatgaatgtcctaaactaacaaacgaaaaaaaaaaaattgaagactctataaaactatcaaatatttgggccaaaagatcaaaagatgagtttggtgaaaatcccaataaagcattgtttggaatcgttcagggtggtgtttataaagacttgaggttacaaagtttggatgatttggaaaaaattggtttcgatgggtatgctttaggtggtttagcagtaggagaaactcaagttcaaatgtttaatgtcctagataatgttgttccatttatatcgaaaaataaaccaagatatttgatgggtgttggaacgccatcagatatattaggcgcagtaaaaaggggtgttgatatgtttgattgcgtaatgcccacaagatccggcagaacgggcttggcttttacttgggaaggtagactgaatttaagaaattcaaaatatcaaaatgactataccccaataaattgtaatactaaaataagaaatttaaataaatattctaagagctatattaatcatctcattaatactaatgaaattttagcttctatgatactaactttaaataacattattttttatcaggaactaatgaaagagattagacaatcaattaaaaatgatacttttgatgctttttataagaaatatgctaatgtgatttag

SEQ ID NO: 239943 - DNA, 871 bp, Unknown
  Bacterial polypeptide expressing nucleotide sequence isolated from the Sargasso Sea
gctaaaaacttctaggggctatgttaaaaccccggtttttatgcctgttggaaccgctgcaactgtcaaagccatgcttcctgaaacccttgaagcgataggggctcaaattcttctgtgtaacacttaccacttgatgattagacctggagaaaaagtgataaaccacttaggaggtttgaatacatttatgaattggtcaggtccaatccttacagatagtggaggttttcaagtgatgagtcttgcgaagctaaggcaactaaatgaaaacggtgtaaccttccgttctcatgtggatggtaaaaagtttttgctcacgcctgaaatctcaataatgatccaagaaacattgaaaagtacaataattatggcttttgatgaatgtacgccgtttccggtagaaaaaaaaattgcagaaaaaagtatgaaactatcttcaagatgggctgaaaggtctaagtcatcatttaaaggatctcatggctcaatgctatttggaattcaacaggggggaatgtttaaagatctccgggaagagagtgcatgttacctaaatgatatagggtttgatggttacgcaataggcggacttgcggttggagagcctcaacaaaaaatgtttgaggtgttagactattcaacagatttttttcctagagataagcctaggtatttgatgggagtaggtaagcctagtgatattgtaggcgctgtgtggagaggaatagatatgtttgactgcgtaatccccacaagatcaggcagaaatggtcaagcttttgttgaaaatggaacgattaatttgaagaacgcaaaatacaagttggacaaaaatccaatagatgatacctgcggttgctattgttgc

SEQ ID NO: 239944 - DNA, 622 bp, Unknown
  Bacterial polypeptide expressing nucleotide sequence isolated from the Sargasso Sea
gatgtttcaacatatttgggctaaaagatctaaaattgaatttgataatgctgaaaacaaatctcttttcggaattgtgcagggtggattatttaatgatcttagaattgaaagcttagaaaagttattagaaattaattttgatggatatgctttaggggggttagctgttggagaaaagcaaaatgaaatgtttgaggttctagataatatcacaaataaaatgccaaaaaataaaccgagatacctcatgggtgttggaacgccatcagatttattgggtgctgttaaatcaggtatagatatgtttgattgcgttttaccaactagatcggggagaactggtcttgctttcacttgggatggaaaagtaaatataagaaattcaaaatataaaaaagacctgaaaccactagatgataatacaaatttgagaagtttaaataaatactcaaaaagctatctaaatcatttaattaacactaatgaaatattagcatccatgttaatttctttgcataatataaatttttaccaagaatttatgaaaaaaattagaacctcaataaaagatggttctttcgatgatttttataaagaaaatatttctaaatttaattag

SEQ ID NO: 239945 - DNA, 598 bp, Unknown
  Bacterial polypeptide expressing nucleotide sequence isolated from the Sargasso Sea
acccggctacggaatttttggtattgtacagggtagtgtattcccagaactccggcgtgaatcagctgcccgcttggtagatacgggatttgatggttatgctgtaggtggattggcaattggcgaaccgcaagatgtaatgtttgatgttttagaaaatacaatccctgacttaccaaaattgcgaccgcattatctaatgggagttggaaaaccagcagatattgttggggcggtaaaacgaggcgttgatatgtttgattgtgttattccaacgagatcaggaagaactggccaagcatatgttcgcgggggttcactcaacctaagaaatgcacgacatgctgatgatgacagacctctggatgccggatgcgattgtcgcgtttgtcaaaattatagtagagcttatctcagccatcttgttaagtcaggagaaatgcttgcaggaatgcttttgactattcataacctccattactatcaatctttaatgtcaaacattagaacggcaattaccgagcaatctctgaataacttcatcaaattgtttgaagaacaacaggaagctgggccagttgtatcggaaacaaactaa

SEQ ID NO: 239946 - DNA, 679 bp, Unknown
  Bacterial polypeptide expressing nucleotide sequence isolated from the Sargasso Sea
aactgaaagagaagcacgccgatcaatggaactatctctcagatgggctgaaagaagccaaaaaaaattccatgatttagggttaggagcacagagagattctgcactctttggtattattcagggaggggtttttaagtctcttcgagaagagtctctcgccagtcttatcgagattgattttgacggttacgctttaggtgggcttgctgttggagagactgaagacgagcgtttgtcagttcttgaaactatcaatgcccttatgccgtcagatcagccgcggtacctaatgggcgttggtacgccggaagaccttatcaaagcagtatcttatggtattgacatgtttgactgcgtaatgcccactcgtcatgcgcgcaatgggcgtttatttacgtcgaagggttcaatcaatattcgaaatcagagatttaaaaatgatacaagccctattgatgagtcatgcaactgcgatacttgccagcactatagtagggcttatattagacacttacagcaatgtaatgagattttgggatcacgacttgccactgtgcataatatttatcactatcaatcgcttatggctgacatgagagatgcaatcagtaatcaatgttttgctgatttttctcttgagagactgcaagggtatgctgccgagatcgatagttag

SEQ ID NO: 239947 - DNA, 776 bp, Unknown
  Bacterial polypeptide expressing nucleotide sequence isolated from the Sargasso Sea
actttcaaacacctaccatttaatgatacggcctggtgtagaaagaattcaattagctggaggtcttcataattttatgaattgtgatttacctattttaactgactctggtggttttcaagttatgtccttatcaaaattaaataaaattgatagagagaagggtgctatatttaactcacatgttgatggaaaaaaattttatttaagtccagaagagagcattagaatccagttaggtttaaattctgatattgtaatgattatggatgaatgccctaagaaaactaataattacaacattattaaaaaatcaatggatttatcactttactgggcagaaagatccaaagaagcatttggtaacaatccacataaagctttatttggaatcatacaaggaggtctgtttaatgacttaagacaaaaatcacttcatgaattaattaaaataggttttgatggttatgctattggaggattagcagtcggagaaacacaaaatgaaatgtttaatgttttagatgatattaaagaatatttgcccattgaaaagccacactatttgatgggtgttggaactccatcggatattttaggtgccgtaaaaagaggtatagatatgtttgattgtgttttgcctactagatctgggcgaacaggtttagcctttacatgggatggaagaataaatattaaaaataacaaatatcaaaaagataacagtccacttgatcccagttgtgaaaatcttaatttaaacaatatattctaaa

SEQ ID NO: 239948 - DNA, 574 bp, Unknown
  Bacterial polypeptide expressing nucleotide sequence isolated from the Sargasso Sea
gtttcagggaagtatgtacccagaactccgccgagagtctgttgcgtatttaaaaaatatcggattcgacggatatgctatagggggtttagcgatcggtgaaccacaagaagagatgtttgatgtcctcgattacaccgttccggacctaccacaaggacgaccacactacctcatgggtgtcggaaaacctgcggacatcgtcggcgctgtactgcgcggtatcgatatgtttgattgtgtaattccgacacgttctggcaggactggacaagcatttgtgcgtggtggttctcttaaccttagaaacgctaaacacgttgaagacagccgaccgcttgacgtgaaatgtgggtgccccgtctgcgccaactatagtcgtgcttatctccaccaccttattaaagcgggcgaaatgttagccggcatgcttttgacatttcataacttgcactattatcaggacttgatggctcaaatacgaggatcaattgaaagtggcacaatgagcgactttgtcactacttttgatagagaacagaaaatcggtgcagtaatttcggagactgaatag

SEQ ID NO: 239949 - DNA, 646 bp, Unknown
  Bacterial polypeptide expressing nucleotide sequence isolated from the Sargasso Sea
atggattcaaaaaaaaaattttttgaattaataaaaaaaaataatgaagccagacttggtataattcaaacaacacatggatttatagatacaccagcttttatgcctgttggcactcaaggcacagtcaaaagtatttttgtagatgatatcttgcaaacaggtacacagattattttaggtaatacataccatctctttttaaggccaggtcttgagatattaaataaatttggcggtttacaaaaatttatgaattgggataaaccaattttaaccgactctggtggttatcaggttatgtctctatctaaattcaatacgattgataaaaataaaggggctattttttcttcgcatattgatggaaaaaaatttgtcttaagtcctgaaaaaagtattcaaatccaaaaatcgataaattcagatattttaatggtcctagatgtatgtccaaaattaactaaaaataaaaaaaatatcttagaggcaataaagatttcaaatttatgggcacaaagatctaaagatgaatttaatgatgaaaagaataaatttttatttggtattgtccaaggtggattgtttgctgatctcagagaagaaagtcttgagaatttaaaaacactaaactttgacggttatg

SEQ ID NO: 239950 - DNA, 838 bp, Unknown
  Bacterial polypeptide expressing nucleotide sequence isolated from the Sargasso Sea
actgactctggcgggtatcaaaatatgtcattatcaaaatttagaaaaatagacaaagagcttggagcagtatttaattcacatattgatggaaaaaaaataatccttagtccagaaaaaagtataaaaattcaaaaaagtttaaactcagatattcttatggttttggatgaatgcccctctttgacaaatgataaaaaaaaactctcaagtgctattgagacgtcaactaattgggcaaaaagatgtaaaattgaatttggccataataatgaaaaagctctttttgggatagttcaaggcggtttatttaaagatttaagaattgaaagtttggaaaaattgaaagaaattgattttgatggctacgccatgggtggattagccgttggtgaagaacaagctaatatgttcaaaattttaagtgagacggttgattatatgcctgaaatgaagcctagatatttaatgggtgtaggaactcctgctgatatcctaggagcagtatattatggaattgatatgtttgattgtgttttacctacaagatcaggtagaacaggattagcttatacgtggaacggtaaaataaatcttagaaattctgagtttaaaaacgataaaagtccaatcgatgagcaaactagcataagaaatatgaataagtattctaagtcttatattaatcatcttataaaatcggatgagatgctagcttctatgattatttctttacataatattaatttctatcaacaatttatgctagaaatcagaaaaagtataaaaaatggaactttcgatgaattttataggaagtatatcaatatgttttaga

SEQ ID NO: 239951 - DNA, 391 bp, Unknown
  Bacterial polypeptide expressing nucleotide sequence isolated from the Sargasso Sea
aatgtcattaaaaaaattttcttttaatgtcattaataaggatgggtttgctagactaggaagaattcaaactcatagaggttttatagacacacctgtttttatgcctgtaggaactcaagcaaccgttaaaggtacttatataaaagatatagttgaaacaggatcacaaataattttatctaatacctatcatttaatgataagaccaggggtcgatagagtaaaatctctaggtggtcttcatgagtttatgaattgtccattgccaattctgacagattctggtggttttcaagttatgtctctatctaaacttaataaaattgatagagaaaaaggagcaatatttaattcccatattgatggaaaaaaatttattttgagtcct

SEQ ID NO: 239952 - DNA, 599 bp, Unknown
  Bacterial polypeptide expressing nucleotide sequence isolated from the Sargasso Sea
cgaaaggtcaaagaaacaatttggatcaaacccacataaagcactctttggaattgtgcagggtggattatttgatgatcttagaatgaggtcattagaattattgactaatattggatttgatggctatgcaattggaggattagcagttggtgaaagccaagtagaaatgtttaaagttttagatggattaaaacatattatgccatttgataaacctcgatatttgatgggtgttggtactccaacagatattttaggatctgtgagtaggggagtagatatgtttgactgtgttttacctactagatccggaaggaccggtttagcctttacgtggaatggaaaaattaatattagaaattctgaatacaaaactgataattccccactagatgaaaatatttcaaaatttgatttaaataagtattcaaaaaattacctgaatcatttgtttaatactaatgaaatgctcggatcaatgatattaacattgaataatgttaacttttatcaagaactaatgtttgaaataagaaaacatataaaaaatggtacttttgaagacttctacaataaatatatccacatcttataat

SEQ ID NO: 239953 - DNA, 400 bp, Unknown
  Bacterial polypeptide expressing nucleotide sequence isolated from the Sargasso Sea
tatgttaaagtttgaaattgaggcacgaaacaataattcgcgtgcagcgaaattacacactctagaaggaacaatccacactccggtttttatgcctgtaggcacacttgcaacggttaagggtatgacgactggagaaattaaggacctgggtgcggaaataattttagggaatacttaccatttgcatcttcgtccaggtgattcagtaattagaaagatgggtggtctgcaaaaatttatgaactgggacggacctattttgactgacagtggaggatttcagattttttcattggcaaaactgatcaagcttaatgaagaaggtgtgataattcgcagtcatattgatggatcaaaaataaaaataactcctgaaatttcaatttcgattcagaaa

SEQ ID NO: 239954 - DNA, 691 bp, Unknown
  Bacterial polypeptide expressing nucleotide sequence isolated from the Sargasso Sea
tcagatattgtaatggtaatggatgaatgtccaaaaaaaagcaatgattataaaaaaattaaaaaatccatgaatctatcaatgtattgggctgaaagatcaaaagaagcatttggaaaaaatcctcataaggctatttttggaataattcaaggtggtttatttaaagatttaagaatcaaatctttagaaaaattagttgaaattgactttaatggatatgccgtaggtggattagctgtaggtgagagccaaaatgaaatgtttaaaacattagattatgtaacaaatttaatgccaaaaaataaacctagatatttaatgggggtagggactccgtctgatattttaggtgctgttaaaagagggattgatatgttcgactgtgttttgcctacacgatcaggaagaactggcttagcttttacatggaatggtcgaattaatattcgcaattctaaatatcaacatgacaataatcctcttgataaagatacaatcaattttggtttaaataaatattctagaaattatttaaatcatttgttcaatacaaatgaaatgcttggatcaatgctgttaacattgcacaatattaatttttaccaagagttaatgagatcaatcagaaaaaatattgaaaatggcacatttaatgaatttcatgataaatatattaataggttgtaat

SEQ ID NO: 239955 - DNA, 412 bp, Unknown
  Bacterial polypeptide expressing nucleotide sequence isolated from the Sargasso Sea
atggcattaaaaaagttctcttttaatgttaaagaaattgataacaaagcaagattaggtttaatcaaaactcatagaggcaatataaatacaccagcttttatgccagtcggcacacaagccactattaaaggtacattcattgacgatataattaaaactggtagtgaaattattttgtctaacacataccacttaatgattagaccaggggttaacagaatagagtcttctggcggtttacatagtttcatgaattgtaaattacctatacttaccgattcaggtggttttcaagttatgtcattgtctaaacttaataagatagatatagaaaagggagctatattcaactctcatattgatggaaaaaaatttatcttaagtcctgaagaaagtataagaattcaaa

SEQ ID NO: 239956 - DNA, 709 bp, Unknown
  Bacterial polypeptide expressing nucleotide sequence isolated from the Sargasso Sea
gatgaattttaatattcataaaactgataaaaacacatcagctcgaactggtgaggtgacaacagatcatggaacttttgaaacaccaatattcatgcctgtagctacatcagctgcgatcaaaggtgtgcataacaaggatcttattgaaaatgtttctccaaaagttatactatcaaatacctatcatctttatttaagaccaggtcaaaaaattataaataaagctggtggaatacataaattcatgagttggaataataatattttaactgacagtggaggataccaagtatattctttgtcagcgaatagaaaaattaatcctgatggtgttaagtttaaatctcacattgatggttcataccatttttttacaccagaaaatgttatggatattcaacgtaatattggtgctgatattattatggcgttcgatgagtgcccaccttatccatgtgaaaaaaattatgccagaaagtcaatggacttaacacatgaatggttaaaaagatgtataaatagattcaatgaaaccaaaccaatttataattataatcaatatttattaccaattgttcaaggaagtgtttattctgatttaagaaaacaatctgctgaaataatagctggacatgacctcccagctaatgcaattggtggattatccgttggagaaccacatgaattaatgtatgagatgtgtgag

SEQ ID NO: 239957 - DNA, 643 bp, Unknown
  Bacterial polypeptide expressing nucleotide sequence isolated from the Sargasso Sea
tcatagtgaagcaagcaaatcaatgaaactttcaatggattgggctttaagatgtagaaatgtttttgaaagtaaaaatttactttttggcattgtccaaggaagtgtatatgaggatttaagaagggattctgtcaaagcactaacagatattggctttgatgggtatgcggttggaggtttggcagttggcgaaactcagtcacaaatgtttgacgttcttggttttacttgtccctcattaccatctaatcaaccaagatacttaatgggagttgggaagccagatgatatcattggtgcagtatccagaggtatcgatatgtttgattgtgttcttccaacgagaagtggaagaaatggacaggcatttacatccactggtactatcaatataagaaattctaagtacaaaaattcaaataattcattggatgaaaaaagtgacaacccaatatgtagagaatattctgctggatacattcaccacctgtttaatgctaaagaaatgctaggaggtatgcttctttcattgcataacatctatttttatcaaaaattaatgagagaaattagagactcaatagagtcagatacatttcttcagtttacgaaaaatttcttgtctaattataaaagttaa

SEQ ID NO: 239958 - DNA, 640 bp, Unknown
  Bacterial polypeptide expressing nucleotide sequence isolated from the Sargasso Sea
aaaaaaataaaagaatctttagatttatcaatgtattgggcgaaaaggtcaaaaattgcatttggtacaaataaacttaaagcattatttggtattgtacagggcggtttattcaatgatttacgactggactcaattgaaaaacttgtagatattaattttgatggttacgcacttggtggattagcagttggcgaaactcaaaatgaaatgtttactgttttagattctgtaaaagattatatgcctgaaaataaaccaagatatttaatgggtgttggtacaccatctgacattttaggagccgtaagaaggggcgtagacatgtttgattgtgtcctaccaacaagatcaggaagaactggtctcgcttttacatggaaaggtagagttaatattagaaatgctaaatataaatatgataattcaccattagacaaagattgcaaaaaatttggtttaaataaatattcaaagaattatttgaaccatttgtttaataccaatgaaatattaggttctatgttgctaacacttcataatttaaatttctatcaagaattgatgcaagccataagaaataatattaaaaagggaacatttgaaagatttcataggaaatactttaataaattatgat

SEQ ID NO: 239959 - DNA, 457 bp, Unknown
  Bacterial polypeptide expressing nucleotide sequence isolated from the Sargasso Sea
aatggcaaagtttaaattctctgtagaaaataaatatcaaaaggcacgcgcaggatctattgaaacattccatggaaaaattaaaactcctgtctttatgcctgttggaactcttgggagcgtaaaggcaatttttcagagagatttagaaaaacttggtgtagaaattattttagcaaatacataccatttgatgcttcgtccaggggatcttttagtaaaagaactaggagggctccacaaatttattaattggaataaaccaattttgacagattctggcggatatcaagtatggtctttgtcaaaattaagaaaaataaatgaacatggaattaattttgtatctcatattgacggaaaaaaaattgaattaaccccagaatctgcaattcaaatccaagaaagattaaattctgatatttcaatggtactggatgaatgtactgaatatcca

SEQ ID NO: 239960 - DNA, 484 bp, Unknown
  Bacterial polypeptide expressing nucleotide sequence isolated from the Sargasso Sea
taattttgatggttacgctgttggcggattagcagtaggtgagacacaaaaagaaatgtttactgttttggattatataaaagacgaattgcctccggagaaacctcattatttaatgggagttggaacaccttcagacattttgggtgcagtcaaaagaggcatagatatgtttgattgtgttttacccacaaggtctggaagaactggtcttgcttttacttggcagggtagaataaatataaagaacaataaatatcaaaatgatgatacaccacttgataaaaattgcaaaaaccttaatttaaataaatattctaaaaattacttaaatcatttattcaatacaaacgaaatacttggctcaatgttacttactctccataatattaatttttatcaagagttgatgtctgctataagaaaaaatattaagaacaatactttcgatgattttcacgataaatacatagataagttgtag

SEQ ID NO: 239961 - DNA, 379 bp, Unknown
  Bacterial polypeptide expressing nucleotide sequence isolated from the Sargasso Sea
aatggcattaaaagattttgcctttaaagttctaaataaagataaatttgccagatctggtgttattgaaactcaccgtggaagtatcaatacacctgcttttatgcccgtcggcacacaagcgacagtaaaagcttgtactattgatgatataaaaaaaactggctcgcaaattattttatctaacacttaccatctaatgattagacctggtgtcgacagaattaaatctgcgggtggtttgcatgaatttatgaattgtgatttgccaattttaactgactctggtggttttcaagtaatgtctctttcaaatttgaataaaattgatcgtgaaaaaggtgctgtatttaattcacatggtgatggtaaaaatttt

SEQ ID NO: 239962 - DNA, 679 bp, Unknown
  Bacterial polypeptide expressing nucleotide sequence isolated from the Sargasso Sea
atggttttagacgaatgtccaaaactatctattgataaaaaaaaaattagagaatctttaaaactttctcatcactgggccgaaagatcaaaaaaagaatttggagaaaatcctaaaaaagctttatttggtattattcaaggtggcatatataaagatttaagactggaaagtttagaaggtttaataaaatttaattttgatggatatgcgcttggtggtctcgctgtaggtgaatctcaaaagcaaatgtttaaagtgttagatgatgttgcaggctttttaccaaaaaataagccccgatatttaatgggggttggcactccatctgatattttaggagccgtaaaaagaggtattgatatgttcgattgcgttatcccaactagatccggaagaacaggattagcttttacatgggagggaaaattaaatttaaaaaattcaaaatatcaaaatgactattcacctataaacaaaaattttaatttgaggaatctcaattcttattcaaagagctatattaatcacttaattaaaaccaatgaaatattggcatctatgatcttaactttgaataatatatttttttatcaggaattaatgcaaaaaattagagaagcaatcaaaactaatacttttgataaattttatgacaaatatattgatataatttaaa

SEQ ID NO: 239963 - DNA, 774 bp, Unknown
  Bacterial polypeptide expressing nucleotide sequence isolated from the Sargasso Sea
tttgaaattctcagttttatctgaagataatcaatctcaagctagaacagggctgattgaaacagatcactcaaaaatagaaactccagtttttatgcctgttggaacccatggtgttgttaaaactctttccccaaatgatttaagtgatatgaatgttcaaatcatactttcaaatacctatcatctctatttaagacctggaactgatattatacatgaaaatgagggtttacataaatttttaaattgggacaaaagcattttaactgacagtggaggatatcaagtattttcattgagcaacatgaatgagattactaaagatggggttaattttcgctcacatttagatggaagcgaacatttttttactccgcaaaaatcaatggaagttcaaagacagttaggttctgatattattatggcttttgattattgtccttcagcagattgttctcaaagagaacttaaaagagcctcaactttaacagaaaattggactaaacaagcttttgaatatcttcatgataaaaaaagtatatatggacatagtcagaccctttttccaataattcagggaggtattaatcctgatgaaagattaaaatgtctgagtcaaatgcttccatatgctacatgtgggatagcaattggtggactttctgtaggagaaaagaaagaaccaatgttagacatagttgaattactcggaaaaaacatgcctaaagatcaaccaagatatttaatggggagttgggtaacctacagatt

SEQ ID NO: 239964 - DNA, 823 bp, Unknown
  Bacterial polypeptide expressing nucleotide sequence isolated from the Sargasso Sea
gcatgctctagaaacgccaaccttcatgccggtaggaactcgaggggcggtacggacccttaactcacttgacctagaagaacttggtgccgatgtagttctgggtaatacgtaccacttgatgctcaggccaggagttgagattatcaaagcgcaaggtggacttcatgggtatacaggttgggacaggctaattttaactgactctggaggctaccaagtgttctccttagagccagaggtagatgaccaaggcgtaacttttaaatcaacatatgatggaagtctccaccgattaacgccaaaagatgctgttgatattcaatgtgggcttggtgcggatatccagatggcgctagatgtctgccctcctctgccagcagagaaatcagtcattgaaactgcagtaactagaacaagcctttgggctgagagcgcaagaaaatatttccttaccaggagagaaaatgaaaatttcactaacgcccagttcgggatagttcaaggtggtctagatctctcgcttcgtcagacatcggctgagcaaatagttgaaataggatttgatggttatgcaattggtggcctgtctgttggtgaaagtagatcagaaatgattgaaccgatggatgcgagcatacgcacacttccatttgataggcctcgctattttatgggtttgggtgacccagctggtcttgtagaagccgtcaacctcggggttgacatgttcgattgtgtctggccgacacgtcttgctcgccatggcacggccttaactagagaaggtagagtcaatctcggagcggctcggtacgcaaaa

SEQ ID NO: 239965 - DNA, 883 bp, Unknown
  Bacterial polypeptide expressing nucleotide sequence isolated from the Sargasso Sea
atgaatttttatattcataaaactgataaaaacacatcagctcgaactggtgaggtgacaacagatcatggaacatttgaaacaccaatattcatgcctgtagctacatcagctgcgatcaaaggtgtgcataacaaggatcttattgaaaatgtttctccaaaagttatactatcaaatacttatcatctttatttaagaccaggccaaaaaattataaataaagctggtggaatacataaattcatgagttggaataataatattttaactgacagtggaggataccaagtttattctttgtcagcgaatagaaaaattaatccagatggtgttaagtttaaatctcacattgatggttcataccatttttttacaccagaaaatgttatggatattcaacgtaatattggtgctgatattattatggcgtttgatgagtgcccaccttatccatgtgaaaaaaattatgccagaaagtcaatggacttaacacatgaatggttaaaaagatgtataaataggttcaatgcaaccaaaccaatttataatcataatcaatatttattaccaattgttcaaggaagtgtttattctgatttaagaaaacaatctgctgaaataatagctggacatgacctcccagctaatgcaattggtggattatccgttggagaaccacatgaattaatgtatgagatgtgtgaggatgtgtgtaaaatacttcccattgctaaaccaaggtatttaatgggtgttggcacaccaataaatataattgaaaacattgctttgggtgtagatatgtttgattgtgttatgcctactagaaatgctagaaacggcatgttatttaccagaaatgggaacaataaatattaaa

SEQ ID NO: 239966 - DNA, 340 bp, Unknown
  Bacterial polypeptide expressing nucleotide sequence isolated from the Sargasso Sea
aatgtcattaaaaaatttcaattttaatgttcatcacactcaaaattatgcaagagtaggaattatagagacccatagaggcaatataaatactcctgcatttatgcctgttggtactcaagcaactgttaaaggtgtttttttagaagatataaaaaaaacaggtagtgagataattttatcaaatacatatcatctaatgataagacctggtgttgaaagaatcgaaagtgttggaggacttcatgaattcatgaattgtgatcttccaatcttaactgactcaggtggctttcaagtaatgtctctgtcgaaattaaataaaattgatagagataag

SEQ ID NO: 239967 - DNA, 889 bp, Unknown
  Bacterial polypeptide expressing nucleotide sequence isolated from the Sargasso Sea
catttatgcctggttggtacatctgcaacagttaaagggataatgcctaaacaaattttatctacaaattcagagataattttgtgtaacacttatcacctaatgttaaagcctggaagaaatataatagaaaaatttggtggtataaataattttatgaattggaagaaacctattttatctgattctggtggttttcaagttatgtctctatctcctctagcaaaagtatcagatcaaggggttaattttaaatctcacatagatggaaaaaatattttcttatcacctgaagaatgtataaatcttcaggtaatttttgatgtagatatagctatggttctagatgaatgtacaccttacccagtggattatcaaactgcgcaaaattctatgttaagatctatgaattgggctaaacgttgtaaacaagcatggccatcaagaccaggtaaaggtttatttggaattgttcaaggtggtatatataaagatttaagaattgaatcattaaatagattaaaagatattgattttgatggttatgcaattggtggtttagcagtcggcgaggggcaaagagaaatgttaagggttttaaaatatacttctgacttattaccttttgaaaagcctaggtatttaatgggggtcggtaaacctgatgatattgtaaaagcagttttagaaggaattgatatgtttgattgtgtgttgcctactaggtctggtaggacaggacaagcttttactagagctgggcctataaatataagaaatgcatgtttttctgatgatacttctccgctagatgaatcaattcctttttcagttagtaataactttagtaaggcgtatgttcatcatttgtttaaatctaaagagattc

SEQ ID NO: 239968 - DNA, 583 bp, Unknown
  Bacterial polypeptide expressing nucleotide sequence isolated from the Sargasso Sea
cacttttcggtattgtaagggctcgatgtttttggatcagagagaccacttcttgagtgctctgatcgaaatgggtttcgatggctatgcggttggtggtttgtctgttggggagcctaaaaacgaaatgtttaaggtgatgcgccatatcgcgccaaaattaccagacgaccagcctcgatatgtaatgggtgttggtaagcccgaagatttggttgagggcgttcgtcgaggtattgatatgttcgattgtgtgatgccgacccgtaacgcacgaaatagtcatctgttcatagataccggtatattaaagttgcgaaatgctgccaatcgaactgatgaaggaccgattgataagcattgtgactgttacacctgcgagaactacagccgtgcttaccttcatcatctagataagtgtggggaaatcctcggcgccacgctcaataccatccataaccttcgccattaccagcagttgatggagggcctgagggcggcaatagagaatggaaaacttgacgtgtttgtcgctgatttttattcaaaacgtggaatggaaccgtcagaattgagatcttag

SEQ ID NO: 239969 - DNA, 847 bp, Unknown
  Bacterial polypeptide expressing nucleotide sequence isolated from the Sargasso Sea
acgccccgattcatgcccgtgggcacactcgccaccgtcaaggggatcagcatcgagcaactgggccgcaccggggctcagatggtgctctccaacacctatcacctgcatctgcaacccggcgaagagatcgtggcggcagccggggggttgcaccggttcatgggctgggacggcccgatgctcaccgactccggcggctttcaggtgttcagcctgggggacctcaacaaaatcgatgaccgtggggtggtgttccgaaacccccgcgatggacgcaccatcgacatgacgccggaacacgccacgcagatccagatggccctgggggcggacgtggccatggcttttgaccagtgtccgccctatcccgccaccgaaaacgacgtgatcgatgcctgccggcgcacccacgcctggctggcccgctgcgttgaagcgcacacgcgggaagaccaggctctgttcggcatcgttcagggcggatgctttccccatctgcgccgcgagagtgctcgagccgtggccgacttcgacttgccggggattgccgtcggcggcgtcagcgtcggcgagccggtggaggaaatgcatcgcatcgtgcgagacgtcacgcccctgctcccaacccacaaaccgcgatacctgatgggcatcggcaccctgcgggagatggccatcgccgtggccaacggcatcgacctgttcgactgcgtcttgcccacccgcctggggcgccacggcacagccctggtcaatggcgagcgctggaacctccgtaatgcccgcttccggcacgaccacacacccctggatccgagttgctcctgtgtggcttgcaccggac

SEQ ID NO: 239970 - DNA, 613 bp, Unknown
  Bacterial polypeptide expressing nucleotide sequence isolated from the Sargasso Sea
agaagctcataaatcagaatcagcattatttggaattgtgcagggaggaatgtatgaagatttaagagaagaatcactaactcttaccttggcatgtgaatttgatggtattgcgattggaggattaagtgttggtgagcctaaagaagaaaaaacaaaagtgttgaaacatttatcaaatattcttcctgatgataagcctaggtatcttatgggagtagggaagcctgaagatattgttgaagcagtcttctatggtgttgaaatgtttgactgtgtcttgcctacaaggaatgcaagaaatggacagcttataactagcacaggcgtgataaatattaggaatgcgaaatataaaaatgatgattcacctatagatgaaaattcagattctaaggtttgtaaaaattattcaaaagcctatttacatcatttagataaaactaacgaaatgttaggatcaatgcttgccagctatcacaatatttattattaccatgagcttatgagacaaattaggcaatcaattgatgacaatatattcgtaaactttgcaaaagacttttataatagtcgaaatttacctattccagattatttggagggcttataa

SEQ ID NO: 239971 - DNA, 627 bp, Unknown
  Bacterial polypeptide expressing nucleotide sequence isolated from the Sargasso Sea
aatggcattaaaaaattttgcctttaaagttttaaataaagataattttgcaagatgtgggataattgagacatctagaggtttaattcatactcctgcatttatgcctgttggaactcaagcaacagttaaagcttgtagaattgaagatattaaaaaaacaggtaccgagataattctatctaacacttatcatttaatgattaggcctggggttgaaagaattaacaatgttggtggattacatgaatttatgaattgtgatttaccaatattgactgactctggtggttttcaagtaatgtcactttcaaaattaaataagattgacagagaaaagggtgcaatattcaattctcacgttgatggaaaaaaattttacttaagtccagaggaaagtattcgaatacaattaggtttaaactcagatattgtaatgattatggatgaatgtccaaaaaatacttcagatcacaatattataaaaaaatcaatggaactatcattgtattgggctgaaagatcaaagaaagcttttggaaacaatccacataaggctttatttggtattgtgcaaggaggtttgtttaaagatctaagattgaaatcattaaaagaacttatgaa

SEQ ID NO: 239972 - DNA, 802 bp, Unknown
  Bacterial polypeptide expressing nucleotide sequence isolated from the Sargasso Sea
tatgactttttttaaattagaaaaaacagatggtaaagctcgtgcgggggttttaaaaacacagcattctgagattcaaacacctgtatttatgcctgtcggaactcgaggcacagttaaatcactcagtagcgaagatttggatgagttgggtcctcaagtaattctgggtaatacttatcatttgtatttaaggccagggcatgagttgattgaaaatgttggagaaggacttcatggctttatgagctttgacaaaagtattttaaccgatagtgggggcttccaggtgtttagtttaagtgatttgaataaaattactgaagacggtgtctggtttagaagccatctcgatggcagtaagcattttattggcccagaaaaatcaatggaaatacaaaaagcgcttggtagtgatattgttatggccttcgatgactgtccagctttaccaaattcgaaagataaaattaaagaggcaatagatagaacacttaggtgggcgaaaagatgtaaggaatatgaattgaagcctcaccaatttctttttggcattgttcagggtggtctagatttagagttgcgtaaattttgcttggaggagttaaataaacttgattttccagggatggcgattggaggtcttagtgttggagagaaaaatgaagaaatggttcaactgttaaaggattttacaccattgatgccggcacacaagccaagatatttaatgggagttggtaccccggttgatattttaaatgcagtggcaacaggtatagatatgtttgattgtgttctt

SEQ ID NO: 239973 - DNA, 721 bp, Unknown
  Bacterial polypeptide expressing nucleotide sequence isolated from the Sargasso Sea
atggcattaaaaaaattttcttttagtgtcattaaacaagacggatttgcacgagtagggaaaattactacccacagaggagaaatagatacacctgtatttatgcctgttggtacacaagcaacaattaaaggtgcatttattaaagatattttaaacactggtgcacaaattattttatcaaacacatatcatttaatgattagaccaggtgtaaatagaatttcatcgcttgggggtttacatcaatttatgaattgtcctttaccaatattaacagactctggtggatttcaagtgatgtcactttctaagcttaacaagattgacagagaaattggtgcaatttttaattctcatattgatggaaaaaaatttatcttaagtcctgaagaaagtataaaaatacaattagggttaaattctgacatcctaatggttatggatgaatgtccaaaaaaaacaaataattatgatttaataaaaaagtcaatggatctttctatgtattgggcggaaagatcaaaaaagaaatttggcaataatcctcacaaagctttatttggaattgttcaaggtggtttatttaatgatttgagagaaaaatctttgaatagtttaaaagaaattggttttgatggatatgctataggtggtttagctgtaggagaaagtcaaaaagaaatgtttgatgttctcgatggattaaaaaacattatgc

SEQ ID NO: 239974 - DNA, 849 bp, Unknown
  Bacterial polypeptide expressing nucleotide sequence isolated from the Sargasso Sea
tttgggaaacacttaccatttgcatcttcgcccaggagattcagtaattagaaagatgggtggccttcaaaaattcatgaactgggacaaaccaattttgactgacagcggtggatttcagatcttttcactagcaaagttactcaaacttaatgaagacggtgtgatgattcgcagccatattgatggatcaaaaataaaactaactcctgagatttcaattgctattcagcaaaatcttggatccacaatcatgatgtgtctggatgaatgcctaaaacttcctgcatcacgtcaagaggtggaacgctctactgatttaaccgcaaaatgggcaaggcgatgtaaagaagccagactgaatgagtctaatgtgtttaaagaacaggctctttttggcatcatacagggaggtaatgaacttgatctaagagaaaaatccatgaatcaaattgttgagataggttttgacggatatgcggttggcggtttgagtgtaggcgaatcaaaggaaaaaatgtataatgtagcccatcatatcacgccgaaaatgcctgataagaaaccacgttaccttatgggtgttggagatcctgcagacctgttggaaggaattgaagcaggaatagatatgtttgactgcgtaatgcctacccgcaatgcacgtaatggaatgctgtttacttctcatggcaagatcagtatcaagcaaagcaggttcagtcaggatcccgagcctcttgattccgaatgtgaatgccccacttgtaaaaactattcaagagcttatctccaacatcttttcaaatcaggagaaatacttggagtacgtctgaatacttatcacaa

SEQ ID NO: 239975 - DNA, 383 bp, Unknown
  Bacterial polypeptide expressing nucleotide sequence isolated from the Sargasso Sea
aatgttaaaaactgaattctcatttgagttaatcactcaagatgataatgcaaggctaggcaggatagaaacaccaagaggtgaaattgatactccagcatttatgcccgttggaacgcaaggaactgtaaaaggtgtttttttggatgacattgaaaaaactggtacacatataattcttggaaatacctaccatctattacttagacctggaattgaactaataaaaaaatttaatggccttcataatttcattaattggaataaaccgatacttaccgactctggaggctatcaaataatgtcattgtctaaatttaataaaattgataaaaaattaggtgctatttttaagtctcatttagacggaaaaaaaataatct

SEQ ID NO: 239976 - DNA, 400 bp, Unknown
  Bacterial polypeptide expressing nucleotide sequence isolated from the Sargasso Sea
atgaccggtttcggatacgaattgttggaaacggacagcgcggcgcggcgcggacggttgacgaccgcccacgggacggttgaaacgccggtattcatgccggtcggcaccgccgccaccgtcaaagggatgacatccgaggcggttacgcggaccggcgcgcagaccgtccttgctaacacctatcacctgatgctgcgtcccggtgcggaaacggtggcccggcttggcgggctgcacgcattcatggactggccaggaccaatcctgaccgattctggagggtttcaggtgatgtcgctgaccgacctcagaaagctcgacgataccggggtcgaattccggtcccatatcgacggcgcccggttcctgcttacgccggagcggtcggtcgaaattc

SEQ ID NO: 239977 - DNA, 678 bp, Unknown
  Bacterial polypeptide expressing nucleotide sequence isolated from the Sargasso Sea
tggttttagatgtgtgtcccaaactaacaaataatagaaaaactttaaataatacaattgacatttctacaaagtgggcaaaaagatgcaaaatagaatttggaaacaacaaaaaaaaagcactttttggaattatccaaggaggtttatataaagatttaagaatagagagtttaaaaaaacttgtaaatatcggatttgatgggtatgccattggaggtttagcagtaggtgaaacccaaaaggaaatgtttaaaacagtaaaaaatatcacaaattatatgccaaaaaataaacccagatatttaatgggtgttggaactccatcagatatattgggtgctgtaaaagagggcgttgatatgttcgactgtgtaatgccaactagatcaggcagaacaggactagcttttacctgggaaggcagggtcaatctcaaaaattcaaaatataaaaatgataaatctcctttagacagcaaatgtaattttagagaactcaatagttattcaaaaagttaccttaatcatcttattaaaaataatgagcttttagcttcaatgttaatttcgttgcataacataaatttttatcaacaatttatgtatgaaataaggaaaagtattaagagtcgcactttcaataaattttacaataggtatatcaatttattttagt

SEQ ID NO: 239978 - DNA, 685 bp, Unknown
  Bacterial polypeptide expressing nucleotide sequence isolated from the Sargasso Sea
aatggcattaaaaaaatttagttttaatgttttaaaaaaaaataaatatgcaagattaggcgttattaagactcatagaggaaatatagatacgccagcatttatgcctgtaggaactcaggctacagtaaaaggatcattcatagatgatattataaaaaccggcagtcaaatcatattatctaatacttatcatttaatgataagaccgggtcctgatagaattaaaaaatcaggaggcttacataaatttatgaattgcaaacttccaatacttactgattcaggcggatatcaaattatgtccctatcaaaattaaataaaattgatagagaaaaaggagctatatttaattcacatattgacggagcaaaatttgtactgagcccagaagaatgtattaaaattcaaaaaaaacttaactctgatatagttatggttttagacgaatgtccaaaaaaatctttgaattataatcttatttcaaaatcagtagatctctctacatactgggccaaaagatcaaaaaaagcttttggaaaaaatcctcataaagctctattcggaatagtccaaggggggctttttaatgatttaagattaaaatcattaaacgatttaacgcaaattggttttgatggatatgctgtaggcggattagcagtaggagatactcaaatcgaa

SEQ ID NO: 239979 - DNA, 581 bp, Unknown
  Bacterial polypeptide expressing nucleotide sequence isolated from the Sargasso Sea
ttttgcctataatcctcataaagctttatttggaatagtccaaggaggtctttttaaggatttaagattaaaatctcttcaagagttaattaaaattggttttgatggttatgctctaggtggattagcagtaggagagacacaaaaagaaatgtttagtgttttagatgatataaaagatcatctacctgtagaaaaaccacactatctaatgggtgttggaacaccatctgatattttaggcgctgttaaaagaggtatagatatgttcgattgtgttttgccaactagatcagggcgtacaggcttagcatttacctggcaaggaagaattaatattaaaaataataaataccaaaatgacaactcccctctagatccagattgtgagaatcttaatttaaataaatattcaaaaaactatttgaatcacttatttaatactaatgaaattctagcttcaatgttgctcactttacataatattaatttttatcaagaattaatgaccttgatccgaaaaaatattaatggcggcacttttgatcaatttcacaataaatacattgataagttgtaga

SEQ ID NO: 239980 - DNA, 929 bp, Unknown
  Bacterial polypeptide expressing nucleotide sequence isolated from the Sargasso Sea
atatcatttatttttaagacctggaactgatattataaaaaaatttggaggtttgcataattatattaattggaacaagccaatattaactgactcgggcggatttcaaattatgtctctatctaaactagccaaaattgatagagaaaaaggtgcttttttttcatctcatatcgatggtcaaaagtttttattaagccctgaaaaaagtattcaaatccaaaaagatataaattctgatattttgatggttttagacgagtgcccaaagcttacaaatgataaaaaaataatttctaacgctatcgaaacttcaacaaattgggcaataagatctaaaaaagaatttgctgactcaccaaataaagcattgtttggaattgttcagggcggtttatttcatgatctcagggttgaaagcttagaaaaattaattgagattaattttgatggttatgcattaggaggtttggctgtaggtgaaaaacaagaagacatggtaaatgttattaaaagaataaccaaacgtatgccaaaaacaaaacctagatatttaatgggtgttggaacaccttcagatatacttgcggcagttaaatatggtattgatatgttcgattgtgtattacctactcggtctggaagaaacggtctagcttttacatgggaagggaaagtaaatttaagaaattctaaatataaaaatgattcttcaccccttgatgaaaaatgtaaattaaggtctttaaatctatattcaaaaagctatctaaaccatctagtaaacactaatgaaattcttgcctctatgatcatatctttacacaatgtaaatttttatcaagaatttatgaaaactattagaaatgaaataaaaaatggtcattttgacagtttttacaaagaaaattttgataaatacatatgat

SEQ ID NO: 239981 - DNA, 821 bp, Unknown
  Bacterial polypeptide expressing nucleotide sequence isolated from the Sargasso Sea
tatgaagttcacactaaaaaacaactcttcaaaatatagtgcacgtactggtgtacttgaaacaggccatgggagtattaatacccctgtgtttatgcctgttggtaccattggcgcagtaaaaacaatggaccctaatgagcttaaaaagatagactttaaaattatacttggtaatacctatcacctttatttaaggccaggaactgaaatcgtaaaaaaagctggcgggctacataaatttatatcctgggatagacctatattaactgatagtggaggctttcaggttttttcactttcgagattaaataaaatatcaaataatggagttaaatttcaatcccatttagacggtagcaggcatatgttcacacctgaaagttcaatggaaattcaaagaaaacttggttcagatattatcatggcttttgatgactgcccgccaggagactctgatcattctacaataaaaaaatctgttgaaagaaccactaattggatggttcgatgttcagactggttagaaaaaaatccagaatattatgatcatgaacaggttgttttccctatagtccagggagcaacagattcacaacttagaaaaataagtgctgaacaacttattgaacattcatcatgcggcatggctattggcgggctagccgttggagaggaaaaaaatgcaatgatggataccatagaatattgtgataccctattacctaaaaatcaaccgcgatatctaatgggtgtagggaaacaaactgatctaataaagtcagtccagagaggagttgatatgtttgactgtgtaatgc

SEQ ID NO: 239982 - DNA, 721 bp, Unknown
  Bacterial polypeptide expressing nucleotide sequence isolated from the Sargasso Sea
agaaagcataagaattcaaaaatctttaaattctgacattgtaatggttatggatgaatgtcctaaaaaaactactgattatgctaaaataaaaaaatcaatgaatttgtctatggaatgggctcaaagatctaaaaatgcatttggattaaatacaaagaaaggtctttttggtataattcaaggaggtttatttgatgatttgagaaatatttctttagaaagattaacagatataggttttgatggttatgcaattggtgggcttgccgttggagatacacaagatgaaatgtttaaagttttagatggtttaaaagataatatgcctaaaaataaaccaagatatttaatgggtgtaggtacaccatctgatatattgggagcagtcaaaagaggtattgacatgtttgattgtgtattaccaactagatctggaagaactggattggcatttacttggaatggtaaagttcaaattagaaattctaagtatcaaaatgataatactccattggacaaaactgtcactaaatttaatttaaataaatattcaaaaaattatttaaatcatttatttaatactaatgaaatgttagcatcaatgatacttaccttaaataatattaacttttaccaagaacttatgtatgaaattagaaaaaatataaaaaatggaacatttaatgaatttcataataagtatattaatttattgtaa

SEQ ID NO: 239983 - DNA, 702 bp, Unknown
  Bacterial polypeptide expressing nucleotide sequence isolated from the Sargasso Sea
tgaagaaggagttaaatttaaatcgccactagatggttcagagatatttcttgctccagaagattcaatccaaacgcaattaacattaaacgcagatatcataatggcctttgatgaatgcacagcttaccccagtacccttaaggaagctaaagaatctatggatcttactcatagatgggcatctagatgtaaagaatatttcaataagaataaaaaagagcatctattatttggcatcgttcaaggtggaatgcatcttgaattaagagaagaatcattaaattttatatctaaacaagattttgatggaattgccttaggaggactgagtgttggcgagccaaaagaagaaaaaacaaaaattttgaagcatttagcccctttattgccggaagacaagcctcattatgtaatgggcgtaggaacacctgaagagttagtggaaggcgtgagatatggaattgatatgtttgattgtgttattcctacaagaaacgctagaaatggctttatatatacctctacaggtatagttaaaataagaaattcagaacacaagaagtcgacaaaacctatagatgaaaattgtgattgttatacctgtaagaacttttctagagcatatttacatcatttagataaggccaatgaaattttagctagcactttaatgagtatttgcagtttgcatacttttaa

SEQ ID NO: 239984 - DNA, 917 bp, Unknown
  Bacterial polypeptide expressing nucleotide sequence isolated from the Sargasso Sea
actgggcgcagaaataattttagggaatacttaccatttgcatcttcgtccgggtgattcagtaattagaaagatgggtggtctacaaaagtttatgaactggggcaaaccaattttgactgacagtggaggattccagattttttcacttgcaaaactgctcaatcttaatgaagaaggtgtgataattcgaagccatattgatggatcaaaaataaaactaactcctgaaatttcaattgctattcagcaaaatcttggatccacaatcatgatgtgcctagatgaatgcctcaagctgccttcgtcgcgccaggaggtggaacgctctgctagcttaaccgcaaaatgggcacgccgttgcaaagaagcccgcataaatgaatctcatgtgtttaaagaacaagctctttttggcatcatacagggtggtcatgagcttgatctacgcgaacaatccatgaatcaaattgttgagataggttttgatggctacgctgttggaggtttgagtgtaggtgaagcaaaggaagaaatgtataatgtagcccatcatatcacaccaaaaatgcctgctgaaaaaccccgttatcttatgggcgttggagatcctccagatttgctggaaggaattgaagcaggaatagatatgtttgactgtgtaatgcccacccgaaatgcacgcaatggaatgctgttcacttctcatgggaaaatcagcattaagcaaagtcgattcaaacaggacccagaatctcttgatgctgaatgcgaatgccccacttgtaaaaactattcacgcgcttatctgcagcatctttacaaatcaggggaaatacttggagtacgcctgaatacttaccacaatctcttcttttttatcaccttagtaaaacaggcaagaaaagctataattg

SEQ ID NO: 239985 - DNA, 556 bp, Unknown
  Bacterial polypeptide expressing nucleotide sequence isolated from the Sargasso Sea
ctttatttggattgtacaaggtgggatttttaatgatttaagagctaaatctattaaagaattaacgaatatcggttttgatggttatgcagttggaggcttagcagttggtgaatctcaaaaagaaatgtttgaagttttggataatttaaaagtttatatgccaaaagataaaccgagatatcttatgggagtagggacaccttctgatatattgggtgcagtgaaaagaggtatcgatatgtttgattgtgttttgcctactcgatctggaagaacaggtttagcttttacatggaatgggcgtatacaaattagaaactcaaaatatcaaaatgacaatgatccattagatattaatgttaataaatttaatttaaacaaatattcaaaaaattaccttaatcatttattcaacactaacgaaatgttggcatctatgcttttaacccttaataatattaatttttatcaagaattaatgaaagctataagggaaaatataaaaaatggtactttttcagagtttcatgacaaatatgttaatttactttaa

SEQ ID NO: 239986 - DNA, 631 bp, Unknown
  Bacterial polypeptide expressing nucleotide sequence isolated from the Sargasso Sea
gatgcaatcgaggtatctactctattgggcaaaacgatgtaaaatcgaatttggtaaagataaatctaaagctttatttggtattactcaaggcggtctttataaagatttgcgtaaagagagtattaaaagattaatagatatagactttgatggttatgcagttggtggtttagctgtaggggaaacacaattacaaatgtttagtatactaaatgaaacaataagtttttttcctaaggacaaaccacggtatttaatgggagctggcacaccctcagatattttaggtgcagtaaattcaggaatagatatgtttgattgcgttttgcctacaaggtctggaagaactggactagcgtttacttgggaaggaaaattaaatatcaaaaattctaaatatcaaaatgataaatcacctttagaccctaattgtcaaatcagaggacttaatcagtactctaaaagctatttaaaccatttagtaaaatctaatgaattgatggcctcaatgataatttcattgcataatgtatacttttatcaacaatttatgagagaaataagagaaaatattaagagcggtacttttgcctctttttataaaaaatatatagactattttaattaa

SEQ ID NO: 239987 - DNA, 367 bp, Unknown
  Bacterial polypeptide expressing nucleotide sequence isolated from the Sargasso Sea
tttggttgagtctgtgcgccgcggtatcgatatgtttgactgtgtaatgcccacgcgcaacgcgcgaaatggtcacttgtttgtgactgaaggcgtagtgaagattcgcaatgcgaaacacagaaacgacacctcgccattagatgagaattgtgattgctacacttgtaaaaactattctcgctcttatctacatcatttggacaagtgtaacgaaatcttgggtgcgcgcttaaataccatccataaccttcgctactatcagcgcgtgatgcaggggcttcgcgatgcgattgacgcaggtacgcttgatgagtttgtacaagaattttatgaacaaaaagggttgccggttccggcactataa

SEQ ID NO: 239988 - DNA, 181 bp, Unknown
  Bacterial polypeptide expressing nucleotide sequence isolated from the Sargasso Sea
atgttcgaattgattcaaagcgatggcgcggctagacggggtcgactgaatttagggcacggtgtggttgagacgcccgtgtttatgccctgcggcacgtatggaacggtgaagggcatgacccctttggatctttctgggataggaacacagatattacttggcaacacttttcacttaa

SEQ ID NO: 239989 - DNA, 314 bp, Unknown
  Bacterial polypeptide expressing nucleotide sequence isolated from the Sargasso Sea
aatgacattaaaaaaatttaattttaatgttcttaaaaaagaaaaatttgcaagattaggtaaaataattactagccgtggtacaatagatactccagtatttatgcctgttggaacccaggcaactgttaaaggtacatttattaaagatgttattgaggctggaagtcaaattgttttatctaatacctatcatttaatgattagacccggtgcagatagagttaaaaaagctggtggtctacataattttatgaactgtaaaataccaatcttaactgattctggtggttatcaaattatgtcattatcta

SEQ ID NO: 239990 - DNA, 880 bp, Unknown
  Bacterial polypeptide expressing nucleotide sequence isolated from the Sargasso Sea
ggtggattacaccaattcatgaattgtaagctgccaattctaacagactcaggtggttttcaagttatgtcattatctaaactaaataaaattgatagagaaaaaggtgcaatatttcaatctcacattgatggtaaaaagtttattcttggtcctgaagaaagtattaaaattcaaaaagatttaaattcagatattgttatggttatggatgaatgtccaaaaaaaacaaatgattatgatttaattaagaaatctatggaactttctacatactgggctgagagatccaaaaaggaatttggttcaaataaagaaaaaggtttatttggaattgtacaagggggtctatttgatgatttaagaaacaaatctttagaaaatttaattgaaataggttttgatggttatgctgtcggaggattggctgttggagagagtcaaaaagaaatgttcgatacactagactttttaaaagacagtttgcctaaagataaaccaagatatttaatgggagttggtacaccatctgatattttgggagctgttaaaagaggtattgatatgtttgattgcgtaatgccaacaaggtcaggaagaaccggattagcatttacctggaatggtagaattcaaataaggaattctaaatatcaaaatgatgattcacctttagatccaaatacaagcaattttagtttaaataagtattcaaagaactaccttaatcatcttttcaataccaatgaaatgcttgcgtcaatgttgctaactattaataatttaaatttctatcaagaattgatgaaagctattagaaataatattaaaaatggtacatttgatcatttctttaataaatattttggaaaattataat

SEQ ID NO: 239991 - DNA, 839 bp, Unknown
  Bacterial polypeptide expressing nucleotide sequence isolated from the Sargasso Sea
tgactctggtggttttcaaattatgtctctttcaaaacttaataagatcgataaacaaattggagcgatatttcaatcgcacatagatggaaaaaaaattatattaagtcctgaaaaaagtattaaaattcaaaaatcaattaattcagatattctaatggtattagacgaatgtccaagcttaacagataatagggatattttaataaacgcaattaatacatcaacccactgggcaaaacgatgtaaaatagaatttggaaataacaaaaaaaaaggattatttggaattatacaaggggggctttataatgatttaagacaagaaagtttagaaaaattagaagaaattggatttgacggttatgcaattggaggtctcgcagtaggtgaaacacaaaaagaaatgttcgaaacagttaaaaatacaacaaataaaatgcctgaaaataaacccagatatcttatgggtgttggcacgccatcggatatattaggagctgtaggagagggcattgatatgttcgattgcgttatgccaacaagatctggtagaacaggattagcttttacatggcaggggaaaataaatttaaaaaactcaaagtataaaaatgactattcgcctttagacagtgaaactaatattagggatttgaaaagttattcaaaaagttatttaaatcatttaataaaaacgaatgaactcttggcttctatgattatttcattacataatatcaacttttatcaacaatttatgagtgaaatcagaagaagtatcaagagtcgcacttttagtaaattttatcataaatatatcaaactttttaattaat

SEQ ID NO: 239992 - DNA, 880 bp, Unknown
  Bacterial polypeptide expressing nucleotide sequence isolated from the Sargasso Sea
cctactttcatgccagtaggaactcaagctaccattaaaggtgcatttattgatgacattataaaaactggtagtgaaataattttatgtaacacatatcatttaatgttaagaccaggtgcagatagagtggaatttgcaggaggtcttcatgattttatgaattgtaaattacctattttaacagactctggtggatttcaagttatgtcattatccaagtttaataaaattgacagagaaaagggagcaatatttcaatcccatattgatggtaaaaaatttatcttaagtcctgaagaaagtataaaattacaaaaaaaacttaattctgacattgttatggttatggatgaatgcccaaaaaatagtaatgactatgataagataaaaaattcaatggaactttcgatggaatgggcaagaagatcaaaagatgaatttggtttgaatgctcataaagggttatttggtattgttcagggtggattgtttgatgatttaagaattgattcattaaataaattaacagaaataaattttgatggatatgctcttggtggtttggcagttggagaaagccagtttgaaatgtttaaagtattagacaacattcaaaaattcctccctaaagacaaaccaagatatttaatgggtgttgggactccttctgatattttaggagctgttaaaagaggtattgatatgtttgactgcgtattaccaactagatcgggtcgcactggattagcatttacatggaatggtagggttcagattagaaattctccatataaatacgataattcacccctagatgaaaatgtttcaaaatttagtttaaataagtattctaaaaactatttaaatcacctttata

SEQ ID NO: 239993 - DNA, 628 bp, Unknown
  Bacterial polypeptide expressing nucleotide sequence isolated from the Sargasso Sea
atggataaatttaagtttaaagttttaaaaaaagatggctatgcccgcaaaggtcttattgaaaccaaaagaggcaatattaaaacacctgcatttatgcctatagctactcaaggagcagttaagtttactcccatagagcttatagaacagattggatatgaattaacgctctcaaatacctatcacttactattaagacctggattagaaagactttctagtgttgatggtatttcagagtttatgggatggaataagcccgtattaacagactctggaggctttcaggtgatgtctctatcaaaattaagaaaaatatctgaagagggagtaaaattccaatctcatattgatggagcatcacactttttaactcctgaaaatgtaattgattatcagaatacaattaagtctgatattcaaatggttctagatgaatgtattcagtaccccgaatcttacgagaatgttaaaaagtcaatggaattatcacttagatgggctgagagatccagaaaacattataataaaaataaaagtaaaatttatggagcccaatttggaataattcaaggaggtgtatttgaagatttaagagagacatcaatttctgaaaccagttaat

SEQ ID NO: 239994 - DNA, 790 bp, Unknown
  Bacterial polypeptide expressing nucleotide sequence isolated from the Sargasso Sea
aattgatagggaaagaggagccatatttaattctcatattgatggaaaacaatttatccttagccctgaagaaagcataagaattcaaaaaaaacttaattcagacattgttatggtaatggatgaatgccctaaaaaaactacagataaaaaaactattgaaaagtctttagatttatcaactgagtgggcattaaggtcaaaaaatgcatttgggaaaaatcctcacaaaggtcttttcggaatagtacagggtggtttatttgatgatttaagaaaaaaatccttagaggatctaattaacattgggttcgatggatatgccctaggtggcctagctgttggagatacacaaagtgaaatgtttaaggtattagacggtataaagggttacttaccggaaggtaaaccaagatatttaatgggtgttggaacaccttcagatatccttggtgctgtaaaaagaggtatagatatgtttgattgcgtattaccctctagatctgggagaactggtttagcctttacttggaatggaccaatcaatattaagaatgccaagtaccagaatgacacaaaacccattgatgaaaaatgtgaaaagttcaatttgaataaatattcaaaaaattacttaaatcatttattcaataccaacgaaatacttgcgtctatgctccttaccctccataatataaacttttatcatgagctcatggataaaattagaattaacataaataatggaacttttgaccagttttttgatgaatacattgctaagttgtaa

SEQ ID NO: 239995 - DNA, 649 bp, Unknown
  Bacterial polypeptide expressing nucleotide sequence isolated from the Sargasso Sea
aatgaatcttactcatagatggctaaaaagatgtatcagcgaatttgagaatacagacaagaatagatctagagaacagtttttatttcctattgttcagggtagcatttacggagatttaagaactgagtctgcagaattcattacatcaatggatttgcctggaaatgcaattggaggtctttcagtaggtgaacctcataatttaatgtatgaaatgtgtgaaatagtttgtgatatacttcctaaaaataaaccaagatatttgatgggtgttgggacaccaactaatattttagaaaatatatgtttaggggtggatatgtttgattgtgtaatgcctacaaggaacgcaagaaatggtatgctttttacatccgaagggaaaattaatattaaaaatgaaaaatggaaaaaagatttttctcaaatagatcctaatggatcaacctttgtagatagtaaatattcaaaagcatatttaagacatcttttttcaattaatgaaaatttaggaaaacaaattgcaacaattcataacttaggcttctacagttggattattaaaaaaacaaaagagaaaattttagatggcaattttgaaagctggaaaaaatcaatggttaaaaaactagacaataagttataa

SEQ ID NO: 239996 - DNA, 884 bp, Unknown
  Bacterial polypeptide expressing nucleotide sequence isolated from the Sargasso Sea
aattaatcaaacaaattctcaaataatattatgtaatacttatcatttatttttaagacctggtactgaaaggatagaaagagtaggggggcttcataattttatgaattttaaaaaaccaattctaacagattcaggtggttttcaggttatgtcgctatctaaaaatactaagattactgaggagggtgcaacatttaattctcacattgatggaaaaaaaatatttatatctcctgaaattagtattgaaattcaaaaaaaacttaactcagatattgttatggtttttgatgaatgtcctgaatacactaaggataaaaaaataattaaagaatctatggatttatcgacacgatgggcaaaaagatcaaaaaccgcttttggtagcaatcctaataagatgctttttgggatagttcagggtggtatatttagtgatttaagaaaagaatcattgaattatttagaagaaattggttttgatggatatgcactaggaggtttagctgttggtgagcctcaaattgaaatgtttgataccgtagagcaaatttcatcttttatggataaaaataagcctagatatttaatgggcactgggacaccaggagatttactaggtgctgttaaaaggggaatggatatgtttgattgtgttttgccaactaggacaggaagaaatggactcgcattcacctggaatggtaaatttaatttacgaaatgctaaatatcaaagtgatgataatccattagatgtaaatgtcgattgtccagcatcaaaactatattcaaaaaattatctaaatcacctaattaattgtaatgaaattttagcatcgactttgattacgtggcataatgttgcgtttcttccaagat

SEQ ID NO: 239997 - DNA, 830 bp, Unknown
  Bacterial polypeptide expressing nucleotide sequence isolated from the Sargasso Sea
tggaggttttcaagttatgtctctatccaaattaaataaaattgacagggaaaagggggcaatattcagctcacacatagatggaaaaaaatatattctaagccctgaggaaagtattaaaattcaaaaaggacttaactcagacatcattatggtaatggacgagtgtccaaaaaattcaagtgattataaaaaaattgaaaagtctatggagttatctatgtattgggcaaaaagatcaaaaaaggcatttggaaccaacttaaataaatctctttttggaatagttcagggcggaaagtttaaagatctcagaactaaatctatcaatcaattgttaaagataggatttgatggttatgcaatcggaggattggctgtcggggaatctcaaaatgaaatgtttgaagtcttagataatttagttgatgatatgccaatagataaaccaagatatttaatgggcgtaggaacaccttctgacatattaggcgctgttaaaagaggtatagatatgtttgattgtgttttaccaaccaggtctggaagaactggtttagcttttacttggaatggaagaataaatattagaaattctaaatataagtatgataacaagccaatagatcaaaatactaaagtatttgacttatataaatattctaaaaattacataaatcatctattcaatacaaatgaaatgttaggttctatgatactaacattacataatgtaaatttttaccaagaactaatgtttgaaataagaaaaaatattgaaagaggcacttattctaaatttcatgacaaatacattaatgttttataat

SEQ ID NO: 239998 - DNA, 829 bp, Unknown
  Bacterial polypeptide expressing nucleotide sequence isolated from the Sargasso Sea
gatgggtagtaatatttataagctaatagcaaaagatggacttgccagaagaggcgaggtaaccactgaacacggtaagtttcaaacgcctgcatttatgcctgtgggaacttatggagctgttaaatcaattagccctaacattttagaaaacctagaagctgaaatcattctttctaatacttaccatctaatggaaagaccaggggtagaaaccattaaactacatggaggcttgcataaatttataggatgggaaggacccatattaactgactcgggtggttaccaagtatttagtttatctaaaaaaaggaaaatactagaagagggagttgaattcttctccccactgaatggagataaaaagtatctaactccagaatcgtgcatgcaattgcagcttgattacggtgttgatattgcaatggtattagatgaatgcactccttatccagtaatagaagatattgctaaaaaatcaatgcaattatcacttagatgggctaaaagatgccgttcgtcttttaaatccgatagcgcttctttgtttgggataattcaaggaggagtcttcaataatcttagagaagaatcactggctgagttaatagaaattaattttgagggctatgcaattggaggcctatcagtaggtgaacctaaagaagaaatggataaagttgtggatcatatagcaccaaaaatgcctgaagataaaccaaggtatttgatgggggtgggtactcctttagacatagtcaaagccgttcagctaggggtagatatgtttgattgtgtaattcctacaagacatgcacgcaatggc

SEQ ID NO: 239999 - DNA, 463 bp, Unknown
  Bacterial polypeptide expressing nucleotide sequence isolated from the Sargasso Sea
gaagataaaacagctatgcttgatgtcattgaattcatggatgattatttacctaaagatcagccgcgatatcttatgggtgttgggcgaccaactgatctgataaaagcaatacagcgcggcattgatatgttcgattgtgtaatcccaactagaaatgcgagaaatggccagctttttacgagtgacggcattgtaaatataggtaacggagaatataaaaaatcctttgagcagatagataaaaaatgtaattgctatacttgcaccaacttctcaaaagcatatttaaggcatttatttaatattggagaagtacttggattgcgactagcaactattcataatttgcactattataataatctaatgcttaccgtaagggataaaatacaatcaaatatttttcatgattggtcaaaatcatatctaaaagaaatggaatatcacgatggtatgtaaa

SEQ ID NO: 240000 - DNA, 616 bp, Unknown
  Bacterial polypeptide expressing nucleotide sequence isolated from the Sargasso Sea
ttgtctttgtattgggccgagagatcaaaaaaaaacttttggtttaatccacataaagcattgtttggaatcatacaaggagggttattcaaagatttaagaataaagtctttgaatgaattaacaaagattggttttgatggatatgctgtaggtggtttagctgttggagaaagtcagagagaaatgtttactgtattagattacttaaaagatgagctaccaaaagaaaagcctcattatttgatgggtgttggtactccatcagatattttaggagctgtcaaaagaggaattgatatgtttgattgtgttttgccgacaagatctggaagaacaggattagcttttacttggaatggtagaataaatattaagaataacaaatatcaatatgatgatactccactcgataaaaatactaaaaatttagaattgaataagtactcaaaaaattatttaaatcatttatttaataccaatgaaattcttggttcaatgttattaactttacataatatcaatttttatcaagaattaatgtcgtcaattagagaaagcatcaacaatggtacatttgatgaatttcatgataaatacataaataagttgtaac

SEQ ID NO: 240001 - DNA, 334 bp, Unknown
  Bacterial polypeptide expressing nucleotide sequence isolated from the Sargasso Sea
atgctcacatttaccatcgatagcacagaccaacgcgcaagaacagggcaaatcatgctgcatggcaaaacgcctattcgcacacctgccttcatgccagtaggcacttgtggctctgtcaaaagcttatccacggaagaagtgcgcaacaccggtgctgatattttacttggcaatacctatcatctcgcatgccgtcctggtgaagctattattgaagcacatggtggtttgggtgcttttatgcattggccctatcctattctcacagattctggtggctttcaagtctttagaaaaagtgcgcttaccaaacaatcagaagaaggtgtat

SEQ ID NO: 240002 - DNA, 794 bp, Unknown
  Bacterial polypeptide expressing nucleotide sequence isolated from the Sargasso Sea
aaaaagaatgggtggcctgcatgaatttatgaattgtgaattacctatattaactgactcagggggttttcaggttatgtcactttcaaaattgaataaaattgatagagaaaaaggtgcaatttttaattcacatgtggatggaaaaaaattttatttaagtccagaggaaagtattaagatacaattaaaccttaactcagatatcgtaatgattatggatgaatgtccaaaaaaaactgataattatgatttgatcaaagattctatgaatttatctttatattgggctaaaagatcaaaagaagctttcggaaaaaattctcataaagcattgttcggtatcgttcagggaggtcttttcaaagatttaagaaagacttcattaaatgaattaataaatattgattttgatggttatgcaattggtggattagcagtaggtgaaacacaaaaagaaatgtttactgttttagattacattaaagacgaattaccccaagaaaaacctcattatttaatgggagtcggaactccttcagatattttgggtgcagtcaaaagaggcatggatatgtttgattgtgttttgcccacaagatctgggagaactggtcttgcttttacttggcagggaagagtaaatataaaaaacaataaatatcaaaatgacgacactccacttgatgaaaattgcaaaaatcttaatttaaataaatattccaaaaattacttaaatcatttattcaatacaaacgaaattcttggatcaatgttacttactctctcataat

SEQ ID NO: 240003 - DNA, 584 bp, Unknown
  Bacterial polypeptide expressing nucleotide sequence isolated from the Sargasso Sea
aatgaaatataaagttaacaatacttcggaaaatgctcgagaggcagaaattcacaccgaaaggggagttatccaaacccctgcttttatgcctgttggtacaaatgggactgtaaaaggacttacgatcgatgacttgaatgaaacacactcacaaataatccttggcaatacttttcatttaatgttgaggcctggcgataagttgattaaagaattgggcggattacataagtttattaattgggagaaacccattctaaccgactctggaggatttcaagtatggagccttggagagttaaataaaatttccgaggaaggcgtgaaatttagttctccatatgatggaaaaaaaatatttatgactcctgaagattctatcatgattcaagaaaatcttggttctgacattgtgatggcttttgatgaatgtacagattatccatctacttatgatgaagcaaaacaatctatggagctttcaatgagatgggctaaaagatgcaaagacgctcataaatcaaagtctgcattgtttggaatcgttcagggtgggatgtatacagatttaagagaagagt

SEQ ID NO: 240004 - DNA, 612 bp, Unknown
  Bacterial polypeptide expressing nucleotide sequence isolated from the Sargasso Sea
tctgaaaaaggatcaccatagttttgaatttatgacattaaagaaattttcttttaatgttataaaaagtaatggtcatgcacgactaggtaaaattaggacgcatagaggaaacatagatactccagtattcatgccagttggtacacaagcaacaataaaaggcgcttttatgaaagatattgttgaaactggaagccaagttattttatgtaatacttatcatttaatgatcagaccaggagttaatagattaaaaaaatctaaaggtcttcataaatttatgaattgtaatttgcctatacttacagactctggtggttatcaaattatgtcattatcaaaattaaataaaattgatccaattaaaggggcaatatttaattcacatatcgatggaacaaaatattatttaagtcctgaagaaagtattaaaatacaaaaaaaattaaattcggatattgtaatggttttagacgaatgcccaaaaaaaacattagattatgatgttatttctaaatctgttgatctttctactgagtgggcaaaaagatcaaaaaaagcttttggtaatattaaacacaaagctttgtttgggatagtacagggcgg

SEQ ID NO: 240005 - DNA, 559 bp, Unknown
  Bacterial polypeptide expressing nucleotide sequence isolated from the Sargasso Sea
ttgggcatcgttcagggaagcgtatttgaggatttaagaaaagagtctgtaaaaactctagaagcaataaattttgatggttatgcagtagggggtcttgcagtaggtgaaagccaagctcaaatgtttgaggtacttgaatttacttcgcctcatctacctgacgacaaaccacattatttaatgggtgtgggcaagcctgatgatattcttggtagtgttgctagaggaattgatatgtttgattgcgtattgccaactagaagtggtaggaatggacaagcctttactcgtcatggaccaattaatattagaaatgcaaaatacaaaaatttagatgatccaattgataaaaactcagataatcctgtatgtaaaaattactctgctgggtatatacatcatttatttaatgcaaaggagatgctaggcggcatgttgctttctttgcacaatatatatttttatcagagtcttatggcagatattagaaaatctatagaggaggatcgctttatgtctttttcaaaagaatttcttgaaagttataaatcttagt

SEQ ID NO: 240006 - DNA, 535 bp, Unknown
  Bacterial polypeptide expressing nucleotide sequence isolated from the Sargasso Sea
tttgaggatttaagaaaagagtctgtaaaagctctagaagcaatacattttgatggttatgcagtaggaggtcttgcagtaggtgaaggccaagctcaaatgtttgaggtacttgaatatacttcgcctcatctacctgacgacaaaccacattatttaatgggtgtgggcaagcctgatgatattcttggcagtgttgctagaggaattgatatgtttgattgcgtattgccaaccagaagtggtaggaatggacaagcttttactcgtcatgggccaattaatattagaaatgcaaaatacaaaaatttagatgatccaattgataaaaactcagataatcctgtatgtaaaaattactctgctgggtatattcatcatttatttaatgcaaacgagatgctaggtggcatgttgctttctttgcacaatatatatttttatcagagtcttatggcagatattagaaaatctatagaggaggatcgctttatgtctttttcaaaagaatttcttgaaagctataaatcttagt

SEQ ID NO: 240007 - DNA, 842 bp, Unknown
  Bacterial polypeptide expressing nucleotide sequence isolated from the Sargasso Sea
cgtgggtacagcagcaaccgttaaagctttaacagttgatcaaattaatcaaacaaattcgcaaataatattatgcaatacttaccatttatacctaagacctggtgctgaaaggatagaaagagtaggggggcttcataattttatgaattttaaaaaaccaatcctaacggactcaggcggttttcaggttatgtctctatctaaaaatactaagattactgaggatggcgcaacgtttaattctcatattgatggaaaaaaaatatttatatctcctgaaattagtattgaaattcaaaaaaaacttaactcagatattgttatggtttttgatgaatgtcctgaatacaccaaagataaaaaaagaattaaagagtctatggatttatcaacacgatgggcaaaaagatcaaaaaccgcttttggcagtaatcctaataaaatgctgtttggaatagtgcagggtggtatatttgatgatctaagaaaagaatccttgaattatttaaaagaaatttgttttgatggatatgctctaggaggtttggctgttggagagcctcaaattgaaatgtttcataccgtagagcaaatttcatcttttatggataaaaacaaaccaagatatttaatgggtactgggacaccaggagatttattaggagctgttaaaaggggaatagatatgtttgattgtgttttgccaaccaggacaggtagaaatggtctcgcattcacctggaatggtaaaattaatttacgaaatgccaaatatcaaagtgatgatacaccactagatccagatgttaattgcccagcatcaaatttatattcaaaaa

SEQ ID NO: 240008 - DNA, 922 bp, Unknown
  Bacterial polypeptide expressing nucleotide sequence isolated from the Sargasso Sea
ccagtatttatgccagttggtacggttggtgcagtaaagaccttttctcctgaagaattaaaaggtatcaattcacagattatattagggaatacataccatttatatttaagacctggtactcctaccattaataaagcaggaggccttcattcttttctttcatgggatagaccaatcttaactgatagcggtggatttcaggtattctctttggcaaaactgaacaaaatatctgataatggggttgagtttcaatcccatttagatggaagtaaacatatgttcacacctgagatttctatggaaattcaacgcgatcttggatcagatattattatgtcatttgatgattgccctccaggagatgcggatcatgaaaccataaaaaatgctgtaaataggacaactgagtggatgaagcgctgtcataaatggctgtcagataatccagaacgatacggtcatgaacaagtagttttccccattattcaaggtggtacagatcataaattaagacgcattagtattgagcaattatctccatattcctctgcaggtatggcaataggaggacttgctgttggagaagaaaagagtgcaatgcttgatacagtagaatattgtgatgaaatattgccaaaagatcagccacgttaccttatgggtgtaggaagaccatctgatattgtagcggcagttagacgcggtgttgatatgtttgattgtgtcatgcctacgcggaacggtagaaatggacatatgttcacatcaaaaggtgtgataaatataaggaatgaaaaatataaagatgatatgtctccattagataatgaaagttcacacccttgggggcagaaattttcaagatcatatgttaggcatctttttaatattaatgaggtcctaggactaagaattt

SEQ ID NO: 240009 - DNA, 817 bp, Unknown
  Bacterial polypeptide expressing nucleotide sequence isolated from the Sargasso Sea
aattaacacgcctgcttttatgccagttggaactgcaggaactgttaaaggagtgtttactagagatctaaaagaaacaggttcagagattattttaggaaatacctatcatcttatgctgcgaccaggagataaaaatattgccgaggtgggtggattgcataattttatgaactggaatatgccaatactcactgactctggtggatatcaagtgtattcactttctaaattaagaaaaatatctgatgaaggtgtaacatttaaatctcacctagatggggaagaaatttttttgtctcctgaaaggtcaatggaaattcaaaaaaaccttaattcagatatcgtgatggcatttgatgaatgtactccttatccttcaactcatagtgaagcaagtaaatctatgaaactttcaatggattgggcattaagatgtaaaaaatcatttgaaggaagaaatttactttttggcattgttcaagggagtatttatgaggatttaagaggagattcagtaaaagcattaacagatattggctttgatgggtatgcagttggaggtttagcagttggtgagactcaaaatcaaatgtttgatgttcttaattttacttgtccaatgttgcccgctgctcagcctagatatttaatgggagtaggtaaaccagacgatattattggggctgtatcaagagggattgatatgttcgattgcgtgcttccaactagaagtggaagaaacggtcaggcatttacatcaacgggtccgattaatataagaaattcaaaatataaaaattcagcatatgtcttt

SEQ ID NO: 240010 - DNA, 925 bp, Unknown
  Bacterial polypeptide expressing nucleotide sequence isolated from the Sargasso Sea
taccatctaatgatacgacccggtgaagaaagagttgcacttcaaggaggtttgcatgagtttatgaattgtccattaccaattttaaccgactcaggtggatatcaagtgatgtcactatcaaatttaaataaaattgatagagagaagggtgccatattcaattctcatgtggatggaaaattatatactcttagtccggaagagagcataagaattcagaaaaaactaaattcagacattgtcatggttatggatgaatgcccaaaaaaaacaacagacagaaaaattattgaagactctttaaatttatcaacagagtgggctttaagatcaaaaaattcttttggaaaaaatcctcataagggtctttttggaatagtgcaaggtggattatttgatgatttaagaaaaaaatcacttaatgatttaataaaaattgggtttgatggatatgccttaggtggtttagctgttggagacacacaaagtgaaatgtttaaggtattagacggtataaaaaatcacctacctgaagataaaccaagatatttaatgggtgttggaacaccttcggatatcctaggagctgtaaaaagagggattgatatgtttgattgtgtattaccctctagatctgggagaactggtttagcttttacgtggaatggacctataaatattaaaaatgctaagtaccagaatgatacaaaacccattgatgaaaaatgtgaaaaatttaacttaaataagtattcaaaaaactacttaaatcacttattcaatactaacgaaatactggcctcaatgcttttaacgctccataatataaatttttatcatgaacttatgaatgaaataagaattaacataaataatggaacttttgaccagttttttgatgaatacatagctaagttgtaat

SEQ ID NO: 240011 - DNA, 748 bp, Unknown
  Bacterial polypeptide expressing nucleotide sequence isolated from the Sargasso Sea
aatgaaatacaaacttttgaaaaaagatggatacgctagaaggggtttcttagaacttcaacatggcaatattcaaacaccagtatttatgcctgttggaacaaatgcaacggtcaagggcttgactgtagaagatcttgaagaaacaggctcacaaataattctttcaaatacttatcatttaatgcttcgtccaggtgatgagatcataaagcagcttggcggccttcataatttttgtaattggcaaaaacctattcttacagattcaggtggctttcaggtttggagtttaggcgatcttgcagaagtctcagagaaaggggtaagttttaaatcaccttatgatggaaagaatatatttatgagtcctgaagattccattcaaattcaagaaaatcttggttcggatattgtgatggtatttgatgaatgtacaaactatccatctccaaagaaagaagcgcaaaaatctatggagctatcagcaagatgggcagctagatcaaaagatgctcataaatcacaatcagcattatttggtattgtgcaaggaggaatgtatgaagatttaagagaagagtcactaaatctcaccttggcatgtgaatttgatggcatcgcaattggaggattaagtgttggcgagcctaaagaagaaaaaacaaaagttcttaaacatttagcaagtattcttccagatgataagccaaggtacctaatgggagtaggaaagcctgaagatatt

SEQ ID NO: 240012 - DNA, 523 bp, Unknown
  Bacterial polypeptide expressing nucleotide sequence isolated from the Sargasso Sea
atgaaattctctataaagaaaaaatataaaaatgcaagaagcggttatctagaattgaaaaatggaaatgttcaaacacctacatttatgacaattgggacatatggttctgtcaaatctttatcaagtgaagatttattaaggtgcggatgtgaaatcttactctgtaatgcatatcacctcatgcttagacctggtttggatgttataactaagggcggacatcttcataagtttatgaattgggataaacctatactaactgattcaggaggctatcaagttttcagtctaagcaagaatgttaaagttaataaggatgctgcggtatttaaatcaccatataatggtgatgagattattatgaccccagaaaaatcaataaaaactcaaattgctcttggaagcgatatcatgatgatatttgatgagtgtactccgtatcctgttgacaaagacaaagcaaatgaatctatgagattgtcactagattgggcagagttatctaaaaaggctaacgact

SEQ ID NO: 240013 - DNA, 583 bp, Unknown
  Bacterial polypeptide expressing nucleotide sequence isolated from the Sargasso Sea
catttactatttggcatagtgcaaggtggtatgcacgaagagttgagaaaacaatcccttgcttttatgaataacttacagcttgacggaatagctctgggtggtttgagtgttggtgaaccaaaggaagagaaaaccaaaattctgaaatacttagcacctttactaccggcaaataaagcccattacgttatgggtgtagggacacccgaagagttagtggagggtgtgagatacggtattgatatgttcgattgtgtcatgcccactcgaaacgctcgaaatggattcttgtatacaagtactggcattttaaaaattagaaatgctgaacataaaaactccacaaaaccgatcgatgaaaactgcgacagttataccaataaaaatttctctcgtgcttatttacatcatctggataaatgcaatgaaattcttgcaagcaccttgatgagtattcataatctggcttatttcaaccaacttatgaccaatattagaaaatcgttagaggaaaataaatttgaagaatttctggattccttttacgatatgaggagcttgaagaagcctaaactatagg

SEQ ID NO: 240014 - DNA, 682 bp, Unknown
  Bacterial polypeptide expressing nucleotide sequence isolated from the Sargasso Sea
aatggaagagacaaaaaagaatttttcttttagcgcaaaacatcaaaataaatattatcgtgttggtttaattcaaacccatcgtggtgagattaatactccggcgttcatgcctgtaggtacacaagctacagtaaaaggagtttttatagatgatataattaaaactggaagtgaaataattctttcaaatacttaccacttaatgattagacctggcacagaaagaattgaggctgtaggtggattgcataaatttatgaattgcaaacttcctattttaactgactcaggaggttatcaagtaatgtctttatctaaatttaataaaattgataaagataaaggagcaatttttcaatcacatattgatggaaaaacttttattttaagccctgaggaaagtataaaaattcaaaaaaaacttaactcagacattgtcatggttatggatgagtgtccaaaaaatactaatgattataacaaaataaaaaactctatgaaattatccttagattgggcgatacgatcaaaaaatgaattcggaaataatccacacaaggcattatttggcatagttcaaggaggcttatttaaagatttaagaaacgactctcttaataaattaatagacatagaatttgatggatatgctattggtggcctagctgtgggagaaacc

SEQ ID NO: 240015 - DNA, 625 bp, Unknown
  Bacterial polypeptide expressing nucleotide sequence isolated from the Sargasso Sea
ctatggatctattctttgtatttgggctgaaagatcaaaaaaagcttttggaaacaatcctcacaaagcattgtttggaataattcaaggaggattatttaatgacttaaggttgaaatcactagatgaactaacaaaaattggatttgatggttatgcagtcggaggattggctgtaggtgaaactcaaaatgaaatgtttgctgttttagatggaataaaagaatatttgccagatgaaaaacctcattatttaatgggtgttggtactcctacagatattttaggagctgtaaaaagaggtatagacatgtttgattgtgttctcccaacaagatcaggcagaactggtctagctttcacttgggatggtagagtaaatatcaaaaataacaaatatcaatatgacaacagtccattagatccaaattgtgaaaatttaaatttaaataaatactcaaaaaattatttaaatcatttatttaataccaatgaaatattagcttcaatgctattaacacttcataatataaatttttaccaagaattaatgtcagccatcagaaaaaatatcatgaataatacttttgatgaatttcacgacaaatacattgataagttgtag

SEQ ID NO: 240016 - DNA, 912 bp, Unknown
  Bacterial polypeptide expressing nucleotide sequence isolated from the Sargasso Sea
gaacgttaggaacagtcaagggcattacatcagagcagcttaagagaacaggagcggaaatgattcttgctaatacttttcatcttcatctgcagcctggagaaaagattgttcaagatgcaggggggctacataaatttatgtgttggaataagccaatacttactgactcaggaggctttcaagtttttagtttggcaaagttaaataaaattgatgatgaaggagtttcgttccaaagtcccagagatggtaaacatatttttttgactcctgaaaaagccactgaaattcaaatggccttaggctcagatgtcgccatggcttttgatcaatgccccccttacccatctagtgagtcagacgtggaggaggcctgtaaaaggactcatcactggttggagagatgtttaaatgctcataccaaagatgaccaagcagtttttggaatagttcaaggtgggtgcttccctcatttgagggaattgagcgcaaaaattgtctcaggattcgacttgcctgggattgctatcggaggtgtaagcgtaggtgaaccaataaatcaaatgcacaaaattgtaagagaaacctgtccgttattacctgatgatcgacccagatacttaatggggattggaaccttaagagaaatgtctatagctgtagcaaatggtgtagatctattcgactgtgtcataccaacgcgcttaggaagacatgggagcgcattagttaatggggaaacatggaatttaagaaattctcgttttaaagacgattacagaccgttggattcatcatgtaattgtgaagcttgtactgggtatacaagggcatatattcatcatttaattcgcaacaaagaattacttggtcttacacttttgagtctgcataatctcacgcattgat

SEQ ID NO: 240017 - DNA, 516 bp, Unknown
  Bacterial polypeptide expressing nucleotide sequence isolated from the Sargasso Sea
aatgactaaattttcatggcaaattgattctttatcaaaaaaatcatttgctagaacaggaaagattaaaacaccaaatggagacattgatactcctgcatttattttttgtgggaccaaggcagccttaaagtctatttcaacaactgaagcaaagtctaataacactcaaataatattgtctaatacttatcatctaatgctacaaccaggtagcaagataatagctaaacatggaggactacacaattttatgaactgggatggtccaatattaactgatagtggagggtttcaaatattttctttgggatacggatcagtagcagatgaaattaaaggaaagggattcaattcaaaaagaaaaaaaactctacttaatataaatgaagaaggaacattatttaaatcttacattaatggaaataatgtttatttaactcctgaaaaatcaatagaaattcaaagagatcttggtgctgatttaattttagtgtttgatgaatgtacaccctt

SEQ ID NO: 240018 - DNA, 799 bp, Unknown
  Bacterial polypeptide expressing nucleotide sequence isolated from the Sargasso Sea
tatttctgataaaggtgtggaatttaaaaatccaagagatggtagtcatgtttttttatcacctgaaaaagtaatacagattcaaatggatcttggatcggatgttgcgatggcttttgatcattgtcctccgcatacagctaacgaaaatgatattgaggactctctgcaaagaactcattcatggttgaaaaaatgtgttgagactcatcagaaatccaatcaagcattattcggtatagttcaaggtggaaagtatccgagattgagagaatatagcgcaaaatatacaagttcttttgatctgcctggaatagcagtgggaggtgtaagtgttggcgaggcagtcgaagaaatacatggtgtaattaattacgttccgaaattcttaccaataaataaaccaagatatttaatgggaattggctctttaaaagaaatttctctagctgttgctaatggattcgatatatttgactgtgttttgcctacaagactaggaagacatgggactgcattttttaatgatgaacgattgaatttgcgaaatgctcgatttaaaaatgacttttctccgattgacaaaacttgtgaatgcgaaacctgtaaatcctattctcgagcgtatttgcatcatctaattagaaatgacgaaatattaggcctaactctcataagtttgcataatattgctcacttaataagatttaccaatgcaatttctactgcaattagagataattgttttacaaatgattttcgctcccttggaaaaccatcctcttattgctcacccata

SEQ ID NO: 240019 - DNA, 823 bp, Unknown
  Bacterial polypeptide expressing nucleotide sequence isolated from the Sargasso Sea
tcaagtatactcattgtcaaatcttagaaagttgtcagaagagggcgttgagttctcatcacacattgatggcacaaaagtatttgtctcaccggaaaaatctattgagatacaaactgatttaaattcagacatcgttatggcattcgatgagtgcaccccttatccagcagagtatgatgaagctaaaaaatcaatgggactgtcaatgaggtgggccagcaggtgtaagaagtattttaaagatcacaatacgaataaattgtttggtattgtgcaaggaagtacttatgaagacctcagacatcagtctgctagtttattaagtgatatcggatttgacggttacgcagtcggaggtttggctgttggagaaactcaaactcaaatgtttgacgtgctcgattatacagtttcaaagctcccgatcgaaaaacctcattatttaatgggtgtaggtaaacctgatgatattattggaagtgttgctcgtggaattgacatgtttgattgtgtattgcctacacgcaatggacgaaatggacaagcatttacaaagtcaggaccaattaatataagaaatgctaaatataaaagtttagatgagccaattgatccagaaagcaacaatccgatttgtagagattactctgctggctatattcatcatttgtttaatgcaaaagaaatgttaggaggcatgctcttatctttacataatatatatttttaccaagaaatgatgagcaatataagaacttcaattgaaaataataaatttgaaaaatttagagataattttttatctaaatacttagattaa

SEQ ID NO: 240020 - DNA, 406 bp, Unknown
  Bacterial polypeptide expressing nucleotide sequence isolated from the Sargasso Sea
aatggcattaaaaaagttttcttttaatgttgaagaaaaagataaacaggcaagattgggtttaataaaaactcatagaggtaatataagtacaccagcttttatgccagttggtactcaagcaacaatcaaaggtacatttattgatgatataatcaaaactggtagcgaaattattttgtctaatacctatcatttaatgattagacccggtgttgatagaattgaatcttcaggaggtttacatcatttcatgaattgtaaattgccaattcttactgactctggtggtttccaagttatgtcattatctaaacttaataaaatagataaagagaagggtgctatatttaattctcatatagatggaaaaaagtttattctaagccctgaagaaagtataaga

SEQ ID NO: 240021 - DNA, 577 bp, Unknown
  Bacterial polypeptide expressing nucleotide sequence isolated from the Sargasso Sea
tttggaaaatcctcacaagggtctttttggaatagtgcaaggtggattatttgatgatttaagaaaaaaatcacttaatgatttaataaaaattgggtttgatggatatgccttaggtggtttagctgttggagatacacaaagtgaaatgtttaaggtattagacggtataaaaaatcacttacctgaagataaaccaagatatttaatgggtgttggaacaccttctgatatcctaggagcagtaaaaagaggggttgatatgtttgattgtgtattaccctctagatctggaagaactggtttagcttttacgtggaatggacctataaatattaaaaatgccaagtatcagaatgatactaaacccattgatgaaaaatgtgaaaaattcaacttaaataagtattcaaaaaactacttaaatcacttattcaatactaacgaaatactggcctcaatgcttttaacactccataatataaatttttatcatgagcttatgaatgaaataagaattaacataaataatggaacttttgaccagttttttgatgaatacattgctaaattgtaa

SEQ ID NO: 240022 - DNA, 465 bp, Unknown
  Bacterial polypeptide expressing nucleotide sequence isolated from the Sargasso Sea
tatgcctcagaatacccctgaatttgattttactttaaaagcaacagatggtagagcgcgccgtggcactctgacaaccgcatggggccgggtagaaacaccagtttttatgcctgttggtacggctgcaacggtaaaggggatgttgccagaatcagtggcatcaaccggggcaagcattattttggcgaatacctatcatttgatgcttcgcccgggagctgaacgtgtggcacggcttggtggggtaagaaaaatgatgggctggaatggcccgctgctaacagactctggcgggtttcaggtaatgtcacttggcccgcttcgaaaaattgatgaagatggtgtgacttttcaatcccaccttgatggcagccatcatcgcctgacaccagaacggtctactgaaatccagcgtctccttgacgccactatcaccatgggcgttgacgagtgtacgccatt

SEQ ID NO: 240023 - DNA, 647 bp, Unknown
  Bacterial polypeptide expressing nucleotide sequence isolated from the Sargasso Sea
catgccaactaataatttttcttttgagataatttctcaaaatgaaaaagcaagaatcggaaaaatcaaaacaccaagaggaaatattgataccccatgtttcatgcccgttggaacattaggaactattaaaggtgtttttttagatgatataataaacacaggcacacaaattattttgggtaacacataccatctgatgataaggccgggtattgatgtaatagagaaatttaaaggaatacacaattttataaactggcaacaacctatacttacagactccggtggttttcaaataatgtctttatctaaaatgagaaaaattgatagaaatataggtgcaatcttttcatcacatgtagatggtaaaaaaattattttaagtccagaaaaatgtattcaaattcaaaaaagtataaactctgatattatgatggttcttgatgagtgccctgtactcacttcagataaaaaaaaactttctagtgcgattgaaacatcaacaacttgggccagaagatgtaaagtagagtttggtaacgataaatcaaaagctctttttgggattattcaaggcggactatttaaagatttaagaattgaaagcttagaaaaattaacaaacttagattttgacggatatg

SEQ ID NO: 240024 - DNA, 895 bp, Unknown
  Bacterial polypeptide expressing nucleotide sequence isolated from the Sargasso Sea
cctaacccctgaacatctcaaagatataggttttgaaataattttaggtaacgcattccatctatatctaaggccaggactagatgtaataaaagaatttggtggattacatgatttcatggcatggaatagatcaatacttacagattcaggaggatttcaggtatggagcctgcaagaattaagaaaaataactgaagaaggagttaaatttaaatcgccactagatggttcagagatatttcttgctccagaagattcaatccaaacgcaattaacattaaacgcagatatcataatggcctttgatgaatgcacagcttaccccagtacccttaaggaagctaaagaatctatggatcttactcatagatgggcatctagatgtaaagaatatttcaataagaataaaaaagagcatctattatttggcatcgttcaaggtggaatgcatcttgaattaagagaagaatcattaaattttatatctaaacaagattttgatggaattgccttaggaggactgagtgttggcgagccaaaagaagaaaaaacaaaaattttgaagcatttagcccctttattgccggaagacaagcctcattacgtaatgggcgtaggaacacctgaagagttagtggaaggcgtgagatatggaattgatatgtttgattgtgttattcctacaagaaacgctagaaatggctttatatatacctctacagatatagttaaaataagaaattcagaacacaagaagtcgacaaaacctatagatgaaaattgtgattgttatacctgtaagaacttttctagagcatatttacatcatttagataaggccaatgaaattttagctagcactttaatgagtatttgcagtttgcatactttt

SEQ ID NO: 240025 - DNA, 645 bp, Unknown
  Bacterial polypeptide expressing nucleotide sequence isolated from the Sargasso Sea
catgatctttaaccttttaaatcaagatggttttgcaagaagagcagaattaaaatttaaaaatggctctgtgcaaacaccagcatttatgcctgttggaacaaatggcacggttaaagcactggaatatgaaaacctattgtctactaattctgaaatcatattgggcaatacctttcatctaatgttaagacctggagatgaattaattaaagaatttggaggcttgcataaatttattggttgggaaaagcctattcttacagattcaggtggatttcaagtttggagcttaggaaagttagcaaaaatttcagaagagggagtaaattttaaatctccatatgatggaaaagaagtctttatatctccagagcgttcaatagatattcaagaaaatcttggttcaaatattgttatggtttttgatgattgcactggttatccagctgaacattccattgctaagtcatcaatggagctttcaatgcgttgggcaaaaagatgtaaggcgcatcacaaaggcaactcttctttatttggcatcattcagggtggtatgcacaacgatttaagattgcaatcacttgaatcattaatgaatatgaatttcagtggcctagctgttggtggccttagtgttgg

SEQ ID NO: 240026 - DNA, 897 bp, Unknown
  Bacterial polypeptide expressing nucleotide sequence isolated from the Sargasso Sea
aaagaataaaacgagtaggaggattacataattttatgaattgtaaactaccaatacttactgactcaggtggatttcaaataatgtctttatcaaaattagtaaaaattaatgaaaaagaaggtgccatatttaattctcatatcgatggaaaaaaatttgttttaagtccagaggaaagtattagaatccaaaaagatataaactcagatataataatggtattagatgaatgtcccaaattatcaaaagacaaaaaaaaaattcataaatcattaattttgtcacataattgggcaaaaagatcaaaaaatgaatttggcgataatcctgacaaagccttatttggtattattcagggtggcacttatagtgacctaagattagaaagtttagaaggtttaaaaagaattgaatttgatggatatgctctaggaggtttagcggttggtgaaacacaaaaacaaatgttaaatgttttagatgatatagttccatttatgccaaaaaacaaacctcgctatctaatgggagtggggactccaactgatattttagaagctgttaaaagaggaatagatatgttcgattgtgttatgccaacaaggtctggaagaacaggtttagcgtttacatggaaaggaagactaaatttaagaaattcaaaatataaaaaagatgattcatctattaacaaagatacaaatgtaagaaatattaatttatattccaagagttacttaaatcatctcattaatacgaacgaaattttagcatcaatgataataacgataaataacgttgttttttatcaacaactaatgcaagagatacgaaaagctatcaaaagcaacacatttgatgttttttataacaaatacatcaatgtaatttaat

SEQ ID NO: 240027 - DNA, 799 bp, Unknown
  Bacterial polypeptide expressing nucleotide sequence isolated from the Sargasso Sea
aaatacttatcatttatttttaagacctggtttagatattttaaaaaatataggaggacttcatgaattcatgaattggcataaacccatattaactgactcgggtggttttcaaattatgtctctttctaaatttagaaaaattgataaggaaaaaggtgcgattttttcgtctcatctagatggaaaaaaaattatattaagtcctgaaaaaagtatacaaattcaaaaaataattaattctgatattctaatggttcttgatgagtgtcctaaattaactaaagataaaaaaataatagcaaatgcaataaacatttctacagaatgggccaagaggtcaaaaatagaatttaatcaagccaatggaaaatctctttttggaattgtacaaggtggtctatttgatgatctaagaattgaaagtctagaaaaattgttagaaataaattttgacggttatgcattgggcggtttagctgtcggtgagaagcaggatgcgatgtttaaagttttagatactattacaaaaaaaatgcctaataataaaccaagatatttaatgggtgttggtacaccctcagacattcttggagctgtaaaatcaggaattgacatgtttgattgcgttatgccgacaagatcaggtagaactggattagcttttacatgggagggaaaaataaatttacgaaacgcaaagtataaaaaagataagacccctttggataaatttacaaaaataagagatcttaataaatattcaaaaagttatttaaaccatctaaccaatacaaat

SEQ ID NO: 240028 - DNA, 399 bp, Unknown
  Bacterial polypeptide expressing nucleotide sequence isolated from the Sargasso Sea
cgcgctatttgatgggggtgggagaaccccgagatctgttggagggggtcgaagcaggggtagacatgtttgattgcgtgcttccgacacgaaatgcaagaaacggctccctttttaccagccggggaaaagtttccatcaaacaggcccgctactgggaagatccggaacctcttgacccggattgtcactgtgagacctgtcagcattatagcagagcatacctcagacatctttatctttcaggagaaatcctcgggatgcgcttgaataccctgcataatctccattttttcctgaatctgatgcgaaacgcgagagaagcaatccttgaaaaccgcttttctaagttcaaaaatgacttcctggaacaatatcttcaggaaggatcaatgtgat

SEQ ID NO: 240029 - DNA, 733 bp, Unknown
  Bacterial polypeptide expressing nucleotide sequence isolated from the Sargasso Sea
atgcttaaggaaaatttttctttcaaagttttgaaagaagatgggtcatctcgattatgtaaaataaatactcatagaggtgttatagatacaccagcttttatgcctgtaggaacattaggaactattaaatctgcttttattgatgatgttatattagctggatcgcaaataattttatcaaatacatatcatttaatgattcgacctggagttaccagaataaaaagggtaggcggcctccaccaatttatgaattgtaatatacctatactaacagactctggtggatttcaaattatgtctttatctaaattagtaaaaattagtaaaaaagatggtgccatatttaaatctcacattgatggaaaaaagatagctttaagtcctgagcaaagtataaaaattcaaaaagatttaaattcagatatcgtaatggttttagatgaatgtccaaagttaactaatgataaaaagataatttctaattctttagacatttctcaaaattgggctgaaagatcaaaaatcgaatttggaataaatcctaaaaaagctttatttggaattgttcaaggtggaatttataaagatttaagaattaaaagtttagaaggattggaaaaaattggttttgatggttatgctttaggtgggttagctgtaggtgaaactcaaaagcaaatgttcaaagttcttaaagatattatgccttatagccaaaaaataaacc

SEQ ID NO: 240030 - DNA, 529 bp, Unknown
  Bacterial polypeptide expressing nucleotide sequence isolated from the Sargasso Sea
aatgaagtttaaaagtaaaaacacgtctgattttgcaagagttagtgaaatagaattctcacgaggcgtaatcaatacgcctgcattcatgccagttgggactaatggaactgtaaaaggtttaactagtcaagacttgaatgaaacaagcacagaaataattcttggaaacacctttcatttgatgttgaggcctggtgacgaattagttagggatatgggcggattgcataaatttattaattgggataaaccaatacttacagattcaggtggatttcaagtttggagtctgggtgatttagctgaaatttcagaggagggagttaagtttagttctccatatgatggtaaaaaaatatttatgagaccagaggactcaatcaagattcaggaaaatcttggctcagatatcactatggtatttgatgaatgcactaattatccatcaagttacgagaaagcaagaaaatcaatggaactatcaatgagatgggcaaagaggtgcaagggaagcccatacatctaa

SEQ ID NO: 240031 - DNA, 1099 bp, Unknown
  Bacterial polypeptide expressing nucleotide sequence isolated from the Sargasso Sea
atgaaatttgatattaagaaaaaattaggtaaagcaagattaggaacattatctctgaagcatggagttgttcaaactccagcttttatgacagtaggtacatatggttctgtgaaatctttgacaaatcaagaccttcatgcatgtaatactgaaattatactttgtaatgcatatcaccttatgatcagaccagaacgtaacttaattgagaaagcaggtggtctccataaattcatgaactggtctaagcctattttaacagactcaggtggttatcaggtatttagtttatccagtcaaactaaagtttcgaaaaagggggtagagtttaaatctccattaaatggaaataaattatttatgtctccagaaaaatcaatagaaacacagctttatcttggtagtgatattatgatgatattcgacgaatgtactccttatccatcgagcaagatagagacagagaaatctatggaattatcattatattgggcagagatgtcacataaagctaacaattctaaaatgccattatttggaattattcaaggaggaatgtatcctgatttaagagaaatatcactaaatgaactaataaaatatgattttgaaggatatgctcttggagggctgtctgttggagagccaaatcatcttcgaaaagaaatcattgagggtattggttataagttacctgaagaaaaaccaagatatttgatgggtgtaggaaaaccacttgatatcattcatgcagtaaagaatggtgttgatatgtttgactgtgtaattcctactagaaatgctagaaatggccagttatttaccaacaaaggtgtcttaaatataagaaatacgaaatatgaggatgatttaagaccgatagatgaatcctgcaagtgttttgcatgtcagaattatacacgagcatatattagacatttagataagtgcaatgatatattagctgcaagacttatgtcgatccataatgtatacttttaccaagaattaatgggacagataagattatcgattgaaaacgataattttgaggatttagaaaaaaaatttgaaacaaattatttaaacgtatgag

SEQ ID NO: 240032 - DNA, 1114 bp, Unknown
  Bacterial polypeptide expressing nucleotide sequence isolated from the Sargasso Sea
aatgtcattaaaaaagttttattttaatgtcagtaaaaaatacgaattcgcaagaactggtctaatagaaactcaccgtggaaatatacaaacaccagccttcatgccagttggcactcaaggaacagttaaagctacgtttattgatgatgtaattaaaactgggagtgaaataattttatctaatacttatcatttaatgctaagaccaggtgttgatagaattattagtgcaggcggcttacataaattcatgaattgtaaacttcctattcttactgattcaggtggctttcaagttatgtcattatcaaaattaaataaaattgatcgtgaaaaaggtgctatttttaagtcacacatagatggtaaagaatttattttaagtccagaagaaagtattagaattcaaaaaggattagattcagacatagtaatggttatggatgagtgtccaaaaaaaaatgatgataaaaatattataaatgaatcaatggatctttcgatgtattgggcaaaaagatcaaaaattgcttttggaaataacccacaaaaaggtttatttggaatagtgcagggtggtctatttgatgatttaagaaaagagtctttagatagattagttaaaattgattttgatggatatgcaataggaggtctagctgttggtgagtctcaaaaagaaatgttttcagtactagactcacttaagaaatatttaccagaagacaaacctaggtatttaatgggagtaggtacaccttcagatataattggtgctgttaaaagaggcatagatatgttcgattgtgttttgcccacaagatcaggtagaactggcttagcttttacatggaatggaagaatgaatattagaaattctaaatatcagcatgataatacacctattgataaaaatgtttcaatttttggattaaataagttttctaaaaattatattaatcatttattcaaaacaaatgagattttgggttcgatgttgttgactttacataatattaatttttaccaagagttgatgaaagaaattagaataaatataaataatggaacttttgataaattccatgataaatatataggtaaaatttaa

SEQ ID NO: 240033 - DNA, 527 bp, Unknown
  Bacterial polypeptide expressing nucleotide sequence isolated from the Sargasso Sea
tagcgccaaatatacaacttcttttgatcttcctggtatagcagtgggaggtgtaagtgttggagaggcagtcgaagaaatacatagtgtaattaattacgtcccgaaattcttaccaatagataaaccaagatatttaatgggaattggctctttaagagaaatttctttagctgttgcaaatggattcgatatatttgactgtgttttgcctacaagactaggaagacatgggactgcattttttaatgatgaaagattgaatttgcgaaatgctcgatttaaaaatgacttttctccgattgacaaaacttgtaaatgcgaaacctgtaagtcctattctcgtgcatatttacatcatctaattagaaatgatgaaatattaggtctcacactaataagtttgcataatattgctcatttaataagatttaccaatgcaatttctgctgcaattaaagataattgttttacaaatgatttcgctccttggaaaacatcctctattgctcatcatacgtggtaac

SEQ ID NO: 240034 - DNA, 967 bp, Unknown
  Bacterial polypeptide expressing nucleotide sequence isolated from the Sargasso Sea
gatggtagacataaaaaagaatttttcttttagcgtaaaacatcaaagtaaaaattatcgtgttggattaattgaaactcatcgcggggatattaatactcctgcatttatgcctgtaggcactcaagcaacagttaaaggcgtttttattgatgacattattaaaacaggaagtgagataattctctctaatacttatcatttaatgataagacctggcacagaaaggattgaagcagttggtggattacataaatttatgaattgcaaacttcctatattaactgactctggtggctatcaggtgatgtctctatctaaatttaataaaattgatagagataaaggggcaatttttcaatcacacatcgatggaaaaacttttattttaagtccagaagagagtattaaaattcaaaaaaaactcaactctgatattgtaatggtgatggatgagtgtccaaaaaatactaatgattataataaaattgaaaaatcaatgaatttatctacagagtgggcaataagatctaaagaagaatttggttctaatccacataaagctttgtttggtatagttcaaggaggtctattcaaagatttaagaaacgagtcgctcgatagattaatcgatatagaatttgatggttatgccataggtggtctggctgttggagaaactcaaaaagaaatgtttgatgtattagacggcataaaagataatttgcccattgataaaccaagatatttaatgggtgtaggaactccatctgatatattaggggcagttaaaagaggtatagatatgttcgattgtgtcctacctacaagatctggaagaactggactagcttttacttggaatggcagaattcaaataagaaattctgaaaataaattagataatacacctctagatagtagtgtaactaaatttgaccttaataaatactctaaaaattattga

SEQ ID NO: 240035 - DNA, 346 bp, Unknown
  Bacterial polypeptide expressing nucleotide sequence isolated from the Sargasso Sea
tatgaaatttgaactcgacactaccgacggccgtgcgcgccgtggtcgcttgatttttgaacgcggcacggtggaaaccccagcctttatgcctgttggtacctacggtacggtaaaaggcatgacgcctgaagaagtgcgtgccactggcgcggatattctgctcggtaacactttccacctgtggttacgtcctggcgaagaaatcatgcgtaagcatggcgacttgcacgattttatgaactggcagcgccctattctgaccgattcgggcggtttccaagtgttcagtttgggtgacattcgtaaaattaccgaagaaggtgtgcatttccgttcgccaatc

SEQ ID NO: 240036 - DNA, 556 bp, Unknown
  Bacterial polypeptide expressing nucleotide sequence isolated from the Sargasso Sea
ttgtttggaattgttcaaggtggtctttttgatgatttaagagaaaaatctttaaatgagttattaaaaataaattttgatggatatgccgttggtggattagctgttggagaaactcagaaagaaatgtttaaagttttaaataatctaaaaaaaataatgcctgaagaaaaacctagatatttaatgggtgtaggaacaccatctgatatattgggcgcagtaaagagaggaattgatatgtttgattgtgttcttcccactaggtcaggtagaactggattagcttttacttgggatggtaaaattaatataagaaattcaaaatatcaaaagaataatacacccttagattcaaattgtactaattttgatttgaataaatattctaagaattatttaaatcatctttttaatactaatgaaattttagcttccatgatattaactttgcataatattaatttctatcaagaattgatgaaatctataaggcatcatattaaaaatggtacttttgatcattttcatgataaatatattggtaggttgtaat

SEQ ID NO: 240037 - DNA, 756 bp, Unknown
  Bacterial polypeptide expressing nucleotide sequence isolated from the Sargasso Sea
atatagatggaaaaacttttatattaagtcccgaggaaagtattaaaattcaaaaaaaacttaactcagatattgttatggtgatggatgagtgtccaaaaaataccaatgattataataaaattaaaatatccatggaattatctgcagagtgggcaaaaaggtctaaagtagaatttggaaaaaatcctcataaagctttgtttggtattgttcaaggaggtttatttaatgatttaagaaatgaatcacttaataaattaattgaaattggatttgatggttacgctattggtggtttagctgttggagaaacccaaagagaaatgtttgacgtgttagatggtatcaaagataacttgccaattgataaaccaagatatttaatgggcgtaggaactccatctgatatactaggtgcagttaagagaggaattgacatgtttgattgtgtccttccaactagatcaggaagaactggactagcttttacatggaatggtagggtccaaattagaaattctgaaaataaattagacaatacacctctagatagtaatgttagtaagtttgacttaaataaatactctaaaaattatttaaaccacctccataatactaacgagatgttgtcatcaatgattttaacattaaataatataaatttttatcaagaacttatgtatgaaatccgaaaaaatattaaaatgggaacttttgatcagtttcatgacaagtatattaatattttgtaaa

SEQ ID NO: 240038 - DNA, 685 bp, Unknown
  Bacterial polypeptide expressing nucleotide sequence isolated from the Sargasso Sea
ctgctacatcgctgtccccatacccaggcgcgcacgggccgcttccacactccccatggcgtggtggacaccccgcgcttcatgcctgtcggtacagcggccacggtcaagggcatcagcactgagcaattgcgcagtaccgatgcgcagatggtgctctccaacaccttccatctgcacctgcagcctggtgaatcgatcgttgctgcagctggcgggttgcaccgattcatgggctggtcggggccgatgctcaccgattcaggcggttttcaggtgttcagcctggccagcctcaatgccatcaaagagcggggtgtcactttccaatccccgcgtgatggctcgatcgtcgagctgactcctgaacggtcgatggccattcaagagcagcttggggctgatgtggccatggcctttgatcagtgccctccttacccagcaagtcatgaggatgtgagcgaagcctgcggtcggacgcaccgctggttggagcgctgtgtatcggcgcaccagcgcccggatcaggctctgtttggaattgtgcaagggggtgtgtttaaggacctacgccaggaatcggcacgggtgatcgccagctttgatctgcctggttgtgccattggtggcgtcagtgtcggagagcccgcggcggcaatgcatgaggtcgtgcgttggtgcacgc

SEQ ID NO: 240039 - DNA, 725 bp, Unknown
  Bacterial polypeptide expressing nucleotide sequence isolated from the Sargasso Sea
gatccagatggcgctgggtgccgatgtagccatggccttcgatcagtgccctccctatccggccacagaaaatgatgtggtggatgcctgccggcgcacccacagctggctggaacgctgcgtcaacgcccacactcgtgaggatcaggccctgttcggcatcgtccagggcggttgtttcccccatctgcgacgggagagcgcccgcgcggtctcggccttcgagctgccgggcatcgccgtcggtggggtgagtgtcggagaaccggtggaggagatgcaccggattgtgagggatgtcacccctctcctccccgtagaccgcccgcgctacctgatgggaatcggaaccctgcgggagatggccttggctgtggcgcacggcatcgacctgttcgactgcgtgctgcccacccggctgggccgtcatggcacggccctggtgggaggcgaacgctggaatcttcgcaacgcgcgcttccgccatgaccacactcccctcgatccaagctgccgctgcatcgcctgcacaggccacacgcgggcctatctccatcatctgatccgcagcgacgaattgctcggcctgaccctgttgagcatccacaacatcacccagctgatccgcttcaccaacgccatgacagcagcgattcaggacggttgtttttcagaggatttcgctccctggaagccggactctccagctctccacacgtggtagc

SEQ ID NO: 240040 - DNA, 844 bp, Unknown
  Bacterial polypeptide expressing nucleotide sequence isolated from the Sargasso Sea
attgaagttttcaatcggttttaacgactcctcctgttccgcaagaagcggcgtcatacatactgaacacggagaaatagaaactcctatttttatgccagtaggaaccctcggcgcagtaaagacaatgtccccagaggagttaaaaagtatcggagcgcaaattattttaggcaacacctaccatctctatttgaggcctggtacagaaatcgtatctggagcaggtggtttgcacgccttttcaaattgggaaaaaccattactgactgatagcggtgggttccaagttttttcgctggcaaagttgaacaaggtaacagatgaaggtgtagaatttcaatctcacttggatgggagtaagcatctccttacccctgagttttccatgaaaatccagcgagaacttggtgctgatataataatggctttcgatgagtgccctgcaagtgatgctgataaacaaacaatagttgatgccgtaaatagaaccactgcatggataaaaagatgtaaagtttggttaaataataattctgaaatgtatggccatattcagactttatttccgatagtccaagggggaattgatagatctctaagaaaaaaaagtatagaggaattagtatcttattcagaatgcgggatggccattggggggcttgcggtgggtgaggaaaaaaatgctatgctagatacaatagaatattgtgatgaagaattaccaaaaaaccaacctaggtatcttatgggcgtgggaaaaccctcagaccttttacacggaatcagaagaggtgttgatatgtttgactgtgtcatcccctcacggaacggaagaaacgga

SEQ ID NO: 240041 - DNA, 514 bp, Unknown
  Bacterial polypeptide expressing nucleotide sequence isolated from the Sargasso Sea
attgaaaaaatttgaatttaaagttttaaaaaaaaataaatttgcaagacgcggtttaattgaaactcacagaggtaaaattgaaacaccagtttttatgcctgtgggaactcaagctacagtaaaagcttgtacaatagatgacataaaaaaaactggttctcaaattattctatcgaatacttatcatttaatgatacgaccaggtgttaaaagaattgaagatgcaggtggacttcacaaatttatgaattgtgatttaccaattcttacagactctggtggctttcaagttatgtctttatcaaaactaaacaaaatagataaagaaaaaggggcaatttttaattctcatattgatggaaaaaaattttatcttagtccagaggaaagtataaaaattcaattaggacttaattccgatattgtaatggttatggatgagtgtccaaaaaaaacaaatgactaccaaactatagataaatcaatgaatttgtctttgtattgggctgaa

SEQ ID NO: 240042 - DNA, 709 bp, Unknown
  Bacterial polypeptide expressing nucleotide sequence isolated from the Sargasso Sea
atggcattaaaaagatttgcctttaatgttttaaataaagataaatttgctagatgtggattaattgaaacacatcgtggaaatataaatacacccgcatttatgcctgttggaactcaggctactgttaaagcttgtaccatagatgacataaaaaaaactggttcagaaataattttatctaacacctatcatttaatgattagacctggtgttgatagagttcagaatgctggtggtttgcataaatttatgaattgtgatctgccaattttaacagactcaggaggttttcaagttatgtctctctcaaaactaaacaaaatagatcgtgaaaaaggtgcaatttttaattcacatgttgatggaaaaaaattttatctcagtcctgaagaaagtataagaatccaattaggattaaattctgatattgttatgattatggatgagtgtcctaaaaaaacgaatgattatgaattaataaaaaaatctatggatctttcattatactgggcagaaagatcgaaaaaagcatttggtaacaatccacacaaagcattgttcggcattgttcaaggaggtctgtttaaagatttaagacttaagtctttaaaagaactaataaatattggtttcgatggatatgcaatggggggtttagcggtaggagaaactcaacgagagatgtttaaagttttagatgatatta

SEQ ID NO: 240043 - DNA, 1129 bp, Unknown
  Bacterial polypeptide expressing nucleotide sequence isolated from the Sargasso Sea
atgagtaaatttgaatataaacttattaaaaatgatgcaaacgctaggcttggcaaaataataacagctcatggtgaaatagatactcctgtatttatgccagttggaacagcagcaactgtaaaagcattaagagttgatgatattaagaagagtaattcacaaattattttagcaaatacttatcatctaatgcttcgtcctggagaaaatattataaatcaacttggtggtgtaagaaaatttatgaattgggatggaccattgttaactgactctggtggttttcaagtaatgtctctagggaatttaagaacaatcaatgaagaaggagttacttttaaatctcaactagatggatcaaagtttttcttaactcctgaaaaaagtatccaaatacaacatttattaggttcaacgattacaatgtgttttgatgagtgtatccaattgcctgcatcatttgaaaatacaaaaaactctatggaattatcaatgaggtgggcggatagatcattaagtgcttataaagaaagagaaggatatgcaatttttggaattattcaaggtggtacatacaaggaattgagggaactctctgctacccatttacgtaatttaaattttccaggatacgctattggtggtttagctgttggtgaagggcaagaaaaaatgtttgaaactattgaatacaccgagccatttatggatacaaacaaaccaagatatttaatgggtgttggcaaaccagaggatattataggcgctgttaaaagaggtatagacatgtttgattgtgttttaccaactaggtcaggaagaaatggtcaagcttttacatctagaggtgaaataaatataaaaaatgctaggcatactaaagatccaaggccacttgacgaagcatgtgactgtaacacttgtaaaaactatagcagagcgtatttacatcacttatttaaagctaatgaaatattaggccttatgctcttatctgatcataatataaacttttaccaaaatatgatgatgggtataaggaaatcaattaaaaatgggaattttgaaaacttttcagagaattttttattaaaaagggccggtggtgatattttagaatcttaat

SEQ ID NO: 240044 - DNA, 1048 bp, Unknown
  Bacterial polypeptide expressing nucleotide sequence isolated from the Sargasso Sea
tgaaactcacagaggtgtaataaatacaccagcctttatgcttgtaggaactcaagctacagttaaaggtgtatttattgatgatattattaaaacaggaagtgagattattttatctaacacatatcacttaatgattagaccgggtacagaaagaattgaaatgcacggaggtctgcataaatttatgaattgtaaattaccaattttgacagactctggaggttatcaagtcatgtccctatctaaacttaataaagttgatagaattaaaggtgctatattccaatcccacatagatggaaaaactttcattttaagtcctgaggaaagtataaaaattcaaaaaaaacttaactccgatattgttatggtaatggatgagtgtccgaaaaatagtaaagattacaataaaatcaaaaattctatgtacttatctatggaatgggcgaatagatcaaaaatagaatttggaaataatcctcacaaggcattgtttggaattgttcagggaggtttatttaaagaccttagaattgagtctcttaataaattaattgaaatagaatttgatggatatgctgttggcggattagctgttggtgaaacccaaaaagagatgtttaaagttttagactccatcaaagattatttacctattgaaaaacctagatatctaatgggtgttggcacaccctcagatatacttggagcggttaaaaggggtattgatatgtttgattgtgttttaccttcaagatctggacgtacaggtttagcttttacttggaatggaagagttcagattagaaattcagagaataaatatgacaatacgccattagataagaatgtttcaaaatttgaccttaataaatattctaaaaattatttaaatcatcttcataacaccaatgaaatgttggcttctatgattcttacattaaataatataaatttttatcaagagcttatgtatgaaattagaaaaaatataaaaatgggaacttttgatcaatttcatgacaagtatattaaaattttgtaa

SEQ ID NO: 240045 - DNA, 886 bp, Unknown
  Bacterial polypeptide expressing nucleotide sequence isolated from the Sargasso Sea
agctgttgtggatgcattaaatttatgaattgcaaacttcctatattgactgactctggcggctatcaggtgatgtctctatctaaatttaataaaattgatagagataaaggtgcaattttccaatcacacattgatggaaaaacttttattttaagtccagaagaaagtattaaaattcaaaaaaaactcaactcagatattgttatggtgatggatgagtgtccaaaaaatactaatgattataataaaattgaaaaatcaatgaatttatctacagagtgggcaataagatctaagaatgaatttggaaataaccctcataaagctttgtttggtattgttcaaggtggtttatttaatgatcttagaattgaatctttaagaaaattaattaacataaaatttgatggatacgcaattggaggtttagccgttggagaaactcaaaaggaaatgtttgatgttttagatggtattaaagactatttaccagtggataaaccgagatatttaatgggtgtaggaactccatctgatatattaggggcagttaaaagaggtatagatatgttcgattgtgtcttacctacaagatctggaagaactggactagcttttacttggaatggcagaattcaaataagaaattctgaaaataaattagataatacacccctagatagtagtgtaactaaatttgaccttaataaatactctaaaaattatttgaatcaccttcataatactaatgagatgttggcctcaatgattttaacgttaaataacttaaacttttatcaagaacttatgtatgaaattcgaaaaaatattaaaatgggaacttttgatgaatttcatgacaagtatattaatattttgtaaa

SEQ ID NO: 240046 - DNA, 845 bp, Unknown
  Bacterial polypeptide expressing nucleotide sequence isolated from the Sargasso Sea
aatgaaatttaattttttagtaaaaaaggaagattcaaaagctagaacaggcgaaatttctacaccacacgggaagatacaaacacctgtgtttatgccagtaggaacttacggagcagttaaagcagtatctccacaaatactagaagaaatttcctctcaaattattttatctaatacctaccatcttatgcagagacctggaataaacataattgaaggtcatggaggtcttcatgagtttatgaaatggaatggacctatattgacagattcaggaggctatcaagtatttagcctggctaagaatagaaaaataactgaacaaggagttgagtttaactctccgcttaatggagatactttatttttaactccagaatcttgtatggatattcaatataggtttggtgtagatatagctatggttcttgatgagtgcacaccatttcctgcaacaaaagaagaagcttctgcgtctatggaactttctatgaaatgggccaagagatgcagagatagcttctcttcggacaagtcggctttatttggaataatccaaggtggtatgtatgaagacctaagggaagagtctctagaaactttaaaagaaatagactttgaaggttttgctttgggtggtctttcggtaggcgaacccaaagaagacatgttaagaatagtgagctctatagctaatcaaatgcctaaagataaaccaaggtatttaatgggtgttggtacgcctttggatatagttttagcagtccaacaaggagtagatatgtttgattgtgttatgcctacaaggcatgcaagaaatggatatctttttacatcaactg

SEQ ID NO: 240047 - DNA, 535 bp, Unknown
  Bacterial polypeptide expressing nucleotide sequence isolated from the Sargasso Sea
ggtctatttgacgatttaagaaaagaatctttagatagattgataaaaattaattttgatggatatgcaattggtggattagctgtcggtgagtctcaaaaggaaatgttttctgtacttgattcacttaagaaccatttaccagaaaacaaacctaggtatttaatgggtgtaggtacaccttcagatatacttggtgcagttaaacgagggatagatatgtttgattgtgtgttaccgactagatctggcagaactggcttagcttttacatgggaaggaagggttagtattaaaaactcaaagtatcaaaaggataatcaacctcttgattcaaaatgtaataattttaatttaaataagtattctaaaaattatttaaatcatttatttaatacaaatgaaattttagcatccatgttactaacattacacaacattaatttttatcaagaattgatggaatcaataagagaacacattaaaaacggtacttttaatgattttcacgacaaatatatcggcaagttgtaat

SEQ ID NO: 240048 - DNA, 1117 bp, Unknown
  Bacterial polypeptide expressing nucleotide sequence isolated from the Sargasso Sea
aatgcaaagtaaagatttttcctttgagttaatagctcaagatggcaaggctagattaggaaaaatatctacatcaagaggcccaattgatacaccagcatttatgccggtaggaactcaaggaacaattaaaggtgtttttactgatgatattataaaaacaggtactcaaattattttgggaaatacttatcatttattactaagacctggaattgatatattaaaaaaatttaatggtcttcatggatttatgaattggaataaaccaattttaactgactcaggcggttatcaaattatgtcactatctaaattaaataaaatagataaagatattggcgcaatatttaaatctcacattgacggaaaaaaaataattttaagtcctgaaaaaagcattcaagttcaaaaatccattaattcagatataattatggttttagacgaatgcccaaaattaacaaatgataaaaaaattttatcaagagctataaacacttctactaattgggcggaaagatgtaaaattgaatttggtcataacaagtcaaaagctttatttggcattactcagggcggtctatttaaagacctcagagaagaaagtataaaaaaattaataaaaataggatttgatggttatgctatggggggacttgctgtaggagaaaaacaatacgaaatgtttaagattttaaatgaaactattgatttttttccaaagaaaaaaccaagatatttaatgggcgttggaaccccttcagatattttaggagcagttaataatggcatagatatgtttgactgtgttttaccaactagatctggcagaacaggattagcttttacatgggaaggaaaattaaatctaaaaaatgcaaaatatcaaggagatttattacctttagactcaagttgtaaattaaaggaattaaacaaatattctaaaagttatttaagtcatttaattagatctaatgaaatgatggcctcaatgttaatttccctacataatatctacttttatcaagaatttatgaaagaaattagaagaaatattaagagtggcacttttgctactttttataaaaaatatattgattattttaattaa

SEQ ID NO: 240049 - DNA, 793 bp, Unknown
  Bacterial polypeptide expressing nucleotide sequence isolated from the Sargasso Sea
atggaaaatgataagttttcttttaacttattaaaatcatctaacgaatttagacgtggtgtaattaaaactcctagaggagagataaacacacctgtttttatgcctgttggaacacaagcaactgttaaaggtgtctttatagatgatataattaaaacaggtagtcaaattattttatctaatacttatcatttaatgttaagaccaggtgttgaaagaatatcttcagttggaggtttgcatgaatttatgaattgtaaacttccaatcttaacagactctggtggataccaagttatgtcattatctaaactaaataaaatagacagaaaattaggagcaatatttaaatcacatatcgacggaaaagaatatattcttagtcctgaagagagtattaaaattcaaaaaggattaaattcagacattttaatggttatggatgaatgtccaaaaaaaaccaaagattatggaaaaataaaattatcaatggatctatcaacagagtgggctatgagatccaaagatgaatttggaaataatccaaaaaaagctttatttggtataatacaaggtggtctatttaatgacttgagaaaaacttctttggaggaacttcaaaaaatagattttgatggttatgcagtaggaggtttggctgttggagaaacacagactgaaatgtttaaagttctcaacaatattgttccaatgatgccaaaagacaaaccaagatatttaatgggtgttggcactccatctgacattttaggtgcagttaaaagaggta

SEQ ID NO: 240050 - DNA, 1042 bp, Unknown
  Bacterial polypeptide expressing nucleotide sequence isolated from the Sargasso Sea
atggcattgaaaaattttgcctttaaaatcttaaaaactgacaattttgcaagaaatgggttaattgaaactcatagaggcaaaatcaatacacctgcatttatgccagttggtacacaagcaactgtcaaagcctgtaccattgatgatataaaaaaaactggctctgaaataattttatcaaatacatatcatttaatgataagaccaggcgtagaaagaatacaacatgctggtggcttacatcaatttatgaattgtgaccttccaattttgactgactctggtggttttcaagtaatgtcattatcgaaacttaataaaattgatagagaaaaaggagccatattcaattctcatgtcgatggtaaaaaattttttttaagtcctgaagaaagtattagaatacaattaggtctaaattcagacattgttatgatcatggatgaatgtccaaaaaaatctaatgactataatttgattaaaaaatctatggatctttctctttattgggcactaagatcaaaaaaagcttttggtatcaatccacacaaagctttatttggaattgttcaaggaggtttatttaaagatttaagaataaaatctttaaatgagttagtaaatattggttttgatggttatgccataggtggcttagcagtaggagagtcacaagatgagatgtttagagttctagatgacatcaaagatgttttgccaaaagacaaacctcattatttaatgggtgttggaacgccttcagatattttaggtgccgtaaaaagaggtgttgatatgtttgattgtgttttaccaactagatctggaagaactggcttagcttttacgtggcaaggtagaataaatattaaaaataacaaataccaatttgataattcgcctctagatattaattgtaaaaatttaaatttaaataaatattcaaaaaattatttaaaccacttatttaataccaatgaaatattagcttctatgctattgtctcttcacaatattaacttttatcaagaactaatgt

SEQ ID NO: 240051 - DNA, 1114 bp, Unknown
  Bacterial polypeptide expressing nucleotide sequence isolated from the Sargasso Sea
aatggcattaaaaaatttcagttttaaaatttttaaaaaccataaatcagctaggcttggtaaaatccaaactcacagaggagcaattgatacaccagcatttatgcctgttggtacacaagctactgtaaagggaacatttttaagtgatattttaaaaactaatagtcagataatattatcaaatacttaccatctcatgattaggcctggagtaagtagaattaaaggtgttggtggtttacataaatatatgaattgtaaactaccaatacttaccgactctggtggttttcaagttatgtctttatcaaaactaaataaggttgataaagaaaagggtgctatctttcaatcacatgtagatggtaaaaaatttattcttagccccgaagaaagtattaaaattcaaaaaggtttaaattcagatatcgttatggttatggatgaatgtttaaaaaaaaataatgactattataaaactaaagattcagtcgatgtatcaacatattgggcaaaaagatccaaagtagcatttggtaaaaatccaagaaaagccttatttggaattgttcagggtggcttatttaacgatttgagagaaaaatcattattagatttaattaaaattaactttgatggatatgccattggtggacttgctgtaggtgaaactcaaagtgaaatgtttaaggttttagattttattaccgataaaatgccaaaacataaacctagatatttaatgggagtaggtaccccttctgacattttaggcgctgtagctagaggtattgatatgtttgattgtgttcttcctactagatccggcagaactggattagcatttacttggaatggcagaattaacatcaggaattctaagtacaaaaatgataaaaatccattgaataaaaatgataaaatatttgatttgaataaatactctaagaattatttaaatcatttatttaatactaatgaaatgttgggtcctatgttgctgactttacataatattaatttttaccaacaattaatgttcgaaatacgtaaaaatattaaaaaaggtactttttctaatttctacaataaatattttaacaagttgtaa

SEQ ID NO: 240052 - DNA, 1111 bp, Unknown
  Bacterial polypeptide expressing nucleotide sequence isolated from the Sargasso Sea
gatggcttttagcttaaaaaataaagattctaattcaaaagcaagagttggatctcttgtcacaaaatcgggtatagttgagactccagtttttatgcctgtttgtacaaaggctgttccaaagactttaacaactgataatttaaaagaaatgggttttgatatggttgttactaatgcatatcacttatttctaaaacctggtcataaagtcattatggaatatggaggcttacattcctttatgaactggaataacagtatcctatctgatagtggaggtttccaagtttatagtctttcacctacagccaagatttctgatgaaggggtaaaatttaaatcatttattgatggatctgttaattttatttcacctgaattatccatcgaaattcaacaacatctaggttctgatattatgatgatttttgatgattgccctaagccagattccgagtattccaggatattagagtccataaatagaactaaggattgggctttaagatcaaaaaaatctaaaaaaagcgaatctatgttgtttggaattgttcaggggggtatttatgaagatttgaggaaaacatctttagaacatatgttagaaattgaatttgatgggtacgcgattggggggttggggttaggtgaggggcagtcacgaacctacgaaataactgagcagatatgctctatgattcctgaggataaaccaagatattcaatgggaataggaaaacctgaagatattattaaatcggtagaacttggggttgatgtttttgattgcgtagttccaactagaaatgcaagaaatggaactttatatacaaaaaatggaaaaattaatattaaaaatagtgaattccatatgtcagataagttaattgatgaggatgatgctaatcatccatgtctaaactatagtttaggctatttaaggcatttatacacttcaaaagagatgacagcactatctttaatgacgatgaataatctttatttttataaacaattaatcgaatctattaaaaattctataaaaaatggtaagtttatagaatttaaaagagcttttttagagaggtacggaaatgaaactgattaa

SEQ ID NO: 240053 - DNA, 969 bp, Unknown
  Bacterial polypeptide expressing nucleotide sequence isolated from the Sargasso Sea
atgatataaaaaaaacaggatcacaaattattttatctaatacttatcatctaatgatacgcccaggcgtagaaagaattgaacatgctggcggtcttcatgaatttatgaattgtgatcttccaatacttacagactcgggtggttttcaagtaatgtcattgtcaaaattgaataaaatagataaagaaaaaggtgcaatttttaactcacatatcgatggtaaaaagttttatcttagtcccgaagaaagcataagaattcaattaggattaaattcagatattgtaatggtaatggatgaatgtccaaaaaaaactaatgattatcaaactatagataaatctatgaatttgtctttgtattgggctgaaagatccaaaaaagcttttggaagtaatcctcacaaagctctatttggtatagtgcaaggtggtttgtttaaagatttgagaataaaatctttgaagggacttttaaaaattggatttgatggttatgcattaggtggtttagcagttggagaaactcaagctgaaatgtttacagttttggaagatattaaagagtatttgccagatgataaacctcattatttaatgggcgttggcactccaaatgatatcttaggtgctgttaaaaggggtattgatatgttcgattgtgttcttccaacaagatcaggtagaactggacttgcttttacttggcagggaagggtaaatattaaaaataataagtaccaaaatgataatactccgctagatcctgaatgtaaaaatcttaatttgaatagatattcaaaaaattatcttaaccatttatttaacactaatgagattcttggatcgatgttattaacgttacacaatataaatttctatcaagaattaatgaaagctattagagaaaatatccaaaatgacacatttgatgcttttcatgataaatacattgataagttgtaaa

SEQ ID NO: 240054 - DNA, 628 bp, Unknown
  Bacterial polypeptide expressing nucleotide sequence isolated from the Sargasso Sea
tatgagattgtcgctagattgggcagagttatctaaaaaggctaatgactcacagtcaccgctttttggtattgttcaaggtggtatgtataaagacttaagagaagaatctatggaaaatttaaacaagcttgattttgatggatatgcccttgggggactatctgttggtgagcccagtaaaattagaaaccaaatagtctcacacatggcgccaaaaatgccatcagaccgaccacgatatctcatgggtatcggaaaaccactagacatcatctatgctgttcaaagtggaattgatatgttcgattgtgttattccaactagaaatggcagaaacgggcaaatttttaccttcaaaggacctattaacatccgcaatagtatttatgaaaatgactttgatccaattgataaagattgtaaatgttttacatgtcaaaattatagcagagcatacataaagcatctcgataaatgtaatgatggtttagcagggagacttattagtattcataatgtatacttttatcaggaattaatgagaaaaattagaaattcaataatttctgatacactagatgagttaataaaggaaattgagttttattattcggaggttgaataa

SEQ ID NO: 240055 - DNA, 1114 bp, Unknown
  Bacterial polypeptide expressing nucleotide sequence isolated from the Sargasso Sea
aatggcattaaaaaaatttaattttaatgttaatcatactgaaaaccattcacgagtaggagttattgaaactcatagaggtaatattaatacacctgcttttatgcctgttggtacacaggcgactgtaaaaggcgcattcataaaagatgtagttcaaactggaagcgaaataatattgggaaacacctatcacctaatgttaagaccaggtgttgatagaatttcaagtgttggaggtttgcatgaatttatgaattgtaaccttcctatattaactgactctggtggatttcaagtaatgtcattatcaaaatttaataaaattgacagagagaagggtgctatttttcaatctcatattgatggtaataagtttattttaagtcctgaggagagtattagagttcaaaagggcctcaactcagacatagtaatggtaatggatgaatgtccaaaaaaaactgatgattttgagaaaattaaaaaatcaatggatttatctatgtattgggcaaaaagatcaaaaaatgcatttggcgacaatcctcacaaaggtttatttggaatagttcaaggcggtctgtttaatgacttaagattaaaatcactagagcaacttatagatattgattttgatggttatgcgatgggtggtttggcggttggagaaactcagaaagaaatgtttgatgtattggatggagttaaagattatttaccaaaagataaacctagatatcttatgggcgttggtactccctcagacataattggcgcagttaaaagaggtattgatatgtttgattgtgtattaccaacacgatctggcagaactggtttggcattcacatggaatggaagagtacaaataagaaatgcaaaatatcaaaacgataattcgcctctagatttaaatgtttctaaatttgacttaaataaatactcaaaaaattatttgaatcacttatttaatactaatgaaatgttagcgtctatgctgttaactttaaataatattaacttttatcaggagttgatgagtgaaataagaaaaaatattaaaaatggaacttttgaagaatttcacgataagtatattaacattctgtaa

SEQ ID NO: 240056 - DNA, 627 bp, Unknown
  Bacterial polypeptide expressing nucleotide sequence isolated from the Sargasso Sea
gggcagagcgttcacgagaggcctttggttatagagagggtcggtctctgtttggaatccagcaaggaagtgttttctcagaacaacgagaagaaagtgctgaagcgttaaaatcaattggctttgacggttacgctgttggtggcttggcagtgggagagggacaagaaaagatgtttgaagttttaaagtacgctcctgattttcttccaagtgaaaagcctagatatttaatgggagttggtaagcctgacgatatagttggtgccgtaaaaaacggtattgacatgatggactgcgttttaccgtccagatcaggaaggactggccaaatatttacccataggggcgtcttaaatattaaaaattcgcgtcatcaagatgatccaaggcctatcgatgaaaattgttcatgtcccgcttgcaaaaattatagtcgcgcttacttacatcacgttttcaaaagtcaggagataataagctctatgcttttaacctggcataatcttcagtattatcaagatcttatggctggcattaggagttcaattaggtcaaatagctttgatgattttattgatgaattttattctgttcgagctgagggtgatattgaacaaatataaa

SEQ ID NO: 240057 - DNA, 1114 bp, Unknown
  Bacterial polypeptide expressing nucleotide sequence isolated from the Sargasso Sea
aatggcattaaaaaagtttgcctttaaagtattaaacaaagacaagtttgctagacgaggtgttatagatactcatagaggtgagataaacacaccagcatttatgcctgttggcacacaagcaacagtcaaagcttgtacaatcgacgatataaagaaaactggatcagaaataatactatctaatacatatcatttaatgatccgtcccggagtgggaagaattaagtcagcaggtggtttacatgagttcatgaattgtgatttaccaatacttacagactcgggtggttttcaagtaatgtctctatcaaaattaaataaaatagatcgggaaaaaggagcaatatttaattcacatgtagatggaaaaaaattttatttaagccctgaagaaagtattagaattcagttgggcttaaactcggatattgtaatgattatggatgagtgtccaaaaaaaactgaagattataattttataaaaaaatctatggatctatctttgtattgggctgaaagatctaaaaaggcatttggaaaaaatcctcacaaagctttatttggaattattcaaggaggattatttaaagatttaagattaaaatcacttgaaggacttacaaacatcggatttgatggctatgcagtcggaggattagctgtaggtgaaactcaaaatgaaatgtttactactttggatggtattaaagaacatttgccagatgaaaaacctcattatttaatgggagttggtacacctacggatattttaggatctgtaaaaagaggtatagatatgtttgattgtgttcttccaactagatcaggtagaacaggtcttgcttttacttgggatggaagggtaaatattaaaaataacaaatatcagaatgacaacactccgttagaccctaattgtgaaaatttaaatttaaacaaatattcaaaaaactatttaaatcatttgtttaataccaatgaaatactagcatcaatgctattaacacttcacaatataaatttttatcaagaattaatgtctgaaatcagaaaaaatattatgaataataccttcgatgaatttcacgataaatacattgataagttgtag

SEQ ID NO: 240058 - DNA, 896 bp, Unknown
  Bacterial polypeptide expressing nucleotide sequence isolated from the Sargasso Sea
aagagttgctcttcaaggaggattgcacgaattcatgaattgtcctttaccaattttgacagactcaggcggttatcaagtgatgtcactatcaaagttaaataaaattgataaggagaaaggagctatatttaattctcatattgatggaaaacaatttatccttagcccggaagaaagtataagaattcaaaaaaaacttaattcagacattgttatggtaatggatgaatgccctaaaaaaactatagataaaaaaactattgaaaagtctttagatttatcaactgagtgggcattaaggtcaaaaaatgcatttgggaaaaatcctcacaaaggtattttcggaatagttcaaggtggtttatttgatgatttaagaaaaaaatccttagaggatctaattaatattgggtttgatggatatgccctaggtggtctagctgttggtgatacacaaaatgaaatgtttaaggtattagacggtataaaaaatcacctacctgaagataaaccaagatatttaatgggtgttggaacaccttcagatatcttgggagcagttaaaagagggattgatatgtttgattgtgtgttaccctctaggtctgggagaactggtttagcctttacatggaatggaccaataaatattaagaatgccaagtaccagaatgacacaaaacccattgatgaaaaatgtgaaaagttcaatttgaataaatattcaaaaaattacctaaatcatttattcaataccaacgaaatacttgcgtctatgcttcttaccctccataatataaacttttatcatgagctcatggataaaatcagaattaacataaataatggaacttttgaccagttttttgatgaatacattgctaagttgtaat

SEQ ID NO: 240059 - DNA, 1132 bp, Unknown
  Bacterial polypeptide expressing nucleotide sequence isolated from the Sargasso Sea
atgaattttaagattcataaaactgataaaaatacatcagctcgaactggtaaggtgacaacagatcatggaacttttgaaacaccaattttcatgcctgtagctacatcagctgcgatcaaaggtgtacataacaaggatcttattgaaaatgtttctccaaaagttatactatcaaatacctatcatctttatttaagaccaggtcaaaaaattataaataaagctggtggaatacataaattcatgagttggaataataatattttaactgacagtggaggataccaagtatattctttgtcagcgaatagaaaaattaatccagatggtgttaagtttaagtctcacattgatggttcataccatttttttacaccagaaaatgttatggatattcaacgtaatattggtgctgatattattatggcgttcgatgagtgcccaccttatccatgtgaaaaaaattatgccagaaagtcaatggacttaacacatgaatggttaaaaagatgtataaatagattcaatgcaaccaaaccaatttataatcataatcaatatttattaccaattgttcaaggaagtgtttattctgatttaagaaaacaatctgctgaaataatagctggacatgacctcccagctaatgcaattggtggattatccgttggagaaccacatgaattaatgtatgagatgtgtgaggatgtgtgtaaaatacttcccattgctaaaccaaggtatttaatgggtgttggcacaccaataaatataattgaaaacattgctttgggtgtagatatgtttgattgtgttatgcctactagaaatgctagaaacggcatgttatttaccagaaatggaacaataaatattaaaaataaaaaatgggaagatgataatagtgaaattgatccttgtggtaccacatttgtggataaactatatacaaaatcatatcttagacatttatttacaatcaatgaatatcttggaaaagaaattgcaactattcataatcttggattttacagttggcttattgaagagtgcaagattgctattaatgaaggtcgatttttagattggaaaaataaaatggtaaaacaattagataataaactttgat

SEQ ID NO: 240060 - DNA, 1123 bp, Unknown
  Bacterial polypeptide expressing nucleotide sequence isolated from the Sargasso Sea
ttgttcggcttcgagatcagcgcccattgcgccaacaccgctgcccgctgcggctgttttcatacaccccatggactggtgcacacgccccgcttcatgcccgttggcaccctggccaccgtcaaagggatcagcacggaccagctcgcccgcacgggggcacagatggtgctgtccaatacgtatcacctgcaccttcagcccggcgaggagatcgttgcggccgccggggggttgcaccgtttcatggggtgggacggtccgatgctcaccgactccggcggctttcaggtgttcagccttggggatctgaacaaaatcgatgaccgcggggttgtcttccgcaacccccgggacggccggatcatcgacatgaccccggaacacgccacgcagattcagatggccctgggggctgacgtggcgatggcctttgatcagtgcccgccctatccggccaccgaaaacgatgtgatcgatgcctgccggcgcacccatgcctggctggcccgctgcgtcgaagcccacagccgcgacaaccaggccctgttcggcatcgtgcagggcggatgttttccccatttgcgccgggagagtgcgcgggccgtcgccgatttcgacctgccgggaatcgccgttggtggcgtcagcgtgggcgaaccggtggaggagatgcaccggatcgtgcgggacgtcacaccgctgctcccgacacacaaaccgcgctacctgatgggcatcggcacattgcgggaaatggccgtggcggtggccaacggcatcgacctcttcgattgcgttctccccacccggctcggccgtcatggcacagccctcgtgggtggtgaacgctggaacctgcgcaatgcgcgtttccgccatgaccacacacccctggacccgtcctgcccctgtcccacatgcagcggagggcataccagggcctacctgaaccatctgatccgcagtgaggaactgctgggactcaccctgctgagcctccacaacatcacccatctcctgcgctttaccaatgtgatgtccaaggcaatccgggatggctgcttttcagaggatttcgctccctgggagccggactcaccagctcatcacacgtggtagc

SEQ ID NO: 240061 - DNA, 445 bp, Unknown
  Bacterial polypeptide expressing nucleotide sequence isolated from the Sargasso Sea
catgaatttcacagtgcgaaatattgatggatttgcccgtcttggtgagattagtttccctcgaggaataattaagactccggcttttatgccagttgggacttatggttcagtaaaagggcttaatccttcgcagattcgttcaacaggagcagatattatcttgggtaatacctatcatttgtcactgcgaccaggcacagaggttgttaaactgcatggaggattgcatcaatttattggttgggagaggcctattctaacagactcaggaggattccaggtgtttagtctaggcgatatgcgaaaaattacagaggaaggagtgagctttcgatcccccatagatggatcaaaccgttttctgagtcccgagtctgcgatcagaatacagcatgctctgggggcagatataataatggcttttgacgaatgcacaccctat

SEQ ID NO: 240062 - DNA, 667 bp, Unknown
  Bacterial polypeptide expressing nucleotide sequence isolated from the Sargasso Sea
gatggcattaaaaaattttgcctttaaagttctaaaaaaagataagtttgcaagatcaggtgttatagaaacacatcgtggtagtataaacaccccagcctttatgcctgttggcacacaagcaaccgtaaaagcttgtacaattgatgacataaaaaaaactggttctcagatacttttgtctaacacttaccatcttatgattagaccaggtgttgaacgaattaaatctgcaggtggactccataaatttatgaattgtgatttaccaattttaacagactctggcggatttcaagtaatgtctctttcgagattaaataaaattgatcgtgaaaaaggagccatctttaattctcatgtagacggtaaaaaattctatttaagccctgaagaaagtataagagttcaactagggttaaattcagatatcgttatgattatggatgagtgcccaaaaaaaactaacgattacgatttaatagaaaaatctatggatctatctttgtattgggcagaaaggtcaaaaaaggcatttggtataaatcgacataaaggtctatttggtattgtacaaggagggttatttaaagatttacgaataaagtcattaaatgaattaatgaatataggttttgatggctatgcattaggaggacttgctgtt

SEQ ID NO: 240063 - DNA, 493 bp, Unknown
  Bacterial polypeptide expressing nucleotide sequence isolated from the Sargasso Sea
aatgaatataggttttgatggctatgcattaggaggacttgctgttggtgaaactcaacaagaaatgttttcagttttagatgatgtaaaagaacatctaccacaagataaaccccattatttgatgggtgttggtacgccgtctgatattcttggagctgtaaaacgtggtattgatatgttcgattgtgttctacctactagatctggaagaactggacttgctttcacatgggaaggaagaataaatattaaaaataataaatatcagaatgataatacacctttagattctaattgtgataatttaaaccttaataaatattctaaaaattacctaaaccatctttttaatacaaatgaaatactagcatcaatgctattgacacttcacaatatcaacttttatcaagaattaatgtcttctattagagataatatagaggcaggtacgtttgataaatttcatgataaatacatagataagttgtag

SEQ ID NO: 240064 - DNA, 679 bp, Unknown
  Bacterial polypeptide expressing nucleotide sequence isolated from the Sargasso Sea
ttggaattctcagttttatctgaagataaacattctcaagctagaacaggcctgattcaaacagatcactcaaaaatagaaactccagtttttatgcctgttggaactcatggtgttgtaaaaactctttctccgaatgatttaagtgatataaatgttcaaatcatgctttcaaatacctatcatttatatttaagacctggaaccgaaattattcatgaaaataagggtctacataaattcttaaattgggataagagcattttaactgatagcggaggatatcaagtattctctttaagtaatatgaacgagattactaaagatggagtgaattttcgctcacatttagatggaagtgaacatttttttacaccacaaaaatcgatggaagttcaaagacagttaggttctgatatcattatggcttttgattattgtcctccagcagattgttcacaaagagaacttaaaagagcatcaacattaacagaaaagtggactaagcaagcttttgaatatcttcatgataaaaaaagtatatatggacatagtcagaccctttttccaataattcagggaggtattaatcctgatgaaagattaaaatgtctaaatcaaatgcttccatatgcatcatgtgggatagcaattggaggactttctgtaggagaaaaaa

SEQ ID NO: 240065 - DNA, 1114 bp, Unknown
  Bacterial polypeptide expressing nucleotide sequence isolated from the Sargasso Sea
atgtcattaaaagatttcaattttaatgttcatcatactcaaaattatgcaagagtaggagttatagagactcatagaggcaatataaatactcctgcatttatgccagttggtactcaagcaactgttaaaggtgtttttttagaagatataaaaaaaacaggtagtgagataattttatcaaatacatatcatttaatgataaggcctggtgttgaaagaattgaaagtgttggaggacttcatgaattcatgaattgtgatttaccaattttaacggactcaggtggttttcaagttatgtctctgtcaaaattaaataaaatcgatagagataaaggtgcaatttttcaatcacatatagatggtaaaacttttattttaagccctgaagaaagtataagaattcaaaaaggtttgaactcagacatagtgatggttatggatgaatgccctaaaaatactaaagactatgataaaattaaaaaatcaatggaattatcatcagagtgggcaaaaagatcaaaagatgcatttggaataaatgatcacaaaggtttatttggaatagtgcaaggtggattatttaacgatctaagaatcaaatctttaaacaatcttattgacattggatttaatggatatgctctaggaggattggcagtgggggaaacacaagatgaaatgtttgatgttcttgatggaataaaagatcatatgcctaaagataaaccaagatatttaatgggtgttggtactccatctgatatactcggtgcagttaagagaggtgttgatatgtttgactgtgtaatgccaacgagatctgggagaactggtttggcttttacatgggaaggacaaattcaaattagaaactcaaaatataaaaatgataatactccactggacagaagtgtcacaaagttcaatttaaataaatattctaagaattatttaaatcatttatttaataccaacgaaatgttggcctcaatgattctgacccttaataacatcaacttttatcaagatttaatgagaaacatcagagacaatataaaacatggtacttttgatgaatttcacgataagtacatcaataaattgtaaa

SEQ ID NO: 240066 - DNA, 1114 bp, Unknown
  Bacterial polypeptide expressing nucleotide sequence isolated from the Sargasso Sea
atggcattaaaaaaatttaattttaatgttaattatacagaaaatcattcaagggtagggcttatagaaactagcaggggaaatataaatacacctgcttttatgccagttggcactcaagctactattaagggtgcatttattaatgacatattaaaaactggaagcgagataattctctcaaacacttaccatttaatgataagaccaggtacagatagaattgaagctgttggagggttacatgaatttatgaattgtagtttaccaatattaacagactcaggtggatttcaagtaatgtcactctctaaattaaataaaatagatagagaaaaaggcgctatatttcaatcacacattgatggaaaaaaatttactttaagtccagaggaaagtataagaattcagaaatctttaaactcagatattgttatggtgatggacgaatgtccaaaaaaatctactgattatcaaaaaataaaaaaatctatggaactatctattgaatgggccgagagatcaaaaaatgcttttgggttaaatccgcataaagctctttttggaattgtgcaaggagggttgtttaatgacttgagaaataaatccctaaaagcattaatcgatattgattttgatggttatgcaataggtggattagccgtgggtgatacacaagatgaaatgtttaatgttcttgataatttaaaagaaaatatgcctgtagataaacctagatatttaatgggtgttggaacaccctcagatatattgggtgcagtgaaaagaggtgttgatatgtttgattgtgtattaccgactagatcaggtaggactggattagcttttacatggaatggtagagttcagattagaaattctatgaatcaaaatgataattctcctttagatccaagtgtgacaaaatttgatttaaataaatattcaaaaaattatttaaatcatttatttaatacaaatgaaatgttggcttcaatgatattgactttaaataatatcaatttttaccaagaacttatgcatgaaattagagaaaatataaaaaaaggtacttttgaacaatttcataataagtactttaatttactataat

SEQ ID NO: 240067 - DNA, 1189 bp, Unknown
  Bacterial polypeptide expressing nucleotide sequence isolated from the Sargasso Sea
atgaccgaaggttcatcccacgatacgcacgcccccgtgcaggaccgcccggcgaacgggctcgaattcgaactgctgacgaccgacggccatgcgcgccgcggccgcgtgaagctcaaccacggcgtggtcgagacgccgatcttcatgccggtcggcacgtacggcaccgtgaaggcgatccagccgcgcgagctgcacgagatcaaggcccagatcatcctcggcaatacgttccacctgtggctgcgcccgggcctcgacacgatcgacgcgcacggcggcctgcatggcttcatgggctggaacaagccgatcctgaccgactcgggcggcttccaggtgttctcgctcggcgacctgcgcaagatcaccgaggacggcgtgacgttcgcgtcgccgatcaacggcgacaagctgttcctgtcgccggaagtgtcgatgcagatccagaaggtgctgaactccgacgtcgtgatgcagttcgacgagtgcacgccgtacgcgaccaacggcgtgccgaccacgcacaaggaagcggccgactcgatgcgcatgtcgctgcgctgggcgaagcgctcgctcgacgagttcgaccggctcggcaacccgaacgcgctgttcgggatcgtccagggcgggatgttcgaggacctgcgcgacgaatcgctcgcgggcctcgccgaactcggcttccacggcctcgcgatcggcgggctgtcggtcggcgagccgaaggaagacatgatgcgggtgctgcagcacgtcggcccgaagctgccggccaacaagccgcactacctgatgggcgtcggcacgccggaggatctggtcgagggcgtcgcgaacggcatcgacatgttcgactgcgtgatgccgacccgcaacgcgcgcaacggctggctgttcacgcgcttcggcgacgtgaagatccgcaacgcgacgcacaagaattcgctgaagccgctcgacgcgagctgcacgtgctacacgtgccagaacttctcgcgcggctacctgcatcacctgcaccgcgtcggcgagatcctcggcgcacagctcaacacgatccacaacctgcactactacctgcagctgatgagcgagattcgcgaagcgatcgagacccacacgttcgacgcgttccgccagcgcttcgcggaggatcgcgccagaggggtcgactgac

SEQ ID NO: 240068 - DNA, 1099 bp, Unknown
  Bacterial polypeptide expressing nucleotide sequence isolated from the Sargasso Sea
ctggtcaaatcagataagagtgccagattgggtgagcttcgttttgataaaggagtcattcatactcctgtttttatgccagtgggtacgtatggatctgtgaaaacaatgacgccggatgagctcacagatattggtgctgaaatcattcttgcaaacacttatcacttaatgatcagaccggggaaggaaatactgtcttctcatgacggattgcatcgaatgatgggatggaaaaaaccaatcttgaccgattcaggcggttatcagatatggagtctatcaaaaaagcgaaagatcaatgatgaattcgttgagtttgattcacccgtgaatggcgacttgattcgtttaacgccagagattgccatggagatccaaaaagttataggaagcgatattcaaatggttctcgatgaatgcacacattatccagcgacaaaagaggaggcatctctatctatgaagagatctgagaaatgggcattgagaagccatgagtcctttttaaatcaaaaaggagatgacgacagtgcttgttttgggattattcaaggcgggatgtatacggatcttcgtcttcagaatttagaatttttatcttcaattgattttgatggactcgcaattggcggactatctgtcggtgaacccattgatgaaagaatgatggttttggaatcattaatgcctcaaatgtctgaaaatatccccagatacttaatgggtctaggaactcctattgatatcattaaagcagtttcagttggtgtggatatgtttgattgtgtgattccgactaggcatgcaagaaatggacaaatttatacccattctggcgtagttaagattaaaaatgctagatatatcaatgatctaggacctcttgatgatgaatgcggatgctatacatgcagtaactttactcgttcatacctgcgtcatttgttcaactgcaatgaaatcttgggattgagattggcgactatccataatctcagtttctatatcaaattgatggatgatataagaaagtctattcaatcagaaacgtttgaaaaatttgccaaaaacttcattcaaagttatcagcagtaat

SEQ ID NO: 240069 - DNA, 976 bp, Unknown
  Bacterial polypeptide expressing nucleotide sequence isolated from the Sargasso Sea
atgagatacaaacttttaaaaaaagatggatacgctagaaggggtctcttagaacttcaacatggcaatattcaaacaccagtatttatgcctgttggaacaaatgcaacagtcaagggcttaactgtagaagatcttgaagaaacaggctcacaaatcatcctttcaaatacttatcatttaatgctccgtccaggtgacgagatcataaaggagcttggcggccttcataatttttgcaattggcaaaaacctattcttacagattccggtggctttcaggtttggagtttaggcgatttagcaaaagtctcagagaaaggggtaagttttaaatcaccttatgatggaaagaatatatttatgagtccagaagattccattcaaattcaagaaaatcttggctcggatattgtgatggtatttgatgaatgtacaaactatccatctccaaagaaagaagcgcaaaaatctatggagctgtcagcaagatgggcagctagatcaaaagacgctcataaatcacaatcagcattatttgggattgtgcaaggaggaatgtatgaagacttaagagaagagtcactaaatcttaccttagcatgtgaatttgatggcattgcaattggaggattaagtgttggcgagcctaaagaagaaaaaacaaaagttctgaaacatttatcaaatattcttccagatgataagcctagataccttatgggagtaggaaagcctgaagatattgttgaagcagttttctttggtgtggaaatgtttgactgcgtcttgcctacaaggaatgcaaggaatggacagcttataacaagcacaggcgtgataaacattaggaatgcgaaatataaaaatgatgattcaccgatagatgaaaattcagattctaaggtttgtaaaaattattcaaaagcctatttacatcatttagataaaactaatgaaatgttaggatcaatgc

SEQ ID NO: 240070 - DNA, 799 bp, Unknown
  Bacterial polypeptide expressing nucleotide sequence isolated from the Sargasso Sea
actgaataagattgatagagtaaagggtgcaatatttaattctcatgttgatggtaaaaaattttatcttagtcctgaggagagtataaaaatacagctaggtttaaattcggacatagtaatgattatggatgagtgtccaaagaaaactaatgattatgaagttattcaaaaatctatggacctttcacttcattgggctgaaagatctaaattagcatttggtaataatcctcataaagctttatttggtattatccaaggaggtctttttaaggatttaagattaaaatctcttcaagaattagtcaaaataagttttgatggatatgctattggcggattagcggtaggtgagacacagaatgaaatgttttctgtgttagatgacataaaagaatttttaccggcaaataaaccacattatttaatgggtgtcggtacaccatcagacattattggtgctgtaaaaagaggtatagatatgtttgattgtgttcttcccacaagatctggaagaacaggtctagcttttacttggcagggtagaatcaatataaaaaataacaaatttcaaaatgataacacgccattagaccctaaatgtgacaatctaaatttgaataagtattcaaagaactatttaaatcacttattcaatacaaatgaaattttggcatcaatgttgctaactcttcataatattaatttttatcagcaattaatgagatcaattagaaaaaatattaatgaaggcacttttgatgaatttcatgacaaatacattgataagttgtag

SEQ ID NO: 240071 - DNA, 1111 bp, Unknown
  Bacterial polypeptide expressing nucleotide sequence isolated from the Sargasso Sea
tatgaaatttaaattaatcaaatcagataagagtgctaggttaggggaacttcagttcaggaaagggctgattcaaacgcctgtatttatgccggtaggaacgtatggctctgtgaaaacaatgacgccagatgagcttatagacattggtgcagaaatcattctcgcgaatacttatcacctgatgattagaccaggaaaagatatcctttcctcacatggaggattacatcaaatgatggcatggccaaagccaattctgactgactcaggtggttatcagatttggagcttatcaaaaaagagaaagatcaatgatgagtatgtcgagtttgactcaccagtcaatggtgacatgattcgcttaacaccagagattgctatgcagatgcagaaagtcattggaagtgatatccaaatggttctcgatgaatgcacccattatcctgccacgagagaagaggcggagttgtcaatgaagagatctgagaagtgggccttgagaagtcatgaatcttttttacagcagaaaggggatgatgacagcgcttgttttgggattattcagggtggtatgtatccagaccttcgtctacaaaatttagaagttttatcgtcaattgattttgatggactcgcaattggcggactatctgttggggaacccatagacgaaagaatgatggtcttagaatcattgatgcctgaaatgtcagaaaatatcccgagatatctcatgggtcttgggacaccagttgatatcataaaagccgtttcagttggcgttgatatgtttgactgtgtgattccaactcgacatgcaagaaatggacaaatttatactcattctggagtagttaagataaagaacgctaagtatatcaatgatttagagcctttagatgaaaaatgtgaatgttatacatgtaataacttctcccgatcctatttgcgtcacttattcaattgcaatgaaatcttaggagcgcgattggcaacaatccacaatctcagcttctatattaaattgatggctgacataagaaagtcaatccagtctgattcttttgaagaatttgccaaaaacttcatacaaagttatcagcaataa

SEQ ID NO: 240072 - DNA, 1120 bp, Unknown
  Bacterial polypeptide expressing nucleotide sequence isolated from the Sargasso Sea
gttgaatccagtgaaatttaaattaatcaaatcagataagagcgctaggataggcgaacttcagttcaggaaagggctgattcaaacccctgtattcatgcccgtaggaacgtatggctctgtgaaaacaatgacgccagatgagcttatagacattggcgcagaaatcattctcgcgaatacttatcacctgatgattagaccaggaaaagatatcctttcctcacatgggggattacatcaaatgatggcatggccaaagccaattctgactgactcaggtggttatcagatttggagcttatcaaaaaagagaaagatcaatgatgagtatgtcgagtttgactcaccagtcaatggtgacatgattcgcttaacaccagagattgcgatgcagatgcagaaagtcatcggaagtgatatccagatggttctcgatgaatgcactcattatcctgctacgaaagatgaggcggagttgtcaatgaagagatctgagaagtgggccttgagaagtcatgaatcttttttacagcagaaaggggatgatgacagtgcttgttttgggattattcaaggtggtatgtatccagaccttcgtctacaaaatttagaagttttatcctcaattgattttgatggactcgcaattggcggactatctgttggggaacccatagacgaaagaatgatggtcttagaatcgttgatgcctgaaatgtcagaaaatattccgagatatctcatgggtcttggtacaccaatcgatatcatcaaagccgtttcagtcggcgttgatatgtttgactgtgtgattcccactcgacatgcaagaaatggacaaatttatactcactctggagtagttaagataaagaacgctaagtatatcaatgatttagaacctttagatgaaaaatgcgaatgttatacatgcaataacttctcccgatcctatttgcgtcacttattcaattgcaatgaaatcttgggagcgcgattggcaacaatccataatcttagcttttatattaaattgatggctgacataagaaagtcaatccagtctgattcttttgaagaatttgccaaaaacttcatacaaagttatcagcaataa

SEQ ID NO: 240073 - DNA, 1117 bp, Unknown
  Bacterial polypeptide expressing nucleotide sequence isolated from the Sargasso Sea
aatgaagcttaaaactaaaaatacatctaattttgcaagagtatctgaaatacaactatcaagaggcaaaattaatacaccagcatttatgccagttggaacaaatgcaactgtaaaaggtttgactgtagaagacttaaatgaaacaggttcagagataattcttggaaatacttttcatcttatgctcaggcctggcgacaacttaatcaagaatttaggtggacttcataaatttattaattgggaaaaaccaattcttactgactcaggaggatttcaagtatggagccttggtgatttagctgaaatttctgaagatggcgttaagtttagctcaccatacgatggtaaaaaaatttttatgagaccggaagattcaatcatgattcaggagaatctcggctcagatattattatggtatttgacgaatgtactgattatccaactaattttgaacaagcaaaaaaatcaatggaactttctatgagatgggcaaagagatgtaaagcagcgcataaatctaaatcagcattatttgggattgttcagggaggcatgtataaagatttgagggaggagtcattgaatcaactaatggatattgattttgatggaatagcattgggaggtttgagtgttggagaatcaaaacaagagaaaactgaaatcttagagtttatgtctgataaattaccaaaggataaaccaagatatctaatgggcgtcggtacgccagaggatattgtcgaagcagtgagatatggaatcgatatgtttgattgtgtcctcccaacaagaaatgcaagaaatggccaactttttacctcagaaggagtaataaatatcagaaacgcagaatataaagatagtgatgaaccaatagataaaaattgtgattctaaagtatctcaaaattacagcagggcctatctaaatcatttacataggacaaacgagatgcttggatctatgttagcaacatatcataatatttattattatcaatctttgatgagagatattagatatgcaataaaaaataatttattcgcgaagttctttaaagacttctataataaacgaaatttagatatggccaaggggccaatatag

SEQ ID NO: 240074 - DNA, 1058 bp, Unknown
  Bacterial polypeptide expressing nucleotide sequence isolated from the Sargasso Sea
aaaaattaaaacctctagaggagacattgatactcctgcttttatgcctgtaggtacattaggaacagtaaaaggggtttttgttgatgacttattaaaaactggatcgcaaattattttaggaaatacttatcatctaatgttaaggcctggaactaaaatattagacaaatttaatgggttacaaaaatatatgaattggaaaaaaccaattctaacagactctggtggatttcaaattatgtctctttcgaaatttaataaaattgatgaaaaaattggtgcaatatttaactctcatatagatggaaaaaaaataatactaagtccagaaaaaagtattgaaattcaaaaatctataaattcagatatattaatggttttagatgagtgtcctaaattgacgaatgataaaaaggtaatttcaaaagcaatcgatacttcaactaattgggctaaaagatgtaaggttgaatttggtaataataaaaaaaaagctctttttggtattgtacaaggtggattatttaaagatttaagagaggaaagtttggataaattgattgatattaattttgacggttatgctttgggaggccttgctgttggagaaactcaaagtcaaatgtttgatacagtggcacaaatttctccaaaaatgccatttaacaaaccaagatatttaatgggagttggtactccatcagatattcttggtgctgtaaacgagggaattgacatgtttgactgtgtcatgcctacaagatctggtagaactggactagctttcacttgggatggaaaaataaacttaaagaactctatttataaaaatgataaatcaccactagacaaaaaatgcaatttaaaaggattaaataattattctaaaagttacttaaatcatttaataaaaactaatgaactcttagcatcaatgataatttcattgcataatatctatttttatcaacaatttatgcttgaggtaagaaaaagtattaagagtcgcacattttttaaattttataagaaatatattaaattttttaattaac

SEQ ID NO: 240075 - DNA, 1108 bp, Unknown
  Bacterial polypeptide expressing nucleotide sequence isolated from the Sargasso Sea
tttgagtgacggctttggttttcacgttgaagtagcccattcgtccggttcgcgggcgggtgttcttaccactccgcatggacaggtgcagacaccactttttatgccagtggcgacactagcgtcagtaaaaggtgtggatatagcccgtgttgtcgagacgggcgccactatgctgttggcaaacacgtatcatctccatctcaggccgggtgaagaagtagtatctcaggcgggcggtgtcggtcatttcatgggatggtctggcccgaccctcactgacagtggaggctatcaagtgtttagccttgctcagcaagtgaaggtgaccgatcacggggcagcatttcgctcgcacctcgacggctctcaggtgaatctcactccggagaaggcagttgctattcaagagtcactaggagctgatgtcgcaatgcagcttgatcatgtgattggtcttcctgcggcacgaaatgacgttgcggaggcaatggagagatctctcgcgtggggagagcgttgtttagctgctcgtcaaaaatcagatcaggcaatgttcggaattgtgcagggtgggcttgatcctgagctaagagcaatcagtgccaagcaccttcgctcgctccctttcgagggctttgcagtaggtgggctgtctgtgggggaaggaccagaggcaatggcgtcaacgcttcaggtgacagtgccgtacttgccgcaagacaagccgcgatatcttatgggagttggaaagccagaggatattattaatgcggttgccgtagggatcgatatgtttgactgcgttttaccaacgcgttgtggtcgtaatgcattgctgtatacgttcgacggcccattacgtttgagaaatgctcagtatttaacggacgaacgccctattgaaagtgactgtccgtgtatggcttgtggccattcacgggcgtatatgcgacatctttttctggcgggggaaatgcttggttcaattttagcctcgattcataatctgaccttctaccagcgactgatgcggcggcttcgggaggcgatagttgccggccaatttcaagcagttcgggcggatattctcgcccgcatgaattga

SEQ ID NO: 240076 - DNA, 1117 bp, Unknown
  Bacterial polypeptide expressing nucleotide sequence isolated from the Sargasso Sea
aatgaattcaaaaaaagttttttttgaattaataaaaactcacaaagaagcaagacttggacagattagaacttcaagaggcttgattgatacacccgcatttatgcctgttggtacacagggcactgtaaaaagtatttttgttgatgatattgtcaagacaaattcacaaataatcttgggaaatacttaccatctttttttaagaccaggattagaaatcttaaaaaatattggtggtcttcatcaatttatgaattggcacaaaccaattttgacagactctggaggttttcaaataatgtcactatcgaagtttagaaaaattgataaagaaaagggagctatttttcaatcacatattgatggtaaaaaaattgaacttagtccagaaaaaagtattcaaatacaaaaaataattaattctgatattttgatggttttagatgaatgtccaaaactcactaatgataaaaaaataatttcaaatgccattgatgtttcaacatactgggcaaaaagatccaaaattgagtttgataatgctgaaaacaaatctcttttcggaattgtgcagggcggattgtttgacgacctaagaattgaaagcttagaaaagttgttagaaattaattttgatggatatgctttaggcggattggctgttggagaaaagcaaaatgaaatgtttgaggttctagataatattacaaataaaatgccaaaaaacaaaccgagatacctcatgggtgttggaacgccatcagatttattaggtgctgttaaatctggtatagacatgtttgattgtgttttaccaaccagatcagggagaactggacttgcttttacttggcatggaaaagtaaatataagaaattcaaaatataaaaaagacttgaagccattagatgagaatacaaatttgagaagtttaaataaatattcaaaaagctatctaaatcatttaattaataccaatgaaatattagcgtccatgttaatctctttacataatataaatttttatcaagaatttatgaaaaaaattagaacttcaataaaagatggttctttcgatgatttttataaagaaaatatttcaaaatttaattaa

SEQ ID NO: 240077 - DNA, 1114 bp, Unknown
  Bacterial polypeptide expressing nucleotide sequence isolated from the Sargasso Sea
atggataaatttaagtttaaagttttaaaaaaagatggctatgcccgcaaaggtcttattgaaaccaaaagaggcaatattaaaacacctgcatttatgcctatagctactcaaggagcagttaagtttactcccatagagtttatagaacagattggatatgaattaacgctctcaaatacctatcacttactattaagacctggattagaaagactttctagtgttgatggtatttcagagtttatgggatggaataagccagtattaacagactctggaggctttcaggtgatgtctctatcaaaattaagaaaaatatctgaagagggagtaaaattccaatctcatattgatggtgcatcacactttttaactcctgaaaatgtaattgattatcagaatacaattaagtctgatattcaaatggttctagatgaatgtattcagtaccccgaatcttacgagaatgttaaaaagtcaatggaattatcactcagatgggctgagagatccagaaaacattataataaaaataaaagtaaaatttatggagcccaatttggaataattcaaggaggtgtatttgaagatttaagagagacatcaatttctgaaacagttaattttgattttgagggatatgctatcggcggactagctgttggtgaaggtcatgaaaaaatgattgaggttgttgattatactgcgccccaattacctgaagataaagtgagatatcttatgggggtcggaaaacctaatgacattattgaggcagtttatagaggtgttgatatttttgattgcgttatcccaactagagaaggaagacatggtatcgcttatgttggttctagctctattaacataaagaattctaaatttgagagtgatttaactccgttagatgaaagtagtgattactttgtttcaaaaaaatattcaaaaagctatttaaatcatttgttaaaaattaaagaccctttaggaccaatgttaatttctcttcataatcttaattattatttcaatttgatgactgatctaggagtatccattgaagaaggtagattagatagttttcgagaagatttttataaggataattaat

SEQ ID NO: 240078 - DNA, 727 bp, Unknown
  Bacterial polypeptide expressing nucleotide sequence isolated from the Sargasso Sea
aatgacattaaaaaaatttagttttaatgttaatagaacgcaaaattttgctagagtaggtgttatagtaacaaatagaggaaatataaatacgcctgcatttatgccagtaggcacacaagctacagttaagggtgtttttattgatgacataattaaaaccggaagcgaaattatactatcaaatacatatcatttaatgataagacctggcgttgaaagaattcaatctgttggtggtcttcataaatttatgaattgtaatttaccaatattaacagactcgggtggttttcaggtaatgtcattatctaaacttaataaaattgatgaagaaaaaggagctatttttcaatcacatatagacggtaaaacgtttgttttaagtccagaagaaagcataagaattcaaaaaggacttaattcagatattgtaatggtaatggatgaatgtcttaaaaaaactaatgattataatgtaataaaaaaatcaatggaactttcaagcggttgggcaaaaagatcaaaggatgcttttggaaaagaatccaacaaagctttatttggaatagttcaaggtggtctttttaatgatcttagaaatgaatcgttaaacaatttgttagatattagttttgacggttacgctcttggagggttagctgtaggagagtcgcaaacagaaatgtttaaagttcttgatggaattaaagataaattgccagaa

SEQ ID NO: 240079 - DNA, 1117 bp, Unknown
  Bacterial polypeptide expressing nucleotide sequence isolated from the Sargasso Sea
gatgcaatttaaagtctcatctacttccggttatgcaaggcggggagaattaagtttttcaagaggcaaagtgcaaactcctgctttcatgccagtaggtacaaacggaaccgtaaaggcattggaggttgagaacctcaaagaaactggttcagaaattattcttgggaatacctatcatctgatgcttagaccaggagatgagcaagtgaaagaattcggtggattgcacaaattttctaattgggataaaccaattttaacagattcaggaggttttcaggtttggagtcttggagatcttgcaaaaattacggaagaaggcataagttttaaatctccctatgatggaaataagtgttttatgagcccagaggattcaatgcgcatccaagcaaaccttggctcagatattgttatggtacttgatgaatgcaccccatatcctgctgaacatgagcaagcaaaagcttcaatggaactatctttacggtgggccaaaagatcccgcgaagctcatcaatctgactctgctttatttggaatagtacaaggaggcatgcatgaggatcttcgcgaacaatcacttaaaggtttaatagatattggttttgatggaatagcccttggtggattaagtgttggagagcctaaagaagaaaaaacaagaattcttaaataccttgctccgcatttaccatcctcgaaaccccattatttgatgggagtaggaaagcctgaggatattgttgaagctgtattttttggaattgatatgtttgattgtgtcttgccaacaagaaatgctcgtaatggccagcttataacctcctatggcgttttaaacataagaaacgcacctagcaaaacttcagatgatccaattgatccagaatgtaattgcaaagtatgcaagaattactctcaagggtatttaaatcatctagataaaaccaatgaaatgttaggctcaatattaaatagttttcataatatttattattaccaaaatcttatgcagcaaattcgcaaagctattgaaacagatacattcgccaagttaataaaagacttttataataagcggcatctagatatgcctgagcatttaatctaa

SEQ ID NO: 240080 - DNA, 1117 bp, Unknown
  Bacterial polypeptide expressing nucleotide sequence isolated from the Sargasso Sea
atgaattcaaaaaaattcttttttgaattaataaaatccaaaaacaattataggctcggtaaaattcatactaaaagaggaataataaatactcctgcatttatgccagttggtacactggggacgataaaaagtatttttacagatgatattttaaagacaggtacagaaataatattaggaaatacttaccatttatttttaagaccaggcattgaaattcttaacaaatttggtggattacacaaatatatgaattggcaaaaacctattcttactgactctggaggttttcaaataatgtcgttatcaaaattcactaaaattgataaaaaaaaaggagcatttttttcctcccatattgatggtaaaaaatttttattaagtcctgaaaaaagtatagaaattcaaaaaaaaattaattcagatattttaatggttttagatgaatgtcctaaacttacggtagacaaaaaaattatatccagtgcaattgatacatctacacattgggcaaagagatctaaaatagcttttggaaagtccagtacaaaagcactttttggtatagtgcagggcggtatctttaaggatctgcgccatgaaagtttagaaaaattaattgatataaattttgatggttatgctatgggcggattagctgttggagaaacacaagatcaaatgttaaaaactttagaagacacaacatatttaatgccaaaaaataaaccgagatatttaatgggcgtaggtaccccttcggatattgttggtgcagttaaaaatggaattgatatgtttgattgtgttatgccaacaagatcaggcagaactggtttagcatttacttgggaaggaaaaatcaatctaagaaatagtaaatttaaaaatgacaagagcccacttgatagaaaatgtaaaataaataatttaaataaatattcaaaaagctatttaaatcatcttataaatacaaatgagatattagcttctatgttgatttcactacataatgttaatttttatcaagaattcatgaaaaaaatcagagagtcgattaaaactgggacatttgaagccttttacaaaaaaaatataaacaagtataactaat

SEQ ID NO: 240081 - DNA, 730 bp, Unknown
  Bacterial polypeptide expressing nucleotide sequence isolated from the Sargasso Sea
atgaaatttcaaattaatagttctagcgagtttgctagaaatgcagaactaaagcttataaaaggaacaatacaaactccagcatttatgccagttggaacaaatgggacagttaaagctcttacagttgaagatcttcatgaaactaattcagaaatcatattaggaaatacctttcatttaatgctaaggcctggagataagctaataaaagacttaggcggacttcataaatttattaattgggataaaccaatactaactgattcaggaggatttcaggtatggagcttaggtgatttggttaacatttctgaagaaggcgttaaatttagctctccttatgatggcaaaaaaatatttatgacacctgaagattccattaagattcaagaaaatctcggttcagacatcattatggtatttgatgagtgtactgattatccatcaactcatgaagaagcaaaaaaatcgatggagctttctatgagatgggcaaaaagatgtaagactgcgcataaaacagaatctgctttattcggaattgttcaaggaggaatttataaagatttaagagaagaatctcttaatagattaatagatatcggttttgatggtattgctctaggtggcctgagtgttggcgagtcacaacaagaaaaaaatgaaatattagagttcatgtctgataagttgcctgaggataaccaagatatcctatgggagttgg

SEQ ID NO: 240082 - DNA, 739 bp, Unknown
  Bacterial polypeptide expressing nucleotide sequence isolated from the Sargasso Sea
aatggattcaaaaaaagttttttttgaattaatcaaaacccacaatcaagcaaggctaggtcaaattaaaacatcgcgtggtttaattgatacacctgcatttatgcctgtagggacacagggtactgttaaaagtatatttgttgatgatattttaatgaccaattcacaaataattttaggaaatacttatcatttatttttaagaccaggattggatatattaaataattttggaggtcttcaccaatttatgaattggcacaaacctattttaaccgactctggtggatttcaaataatgtctttatctaagtttcgaaaaattgataaagataagggtgctattttctcatcacatttagatggtaaaaaaattgagcttagcccagaaaaaagtattcaaatacaaaaaacaattaactcagatatattaatggttttagatgaatgtccaaaacttacaaatgacaaaaagttaattgctggggctatagatgtttcaacaaattgggcgaaaagatctaaaatagaatttaataatgctaaaaacaaatctctatttggaattattcaaggtgggttatttaatgatttaagaattgaaagtttagaaaaattgttagaaattgattttgatggatatgcattaggaggtttggccgtaggtgaaaaacagcatgaaatgtttaaggtattagacagtataacaaataaaatgccaaaaaataaaccgagg

SEQ ID NO: 240083 - DNA, 751 bp, Unknown
  Bacterial polypeptide expressing nucleotide sequence isolated from the Sargasso Sea
tatgaaatttaaaatagattctcaggctgaatttgcccgaaaaggagagcttcaatttcctaaaggtaaggttcaaactccagcatttatgccagttggcactaatggaacagtaaaaggtttgacagttgacgatctgaaatcaactggatctgagataattttaggaaatacatatcatttaatgttgagacctggcgatgaaattataaaagatttaggcggcctgcataaattttcaaattgggacagacctattttaaccgattctggtggatttcaagtttggagcctcggagatttagcaaaaatttctgaagagggcgttaaatttagttcaccatatgatggaaaaaaaatatttatgcgacctgaggattcaattcaaatacaggaaaatttaggctctgatattataatggtatttgatgaatgcaccgattatccctcaacatttgatcaagctaaaaaatccatggaattatcaatgagatgggcaaaacgatgcaaagattatcattcctctaattctgcactatttggaattgttcaaggaggagtttatgaggaactgagagaacaatctttatctaagataatagaaattgattttgatggaattgcattgggtggtttaagtgttggagagacaaaagaagaaaaaaataaaattctatcttttttagcagataaacttccaacaaacaaacctagatacttaatgggtgttggtaaaccagaagatattgtt

SEQ ID NO: 240084 - DNA, 763 bp, Unknown
  Bacterial polypeptide expressing nucleotide sequence isolated from the Sargasso Sea
tttgaaattcacactaaaaaccaattcttcaaaatataatgcacgaactggcgtgcttgaaacacaccatggtagcattaatacccctgtgttcatgcctgttggtaccattggcgcagtaaaaacaatggacccatatgagctcaaaagtatagactttaaaataatacttgggaacacctatcacctatatctaaggccaggaactgacattataaataaagctggcggactccacaaattcatatcctgggataggcctattttaactgatagtggaggctttcaggttttttcactttcaagattaaataaaatatctaatgatggagttgaatttcaatcacacttagatggtagtagacatatgtttacacctgaaagttcaatggaaattcaaaggaaacttggttcagatattatcatggcttttgatgattgcccgccaggagattctaatcattctacgataaaaaaatctgttgaaagaacaactaattggatggttcggtgttcagactggctagaaaaaaacccgagatatcatgatcatgaacaagttgtgcttcccataattcagggagcaacagacttagatcttagaaaaataagtgctgaacaacttattcaacactcatcatgtggcatggctattggtgggttagctgttggagaggaaaaaaatgcaatgatggacaccatagaattttgtgatacaatattacctaaaaatcaaccacgatatctgatgggggtagggaaa

SEQ ID NO: 240085 - DNA, 760 bp, Unknown
  Bacterial polypeptide expressing nucleotide sequence isolated from the Sargasso Sea
atgagtccagaagattctattcaaattcaagaaaatctaggttcggatattgtgatggtatttgatgaatgtacaaactatccatctccaaagaaagaagcgcaaaaatctatgcagctgtcagcaagatgggcagctagatcaaaagacgctcataaatcacaatcagcattatttgggattgtgcaaggaggaatgtatgaagatttaagagaagagtcactaaatcttaccttggcatgtgaatttgatggcattgcaattggaggattaagtgttggcgagcctaaagaagaaaaaacaaaagttctgaaacatttatcaaatattcttccagatgataagcctaggtaccttatgggagtaggaaagcctgaagatattgttgaagcagtcttctttggtgtggaaatgtttgactgcgtcttgcctacaaggaatgcaaggaatggacagcttataacaagcacaggcgtgataaacattaggaatgcgaaatataaaaatgatgattcaccgatagatgaaaattcagattctaaggtttgtaaaaattattcaaaagcctatttacatcatttagataaaactaatgaaatgttaggatcaatgcttgccagctatcacaatatttattattaccatgagcttatgaagcaaattaggcaatcaattgatgacgatatattcgtaaactttgcaaaagacttttataatagtcgaaatttaccaattccagattatttggagggcttataaa

SEQ ID NO: 240086 - DNA, 1186 bp, Unknown
  Bacterial polypeptide expressing nucleotide sequence isolated from the Sargasso Sea
aatgactaacttttcttggaaagttaaaaaaacaaataaaaataataaagcaagaacaggaaaaatttctacaccacatggtgatattgaaactccagcatttattttttgtgcaacaaaagctgcactaaaatcttttactacacttgaagcaaaaaaaaataatacacaaattatactatccaatacataccatttaatgcttcagccaggtagtgaactaatagctcaacatggaggtcttcataaatttacaggttggaatgggcctatgttaacagatagtggtggatttcaaattttttctcttggacatgggtcagttgctgatgaaataaaagggcgaaaaacaaattcaaaaaataaaaaaactttaataaatttgaatgaagagggtgcattattcaagtcctatatagatggttctactcatatgttatctcctgaaaaatcaatagaggttcaaagaaatcttggcgcagatttcatcttagtttttgatgaatgcactccttataatgtagataaaacatacacatctgattctatgttaagaagtcatagatggtctttaagatccatcaatgcatttaactctaaacttaattataatcctaaaaatggctcagctggtagacaagaaatgtatgggatcattcaaggtgggatttacaaagatttaagagaagaaagcattgaatttaacacaaaaaaaatcaacacttttggaattgctattggtggtagtttaggatcaaataaagatgaaatgaaagatatagttcattttacttcttctaaattagataattctcgtccagtgcatttgctaggtattggcgatccaagggatatatgggattttgttgcagatggaatcgatacatttgattgtgtcagtccaactagaattgctaggcatggatcagctttagtaaaaggtaaacaaggaaaaataaacttaaaaaatgttaaatataaaaataatttaaacccaatagataatgagtgtaattgctatacttgtaagaactttacactggcatatttgtatcatcttttttctgcacaagaattactaggattacaacttctaactaatcataatatatattttatgaataatcttatgaaagaagtgagaaactcaatttacgataatgattttgataatgcaaaaaagaaa

SEQ ID NO: 240087 - DNA, 694 bp, Unknown
  Bacterial polypeptide expressing nucleotide sequence isolated from the Sargasso Sea
aatgaaatttgaaataaataattccagtgagtttgctcgaaatgcagaactaaagctcgcaaaaggaacaatacagaccccagcatttatgccagttggaacgaatgggacagtgaaagctcttacagttgaagatcttcatgaaactaattcagaaattatactaggaaatacttttcacctaatgttaaggcctggagataagttaataaaagacttaggtgggcttcataagtttattaattgggataaacctatattaactgattcaggaggatttcaggtatggagcttaggcgatttagttaaaatttctgaagaaggcgttaaatttagttctccttatgatggtaaaaaaatatttatgacaccagaagattccattgaaattcaggaaaatcttggttcagatatcattatggcattcgatgagtgtactgattatccatcaactcatgaacaagcaaaaaaatcgatggagctctctatgagatgggcaaaaagatgcaagaatgctcataaaacagaatctgctttatttggaatcgttcaaggaggaatgtataaagatttaagagaagaatctcttaatagattaatagatatcggttttgatggcattgctctaggtggtttaagtgttggcgagtcacaacaagaaaaaaatgaaatattagagttcatgtctgataag

SEQ ID NO: 240088 - DNA, 715 bp, Unknown
  Bacterial polypeptide expressing nucleotide sequence isolated from the Sargasso Sea
ctttcaaaattaaataaaatcgatagagagagaggagctatattcaattcccatgttgatggaaaacaatatactttaagtccagaagaaagtataagaattcaaaaaaaacttaattcagacattgtcatggtaatggatgagtgtcctaaaaaaactactgacagaaaaattattgaaaattccctagatctatcaactgaatgggcattaagatcaaaaaatttttttgggaaaaatcctcacaaaggtctttttggaatagttcaaggaggcttatttgatgatttaagaaaaaaatccttagaagatctaattaaaattgggttcgatggatatgcattaggtggcttagctgttggagatacacaggaggaaatgtttagagtcttggacggtataaaagaacatttacctgaagataaaccaagatatttgatgggagttggaactccttctgatatccttggagcagtaaaaagaggtattgatatgtttgattgtgtattaccttctagatctggaagaactggtttagcttttacgtggaatggccctataaatattaagaatgcaaagtatcagaatgacacaaaacctcttgatgaaaaatgtgaaaaattcaacttgaataagtattcaaaaaactacttaaatcacttattcaataccaacgagatactggcctcaatgcttttaacctccataatataaa

SEQ ID NO: 240089 - DNA, 631 bp, Unknown
  Bacterial polypeptide expressing nucleotide sequence isolated from the Sargasso Sea
atgacattaaaaaagtttacttttaatgttattgaaaaaaataaacaggctagattaggattaataaaaacttctcatggaaacattgatacaccagcttttatgccggttggtactcagggtacaattaaaggcatttttattaatgatattataaaaactgaaagtcatattatcttaggtaatacttaccatttaatgcttagaccaggtataaaaagaattgagtctttaggtgggttacatcaatttatgaattgcaagttacccatattaactgactctggtggatttcaagttatgtctttgtctaaacttaataaaattgatagagaaaaaggagcaatttttcaatcccacatagatggaaaaaaatatattttaagtcctgaagaaagtataaaagtacaaaaatctcttaattctgacatagtaatggtaatggatgaatgtcctaaaaaaagtggtgattataaaaaaattaaaaaatctatggaattgtcaatgtattgggccgatagatcaaaaaaagcttttggtttaaatcctcataaagctatttttggaataattcaagggggtttattcaaagatttaagagttgaatcgttaaagcacttattaaatattg

SEQ ID NO: 240090 - DNA, 1135 bp, Unknown
  Bacterial polypeptide expressing nucleotide sequence isolated from the Sargasso Sea
ttgagcaacaaatctaaattttttaatattttaaaaactgatggcaaggccagactgggaaaaataactacctcgagaggcgaggttgatacaccagcatttatgcctgttggaactgcaggtaccgtaaaaggcgttttgccagagaatgtcaaactttctggaagccaaataatactcggcaatacttaccatttaatgctaagacctggatctgaattaatttcaagttttggtgggctgcacaagtttatgaattgggaattgccaatacttactgatagtggaggctttcaagtaatgagtctgtctaaactaagaaaaatttctgaggaaggtgtggagttttcctcacatattgatggaagtaagcattttgtttctccggaacgctccatagaaatccaacttaatttaggaagcgacataattatggcgtttgatgaatgtgttgattctgaaactcctttggagaaagttaagtcaagtatggatcgatcaatgcgctgggcaaaaagatctattgctgcatttggcaaccaaaaccttaaatttatttttggcatacagcaaggtgggtttgatgagaaacttagattggaaagttcgaaaattctcacagatcttaattttgatggttatgcggtaggaggtcttgcagtaggcgaggggcaggaagaaatgttcaaagttcttgattttgctaccgaatttttaccacaagaaaaacctaggtacttaatgggtgtaggaaagccagatgatataataggcgcagttgaaagaggggttgatatgtttgattgcgttttgcctacaagatctggccgaacagggcaagcacatacccgaatgggagaaataaatttgagaaatgctcgccacataaaagatgaccgtcctcttgataatctttgcagttgctatacctgtgttaattattctagggcctatcttaatcaccttgaaaaagcaaatgagatattagggtcagtacttctctcaattcataatatttcttattatcaagaattgatgaagggaattcggagagccataagcaataatgacttgaaagcttttgttgaaaatttttatgagagaaggaaaattggggatttgccgaagctataag

SEQ ID NO: 240091 - DNA, 1111 bp, Unknown
  Bacterial polypeptide expressing nucleotide sequence isolated from the Sargasso Sea
tatggctaatttcaaatttcaaattttaaataaagaaggtaatgctcgtaatggagttatagaaactaaaagaggtaaaataaatacccctgcttttatgcctatagctactcaaggggcaataaagtttactccaatcgagtttatcgaacaaattggatatgatttaatattatcaaatacttatcatttacttctaaggccagggttagagagattatccgatattgacggagtctcagagtttatgacttggaacaaaccagttttaactgattccggaggctttcaggttatgtctctagcaaaattaagaaaaataaccgaagagggtgtaaattttcaatcacatatagatggttcaaaacattttctaacccctgaaaatgtaattgattatcaaaatgttattaagtctgacattcaaatggttttagacgaatgcatacaatttccagaatcttatgaaaatgtaaaaaaatcaatggagttatctcttcgttgggccgagagatcaagaaaatattatattgaaaataagaataagatttacggagcgcaatttggaataattcaaggtggtgtttttgaggatttgagagaaatatctatttctgaaacaactaaatttgattttgagggctatgctattggcggtttagcagtaggagaaggtcatgaaaagatggtcgaagttgttaattatactgccccactattacctgaaaataaagttcgctacttaatgggcgtaggtaggcccaaggatattattgaagctgtatatagaggtgttgacatttttgattgtgttattccaactagagaggggagacatggtttggcatatgttggttcaagcagtattaatttgaaaaattctcaatttgaaaacgatttaacacccttagataagaggagcgattattttgtttcaaataaatactctaagagctatttgaaccatttattaaaaattaaagatcctttaggctctatgttaatctctcttcataacctcaattattattataaattaatggaagacctaagaaaatcaattgaagaaggaagcttaagtagtttcagggaagatttttatagtaaaagt

SEQ ID NO: 240092 - DNA, 1138 bp, Unknown
  Bacterial polypeptide expressing nucleotide sequence isolated from the Sargasso Sea
aatgaaatttgaactgaaaaccactgacggccgtgcccgtcgcggccagctggtattcgagcgcggcaccgtgcagaccccggccttcatgccagtcggcacctacggcaccgtcaaggggatgaccccggaagaggtgcgtgagactggcgcccagatcctgctcggcaacaccttccacctctggctgcggccggggcaggaagtgatgcgcgcccacggcgatctgcatgacttcatgaactggcagggcccgatcctgaccgactcgggcggtttccaggtgttcagcctgggccacattcgcaagatcaccgaagcgggggtgcacttccgtcaccccatcaatggcgagaagatcttcctcgaccccgagaaatcgatggagatccagtacgatctgggctccgacatcgtgatgatcttcgatgagtgcacgccgtacccggccacttacgaagaggcgcgcaagtccatggagatgtctctgcgctggggcaagcgttcgcgtgacaagttcgatgcgctcggcaacaagaacgccctgttcggcatcatccagggttccgtgtacgaagatctgcgggatgtgtcgctggacggtctcttggagatcggcttcgacggttacgcggtcggtggtctggcggtgggtgagccgaaagaggacatgcatcgcatccttgagcacgtctgcccgaaaatcccggccgacaagccgcgctacctgatgggggtgggcaagccggaagatctggtggaaggggtgcgccgcggcatcgacatgttcgactgcgtgatgccgacccgcaacgcccgcaacggccacctgttcaccaccgacggggtggtcaagatccgcaacgccaagtatcgcgaggacaccagcaccctggatgccgactgcgattgctacacctgcaagaactacacccgcagttatttgtaccatctggacaagtgcaacgagatcctcggtgcccgtctgaacaccattcacaacctgcgttattaccagcgtgtgatgcagggtttgcgggacgcgatcgagcagggtaaattagacgactttgtaactgagttttaccgtcggcaagggaagcccgtgcctccgttagctgaaaatgacgtgaaataa

SEQ ID NO: 240093 - DNA, 1132 bp, Unknown
  Bacterial polypeptide expressing nucleotide sequence isolated from the Sargasso Sea
aatgacaatttcttttaatattaaaaatacagatggagattctagaagtggctttattaaaactgcccacggtatagtaaatactccagtttttatgccagtaggaacatatggcgcagtaaaaggtatccaacccagtgatttaactgaaataggatcagaaataattttatctaacacctatcatttaatggaaagaccaggaaaagatattatacgtgaattaggtgggcttagaagttttatgaattgggatggtcctattttaacagactcaggaggttttcaagttatgtcgcttcaaaatatggctaagatagatgatgatggagtcacatttaaatctcatttagatggaagtttactaaggttaacgccaaaagattctattaatatgcaaaatgcattagattcaactataacaatggcgtttgatgagtgtacaccgtatccggttagtcatgatactgctttaaaatctatgaatttgtccatgaaatgggctaaattatgcagagataattttatagatagaaacggttatggcctattcggtatagtgcaaggatctacttttaatgatttaagagagaaatctagtgaatctcttataaatataggttttgatggctatgcaataggaggattagcagtgggggaaggccatgatctaatgataagtactttaaaatcaagtataaattatctacctaaagaaaaacctcgctatttaatgggcgttgggtatccaaaagatataattgaagccgtaagattaggagtagacatgtttgattgtgttatacctacaagatcaggaagaacaggaaaaatattcacaaaaacaggaactttaaatattaaaaacgctaggcataaaaatgaccctagacctatagaggaaggatgttcatgtaaagtgtgtagtaataaggtttctagggcttatttacatcatttatttaatactaatgaaatgttaggaagtatatatttaactatacataatattagtcattacattcaattaatgtctaatttaaggtcagctattaatgataataattttaaggaaacttcaaattatttattaaatcaatataaaaaaggagatattgaaatatataattaa

SEQ ID NO: 240094 - DNA, 517 bp, Unknown
  Bacterial polypeptide expressing nucleotide sequence isolated from the Sargasso Sea
catgaccgacggtcatacccacgatacgagcggtacctgcaatacctgcgcgagccacggtgagcgccctgaaaacggcctcaaattcgaactgctcggcaccgacggccaggcgcggcgcggccgcgtcacgctgaatcacggcgtggtcgaaacgccgatcttcatgccggtcggcacctacggcacggtgaaggcggtccagccgcgcgagctcgaggaaatgcacgcgcagattatcctcggcaatacgttccacctgtggctgcgcccgggccttgaaacgatcgaggcgcacggcggcctgcacggcttcatgggatggaagaaaccgatcctgaccgactcgggcggtttccaggtgttttcgctcggcgatctacgcaagatcaccgaagatggcgtcacgttcgcgtcgccgatcaacggcgacaagctgttcctgtcgccggaagtatcgatgcagatccagaaggtgctaaattcggacatcgtcatgcagttcgacgaatgcacg

SEQ ID NO: 240095 - DNA, 832 bp, Unknown
  Bacterial polypeptide expressing nucleotide sequence isolated from the Sargasso Sea
atgacacttcgcttttctttgagctcaatagatggcgccgctagatgtggaaaattagaaactgctcatggcgtgataaatacccctgcctttatgcctgttggaacagcagccactgtaaaagcaatgttaccagaatctgtaaaggctactggggcggagattatacttggaaatacatatcacttgatgttgagacctggtgcaaagcgaattgaggaatttgggggtttacatgattttatgagttggccgggaccaatcctgaccgactctggcggttatcaggtgatgtcgttagcgacgttaaggaagattgatgaagatggtgtgaggtttcgaagccacatcgacgggtcttatcataagctcactcccgaaagctcgactgaaatacaaagaagtttgggtgcggatattacgatggcttttgatgaatgcacgccgtacccggttgcagagacgatagcagaggaatccatgttaatgtcaatgcgttgggcggagcgttctaaaaaagcattcaaacaaaaaaaaggatatggtctttttggaattgttcaaggaagcacttttgaaaaacttcgattaaattcggtggaagcccttacagaaattggatttgatggttacgctatcggggggttggcggttggcgaaggacatcaggaaatgatccgaattcttgatatcacagcatcagttctgccggaaaataaaccacgatacctaatgggcgtgggaaaaccaatagatttagtggcgggtgttatgaggggggtggatatgtttgattgtgtgcttccaacccgatcgggcaggacagggcagg

SEQ ID NO: 240096 - DNA, 1126 bp, Unknown
  Bacterial polypeptide expressing nucleotide sequence isolated from the Sargasso Sea
atgaaatttgaactcgacactaccgacggccgtgcgcgccgtggtcgcttgatttttgaacgcggcacggtggaaaccccagccttcatgcctgttggtacctacggtacagtaaaaggcatgacgcctgaagaagtacgtgccactggcgcggacattctgctcggtaacactttccacctgtggttacgtcccggcgaagaaatcatgcgtaagcatggtgacttgcacgattttatgaactggcagcgtcctattctgaccgattcgggcggtttccaagtgttcagtttgggtgacattcgtaaaattaccgaagaaggtgtgcatttccgttcgccaatcaacggcgagaaaatcttcttagatcctgaaaaatcaatgcaaattcaacatgcattgggcagtgatgtggtaatgatttttgacgaatgtaccccgtatccggcgacagaagatgaagcgcgcaagtcaatgcagatgtcactgcgttgggctaagcgttcacgcgacgagttcgaccgtctggaaaaccccaattcattatttgggatcatccaaggcagtgtttatgaagatttacgcgacgagagcttaaaaggcttagtcgacattggtttcgacggttatgccgtcggtggtttggccgtaggtgagcctaaggaagacatgcaccgcattcttgagcatgtctgtccacaaattcctgcggacaagccgcgctatctgatgggggtcggtaagccagaggatttagttgaaggtgtgcgtcgtggtatcgacatgtttgactgtgtgatgccaacccgtaacgcccgtaacggtcatctgtttaccagtgaaggtgtgatcaagatccgcaatgcgcgtcatcgtgatgacacttcaccgctcgatcctaagtgtgattgttatacctgtaaaaactattcacgggcatacctttaccatttagatcgttgtaatgagattctgggtgcgcgtttaaacaccattcacaacttgagatactatcaaatgttaatggaaggtttgcgcggggcgattgagacgggtacattagacgcctttgtaaaggacttctataccagtcaaggtcgtgaagtaccagagttagtcgattgat

SEQ ID NO: 240097 - DNA, 1123 bp, Unknown
  Bacterial polypeptide expressing nucleotide sequence isolated from the Sargasso Sea
atgaccaaatttttttttgaaaaaatagaaactgatggtttggcccgtgttggtcttcttcacacccaccatggaagtattagaacgcctgctttcatgccggttgggactctaggtacggtaaaagcaatgtacccggaacaagtcgaaaacacaggtgcagatataatcttaggtaatacataccatcttatgattcgtccaggtgctgaaagaatatctaaacttggtggtcttcacagttttatgaattggaagttaccaatacttacagactctggagggtttcaagtaatgtcacttgcaaaactccgaagtctcgacgaaaaaggcgtaacctttcaatctcatatagatggatcgaagttttctttgacacctgaacgtgcaatagaaattcagcacctactaggctcggatataacaatggttttagatgaatgtcccgaacacggaaaaaggaaaagtgacatcgctgaatcaatgaggttgtctctccagtgggctaaaagatctagggagaactttatagaacgacaaggatatggactgtttggcattgttcaaggcaatgtctttgaagatttaagagaagagtcagcgctaaaaacaatggagattggttttgacggctatgctgttggtggacttgctgttggtgagggacacattcaaatgctctcaacgctggattttactgtgcccttcttaccagatctgaaaccgagatatttgatgggagttggcaggcccctggatattgttgaatcagtaatccgcggtatagacatgtttgattgtgttttaccaacaagatctggaaggacaggaaaagcgttcacctcaagaggggaaataaatatttttaatgcacgccatgctgacgacgaacgacctttatcctcagaatgcctgtgtccgacttgtaaatattatagtagggcctaccttcatcacctttttaaatcaaaggaaatacttgggcccatgctacttacataccataatctgaaatattaccaggatcttatggaaactttgagaaatagtatttcaaaacagagtttgaaagaagttgttagtaacttggtaagtgaatgggaaaagggagacatcgactaga

SEQ ID NO: 240098 - DNA, 1061 bp, Unknown
  Bacterial polypeptide expressing nucleotide sequence isolated from the Sargasso Sea
tatgattaattttaatataaaaaagaaaactggtttagcaagagttggggaaatagtggtcaataatcatactattgaaacgccagtattcatgccggtaggaactgcagcgactgttaaaagtattactccacaagatcttaaagatattggatacaaaattattttatctaatacttatcacctttatttgagaccaggaactgaagtgatttcatatcataaggggttacataattttatgggctgggaaaacgccattttaacagattcaggaggttatcaagtttatagcttatcaaagttaagaaaaatctctcaagatggagttaaatttaattcacctgtggatggaagcactttatttatgtcaccagaaaaatctatggaaatacaagcatccctgaattcagatatcgttatgtgctttgatgattgcacaccttacccgtgtgaatataacgatgcaaaagaatcaatggagttatctcttcgttgggctgaaaggtgtaagaactattcccttcctaagaataatcatctctttgggattatacagggaagcacctatgacgatttaagggataaatctttagaacatttaattaatttagattttgacggatatgctatcggtgggttgtcagttggtgagagtgccaacgtaagaaataaagtgcttgataatattgtaaataaaatgccagaaaaaaagccacgctacctaatgggggttggaaaacctgaagatattgtagaagctgttttaagaggtgtggatatgtttgattgcgttattccaacacgaaatgcaaggacaggctttttatacactcataatggaataatcaaaataagaaataataagtataaatttgatacaaaacctattgatgagaattgttcgtgttatacttgcagaaattttagcagatcttacttgagacatttagacaatgccaaggaattactgggattaaggcttaataccatacataatttacattattattatgaattaatgcaaaatattcgagaagctataaaatctgataaattga

SEQ ID NO: 240099 - DNA, 730 bp, Unknown
  Bacterial polypeptide expressing nucleotide sequence isolated from the Sargasso Sea
aatggcattaaaaaaatttgcctttaacgttttaaaaaaagataaatttgctaggtctggtttaatagagacccatcgaggaaatatacacactccagcatttatgcctgttgggactcaagctacagtaaaagcttgcacaatagatgatattaaaaaaacaggctctgaaataattctttcaaatacttatcatttaatgatacgccctggtgttgaaagaattgaatctgctggtggacttcataattttatgaattgtgatttacctattttaactgactcaggtggttttcaagttatgtctctttcaaaattaaataagattgatagggagaagggtgctatttttaactctcatgttgatggtaaaaaattttatttaagtccagaggagagcattagaatacaactaggtttaaattcagatatcgtaatgattatggatgaatgccctaagaaaactaatgattacaacattattaaaaaatctatggatctttctctgtattgggccgaaagatcaaagaaagcatttggtaataatcctcataaagctttatttggtattgttcagggtggtttgttcaaagatctaaggcttaaatcgttaaaagaacttatgaaaattggttttgacggatatgcgatcggtggtttagctgttggagaaactcagaatgaaatgttttcaaccttagatgatattaaagaatttttacccaactga

SEQ ID NO: 240100 - DNA, 1120 bp, Unknown
  Bacterial polypeptide expressing nucleotide sequence isolated from the Sargasso Sea
atggaagacataaaaaagaatttttcttttagcgtaaaacatcaaaataaaaattatcgtgttggattaattcaaacacatcgtggtgaaattaatactccttcttttatgcctgttggtactcaagccacagttaaaggtatttttattgacgatattattaaaacaggaagtgaaataatactttcaaatacatatcacttaatgattagaccaggaactgagagaatagaggcagttggtggcttacacaaatttatgaattgtaaacttcccattctgacagactctggaggttatcaagtgatgtctctatctaaatttaataaaattgatagagttaaaggggcaatatttcaatcacatattgatggaaaaacttttgttttaagtccagaggaaagtattagagtacaaaaaaaacttaattcagacattgttatggtgatggatgaatgtccaaaaaataccaatgattacaataaaattaaaacctctatggatctatctatggagtgggcgaaaagatctaaagaggaatttggaaaaaaccctcacaaagctttattcggtatagtgcaaggaggattatttaaagatttaagaaataagtctctaaaaaaattaatagacatagaatttgatggatatgctattggtggattagccgtcggagaaacacaaaaagaaatgtttgatgttttggatggtataaaagataatttaccaatcgataaaccaagatatttaatgggtgttggaaccccctccgatatattaggagcagtcaagagaggtattgatatgtttgattgtgtcctaccaactagatcaggaagaactggtttagcttttacctggaatggcagagttcaaattagaaattctgaaaataaaacagacaatacacctctagatagtaatgtaacaaggtttgatttaaacaaatactctaaaaattacttaaaccatcttcataatactaatgaaatattatcatcaatgattttatcattaaataatataaatttttaccaagaacttatgtatgaaattcgaaaaaatattaaaatgggaacttttgatcaatttcacgacaagtatattaatattttgtaaa

SEQ ID NO: 240101 - DNA, 1114 bp, Unknown
  Bacterial polypeptide expressing nucleotide sequence isolated from the Sargasso Sea
atggcattaaaaaagtttacttttaatgttcagtataaagataatcaatcaagagtaggtataattcaaactcacagaggtaatatagatacgcctgtttttatgccagttggtacccaggctacagttaaaggtgtttttattgacgatgttataaaaacaggagcacaaattatactttccaacacctatcatctgatgcttaggcctggtgttgatagaataaaatcaataggtggtttacatgaatttatgaattgtaatttaccaatattaactgattctggtggctttcaggtaatgtctttgtcaaaattaaacaaaatagattcggaaaagggcgcaatatttcaatctcatattgatggtaaaaaatttattttaagtccagaagaaagcataagaatacaattaggtcttaactcagatatagttatggtaatggacgaatgtccaaaaaaaagttcagattacaaaaaaataaaaaaatcaatggaattatcaatgtattgggcagatagatcaaagaaagcttttggaataaataaccacaaaggaatttttggtataattcaaggaggattatttgaagatttacgagctgagtcagtaaatcaattattgaagatagattttaatggttatgcaataggtggtttggcggtaggggaaacacaaagtgaaatgtttaaagtattagatggaatcacatgtttaatgccacaggaaaaaccaaggtatttgatgggtgtgggaacaccaagtgatatattaggtgctgtcaaaagaggtgttgatatgtttgattgtgtaatgccaacaagatctggaagaactggtttggcttttacttggaatggaagaataaatatacgaaatgctaaatatcaaaatgacaattcgcctcttgatgaaaatacagataaatttaatttaaataaatatacaaaaaattatttaaatcatttgtttaatacgaatgaaatgcttggatccatgttgttaacactacataacattaatttttaccaagaattaatgtcatcaataagaaaaaatattaaaaatggtacatttcaacaatttcatgatcaatatataaataagatttaat

SEQ ID NO: 240102 - DNA, 289 bp, Unknown
  Bacterial polypeptide expressing nucleotide sequence isolated from the Sargasso Sea
aatgaaatttaaaactaataattttgcagaaattgcaagagaatctgagattaaaacttcaagaggaattatacatactcctgcttttatgccagttggcacaaatggaactgtaaaaggactaacagttgatgatcttaaagaaactaactcagagattattttaggtaacacttttcatcttatgttaaggcctggcgatgaattaataagagatcaaggcggacttcataaatttatgaactgggaaaaacctatattaactgattctgggggttttcaagtttgg

SEQ ID NO: 240103 - DNA, 925 bp, Unknown
  Bacterial polypeptide expressing nucleotide sequence isolated from the Sargasso Sea
ggactagatgtaataaaagaatttggtggattacatgatttcatggcatggaatagatcaatacttacagattcaggaggatttcaggtatggagcctgcaagaattaagaaaaataactgaagaaggagttaaatttaaatcgccactagatggttcagagatatttcttgctccagaagattcaatccaaacgcaattaacattaaacgcagatatcataatggcctttgatgaatgcacagcttaccccagtacccttaaggaagctaaagaatctatggatcttactcatagatgggcatctagatgtaaagaatatttcaataagaataaaaaagagcatctattatttggcatcgttcaaggtggaatgcatcttgaattaagagaagaatcattaaattttatatctaaacaagattttgatggaattgccttaggaggactgagtgttggcgagccaaaagaagaaaaaacaaaaattttgaagcatttagcccctttattgccggaagacaagcctcattacgtaatgggcgtaggaacacctgaagagttagtggaaggcgtgagatatggaattgatatgtttgattgtgttattcctacaagaaacgctagaaatggctttatatatacctctacaggtatagttaaaataagaaattcagaacacaagaagtcgacaaaacctatagatgaaaattgtgattgttatacctgtaagaacttttctagagcatatttacatcatttagataaggccaatgaaattttagctagcactttaatgagtatttgcagtttgcatacttttaataagctaatgcaagatatgaggtcatcattagaagaaaataaatttgaagaattcgttgattccttttacgatatgagggacttgaaaaagccaaaattataga

SEQ ID NO: 240104 - DNA, 931 bp, Unknown
  Bacterial polypeptide expressing nucleotide sequence isolated from the Sargasso Sea
tatgagattcaaaataataaatgaggataacctagcaagaactggacggatatctttgaagcggggtgaaatacaaactccagctttcatgcctgttggaacatacggagccgttaagagtgtcactcctgaagagctgagtgaaagctctacagatattattctttcaaacacgtttcacctgatgttaagaccgggtgttgaaaccataaagaaacacggcggattgcataaatttatgaactggagcggacctattttgacagattcaggtgggttccaggtgttctcattggaaaagaaaaggaaaataactaaagatggggtgcattttcagtctcctattgatggagctaatgttttcctttctccggagctctcaattgatgttcaacatcatcttgattcagacatcgttatgatttttgacgaatgcacaaaatacccagcctcaaaaaaagaagccaaagattcgatggagctctctattgattgggcgagaagatcaaaaaatacatttcttaagttaaagagaaatcaaggtgaagaaagagctgatttattcggcataattcaaggaggaatgtatgatgatctaagattagagtcactagaaacactccatgatataggttttgatgggtatgccataggagggcttgcagttggtgagtcggaattagagagagtatcgatcttagaaaatttaattccgcatatgaaaaaagataaacccagatatctaatgggagtagggtttccagcggatattgcaaaatcagtccaaatggggattgatatgtttgattgtgtgataccaacaaggcatgccagaaatggacatctctttaccagtctgggaataatcaatattagaaattctatatataaagacgatactgataaattagatccaatttgtgaatgttat

SEQ ID NO: 240105 - DNA, 1108 bp, Unknown
  Bacterial polypeptide expressing nucleotide sequence isolated from the Sargasso Sea
aatgaaatttaggataaaaacccagacgaattcatttagaactggagttatagaaactgatcatgggtttattgaaactccagtttttatgccagtaggcacggtcggagcagtgaaaactatatcatctgatgaattagaagctattggctctgaaataattcttggcaatacttatcacttatatttaaggccaggtatggatgttataagtggggcagggggtctacacaattttaattcttggcaacggcctatcttaactgatagtggtggatttcaagttttttcgctatctaatcttaataaaataaccgatgatggagtagaatttcaatcgcaccttgatgggagcaggcatttgtttactccagaatcttgtatggagattcagagaattatcggggcagatatcattatggcatttgatgaatgtcctcctggaaattctgataaacttgtagttaagaaagcagtagaacgtacgaccaattggacgaggcgttgtgcaaaatggataaataataatgcagagatttatgatcattcccaaacactctttccaattatccaaggatctattgataaaaatctgagaagacaaagtgcagaagaattagtaccactttcaaagtgcggtattgctataggtggattagcagtaggtgaagaaaaaacagcaatgtttgagacgattgaattttgtgatgaattacttcccaaagatcaaccaagatatttaatgggggttggaagacccagcgatttaattaagggcgttttacgaggtgtagacatgtttgattgtgtaatgccgacaagaaatggaagaaatggacatatatttacacaaaacggtgtaattaatattaggaatcaaaaatataaaaatgatttctcaccattagattcaaatagtagtcataaatggggtcagatttattcaaaatcttatgtccgtcatttatttaatatcaatgagattttaggacttcgcattgcatcaaagttaaatttggtttttgttcttgatttaatgaaccaaataagagaaaaaattaaattaaatacttttgaatcatgggcaagagaaaaattaaatctattt

SEQ ID NO: 240106 - DNA, 1090 bp, Unknown
  Bacterial polypeptide expressing nucleotide sequence isolated from the Sargasso Sea
aatgaaaaaatttaactggaaagtaataaaaacatcaaaagatactagagctcgattgggtataataaccactcctcatggtaaagttgaaaccccagcatttattttttgtggtaccaagggtgctttaaaatcttgcagtactggtgaagcaaaaaatcataatactcaaataattttatccaatacttatcatttaatgcttcaaccaggtagtgacattatttctcaacatggtggaattcacaatttcatgaattggcaaggaccaatcttaacagacagcggaggatttcaaattttttccttaggtcatggatcagtagcagatgaaattaaaagaaaaaactctaatcgcaaaaaatctcttttaaacatttctgaagaaggggctttatttaaatcctttattgatggtagaaatcatttattaacacctgaaaaatcaattgcaattcaaagagatataggtgcagatctcattcttgtttttgatgaatgcactccgtttcatgtagataaatcttataccgacctatctatgaaaagaagtcacaattggtctattagatctataaacagtttcctaaaaagtaataaatatttaccaatgaaaggatcctcaggaagtcaaaaactttatggcatcattcaaggaggtatttataaagatttaagagatgaaagtattgagtttaatataaattcaaaatttttttttggtttagctattggtggaagtttgggatctactaaagaagaaatgcatgaaatagttgattatactgcttcaagattgggaaatatgcatccgatacatttattaggcataggggatcctgaagatatatggaaattagttaagtcaggagttgatacatttgattgtgtaagtccaacaaggttggctagacatgggtctgctttagtaaaaggtaaaaaaggtaaaataaatattaaaaataataaatttagtgaaaaccttagtccaatagataaaaattgtcattgtagtacatgtaaaaactattcattggcataccttcatcatttattaaaagctgaagaactaattgtttttaattatatt

SEQ ID NO: 240107 - DNA, 1105 bp, Unknown
  Bacterial polypeptide expressing nucleotide sequence isolated from the Sargasso Sea
atgagcgattttaaaatactaaaaacagatggaaatgccagaagaggtaaattaataacctctcatggggagataaatacgcctgcttttatgccagttggtacagctgcaaccgtcaaaggtgtctttacaaaagacctaattgaaacaggctcggaaatccttttaggcaatacttaccatctaatgcttagaccaggatccgaactaataaaagaattcggcgggcttcacaagtttatgaattgggacaaacctatactcacagattctggtggataccaagtattttctctatctaaactaagaaagattagtgaggaaggtgttaagttttcatcacatatagatggaaaagaagtaatgcttactccagaaagttcaatggaaatacaaactaacttaaactcagatattgtaatggcgtttgatgaatgtacagcttttccttgtacccatgatcaagcaaaaaactcaatggaattatctatgagatgggcaaaaagatgcaaagactatttcatagaaagaaataacaacaaattatttggcatcgttcagggaagtgtatttgaggatttaagaaaagagtctgtaaaagctctagaagcaataaattttgatggttatgcagtagggggtcttgcagtaggtgaaagccaagctcaaatgtttgaggtacttgaatttacttcgcctcatctacctgacgacaaaccacattatttaatgggtgtgggcaagcctgatgatattcttggtagtgttgctagaggaattgatatgtttgattgcgtattgccaactagaagtggtaggaatggacaagcctttactcgtcatggaccaattaatattagaaatgcaaaatacaaaaatttagatgatccaattgataaaaactcagataatcctgtatgtaaaaattactctgctgggtatatacatcatttatttaatgcaaaggagatgctaggcggcatgttgctttctttgcacaatatatatttttatcagagtcttatggcagatattagaaaatctatagaggaggatcactttatgtctttttcaaaagaatttcttgaaagctataaatcttagt

SEQ ID NO: 240108 - DNA, 1048 bp, Unknown
  Bacterial polypeptide expressing nucleotide sequence isolated from the Sargasso Sea
aatggcattaaaaaaatttacttttaatgttctcaaaaaagataaatttgcaagattgggcaaaataaatactcacagaggatctatagatactcccgcatttatgcctgttggtacacaagctacaataaaagggtcttttattaacgatattattaaaactaatagtcaaattattttatctaatacataccatttaatgattagacctggcgtaaaaagaattaaaaaaaatggaggtcttcacaagtatatgaattgtaaattaccaattcttacagattccggcggataccaaataatgtctttatctaaattaaacaaaattgattatgaaaaaggtgcaattttcaattcacatattgatggtagtaaatttattttaagtccagaaaaaagtgtaaaaatacaaaaggatttaaattctgatattgtaatggttttagatgagtgccctaaaaaaagcttggattataatttgatatcaaaatctgttgatctttccacatattgggcaaaaagatcaaaaaaagcctttggaattaatagacataaagctttatttggtattgtacaaggtggtttgttcaaagatttaagattaaaatcattaaaagatttaattaaaattggatttgatggatatgcagttggtggcttggcagttggtgatactcaaacagaaatgtttaaagttttagatatattaaaaaataatttgccacaaaataaaccgcgatatttaatgggtgtaggaacaccatcagatattatgggttctgttaaaaggggaattgatatgtttgactgtgttttgcctactcgttctggtagaacaggcttagcgtttacatggaatggaagaattaatataagaaatgctaaatataaaaatgataataagccacttgattcttctattacaaagtttgatcttaacaaatattctaaaaattatataaatcatttatttaataccaatgaaatgcttggtccaatgcttctgacactaaataacattaacttttaccaagagctacatgtatga

SEQ ID NO: 240109 - DNA, 549 bp, Unknown
  Bacterial polypeptide expressing nucleotide sequence isolated from the Sargasso Sea
gatggcattaaaaaagtttaaatttaatgttattaaaaatgataatttttcgagactaggcattataaaaactcatagaggaaatattaatacacccgtttttatgcctgtaggcactcaggctactgttaaagcagtttttctagatgatttaattaatacaggctctgaaatcattctatcaaatacttatcatttaatgttaagacctggattagaaagaataaaatcaattggaggtcttcataatttcatgaattgtccattacctatacttactgactcaggaggttttcaggttatgtctttgtcaaaattaaataaagtagataaagaaaagggtgtaacttttaaatctcatattgatggcaaagaatttatattaagtcccgaagaaagtattagaattcaaaagggtctaaattcagatattgttatggtaatggatgaatgtccaaaaaaatctaatgattataaatctattaaaaagtctatggagttatcaacatattgggcagcaagatcaaagaaagcttttggatcgatacc

SEQ ID NO: 240110 - DNA, 1108 bp, Unknown
  Bacterial polypeptide expressing nucleotide sequence isolated from the Sargasso Sea
atgaaatttactattacagcgacacacggcaatgcaagagcagcagaactaactgttaataaaaaaaagatagatactcctgcctttatgaccattggcacatatggttcagtgaaatccctagatgctgatgatttaaaaaaatgcaacgtagaaataatactatctaatgcatttcatctgatgttaagacctggaacaagtattattactaaatctggcggacttcataaatatatgaactgggatggattaattttaactgattctggaggataccaagtttttagtctgggaaaggaagtaaaggttaataaagatggtgctgaatttaggtctccatttgatggcaataaagtagtgatgacacctgagatatctatggatgtccaaactaaaattaataccgatatcatgatggcatttgatgagtgtataaaatatccatcagatatttatacgactgaaaaatctatggaattatcactcaattgggctgagagatctataaaatcaaactatcttaataaaactctatttggtattgttcagggcggcatgtatcaaaatttgcgtgataaatctcgagaggagcttatagcgatgaattttgacggttatgcacttggaggattatcagttggagagcccccacaactcatgcatgagattatcgaagttaatgcgccaaagttgcctgtgaataagcctcgatatgttatgggaataggaaaaccacttgatattgcctatgctgtgcgatcgggagtagatatgtttgattgtgtcattcccacaagaaatgccagaaatggacatctctttacctcagagggtatcaaaagaattagaaatgcaaaatataaagatgatatgtcgcctattgataagaaatgtggctgttatacatgccaaaactacagtatttcttatataaagcacttagatagatgtaatgagatactagctgcgagacttatgacaatccataatgtatacttttatcaaaatttgatgagacagttgagaactgccatcgtaaattcatcccttgatgaattaattaatcaactcgaaaatgattacgaagaggtaaaaaatgattgaa

SEQ ID NO: 240111 - DNA, 916 bp, Unknown
  Bacterial polypeptide expressing nucleotide sequence isolated from the Sargasso Sea
aatgattagacctggtgtcgatcgaatttcatctgctggtggactgcatgaatttatgaattgtagtttaccaattttaactgattcaggtggtttccaagtaatgtctctttctaaattaaataaaattgatagagaaaaaggtgcgatatttcaatcacacatagatggaaaaaaatatgttttaagtccagaggaaagtataaaaattcaaaaatctttaaattcagatattgttatggtcatggatgaatgtcctaagaaatccaacgatcacgataaaataaaaaaatctatggaactttctttagattgggcccaaaggtctaaaaatgcatttgggttaaatccgcacaaggctatttttggaattgttcaaggcggtatatttgacgatttaagaaatatttcattaaaaaaattaactgatataggttttgatgggtatgcaataggtggattagcagttggggatacccaagaagaaatgttcaaagtacttgataatttaaaaaatcaactaccaataaataagcccagatatttaatgggtgttggtacaccatctgatattttgggagctgtcaaaagaggcgttgatatgtttgattgcgtgttaccgacaagatcaggcaggactggtttagcctttacgtggaatggcagaattcagataagaaattcaaagaatcaaagcgataattcgccgctagactcaaatatttctaaatttaatctaaataaatattctaaaaattatttacaccatttatataatacaaatgaaatgttggcttcaatgatacttacattaaacaatatcaatttttatcaagaacttatgtttgaaattagaaaaaatataaaaaaaggaacttttgaacaattttataataagtactttaatttgttataa

SEQ ID NO: 240112 - DNA, 718 bp, Unknown
  Bacterial polypeptide expressing nucleotide sequence isolated from the Sargasso Sea
aattctgatattgttatggcttttgatgaatgcaccaattatccaagttcacttgatgaagcggaagaatctatgaatctaactcatagatggacaaaaagatctgttgactatttcaataaaaataaaaatggacatttgcttttcggcatagtgcagggcggaatgcataatgaattaaggttaaagtcacttgaatttatgaatagtatgaaacttgatggaattgcacttggaggtttaagcgtgggagagactaaagaggaaaagacaaaagttcttaaatttcttgctccacatcttcaaattgataaacctcattatgtaatgggtgttggtacaccagaggagattgtagagggtgttagatatggaatagatatgtttgattgtgtaatgccaactagaaatgcaagaaatggatttttatatacaagtaaaggaattttaaaaataagaaattctgaacataaaaactctactaaacctatagatgaaaattgtgacagttatacaaatagaaatttttctcgtgcttacctccatcatttagataagtgcaatgaaatattagctagtactttgatgagcatacataatttatcttactttcataaattaatgtctgatataagaaagtctctagaagaaaataaatttgaagaatttcttgattccttttacgatatgaggagcttaaagaagccaaaactatagg

SEQ ID NO: 240113 - DNA, 561 bp, Unknown
  Bacterial polypeptide expressing nucleotide sequence isolated from the Sargasso Sea
aatgtcattcaaagtcttaaataaatctagttacgctagaagaggggagttggtaactaaaacttctaagatacaaactccagtttttatgcctgttggtacatatggcaccgtgaaaggcctaacccctgaacatctcaaagatataggttttgaaataattttaggtaacgcattccatctatatctaaggccaggactagatgtaataaaagaatttggtggattacatgatttcatggcatggaatagatcaatacttacagattcaggaggatttcaggtatggagcctgcaagaattaagaaaaataactgaagaaggagttaaatttaaatcgccactagatggttcagagatatttcttgctccagaagattcaatccaaacgcaattaacattaaacgcagatatcataatggcctttgatgaatgcacagcttaccccagtacccttaaggaagctaaagaatctatggatcttactcatagatgggcatctagatgtaaagaatatttcaataagataaaaaagagcatctattatttggcatcgttcaa

SEQ ID NO: 240114 - DNA, 1111 bp, Unknown
  Bacterial polypeptide expressing nucleotide sequence isolated from the Sargasso Sea
atgatcgagtatcaggtttttcatcaggatggcaatgcacgcgcaggaaaattggactccccccacggcagcatcctgactccgatcttcatgccggtcggtaccctgggaacggtcaaagccgcaactccggaagaactgaaaaaacttgggactcagattcttttaggaaacacctaccaccttcatttgcgtccaggagatgaactgattcgtaaactcggcggattacatcagttcatgaattgggatggacctattctaaccgacagtggaggatttcaggttttctcccttgccaaactgctcaaatgtgaagaagagggggtgatcttccgaagtcacatcgacggtcgggaaatcaagatcaccccagaatcttcgattggcatccagcagaatcttggctccaccatcatgatgtgctttgatgaatgcctggaattgccggcaaaacgtgaaagaatccaaagctctctagaactcacaacacgctgggcaaaacgatgcaaggactcccaaacttctgaccaggctctattcggcatcatccagggagggggggaagaagatcttcgtgaagaaagtcttcagcaacttcttgaaatcggcttcgatggatacgccatcggaggcttaagtgttggtgagagaaatgaagatatgtatcgggtcacacgccacatagctcccctaatgccatcagaccgtccgcgctatctgatgggggtgggagaaccccgagatctgttggagggggttgaagcaggagtagacatgttcgactgcgtgcttccgacacgaaacgcgagaaacggctccctttttaccagccggggaaaagtttccatcaaacaggcccgctaccgcgaagatccggagcctcttgacccagattgtatctgtgaaacctgtcagcattacagcaaagcctacctcagacatctttatctttcaggagaaatcctcgggatgcgcctgaacactctgcataatctccattttttcctgaatctgatgcggaacgcgagagaggcgatccttgaaaaccgcttttctgagttcaaaaaggacttcctggaaaaatatcaacaggaaggatcaatgtgat

SEQ ID NO: 240115 - DNA, 1075 bp, Unknown
  Bacterial polypeptide expressing nucleotide sequence isolated from the Sargasso Sea
tgatggttacgcaagattaggaaaaattaatacacatagaggtccaatagacactcctgcatttatgcctgtcggtacacaaggtactgttaaaggaacattcataagggatattgagaaaacaggaagccaaattattctatcaaacacctatcatttaatgatcagaccaggtgttaaaagagttaaaaaatttggaggtcttcacaagtatatcaactgcagacttccaattttaacagactctggaggatatcaaattatgtcactttctagattaaataaaatagacaaaaaaaaaggtgcaatttttaattcacatatagacggttccaaatttatattaagtcctgaggaaagtattaatatccaaaaaaaactaaattcagatatagtaatggttcttgacgaatgccctaaaaaaaatttaaattataaatttattcagaaatcagttgaattatctacacactgggctgcaagatcaaaaaaagcatttggcataaataaacataaggctttatttgggatagtccaaggtggtcttttcaaagatttaagattgaaatcattaaatgatttaaaaaaaattggttttgatggatatgctataggtggtctagcagttggtgatactcaagacgaaatgtttaatgtgcttgattatttaaaaaatcatatgccaaaagataaaccaaggtatctaatgggagtagggacgccatcagacattttaggtgcagttaaaagaggtattgatatgttcgattgtgttttaccaactagatcaggtagaaccggtttagcttttacatggaacggtcgtgtacatattcgaaatgcaaaatataaaaatgataaaaaacctcttgatagttctgtcaaaaaatttgatttaaataaatattctaaagattacttaaatcatttatttaatacaaacgaaatgcttgggtcaatgattcttacattaaataatattaatttttatcaagaacttatgtttgagataagaaagaatataaaaaaaggtactttttccaaattttataataaatattcgagaaagttgtaa

SEQ ID NO: 240116 - DNA, 952 bp, Unknown
  Bacterial polypeptide expressing nucleotide sequence isolated from the Sargasso Sea
ttgaaattctcagttttatctgaagataagaattctctagctagaacaggcttgatcgaaacagatcattccacaattgaaacaccagtttttatgccagtaggaacccatggtgttgtaaaaacgctatctccagatgacttaaatgctatgagtgttcaaataatgctttcaaatacctatcatttatatttaagaccaggaaccgagattatacatgaaaatgaagggttgcataaatttttaaattgggataaaagcattctaactgatagtggtggatatcaagtattctctttaagcaatatgaatgaaataactagcgatggtgtaaattttagatcgcatttagatggaagtgaacatttttttactccccaaaaatcgatggaagttcaaagacagttaggttctgacataattatggcttttgattattgccctcccgcagattgctctaaaaaagagcttagaagagcatcaactttaactgaaaaatggaccgagcaagcttttaaatatctaaacgataaaacaagcatttatggtcacaatcaaacgcttttcccaataattcaagggggtattaatccagaagaaagattaaaatgtttgaatcaaatgcttccatatgcttcatgtggaatagcaattggaggactttcagttggcgaaaaaaaagaaccaatgcttgatattgttgagttattaggaaaaaatatgcccgtagatcaaccaagatatttgatgggagttggtaagcctacagatttggttaaagcaattttacgaggggtagatatgtttgattgtgtgctgcccgccaggaatgcaagaaatggtcagatattcacacatgatggtgttataaacattatgaatagtgcttattcaaatgatacatcaccaatagataaacatagttcaatagagtatgcaaaaactttttcaa

SEQ ID NO: 240117 - DNA, 811 bp, Unknown
  Bacterial polypeptide expressing nucleotide sequence isolated from the Sargasso Sea
aatgtcattaaaaaagtttacttttgatgttattcaagaagaaaacagctctagactaggtaaaatagaaacacatagaggttctattaatacacctgcgtttatgcctgttggaacacaagcgacgattaaaagtgcatttattgaagacataattaaaacaggcagtgaaataatattatgtaacacatatcatttaatgattagacctggcgcagaaaggattgagcttgcgggtggtctacacgattttatgaattgtaagttaccaatattaactgactcaggcggatttcaagttatgtcattatcaaaatttaataagattgatagagaaaaaggtgcaatatttcaatctcatattgatggtaaaaaatttatattaagtcccgaggaaagtataagaattcaaaaaaaacttaactcggatattgttatggttatggatgaatgtccaaagaatagcaacgattacaaaaaaattaaagaatctatgaaactttcaatgtattgggccaaaaggtcaaaagatgaatttggtttaaatccacataaagctttatttgggattgttcagggagggttatttgatgatttgagaattgagtcattaaatgaactaattaatatagattttgatggatatgccttaggtggattagcagttggtgaaagccaaaatgaaatgtttaatgtcttggataatattaaaaaatttttacctaagaataaaccgagatatttaatgggagttggaactccgtctgatattttaggagctgtaaaaagaggcattgatatgtttgattgc

SEQ ID NO: 240118 - DNA, 1123 bp, Unknown
  Bacterial polypeptide expressing nucleotide sequence isolated from the Sargasso Sea
ttgttaaaaaccgacggcaaagcccgtcgtggccgtcttgtattcgagcgcggcattgttgaaactcctgcatttatgcctgtgggtacttatggcacagtcaaaggtatgacacctgaagaactggacgctacgggagctcaaatctgcttaggcaataccttccatttaatgctgcgtccaggcactgagatcatcaaaaaacatggtgatttgcatgactttatgaactggcacaagcctatcctgaccgactctggtggttttcaggtgtttagtttaggtgagctgcgtaaaattaaagaagaaggtgtgactttccgctcgccgttgaacggcgaaaaaatcatgttaactcctgagcgttctatggaagtgcaacgtgatttaggctcagacatagtgatgatttttgacgaatgtacgccgtacccagccactgagcagcaagcgaaaaagtcgatggaaatgtcgttacgctgggcgaaacgcagtaaagatgcgcacggagataatccatcagcgctgttcggtattatccagggcggcatgtatcctaatttgcgtgatgtttcgctgcaaggcctggaagagattggttttgatggttatgccataggtggtttgtctgtcggtgagccgaaagaggatatgattaaaatccttaatcacactacaggtcagatgccgcagcacaagccacgttatttaatgggtgtcggcaagcctgaagacatagttgaagcggtgcgccgtggtattgatatgtttgactgtgtgatgccaacccgtaatgcccgtaacggtcatttgtttgtcagcactggtgtgattaagatccgcaacgccaaacacaaggacgatccatctgctttagatgcagaatgtgattgctacacttgtaaaaactattctcggtcatatctacaccatctggacagatgcaatgagattttgggcgctcgcttgaataccatgcacaatttgcatcattatcagaagttaatgcagggcttgcgtgcagctattgctgaacaaaaactggaagaatttgtggctgagttttaccagaaacgcggtatggaagtaccgccactggaagcaagccttacagaacaataag

SEQ ID NO: 240119 - DNA, 1105 bp, Unknown
  Bacterial polypeptide expressing nucleotide sequence isolated from the Sargasso Sea
atgagcgattttaaaatactaaaaactgatggaaatgccagaagaggtaaattaataacctctcatggggagataaatacacccgcttttatgccagttggtacagctgcaactgtcaaaggtgtctttactaaggacctaattgaaacaggctcagaaatccttttaggaaatacttatcatctaatgctcagaccaggatccgaactaataaaagaattcggtggacttcataagtttatgaattgggacaaacctatacttacagattctggtggataccaagtattttctctatctaaactaagaaagataagtgaggaaggtgttaagttttcgtcacatatcgatggaaaagaagtaatgcttactccagaaagttcaatggaaatacaaactaacttaaactcagatattgtaatggcgtttgatgaatgcacagcttttccttgtacccatgatcaagcaaaaaactctatggaattatctatgagatgggcaaaaagatgtaaagattatttcatagaaagaaataacaacaaattatttggtatcgttcagggaagcgtatttgagaagttaagaaaagagtctgtacaagctcttgaagatctaaattttgatggttacgcagtaggaggtcttgcagtaggtgaaagtcaagaccaaatgtttgaggttcttgaatttaccacacctcatttacctgacgacaaaccacactatttaatgggtgtgggcaagcctgatgatattcttggtagtgttgctagaggaattgatatgtttgattgcgtattgccaactagaagcggaaggaatggacaagcctttacttgtcatggaccgataaatattagaaatgcaaaatacaaacatttagatgatccaattgataaaaactcagataatcctgtatgtaaaaattactctgctgggtatatacatcatttatttaatgcaaaggagatgctagggggcatgttactttctttgcacaatatatatttttatcagaaacttatggcagatattagaaagtctatagaggaggatagctttatatctttttcaaaaaaatttcttgaaatttacaaatcttagt

SEQ ID NO: 240120 - DNA, 1201 bp, Unknown
  Bacterial polypeptide expressing nucleotide sequence isolated from the Sargasso Sea
aatgaaagattttaattggtcaatcaaaaataagtctaataattcaaatgcaagaactggagtaatatctaccccccatggtgaaattaatacaccagcgtttatattttgtgcaacaaaagcagctttaaaatcttttactacaaaggacgcaaaagagaataattcacagattatattatcaaacacttatcatttaatgcttcaaccaggaagtgaactaatagctcagcatggaggtcttcataaatttacaggttggaatggacctatgttaacagatagtggtggatttcaaattttttctcttggacatggctcagttgctgatgaaataaaagggcgaaaaataaattcaaaaaataaaaaaactttaataaatctgaatgaagagggtgcattatttaagtcttatatagatggttctactcatttgttatctcctgaaaaatcaatagaggttcaaagaaatcttggcgcagacttcatcttagtttttgatgagtgcactccttataatgtagataaaacgtacacatctgattctatgttaagaagtcatagatggtctttaagatcaatcaatacgtttaactctaaacttaattataaacctaaaaatggctcagcaggtagacaagaaatttacgggatcattcaaggtgggatttacaaagatttaagagaagaaagcattgaatttaacaaaggaaaaattaatacttttggaattgctattggtggtagtttagggtcaaataaagatgaaatgaaagatatagttcattttacttcttctaaattagataattctcgtccagtacatttgctaggtattggcgatccaagggatatatgggattttgttgcagatggaatcgatacatttgattgtgtaagcccaactagaattgctagacatggatcagctttagtaaaaggtcaacaaggaaaaataaacttaaaaaatgttaaatataaaaataatttaaaccctatagataatgattgtaattgctatacttgtaagaactttactctggcatatttataccatcttttttctgctcaagaattactaggattacaactgctgactaatcataatatatattttatgaataatcttatgaaagaaattagaagatcaattgataacaatgattttgataatgcaaaaaagaaatggttaaattcttaa

SEQ ID NO: 240121 - DNA, 1120 bp, Unknown
  Bacterial polypeptide expressing nucleotide sequence isolated from the Sargasso Sea
atgtcattcaaagtcttaaataaatctaactacgctagaagaggggaattagtaactaaaacttctaaaatacaaactccagtttttatgcctgttggaacatatggcactgtaaaaggcttaacccctgaacatctaaaagaaataggttttgaaataattttaggcaatgcattccatttaaatctaaggccaggactagaagttattaaagaatttggcggactacatgattttatggcatgggatagatcaatacttacagattcaggaggtttccaggtgtggagcttacaagaattaagaaaaataacagaagaaggcgttagatttaaatcgccattagatggatcagagatatttcttaccccagaagattcaattcaaacacaattaactttaaatgcagacatcataatgacctttgatgaatgtacaacttaccccagcactctcagtcaagctaaagaatcgatggatttaacacatagatgggcatcaagatgcaaagaatatttcaataagcgtaagaagggccatctattgtttggcatcgttcaaggtggaatgcatcatgaattgagagaagaatcattaaattttatgtcagatcaagattttgatggaattgcactaggagggctaagtgtaggtgaatcaaaagaagaaaaaacgaaaattttgaagcacctagcccctttaatgcctgaagataaacctcattatgtaatgggtgtaggaacaccggaagaactggtagaaggtgtcaggtatggaatagatatgtttgactgtgtcatacctactagaaacgctagaaatggttttatatatacatctacaggcattttaaaaataaggaattcagaacataagaaatcaactaaacctatagatgaaaattgtgagtgttatacatgtaaaaacttttctagagcatatttgcatcatctcgataaagccaatgagattttagcaagcactttaatgagtatttgcagtttatatacatttaataagttaatgcaggatatgaggtcagcattagaaaaaaataaatttgaagaattcgttgattccttttacgatatgagggacttaaaaaagccaaaattataga

SEQ ID NO: 240122 - DNA, 814 bp, Unknown
  Bacterial polypeptide expressing nucleotide sequence isolated from the Sargasso Sea
tatgtcactatcaaaattaaataaaatagatagaaagaaaggagctatattccaatctcatatagacggtagagaatatattctaagccctgaagaaagtataagagttcagaaaggattaaattctgacattttaatggtcatggacgaatgtccaaaaaagacaaacgattatgaaaaaataaaactatcaatgaatttatctacagaatgggcattaagatctaaaaatgaatttggaaccaatccaaaaaaagctttatttggaataatacaaggtggattatttgatgatttaagaaaatattcattaaatgaattagaaaaaattggttttagtggttatgcagtcggtggattggcagtaggtgagtcgcaagaagagatgtttaaagttcttgatagtatcgttccccacatgcccaaagataagccaagatatttaatgggagtaggaactccatcagatatattgggtgcagtaaaaaggggtatcgatatgtttgattgtgttatgccgactagatctggcagaacagggttggcttttacttggaatggaagaataaatattagaaattctatgtataaaagtgataatagtccattagatgaaaaatgttcaaatttagatttgaataagtattcaaaaaactacttaaatcatttatttaatacaaacgaaatgttaggttcgatgttacttactttgcataatataaatttttatcaagagttaatgggtcaaataagacatcatataaaaaatggcagtttttctaattttcatgatcaatatttcaataaaatataa

SEQ ID NO: 240123 - DNA, 748 bp, Unknown
  Bacterial polypeptide expressing nucleotide sequence isolated from the Sargasso Sea
ttatcacctgaaaaagtaatacagattcaaatggatctgggatcggatgttgcgatggcttttgatcattgtcctccgcatacagctaacgaaaatgatattgaggactctttaaaaagaactcattcatggttgcaaaaatgtgttgagactcatcagaaatccaatcaagcattatttggaatagttcaaggtggtaagtatccgagattgagagaatatagcgcaaaatatacaagttcttttgatctgcctggcatagcagtgggaggtgtaagtgttggcgaggcagtcgaagaaatacatagtgtaattaattacgtcccgaaattcttaccaataaataaaccaagatatttaatgggaattggctctttaagagaaatttctttagcggttgctaatggattcgatatatttgactgtgttttgcctacaagactaggaaggcatgggactgcattttttaatgatgaaagattcaatttgcgaaatgctcgatttaaaaatgacttttctcctattgacaaaacttgtaaatgcgaaacctgtaaatcctattctcgagcatatttgcatcatctagttagaaatgacgaaatattaggcctaactctaataagtttgcataatattgctcacttaataagatttacaaatgcaatttctaccgcaattagagataattgttttacaaatgatttcgctccttggaaaacatcctctattgctcaccatacgtggtaac

SEQ ID NO: 240124 - DNA, 1195 bp, Unknown
  Bacterial polypeptide expressing nucleotide sequence isolated from the Sargasso Sea
atgacaaaattttcatggcagattacacaccaatcgaaaaaacataaagctagaactggcatattaactacaccacatggcaaaattaataccccagcatttattttttgtgcaactaaaggtgctttaaaatcatcaaccacaagtacagctaaagaaaataatactcagattattctatcaaatacatatcatttgatgcttcagccaggaagtgacttgattgcaaatcatggtggattgcataaatttttaaattggaacaaaccaatgttgacagatagcggaggatttcaaattttttcattaggtcatggttcagttgcagatgagataaaaggaagttctaatattaaaagaaataagacactgttaagtattagtgaagaggggagtttattcaaatcatatcttgatggatcatttaaatttttatcgccagagaaatcaattgaaattcaaagaaatcttggtgctgatttaatactagtatttgatgaatgtactccttttcatgtagataaatcttatactgaaagctcaatgagaagaagtcatagatgggcaactagatcattaaatcgtttcaattcacatattaaatttaaacctaattttggttcagcaggagaacaaaaactatatagtattgttcagggaggtatttatgaggatcttcgagaggaaagtatcgatttcaatttaaataaaattgatacatttggtatagccattggaggtagtttaggatcatcaaaggaagagatgtacaaagttgttaattttaccgctccaagattagggaataatcacccaatacatctattagggataggagatccaaaagatatttggcatttagttaaaaatggcattgatacatttgattgtgtcagtccaacaagactagctagacatggttcagcattaattaagggaaaagtaggaaagaaaaatattaaaaataatgaattttctaatgatttatcaccaattgataataagtgtagttgctcaacatgtaaaaactattcgttagcatacattcatcatttgtttaaagcaggtgaacttctgggtctacaacttattactgctcacaatatttattttatgaatgaattaatggaattaataagaaactctataaataatgactctttggatgaaaatgaagaagagtggtttagttaat

SEQ ID NO: 240125 - DNA, 458 bp, Unknown
  Bacterial polypeptide expressing nucleotide sequence isolated from the Sargasso Sea
aagattgaccattcttgagcatcttgcaccacaactcccaaaaacattgcctcactatctgatgggtgttggaaagccagaagatattgtcgaagctgtttattatgggatagatatgtttgattgcgtgcttccaactcgcaatgcaagaaacggccaattgattacttcttttggtgaattgaatataagaaatgctgagcataaaaattcttctgagccaatcgattcagattgtgcctgcaaggtatgcaaaaattattcaagagcctaccttcatcatctggataaaactaaagagattttgggatcaattttatcgagttatcacaatatcttttactatcaaactttgatgtcgcagataagggaagccatcgaaacagaatcattcgctaagttcataaaagacttttataataagcgacaaaaatcagtgcctgagcacttaaagtaag

SEQ ID NO: 240126 - DNA, 574 bp, Unknown
  Bacterial polypeptide expressing nucleotide sequence isolated from the Sargasso Sea
actgttcggtattgttcagggcggcatgtatccggaactgcgccttcgttctctggaaggtctcactgacattggctttgatggttacgccgtgggtgggctgtcagtgggtgagcctaaaggcgagatgatggcggtgctcgatggtctggcggaacacttaccagcggaaaaaccccggtacttgatgggggtaggtacacctgccgatctgctggaaggcgctaggcgtggtatcgatatgttcgactgtgttatgcccacccgaaacgctcgcaatggccacctcttcaccagtaccggtgtgctgaagctgcgcaacgccaaatacaagaccagcaccgaaccggtggacgcgaactgcgactgttatacgtgtgaaaacttttcccggggatatctcgcacaccttgataagtgcaacgaaattttgggctcccagttggctaccattcacaacttgcgtttttatcaaaagcacatggcggctattcgacaagcgattgagtcgggtgaattggacgaattcgctcggaagttctatgccgcgcaggccgaggagggattaggatga

SEQ ID NO: 240127 - DNA, 1105 bp, Unknown
  Bacterial polypeptide expressing nucleotide sequence isolated from the Sargasso Sea
aatgactgattttcatattacccatgaagatggcaatgcccgtagaggtaaactcaatacaaaaaatggcgttattaatacacctgcgttcatgcccgttggaactgcggcaacagtaaaagctatatttacaaaagatttatacgaaacgaactcggaaataatattaggaaacacgtatcacttaatgctaagacctggatccgctcaaattagagaatttggaggtcttcataaatttatgaattggaataaacccattttaactgactctggcggttatcaagtatactcattgtcaaatcttagaaagttatcagaagagggtgttgagttttcatcacacattgatggaacgaaaatatttgtctcacctgaaaaatctattgagatacaaactgatttaaactcagatatagttatggcatttgatgagtgtactccttatccagctgagtatgacgaagcaaaaaaatcaatggaattgtcaatgaggtgggcaggtaggtgtaaggagtattttaaagatcataatacaaataaattgtttggcattgttcaaggaagtacttacgaaggtttaaggcatcagtctgttagtttattaagtgatattggatttgatggttacgcagtcggaggtttagctgttggagaaactcaaactcaaatgtttgatgtgctagattatacggtttcacagcttccaatcgaaaaacctcattacttaatgggggtaggtaagcctgatgatattattggaagtgttgctcgtggtattgatatgtttgattgtgtgttgcccacacgcaatggacgaaatggacaagcttttacaaaatcaggaccaattaacataagaaatgctaaatataaaagtttagatgagtcaattgatccagaaagcaacaatccgatttgtagagattactctgctggctatattcatcatttgtttaatgcaaaagaaatgctaggaggcatgctcttatctttacataacatatatttttatcaagaaatgatgagcaatataagaacttcaattgaaaataatgaatttgaaatatttagagctgattttttatctaaatacttagattaa

SEQ ID NO: 240128 - DNA, 1003 bp, Unknown
  Bacterial polypeptide expressing nucleotide sequence isolated from the Sargasso Sea
aatggcattaaaaaaatttgcctttaacgttttaaaaaaagataaatttgctaggtgtggtttaatcgagacacatcgtggaaatatacaaaccccagcttttatgcctgtaggaactcaggcaactgttaaagcttgcacaatagatgatattaaaaaaacaggttctgaaataatactttcaaatacttatcatttaatgatacgtcctggtgttgaaagaattgaatctgctggtggacttcataattttatgaattgtgatttacctatcttaactgactctggtggttttcaagtaatgtctctttcaaaattaaataaaatagatagggaaaagggtgcaatatttaactctcatgttgatggtaagaaattttatttaagtcctgaggagagcatcagaatacagttaggtttaaattcagacatagtaatgattatggacgagtgcccaaaaaaaactaatgattatgacgttattcaaaaatctatggatctttcacttaattgggccgaaagatctaaagtagctttcgggaacaatcctcacaaagctttgtttggaattgttcaaggaggtctatttaaagatttaagactcaaatcacttgaagagttagttaaaattggttttgatggttatgctattggaggattagcagttggagagacacaaaatgaaatgtttaatgttttagatgatataaaagaatatttacctatagaaaaacctcactatttaatgggtgttggaacaccatcagatattttaggtgctgttaaaagaggtatagatatgtttgattgtgtgttacctaccagatcaggaaggacaggtttagcatttacatggaatggaagggtaaatattaaaaataataagtatcaaaatgataatactccacttgatcctagttgtgaaaatcttaacttaaacaaatattcaaaaaattatctaaatcatttatttaatacgaatgaaatattagcttcaatgtta

SEQ ID NO: 240129 - DNA, 1132 bp, Unknown
  Bacterial polypeptide expressing nucleotide sequence isolated from the Sargasso Sea
atgagaagtaatatttataaacttataactaaagatggtcttgctagaagaggtgaggtaaaaactgctcatggtaaatttcaaacccctaccttcatgcctgtaggaacttacggagcggttaaatctcttagtccagaaactttagaagtgttacaagctgagatcattctttctaatacttaccatctcatggaaaggcctggagttgagataataaaatctcatggaggcttacatcggtttatgggttggcaagggcccatattgactgattcgggaggctatcaggtatttagtctgtctaaaaagaggaccataagcgaagagggagtaaagttcttttctccactaaatggcgataaaaattatttaacacctgaatcatgtatgcaactgcagcttgattatggtgtagatatagcgatggtgttagatgactgcactccctttccggtaagtaaagaaacggccaaggaatcaatgaacttatcacttagatgggctaagcgttgccgctctgcttttacatctgacaaatcttctctttttggaataattcaaggaggtatttttgatgatctcagagaagaatcattagaaggcttaatgaacattgattttgaaggttatgctattggaggactttcagttggtgagcccaaaatggaaatgcaaaaggttattaataacatcgttcctaaaatgcctgaagacaaacctagatatttaatgggagtaggaacacctttagatatagtaagagcggtacaactaggcgtggatatgtttgattgtgttattccaacaagacatgcacgaaatggttatctctacacctcaaaaggaatagttaaaatcagaaatagtgagaataaagataaccttgctcccattgatgacaattgctcctgttatacttgtacaaatttttcgagaagttatctgcatcacttggataaaacaaaagagatgcttggatcaacactcaatacgattcacaaccttcattactatttaaatcttatgagaaatttgcgactatctattgaacaaggtacattgcaaacctttatcaaagaaattgaagatacttggaatattaatgataatcccaacatagataattaag

SEQ ID NO: 240130 - DNA, 955 bp, Unknown
  Bacterial polypeptide expressing nucleotide sequence isolated from the Sargasso Sea
taacacatatcatttgtatttaagacctggaacaaaaataattagaaagattggtggtttacacaaatttatgaaatgggacagacctattttgactgattctggtggatatcaagtttattctctatccaataatagaaaaattaaagaagaaggggtaaattttcaatctcatatagatggatcatatcacttgtttactccagagaaagcaattcaaattcaaagtgaaattggagcagatataattatggcttttgacgaatgtattccttatcctcttgaatatcaaaaaacaaaaaaatcaacagatatgacacatagatggctagataggtgtatcgaggaaaataaaaaacaaaaatttaaatataattatcaacaatatttgtttcctattgttcaaggaggagtatacaaagacttaagaaagttatcagctgaatatgttgcagaaaaaaatttatcaggtaatgcaattggtggactttcggtaggagagccaatagaggatatgtatgcaatgactgagttaacatgcgatattttaccaaaagacaaacctcgctatttaatgggagttggtactccaataaatattttagagtgcatagcaaaaggagttgatatgtttgattgtgtaatcccaactagaaatggaagaaatggaacattatacacttcaagaggaattataaacataaaaaacaaaaaatgggaagatgatttttctcctattgatgaatttaattatagttttgtgaatgtagattattcgaaagcttatttaagacatctttttactgttaatgaaattttaggaaaacaaatagctacccttcataatttatcttttttcatgtggttaatggaagagtcgagaaaacatattttagagggggattttaacagctggaagaataagatgataaaacaaatggatcaaaaaaattag

SEQ ID NO: 240131 - DNA, 419 bp, Unknown
  Bacterial polypeptide expressing nucleotide sequence isolated from the Sargasso Sea
catgctgcagttcgaactcctcaaaaccgacccctccagccacgcacgccgtggccagctcacgctcaaccatggcgtggtgcagacccccatcttcatgcccgtgggcacctatggcaccgtcaagggcgtgatgccgcgcagcctgcacgacatgggcgcgcagatcatcctgggcaacacctttcacctgtggatgcgcccgggcctcgatgtgatgcagagctttggcggcctgcacggctttgaaaagtgggacaagcccatcctcaccgactcgggcggcttccaggtctggagcctgggggccatgcgcaagatcaccgaagaaggcgtgacctttgccagccccgtcaacggcgacaagctcttcatgtcgcccgaggtgagcatgcagatccagaccacgctcaactccg

SEQ ID NO: 240132 - DNA, 1114 bp, Unknown
  Bacterial polypeptide expressing nucleotide sequence isolated from the Sargasso Sea
aatggcattaaaaaattttgcctttaaagttttaaaaaaagataaatatgctagatcaggtgttatagaaacacatcgtggaaatatagatactccagcttttatgcctgttggtacgcaagccactgtaaaagcatgcacaattgacgatataaaaaaaaccggttctcaaataattttatctaacacctatcacttaatgataagacccggtgtagaccgaattcaatctgccggtggtttacatgaatttatgaattgtgatttaccaattttgacagactctgggggttttcaagtaatgtctctctcaaaactaaataaaattgatcgagaaaaaggtgccatttttaattcacacgtggatggtaaaaaattttatttaagccccgaagaaagtataagaattcagttaggtttaaattcagatattgttatgattatggatgagtgtccaaaaaaaacaaacgattataatttaattaaaaaatctatggatctctctttatattgggccgaaagatcaaaaaagtcatttggcaaaaatccccataaagcactatttggcatcgttcaaggagggctttttaaggatttaagacttaagtcattaaaaaaattaattaatataaattttgatggttatgccttaggtgggcttgctgttggtgagactcaagtcgaaatgtttaaagttttagacgatgttaaagaatttttacctgacgaaaaacctcattatttgatgggtgtgggtacaccatcagatattcttggtgctgttaaacgtggtattgatatgtttgattgtgttttaccaactagatctgggagaactggccttgctttcacctgggatggaagaataaatattaaaaataataaataccaaaacgataatacaccacttaattctaattgtacgaatttaagtttgaataaatattctaaaaattacctaaaccatctctttaatacaaatgaaatactagcatcaatgctactgtctctgcacaatattaacttttatcaggaattaatgtcttctatcagagacaatatagaggcaggtacattcgataaatttcatgataaatacattgataagttgtag

SEQ ID NO: 240133 - DNA, 397 bp, Unknown
  Bacterial polypeptide expressing nucleotide sequence isolated from the Sargasso Sea
atgaaatttaatatttctaaaacacaaggttttgcccgaagaggagttatgcactttgaaaggggtgaaatacagacacctgcattcatgccagtaggaacgaacggcaccgttaaggctcttgagattgagaatatcttagaaacaggatcagaaattattttagggaatacttttcatctgatgctaagacctggagatgagttaattaaagatgcaggtggcctgcacaagtttatcaactggtccaaacctattcttactgattcagggggtttccaagtttggagtttaggtgagatggcaaaaatttctgaagagggcgttcattttcagtcaccttatgatggcaggaagatagaacttacgccggagcgctctatcgaaattcaaaata

SEQ ID NO: 240134 - DNA, 844 bp, Unknown
  Bacterial polypeptide expressing nucleotide sequence isolated from the Sargasso Sea
tttttcgctagccaagttaaatgatatatcagatgacggtgttcactttcaatctcacttagatggtagcaaacattttcttacccctgaattatcaatgaaaatccaaaggaatttgggatctgacattataatggcttttgatgaatgccctgatggaaaagcagacagaattttaattgataaagcagtgcgcaggagtacgctatggtttaatagatgtaataagtatttaaatgacaacccacctctttatgattgggaacaaacgcttttcccaattattcaaggaggaattttccctgatttaagaaagaaaagtgcaaatgaactcgtgtcatcttctaattgtggaattgcaattggtggattagctgtgggagaagaaaaaaaggcaatgaatgatattgtttcattgatggatgaaatattaccaaatgaacaaccacgttatcttatgggagtaggtagaccaacagatttggttcaatccattaaatcaggaattgatatgtttgattgcgttttgccaacacgtaatgcccgtaatggtcaattattcacaagcgttggaataataaatattgggaataataagcataaagaatcatttgaaccaatagatccagattgtagctgctatacttgtaaaaatttttctagggcatatttgcgtcatttgtttaatattaaagaaatggttgcttttcgtttggccactatccataatttgacctattatatgacactaatgaaaacaataagaaaaaatattgaattaggaagtttttcaaaatgggctgatgcttttctatctgaaatgataaaacataaaggtatgtga

SEQ ID NO: 240135 - DNA, 1114 bp, Unknown
  Bacterial polypeptide expressing nucleotide sequence isolated from the Sargasso Sea
gatggcattaaaaaattttgcctttaaagttcttaaaaaagataagtttgctagatcaggtgttatagaaacacatcgtggtaatataaacacaccagcctttatgcctgttggtacacaagcaaccgtaaaagcttgtacaattgatgacataaaaaaaacaggttctcagataattttgtctaacacttatcatctaatgattagaccaggtgttgaacgaattaaatctgctggtggtattcataaatttatgaattgtgatttaccaattttaacagactctggtggtttccaagtaatgtcactttcgaaattaaataaaattgatcgtgaaaaaggagccatatttaattcacatgtagatggtaaaaaattctatttaagtccagaagaaagtataagagttcaactagggttgaattcagatattgttatgattatggatgagtgcccaaaaaaaactaatgattatgatttaataaaaaaatctatggatctatctttgtattgggcagaaaggtcaaaaaaggcatttggtataaatcgacacaaggctctatttggtattgtacaaggagggttatttaaggatttacgaattaagtcattaaaagaattaatgaatataggttttgatggttacgcattaggtggtcttgctgttggtgaaactcaacaagaaatgttttcagttttaaatgatgtaaaagaatatctgcctgataataaaccgcattatttaatgggagttggtactccgtctgatattcttggagctgttaaacgtggtattgatatgtttgattgtgttctaccgactagatctggaagaactggacttgcctttacttgggaaggaagaataaatattaaaaataataaatatcaaaatgataatacaccattagattctaattgtgataatttgaccttgaacaaatattctaaaaattacctaaaccatctttttaatacaaatgaaatactagcatcaatgctattgacactgcacaatatcaacttttatcaagaattaatgtcttctattagagataatatagaatcaggtacgttcgataaatttcatgataaatacatagataagttgtag

SEQ ID NO: 240136 - DNA, 1042 bp, Unknown
  Bacterial polypeptide expressing nucleotide sequence isolated from the Sargasso Sea
catgaagccagggtttgccttccaactcgatgcaacaaacggcgatgccagggctggcatgcttgcaacccctcatggaacagtgcccacgccattgtttatgcccgtaggaacgatggccgcagtcaagggcgttgaggttgatcgtgtgcgggagactggtgcaaagatggtgcttggcaatacgtatcacctgcacctgagaccaggtgaagcgattgtttcagaaggaggaggattagcaaaatttatggggtggggagggccaacgctcacagactcaggaggattccaggttttttcccttgctcaacaagtacatgtcacggatgaaggagcattctttcgttcgcatgttgatggtgccgcagtggcactcactcctgaggcctctatggaaattcagcagagattgggtgctgatattgttatgcaacttgatcatgttgttcctctgccaaatgatcgtgatatcgttgcagatgctatgcgtcgctcactgcaatgggctcaacgctgccaagatgctcatgacagaccagatcaggtcttatttgctattgttcagggagggcttgatttggggctcaggagggaaagtgctgagcagcttggggagatgggttttcatggatatgccgtcggtggactgtcagtgggggaaggagcagaggccatggatatgacgctccgtggcacactgccgcacttgccaatcaatcgccctcgttatcttatgggtgtgggacaaccgagagatattattgaggcggttgccgcagggatcgatatgtttgattgtgtgctgccaacacgatgtggccgtactggacttgcgtatacattcgaaggtttggttcgaatcaaaaatgctcaatatgccagagagaaaaagccactcgaagaagggtgtccgtgcgttgcctgtcgtcatagtgtcagttatttgcggcacctttttcttgcgaacgaaatgcttgggccaatcttgacgtcgattcataacctcactttctaccagcgactcgtaggacggcttcgc

SEQ ID NO: 240137 - DNA, 499 bp, Unknown
  Bacterial polypeptide expressing nucleotide sequence isolated from the Sargasso Sea
tgcaattggaggtctttcggtgggcgagcctaaggaagaaatggaaaaagttgtagattttattacgcctaaaatgcctgaagacaagcctaggtatttgatgggggtaggaacgcctttagatatagtaaaagcagttcgatcaggtgtagatatgtttgattgtgttattccgacaaggcacgcgcgcaatggttatctgtacacttcaaaaggaatagtaaaaataagaaatagtgagcacaagaacagccttgaacctcttgatgaagcctgctcttgttatacttgtagtaattttacaaggagctatttacatcacttagataaaactaaagaaatgcttgggtctacacttcagacgattcataatctgcatttttatttaagtcttatgagaaatttgcgactatcaattgaaacaggtacattgcaaacctttatcagtgaaattgaagacacttggaataattttgataaacccaatatagttaagtaa

SEQ ID NO: 240138 - DNA, 964 bp, Unknown
  Bacterial polypeptide expressing nucleotide sequence isolated from the Sargasso Sea
catggtaggaattcacaattttatgaattggcaaggaccaatcttaacagacagtggaggatttcaaattttttccttaggccatggttcagtagcagatgaaattaaaagaaaaaactctaacagtaaaaaatctctactaaacatttctgaagagggggccttatttaaatcttttattgatggtagaaaccatttattaacacctgaaaaatcaattgcaattcaaagagatataggtgcagatctcattcttgtttttgatgaatgcactccgtttcatgtagataaattttatactgatcaatctatgagaagaagtcacaattggtctattagatctataaacagtttcctaaaaagtaataaatatttaccaatgaaaggatcttcaggaagtcaaaaactttatggcatcattcagggaggtatttataaagatttaagagatgaaagtattgagtttaatataaattcaaaaattttttttggtttagctattggtggaagtttgggatctactaaagaagaaatgtatgaaatagttgattatactgcttcaagattgggaaatatgcatccgatacatttattaggtataggggatcctgaagatatatggaaattagtcaagtcaggggtagatacatttgattgtgtaagtcctacaagattggctagacatggatctgctttagtgaaaaataaaaaaggtaaaataaatattaaaaataataaatttagtgaaaatttaaatccaatagataaaaattgtcattgtagcacatgtcaaaattattccctatcttaccttcatcatttgttaaaagctgaagagctaattgttttaaattatattactactcacaatatatattttatgaattctctaatgaaatatattcgtgaaagtattaaagaagataaaatacttgaagctgaaaaaaattggtattcagactaa

SEQ ID NO: 240139 - DNA, 1066 bp, Unknown
  Bacterial polypeptide expressing nucleotide sequence isolated from the Sargasso Sea
aatggcattaaaagattttgcttttagtgtgttaaacaaagataaatacgctagacatggtttaattgaaacccatagaggcaatatcaaaacacctgcgtttatgccagtcggaactcaagcaacagttaaagcttgcacaattaatgatataattaaaacaggttctgagattattcttggaaatacttatcacttaatgattagacctggtgttgatagaattcaaaaagctggtggtttacataaatttatgaattgtgatttgccgatacttactgattcaggaggctttcaagtaatgtcattatctaaattaaataaaattgatagagaaaaaggagctatttttaattcacacgtagatggaaaaaaattttatttaagtcctgaggaaagtattaagattcaacttggattgaattccgacattgttatggttatggatgagtgccccaaaaaaactgatgattataaattgataaaaaaatctatggaattatctctatattgggccaaaagatcaaaaaccgcctttggtaaaaatccgcacaaagcattatttggaataatacaaggagggctttttaaagacctaagattaaaatcattacatgaattagaaaaaattaattttgatggttatgcaattggtggattagctgtaggagaaacccaaaaagaaatgttcacagttctagataatattaaagattatttaccaaacaataaaccgcattatttaatgggagtaggtactccatctgatattttaggtgctgttaaaagaggtattgatatgtttgattgcgtgatgccaacaagatcgggaagaacaggattggcttttacttgggatggtagaattaatataaaaaacaataaatataaagatgataatactcctcttgatgataattgtagaaatctcaatctgaataagtattcaaagaattatttgaatcatctctttaatactaacgaaattttaggttcaatgattttaactttacataatttaaacttttaccaagagttaatgactgcaataagaaagaatatttga

SEQ ID NO: 240140 - DNA, 967 bp, Unknown
  Bacterial polypeptide expressing nucleotide sequence isolated from the Sargasso Sea
ttggggaatacatatcatctgtatttaagacctggccatgaaattattcattcagcgaaaggcctccattcatttatgaactgggataaaagtatcttgacggatagtggaggttatcaaattttttctttagctaagcttaataatatttctgatgagggggtagaatttcaatcgcacatagatggaagttcccattttctttcaccagaactttcaatggatatccagaggcatcttggatcggatattatcatggcatttgatgaatgccccgccgcaaatgttgataaatcaataatctctaaatcagtagatcgtacatttaaatggacagaaaaatgttataaatatcttaaagagaatgatcctatatattcttggaatcaaaccttatttccaattatccagggtggaacttttaaaagcgaacgaagaaaaagtgctgagttacttattccatttgcagattgcggagttgcaattggtgggctagcagttggggaagataaatcatcaatgtttgacactattgctctattagatgaattattaccaaaagatcaaccaagatatcttatgggagtcggtcgccctaccgatttaattaaagccattcaacttggggtggacatgtttgattgtgttttgccaacaagaaatgcaagaaatggtcaattatttactagcgatggaataattaatattgaaaatagtaaatataaaaattcatttgatccccttgatgtgaattgtaactgctatacctgtttgaatttttcgagatcatatttaagacatttatttaatattaaagaagtcttggggttgcgtttagccactatacataacttaacttattataataatttaatggcaaccgtaagaaagaaaattaaatcagaagagtttaacaattggtctcaatcatatttaaattcaatggcagatcatgaaaatatgtaaa

SEQ ID NO: 240141 - DNA, 670 bp, Unknown
  Bacterial polypeptide expressing nucleotide sequence isolated from the Sargasso Sea
atgaaatttaaagttaacaatacttcggaaaatgctcgagaggcagaaattcataccgaaaggggagttattaaaacccctgcttttatgcctgttggtacaaatgggactgtaaaaggacttacgatcgatgacttgaatgaaacacactcacaaataatccttggtaatacttttcatttaatgttgaggcctggcgataagttgattaaagaattgggcggattacataagtttattaattgggagaaacccattctaactgactctggaggatttcaagtatggagtcttggagagttaaataaaatttctgaggaaggtgtgaaatttagttctccatatgatggaaaaaaaatatttatgactcctgaagattcgatcatgatccaagagaatcttggttctgacattgtgatggcatttgatgaatgtacagattatccatcaacttataatgaagcaaaaaaatctatggagctttcaatgagatgggctaaaagatgtaaagaagctcataaatcaaaatctgcattatttggaatcgttcaaggtggtatgtataaggatttaagagaagagtcattaaataaattaatagatatagattttgatggcattgctcttggtggcttgagtgtaggtgaatcaaaacaagaaaaaaactgaa

SEQ ID NO: 240142 - DNA, 622 bp, Unknown
  Bacterial polypeptide expressing nucleotide sequence isolated from the Sargasso Sea
atgaacttatctttgtattgggcagagagatcaaaaaaagcatttggacaaaatcctcacaaagcactttttggtattgttcaaggaggattgttcaaagatttaagaataaaatctttaaatgaactaatcaaaattggttttgatggatatgcgatgggtggattagcggttggagagtctcaaagtgaaatgtttaaagtattagatgatattaaagaacatcttccaaatgatagaccgcattatttaatgggtgtgggcaccccttcagatctaattggtgctgtaaaaagaggtattgatatgtttgattgtgttttacccactagatctggcagaactggtttggcatttacttgggatggaagaattaatattaaaaacaataaatatcagaatgacaatacacctttagattctaattgtaataatttaaaccttaacaaatactcaaaaaattatttaaatcatttatttaacactaatgagatgttagcttcgatgcttttaacgcttcataatataaatttttatcaagaattaatgcaagctattagaaagaatatttctgaaggtacatttgatcaatttcatgataaatacattgaaaagttgtagt

SEQ ID NO: 240143 - DNA, 814 bp, Unknown
  Bacterial polypeptide expressing nucleotide sequence isolated from the Sargasso Sea
tagcctagctgaatccagaaaaattactgaagagggagttcattttcgttctcctattgatgggaagcaaatatttctaggacccgaggaagccattaagatgcagcatgtattaggcgcagaaattattatggtttttgatgattgcacgccatatccatgctctgaagaaaaagcacgcgaatcaatggagctgtcattacgctgggcagaaagatcaaaaagagctcatgagggaaatacaaatgctttatttggcattattcagggcgggatgtatccaaagttacgcgaggattctttgagcggtctttgcgaaattaattttgatggctatgcagttggcggtctttcagttggcgagcctgctgaattaatgatggaaattcttgataatttaatatcaaaaatgccagaaaataaaccccgatatttaatgggcgtggggacccctgaaaatttagttgaggcggtatgtaggggggtagatatgtttgattgcgtaatgccaacaagaaatgccagaaacgggcatctttttactgaatttggggatattcgtatcaataatgcatgttataggttcgatgagcttccgcttgacgagaactgtgcttgttatacatgtaaaaactactcaagagcctatctacaccatctttcaaaaactaatgagatcttaggagcacgcttgaatacaaagcataatcttcattattatcagtatttaatgagtcagttacgtctggcgatagaagaggagcacctggtagagtttgtatccgatttttacctcaagcgaggaggtggttga

SEQ ID NO: 240144 - DNA, 1126 bp, Unknown
  Bacterial polypeptide expressing nucleotide sequence isolated from the Sargasso Sea
gatgaaatttgaacttgacactaccgacggccgtgcgcgccgtggtcgcttgatttttgaacgtggtacagtggaaaccccagcatttatgcctgtagggacttacggtacggtaaaagggatgacgccagaagaagtgcgtgctactggcgccgatattctgctcggtaacactttccacctgtggttacgccctggcgaagaaatcatgcgtaagcatggtgaccttcacgattttatgaattggcagcgtcctattctgaccgattcgggcggtttccaagtgttcagtttgggtgacattcgtaaaattaccgaagaaggtgtgcattttcgctcgccaatcaacggcgagaaaatcttcttagatcctgaaaaatcaatgcaaattcaacatgcattgggcagtgatgtggtaatgatttttgacgaatgtactccgtatccagcaaccgaagatgaagcgcgcaagtctatgcagatgtcactgcgttgggctaagcgttcacgcgacgagtttgaccgcctggaaaaccccaattcattatttgggattatccaaggcagtgtttatgaagatttacgcgacgagagcttaaaaggcttagtcgaaattggtttcgacggttatgccgtcggtggtttggccgtaggtgagcctaaggaagacatgcaccgcattcttgagcatgtctgtccacaaattcctgctgacaagccgcgctatctgatgggggtcggtaagccagaggatttagttgaaggtgtgcgtcgtggtatcgacatgtttgactgtgtgatgccaacccgtaacgcccgcaacggccatctgtttaccagtgaaggtgtcatcaagatccgcaacgcgcgtcatcgtgatgacacttcaccgctcgatcctaagtgtgattgttatacctgtaaaaactattcacgggcatacctttaccatttagatcgttgtaatgagattctgggtgcgcgtttaaacaccattcacaacttgagatactatcaaatgttaatggaaggtttgcgcggtgcgattgagacgggtacattagacgcctttgtgaaggacttctataccagccaaggtcgcgaagtaccagagttagtcgattga

SEQ ID NO: 240145 - DNA, 511 bp, Unknown
  Bacterial polypeptide expressing nucleotide sequence isolated from the Sargasso Sea
tatgtctctaaaaaaattaatagacatagaatttgatggatatgctattggtggattagctgtcggagaaacacaaaaagaaatgtttgatgttttggatgggataaaagataatttaccaatcgataaaccaagatatttaatgggtgttggaaccccctccgatatattaggagccgtaaagagaggtattgatatgtttgattgtgtccttccaactagatcaggaagaactggattagcttttacctggaatggcagagttcaaattagaaattctgaaaataaaacagacaatacacccctagatagtaatgtaacaaggtttgatttaaataaatactccaaaaattacttaaaccaccttcataatactaatgaaatattatcatcaatgattttatcattaaataatataaatttttaccaagaacttatgtatgaaattagaaaaaatattaaaatgggaacttttgatcaatttcacgacaagtatattaatattttgtaa

SEQ ID NO: 240146 - DNA, 919 bp, Unknown
  Bacterial polypeptide expressing nucleotide sequence isolated from the Sargasso Sea
ttaatgatacgtcctggagttaatagaatttcaaaaattggtggattacataaatttatgaattgtaagttaccaattttgactgattctggtggatttcaagtaatgtctctatctaaacttaataaagtagatcgagagaaaggagcaatatttaggtctcatatcgatggaaaaaaatttgtgttaagtcctgaagaaagtataaaaattcaaaagaaattaaattcagatattattatggtgatggacgagtgtccaaaaaaaacaactaattatgaattaattgaaaaatcaatgaatctatctacttattgggcaaaaagatctaaaaaagcttttggaaaaaatacccataaagcactatttggcatagtacaaggaggactatttaaagatttaagaattaaatctcttaacgaattacttaagattgaatttgatggatatgcaataggtgggttagcagtaggggaaactcagaaagaaatgtttgatgttctggatggacttaaagaatttatgccacatgataaaccaagatatcttatgggtgtgggcactccttctgatatattgggtgcagttaaaagaggtatcgacatgtttgattgcgttttaccaacaagatctggaagaactggtcttgcttttacatggaatggaagagtaaatattagaaatgcaaaatacaagaaggataataatcctcttgatttaaagtgcactaacaagaatttactcaaatattctagaaattacataaatcatcttttcaatactaatgaaatattaggttcaatgattttaactttacataatgtcaatttttatcaagaattaatgaaagaaataagaaaaaatattaaaaagggtacatttgacaaattttataactattattccaaaaagttgtaat

SEQ ID NO: 240147 - DNA, 994 bp, Unknown
  Bacterial polypeptide expressing nucleotide sequence isolated from the Sargasso Sea
actgttaagggtgtttttactgatgatatattgaaaactaattcacaaataattttaggtaatacttatcacttacttttaagaccaggagtagatattttaaaaaaatttggaggtttgcataattttatgaactggcagaagccaatcctcactgattctggaggttatcaaattatgtctctttcaaaattaaataaaatagacatgaaaattggtgctatttttaaatcacacatagatggaaaaaaaataattttaagcccggaaaaaagtattaaggtacaaaaaagtattaattcggatattgttatggttttggatgaatgtccaaaactaacaagcgataaaaaaaccatatcaagagctattaaagtttctactaattgggcaaaaagaagtaaaatcgaatttggaggaaataaaacaaaggctttgtttggaattgttcagggaggtctttttaaagatcttagaatacagagtatcgaggatttaaaagatatcggtttcgatggatatgcaatgggaggattagcagtaggtgaaaaacaatctgatatgtttaatattcttaatgaaacaacagattttttacctaaagataaaccaagatatttaatgggtgttggcacaccagctgatattctgggagctgttaaatatggtatagacatgtttgattgtgtgatgccgactagatctggcaggactggtttagcttttacctgggaaggaaaattaaatataaaaaactcaaaatttagatcagattacactcctttaaatgaggattgcgacattaagcaactaaataaatactcaaaaagttatttaaaccatttaattaaatctgatgaaatgcttgcatctatgttgatttctttaaacaatatatatttttatcaacaatttatgcgagaaattagaacaaatataaaaaacggtacttttagggaattttataaaaaatatataagattttttgattaat

SEQ ID NO: 240148 - DNA, 1195 bp, Unknown
  Bacterial polypeptide expressing nucleotide sequence isolated from the Sargasso Sea
atgaaaaaatttaactggaaagtaataaaaaaatcaaaagatactagagctcgagtgggtttaataaccactcctcatggtgaagttgaaacaccagcatttattttttgtggcactaagggtgccttaaaatcttgcagtacagtggaggcaaaaaataataatactcaaataattttatctaatacctatcatttaatgcttcaaccgggcagtaatattgttgccaaacatggcggaatacataattttatgaattggcaaggtccagttttaactgacagtggaggctttcaaattttttctttgggttatggttctgtagcagatgaaattaaaagaaaaaacgctaatagaaataaatctcttttaaatatttctgaagagggagctctatttaaatcttttattgacggaagaaatcatttactaactcctgaaaaatcaatcgcaattcaaagagatataggtgcagatatcattcttgtttttgatgaatgcacaccatttcatgtagataaatcttatactgaccaatctatgaaaagaagtcacaattggtccattagatctataaacagtttccaaaaaagaaataaatatttaccaatgaaaggatcttcaggaagtcaaaaactttacggtattattcaaggaggtatttataaagatttaagagaagaaagtattgaatttaatataaattcaaaaattttttttggtttggctataggtggaagtttaggatctacaaaagatgaaatgcatgaaatagttgattatactgcttcaagattagggaaaattcatccgatacatttattaggtataggggaccctgcagatatatggaaattagttaagtcaggagttgatacatttgattgtgtgagtcccacaaggttagctagacatgggtctgctttagtaaaaagtaaaaaaggtaaaataaatattaaaaataataaatttagagaaaatcttagtccaatagataaaaattgtcattgtagtacatgtaaaaactattcactggcataccttcatcatttgttaaaagctgaagagctaattgttttaaattatattactactcacaatatatattttatgaattctttaatgaagtatattcgtaaaagtattaaagaagataatatatttgaagctgaaaaaaattggtatttagactagc

SEQ ID NO: 240149 - DNA, 1107 bp, Unknown
  Bacterial polypeptide expressing nucleotide sequence isolated from the Sargasso Sea
cccgagccggctccttcacgacacctcatggaagcgtgtcgactccggccttcatgccggtcgggactgctgggacggtcaagagccttatcatggaggaggttaaggagctgggggcacaggtcgtgctagcgaatacgtaccatttgtacttgaggcccggtcaagatttggtgcggcagctaggagggctgcatgactttatgcgttgggatggcccgattttgaccgacagtgggggctaccaggttttttctttgaaaggcatgcgcaaagtgcatgacgacggtgtcgactttcagagccacgttgacggatctcgccacgttttcacccctgaatcggttatggacatccaacgcgcgcttggtgcggacatcgtaatggcgttcgatgagtgtccgccaggaggatgcgatcgccagactgctgagcaagcgaaccgtcggactcttgaatggttagggcgttgtcgcgcacggtttgacgagttggagaaggtgggtgagttcccggaacaaagccttttccctgttcttcagggcaatgtctttgacgaccttcgaaaagagcatgcggatcagttcatgtcgctcaatgactgggacggtttcgggatcggagggttaagtgtaggtgagtcaaagccggatatgtggaggacccttgagctgctcgacgacgttctcccaaaagagcgtccgcgctatttgatgggtgtcggttacccagatgatcttctcgaagccataaagcgagggtgcgacctttttgactgcgtcgctccgacgcgcaacgcacgacatggaactgcctggaccagtttagagggtcagatcaatcttaaggctgctcggtttcggtcagatacccgtccgattgatacggaatgcgattgctatacctgcgcccgttatgatcgagcttatcttcgtcatctggttgtatcgggcgaatggctgccgttacgacttatttcgattcacaatctccggtttctggtccgtctaggtgaagaggcccgccgtcgagtgattgacggaagcttcgaccattggcacagggactggttagaacgctataaaaaagaggggaaggcttcgtgac

SEQ ID NO: 240150 - DNA, 1117 bp, Unknown
  Bacterial polypeptide expressing nucleotide sequence isolated from the Sargasso Sea
aatgaattcaaaaaaaaatttttttgaattaataaaaactgataatcaagctagattaggaaaaattaaaactttaaaaggtacaatagatactccggccttcatgccagtaggaacacagggaactgtaaagggtatttttgttgacgatattttaaaaaccaatacacaaataattttgggtaacacttatcatttgtttctgagacctggcttagacatattaaaaaatgttggtggactacataattttatgaattggcacaaaccaattttaaccgactctggtggatttcaaataatgtctctttcaaaatttagaaaaattgataaaaatgttggtgcaatattttcatcacacttagatggaaaaaaaataatattgagtccagaaaagagtattcaaattcaaaaagttattaattctgatattcttatggttttagatgaatgtccaaaattaacaaatgataaaaaagtaatagctaatgctattgatatctcaacaaattgggcaaaaagatgtaaagttgaatttaataatgctaaaaataagtttttatttggaattgttcaaggtggactttttaatgaccttagaaatgaaagtcttgaaaaattattagaaataaactttgatggttttgctttagggggtttagctgttggagaaaagcaagatgaaatgtttaaagttttaaatggtataacaaaaaaaatgccaaatgataaaccaagatatttgatgggtgtgggaacaccatctgatatcttaggagctgttaaatccggtattgatatgtttgattgtgtaataccaacaagatctggaagaactgctttagctttcacatggggcggtaaaattaatttaagaaatgctaagtataaaaatgataaatctccccttgatgaaaatacgaaattaagggatttaaataagtattccaaaagttatttgaatcacctaacaaataccaatgagatattagcctcaatgttagtatctttgcataatataaatttctatcaggagtttatgagagaaatacgtactaaaataaaagaggggacatttagcgcattttataaaaagtatatagggatgtataaatag

SEQ ID NO: 240151 - DNA, 1102 bp, Unknown
  Bacterial polypeptide expressing nucleotide sequence isolated from the Sargasso Sea
atgaaattctctataaagaaaaaatataaaaacgcaagaagcggttatctagaattgaaaaatggaaatgttcaaacacctacatttatgacaattgggacatatggttctgtcaaatctttatcaagtgaagatttattaaggtgcggatgtgaaatcttactctgtaatgcatatcatctcatgcttagacctggtttagatgttatagttaggggcggacatcttcataagtttatgaattgggataaacctatactaactgattctggaggctatcaagttttcagtttaggcaagaacgttaaagttaataaagatgctgcgatatttaaatcaccatataatggtgatgagattattatgaccccagaaaaatcaataaaaactcaaattgctctaggaagcgatatcatgatgatatttgatgagtgtactccgtatcctgttgacaaagacaaagcaaatgaatctatgagattgtcactagattgggcagagttatctaaaaaggctaacgactcacagtcaccgctttttggtattgttcaaggtggtatgtataaagatttaagagaagaatctatgaaaaatttaaataagctagatcttgatggatatgcccttgggggactatctgtaggtgagcccagtaaaattagaaacgaaatagtctcacatatggccccaaaaatgccatcagatcgaccacgatatctcatgggtattggaaaaccactagacatcatctatgctgttcaaagtggaattgatatgttcgattgtgttattccaactagaaatggcagaaacgggcaaatttttacatttaaaggacctattaacatccgcaatagtatttatgaaaatgactttgatccaattgataaagattgtaaatgttttacatgtcaaaattatagcagagcatacataaagcatctcgataaatgtaatgatggtttagcagggagacttattagtattcataatgtatacttttatcaggaattaatgagaaaaattagaaattcaataatttcttatacactagatgagttaataaaggaaattgagttttattattcggaggttgaataaa

SEQ ID NO: 240152 - DNA, 835 bp, Unknown
  Bacterial polypeptide expressing nucleotide sequence isolated from the Sargasso Sea
atggcattaaaaaaatttaattttaatgttaattttactgagaattattcaagagtcggagttatagagacaagcaggggtaatataaatactcctgcatttatgcctgttggtacacaagcaactatcaaaggtgcttttatagaagatataattaaaactggtactgaaattattctttctaacacttaccatttaatgattagacctggtgtaaaaagaatatcagatgctggtggtttacataaatttatgaactgtaaattaccaattttaactgactctggtggttttcaagttatgtccctttctaaattaaataaaattgacagagaaaaaggtgcaatttttcaatcacatattgatggtaaaaaattcattttaagtcctgaagaaagtataagaatacaaaaaggtttaaactcagacattgttatggtcatggatgagtgtccaaaaaaaagtttagattatagtcaaattaaaaaatctatggatatttctatggaatgggccgagagatcaaaaaaagcttttggaataaatcctcaaaaagctatttttggtattgtccaaggtggtttatttaatgatttaaggaataaatctttagaaactttaactaatattggatttgatggctatgctattggaggattggcagtaggtgacacacaagaagaaatgttcaacatactagataaattaaaaaaaaatttacctaacgataagccaagatatcttatgggcgtaggtacaccttcggatatattaggtgctgttaaaaggggaattgacatgtttgattgtgtattacctactagatcaggcagaa

SEQ ID NO: 240153 - DNA, 1048 bp, Unknown
  Bacterial polypeptide expressing nucleotide sequence isolated from the Sargasso Sea
atgtcattcaaagttttaaataaatctagttacgctagaagaggagagttagtaactaaaacttctaaaatacaaactccagtttttatgcctgttggtacatatggcactgtaaaaggcttaacccctgaacatctcaaagatataggctttgaaataattttaggtaacgcattccatttatacctaagaccaggactagaagtaataaaagaatttggtgggttacatgatttcatggcatgggatagatcaatacttacagattcaggaggatttcaggtatggagcctacaagaattaagaaaaataactgaagaaggagttaaatttaaatcgccactagatggttcagagatatttcttactccagaagattcaatccaaacgcaattaacattaaacgcagatatcataatggcctttgatgaatgcacagcttaccccagcacccttaaggaagctaaagaatctatggatcttactcatagatgggcatctagatgtaaagaatattttaataagaataaaaaagagcatctattatttggcatcgttcaaggtggaatgcatcttgaattaagagaagaatcattaaattttatgtctaaacaagattttgatggaattgccttaggaggactgagtgttggtgagccaaaagaagaaaaaacaaaaattttgaaacatttagctcctttattgccggaagataaacctcattacgtaatgggcgtaggaacacctgaagagttagtggaaggtgtgagatatggaattgatatgtttgattgtgttattcctacaagaaacgctagaaatggctttatatatacctctacaggtatagttaaaataagaaattcagaacataagaagtcgacaaaacccatagatgaaaattgtgattgttatacctgtaagaacttttctagagcatatttacatcatttagataaggccaatgaaattttagctagcactttaatgagtatttgcagcttacatacttttaataagctaatgcaagatatgaggtcatcactgg

SEQ ID NO: 240154 - DNA, 1117 bp, Unknown
  Bacterial polypeptide expressing nucleotide sequence isolated from the Sargasso Sea
aatgaagtttaaaactaaaaatacagccaattttgcaagagcatctgaaatacaattatcaagaggttcaatcaatacgccagcatttatgccagttggcactaatggaactgtaaaaggcttaactgtagaagacttaaatgaaactggttcagaggtaatccttggaaatactttccatcttatgttaaggcctggcgataaattgattaaaaacttcggcggacttcataaatttattaattgggacaaacctattcttactgattcaggaggattccaggtatggagccttggtgatttggctaaaatttctgaagatggtgttaagttcagttctccatatgatggtaaaaaaatttttatgcggcctgaagattcaatttttattcaggagaatcttggctcagatattattatggtatttgacgagtgtactgattatccttcaacttacgaagaagcaaaaaaatcaatggaactctctatgagatgggcaaaaagatgcaaagaagcgcataaatctaaatcagcattatttggaattgttcagggaggcatgttcaaagatttaagagaagagtcattaaacaaattaattgaaattgattttgatggaattgcacttggaggattaagtgtaggtgaatctaaacaggagaaaactgaaatattagagtttatgtgcgataagttgcctgaaaataaaccaagatatctgatgggcgttggcactcctgaagatattgttgaagctgtaagatatggtattgatatgtttgattgtgttcttccaacaagaaatgctaggaatggacaattgtttacctctgaaggtgtaataaatattagaaatgcagaatataaagactgtgatgagcctatcgatgtaaattgtaataataaagtatctcaaaattacagcagggcatacctcaatcatttacatagaactaatgaaatgcttggagcaatgttggctacttatcataatatctcttattaccagtcattaatgaatgatattagaagcgcaataaaagataatttattcgcgaagttcataaaagacttttataataaacgaaatttagatatgcccgacgggccaatatag

SEQ ID NO: 240155 - DNA, 1087 bp, Unknown
  Bacterial polypeptide expressing nucleotide sequence isolated from the Sargasso Sea
aatgagtaatcttaattttaaaatattagccaaagaaaataaatcaagaacaggtgagataactataaataataaaacaataaaaacacctggatttatgccagttgcaacaagaggagctattaaatcaacaccgcatacctttttagataatactgatgttttgttagctaatacttatcatttatatttaagacctggagtggatgtaattaatgagttaggtggtattcataaatttatgagttgggataaagtaatattaactgattcaggtggttttcaagcgtggtctttaccaacaaaaattgataacgaaggagtagtgtttaaaaatatttatgatggttcctcatttaaaatgacaccagaaatttcaatcaaatcacaaaataaaattggtagcgatatagctatgatatttgactgcttaattgatattaaagatagtaaagaaaaacaaataaattctataaatttaactagggattggggatcgataacaaaaagttttcataaaaataaagatcaagccttatttgggattgtacaaggaggattacataaagatttacgagaattatctacaaaatatatggttgatcaggaatatgatggatatgcccttgggggattagctataggtgaaactaacatcgaaagaaagaatattgttaaatttactagcgaattattacccgatgataaaccaaaatatgttatgggtcttggggatatgcacggtttagtagatttaatagaagaaggaatagatctttttgactgtgtatggcctgcaagacttgcaagacatggaaaattaattgttgggaatacatatataaatattaaaaataaacaatacgaaaacgatcctgaaccaataagcaatgtatgcacatgttttacatgtcaaaattactcaaaagcctttttaagacacttaatacataatgaaaataccactgcatggctttatttaactattcacaatttaattcaaacagagattattcttgatgaagctagaaaaagtatattagaatctacttttagtacttttagaaaacaatttgaatatgaatga

SEQ ID NO: 240156 - DNA, 1088 bp, Unknown
  Bacterial polypeptide expressing nucleotide sequence isolated from the Sargasso Sea
aatggcattaaaaaaatttgcctttaacgttttaaaaaaagataaatttgctaggtgtggtttaatagagacccatcgtggaaatatacacactccagcatttatgcctgttggaacacaagctacagtaaaagcttgtacgatagatgatataaaaaaaactggatcagaaataatactttcaaatacatatcacttaatgatacgtccaggtgttgaaagaattaaatctgctggtggtctacatgaatttatgaattgtgatttacctattttaactgactctggtggatttcaagttatgtctttgtcaaaattaaataaaattgatagagagaagggcgctatatttaactctcatgttgatggaaaaaaattttacttaagtcccgaagagagtatccgaattcagttaggtttaaattctgatattctgatgatcatggatgagtgcccaaaaaaaactaatgattataatgtaataaaaaaatctatggatttatcactttactgggcagaaagatctaaagttgcatttggaaacaatccacataaagctttatttggtatagtccaaggaggtctttttaaagatttaagattaaaatctcttcaagagttaattagaattggttttgacgggtatgctctcggaggattagctgtaggagaaactcaaaatgaaatgtttaacgttttagatgatattaaggaaaacttacctattgaaaaaccacactatttaatgggtgttggaacaccatcagatattttgggtgctgtaaaaagaggtatagatatgtttgactgtgtgttgccaactagatctggaagaacaggtttggcttttacatggcagggaagaatcaatatcaaaaataacaaatatcaaaatgacaacacgccacttgatccaaattgtaaaaacctcaatttaaataaatattccaaaaattatttaaatcacttatttaatacaaatgaaattcttgccctcatgttactgacgctaaataatattaatttttatccagaattaatgacctctatcagaaaaatattaatgaaagcacttttgatcatttcac

SEQ ID NO: 240157 - DNA, 281 bp, Unknown
  Bacterial polypeptide expressing nucleotide sequence isolated from the Sargasso Sea
aatgacaaaaaaattttcatactccctgactgcggttgatggaaaagccaggtgtggaataatttcgacaccgagagggaaaattagaacaccagcttttatgcccgttggaacggcagctactgtgaaagcaatgctcccggaaagcgtaaggtctacgggtgcagatattttgttgggaaatacatatcacttgatgttaaggccaacagctgagcggatatctgaattaggcgggcttcataaatttatgaattgggagctgccaatacttactgata

SEQ ID NO: 240158 - DNA, 1117 bp, Unknown
  Bacterial polypeptide expressing nucleotide sequence isolated from the Sargasso Sea
atgaaatataaagttaacaatacttcggaaaatgctcgagaggcagaaattcacaccgaaaggggagttatccaaacccctgcttttatgcctgttggtacaaatgggactgtaaaaggacttacgatcgatgacttgaatgaaacacactcacaaataatccttggcaatacttttcatttaatgttgaggcctggcgataagttgattaaagaattgggcggattacataagtttattaattgggagaaacccattctaaccgactctggaggatttcaagtatggagccttggagagttaaataaaatttccgaggaaggcgtgaaatttagttctccatatgatggaaaaaaaatatttatgactcctgaagattctatcatgattcaagaaaatcttggttctgacattgtgatggcttttgatgaatgtacagattatccatctacttatgatgaagcaaaacaatctatggagctttcaatgagatgggctaaaagatgcaaagacgctcataaatcaaagtctgcattgtttggaatcgttcagggtgggatgtatacagatttaagagaagagtcattaagaagattaatagatatagattttgatggtattgctcttggtggtttaagtgtaggtgaatcaaaacaagaaaaaactaaaatattagaattcatgtcaaataaattacctgaggataaacctagatatctaatgggagtagggacaccggaggatattgttgaagcagtgaggtatggaattgatatgtttgattgtgttcttccaactagaaatgccagaaatgggcaattatttacatcggaaggcgttattaatattagaaatgctgaatataaaaatagtgatgaccctattgataaaaattgtgactctaaagtttctctaaactatagcagggcgtaccttaatcatcttcaaagaaccaacgaaatgcttggttcaatgttagcttcttatcacaatatttattattatcaatccttaatgagagagataagagactcaattaaagataatttattcgcgaagttcgtaaaagacttttataataaacgaaatttggatatgcccgaggggccattatagg

SEQ ID NO: 240159 - DNA, 1087 bp, Unknown
  Bacterial polypeptide expressing nucleotide sequence isolated from the Sargasso Sea
atgtcattaaaagatttcaattttaatgttcatcatactcaaaattatgcaagagtaggaattatagagacccatagaggtaatataaacactcctgcatttatgccagttggtactcaagcaactgttaaaggtgtttttttagatgatataaaaaaaacaggtagtgagataatcttatcaaatacttatcatctaatgataagaccaggtgttgaaagaattgaaagtgctggaggacttcatgaattcatgaattgtgatctaccaatcttaactgattcaggtggttttcaggtaatgtctctgtcgaaattaaataaaatcgatagagataaaggtgcaatttttcaatcacatattgatggtaaaacttttattttaagtcccgaagaaagtataagaattcaaaaaggtttgaactcagatatagtgatggttatggatgaatgccctaaaaatactaaagactatgataaaattaaaaaatcaatggaattatcatctgagtgggcaaaaagatcaaaagatgcatttggaataaatgatcacaaaggtttatttggaatagtgcaaggtggattatttaatgatctaagaataaaatctttaaacaaccttattgatatagggtttaatggatatgctcttggaggattggcggtaggggaaacacaagatgaaatgtttgacgttcttgatggaataaaagatcatatgcctaaagataaaccaagatatttaatgggtgttggtactccatccgatatactcggagcagttaagagaggtgtagatatgttcgactgtgtgatgccgacaagatctgggagaactggtttagcttttacatggaagggacaaattcaaatcagaaattcaaaatataaaaatgataatacccctctggacaaaaatgtcacaaagttcaatcttaataaatattctaaaaattatttaaatcatttatttaatactaatgaaatgttggcctcaatgattttaaccttgaataacatcaacttttatcaagatttaatgaaaaatattagagacaatataaaacaaggtacttttgatgaatttc

SEQ ID NO: 240160 - DNA, 280 bp, Unknown
  Bacterial polypeptide expressing nucleotide sequence isolated from the Sargasso Sea
tttgaaattctcattaaaaaaaactgaccctaattctaatgcaaggactggcaccttgtatactgggcatggagaaatagaaactccagtatttatgccagttggtacagttggagctgtaaagacctttgctcctgaagagctaaaggatatcaattcacagattatactagggaatacatatcacctatatcttagacctggcactcctattatagagcgtgctggagggctccattctttcatctcttgggacaaaccaatcttaactgatagtggt

SEQ ID NO: 240161 - DNA, 432 bp, Unknown
  Bacterial polypeptide expressing nucleotide sequence isolated from the Sargasso Sea
tttgaaattctcaataaaaaaaactgatacttattctaaggcaagaaccggtactcttactactggccatggtaaaattaaaacgccagtgtttatgccagttggtacggttggagcagtaaagaccttttctcctgaagaattaaaaggtatcaattcacagatcatattagggaatacataccatttatatttgagacctggtactcctaccattaataaagcaggaggtcttcattcttttctttcatgggatagaccaatcttaactgatagcggtggatttcaggtgttctctttggcaaaactgaacaaaatatctaataatggggttgagtttcaatcccatttagatggaagtaaacatatgttcacgcctgagatctctatggaaattcaacgtgatcttggatctagatattattatgtcat

SEQ ID NO: 240162 - DNA, 686 bp, Unknown
  Bacterial polypeptide expressing nucleotide sequence isolated from the Sargasso Sea
aatgaaatttaaggtaaaaaattcttcagaatttgcaagggtttctgaaattcatacatccagaggtgtaatacatactccagcttttatgcctgttggcactaatgggactgttaaaggacttacaactaatgacctaaatgaaaccaactcagaaattattcttggtaatacttttcacttaatgttacgacctggagataaactcattaagaatctaggcggccttcataaatttattaattggaataagccaatattgacagactcaggaggttttcaggtttggagtttgggcgatttagcaaaaatatccgaagaaggggtaaagtttagctctccttatgatggaaaaaaaatttttatgacacctgaagattcaataatgattcaagaaaacctaggttcagatattattatggtatttgatgagtgtacagactatccatctgattatgaacaagcaaagcaatccatggaactatcaatgcgctgggcaaaaagatgtaagattgcacataaatcaaaatcagcattgtttgggattgttcaaggcggaatgtataaagatttaagagaagtttctctaaataaattaatagatctagactttaacggaattgcacttggcggcttaagtgttggcgaatcaaaacaagaaaaaactgaaatattaaaatttatgt

SEQ ID NO: 240163 - DNA, 1135 bp, Unknown
  Bacterial polypeptide expressing nucleotide sequence isolated from the Sargasso Sea
ttgaaattttcaataactaattctgattctaatactgctgctaggacaggtgctatagaaacagaccatggaattatccatactcctgtttttatgccagtcggaacagtcggggccgtaaagacattttcgcctcatgagctagaagggctgggggctgaaatcattcttggtaacacatatcatttatatttaaggcccgggacagaaatcattcataaggccggtggtcttcataatttctcaaattggtctaggcctatgctaacagatagtggggggtttcaagttttttcattagctagacttaataagattagtgatagtggggttcagtttcagtcgcatctagatgggagtcatcacaatttcacccctgaggtttctatgaaaatacagcgtgctcttggggctgatattatcatggctttcgatcattgcccctctgcagaagctaaccaaaaggagattgaaaatgcagttagccgaacgactcagtggtttaaacagtgtaaaaattatctagatgacaacttaagtctatatgatcatagtcaatctctatttccgatcatccaaggtggtgtagatcatgacctgagacagagaagtatcgaagaactagctggttattctgattgcggcatcgcgataggtgggcttgctgttggcgaagaaaagggagctatgtttgatacaattgaattttgtaatggtttactgccaaaggcagaaccaagatatctaatgggtgtagggaaaccaactgatattgttaaaagtattcgtctgggtgtagatatgtttgactgtgtaatgccaacccgaaatggcaggaatggtcaaatattcacatctcggggaacaataaatattagtaatgagagatataaaaatgatcactctttggttgatgataaaagcgagcacgcttttgggcggatgttttcaaaagcatatctgagacatttgtttaatgttaaagagatccttggcttgcgtattgcatctacattgaacctgtcttattatatttccttgattaagaccattcgggaaacaattgattcgggagaatttgatagatggtctagtagctggctaagtgaaatggaaaatcagcgaggaatgtgat

SEQ ID NO: 240164 - DNA, 511 bp, Unknown
  Bacterial polypeptide expressing nucleotide sequence isolated from the Sargasso Sea
aatgaatttttctttaatatcatcagatattaataattctgctagacttggaaagattagcactgatcatagtactttcgaaacccctgtatttatgccaattggaacttccggcgcaattaaaacaatcgaccctgattttttacatgatttagaaattagtattatacttggcaatacatatcatctgtatttaagacctggccatgaaattattcattcagccaaaggtctccactcatttatgaactggaataaaagcattttgactgatagtggaggttatcaaattttttctttagctaagcttaatagcatctcagatgagggggtagaatttcaatcgcacatagatggaagttcccattttctttcaccagaactttcaatggatatccagaggcatcttggatcagatattatcatggcatttgatgaatgccccgccgcaaatgttgacaaatcaataatctctaaatcagtagatcgtacatttaaatggactgaaaaa

SEQ ID NO: 240165 - DNA, 1114 bp, Unknown
  Bacterial polypeptide expressing nucleotide sequence isolated from the Sargasso Sea
atgcaatttgagttgttaaaaaccgaaggccgagcacgacgcggtcgtttggtgtttgaacgcggtgttgttgaaaccccagcgttcatgcccgtaggtacatacggtactgttaagggaatgacccctgaagaattaaaagacagcggtgcacacatctgtcttggaaacacgtttcacctgatgcttcgtcctggtacaggcattattcgccagcatggcgacctacatgacttcatgaattgggacaagccaatccttacggattcgggtggcttccaagtgtttagcttgggtgatttgcgtaaaattaccgaagaaggtgtaacattccgctctccgataaacggcgaaaagatcttacttacgcctgaaaaatcgatggaagttcagcgcgatttgggctctgacatcgtgatgatttttgatgagtgcacgccgtaccccgctactgaacaagaagcgcgcgtttcaatggaaatgtcgctacgttgggccaaacgtagtaaagaagcccatggcgataacccagcggcactgtttggtatcattcaaggcggtatgtacgaaggtctgcgcgacgtttcacttgctggccttgaagctattggcttcgacggttacgccattggtggtctttcagtaggtgagccgaaagaagatatgatccgcattatcgatcataccgcgcctaaaattccggaagataaacctcgctatttaatgggcgtgggtaaacctgaagatttggtagagtctgtgcgtcgcggtatcgatatgtttgactgtgtaatgcccacgcgtaacgcccgaaatggtcacctgtttgtgactgaaggcgtagtgaagattcgcaatgcgaaacacagaaacgacacctcgccattagatgagaattgtgattgctacacttgtaaaaactattctcgctcttatctacatcatttggacaagtgtaacgaaatcttgggtgcgcgcttaaacaccatccataatcttcgctactatcagcgcgtgatgcagggtcttcgcgatgcgattgacgcgggtacgcttgatgagtttgtacaagaattttatgaacaaaaagggttgccggttccggcactataac

SEQ ID NO: 240166 - DNA, 757 bp, Unknown
  Bacterial polypeptide expressing nucleotide sequence isolated from the Sargasso Sea
aatccagaaaaatgcatggaacttcagcagtcttatggagttgatatagccatggtccttgatgaatgcacaccttatccagcagagatatcggtagcagagaaatctatgcaattgtccttgagatgggcagaaagatctagaaacgcctttaatagcaataaatcaagtttgtttggaataatacaaggcggtatttatggtgatctcagagagcagtctttagaagggctaaaaaaaatggattttgagggatatgccataggaggattatctgtgggagagcctaaagaggatttacgtcaaataactaatctaattgcccctaaaatgccagcagataaaccccgctatttaatgggtgtaggcacaccccttgatatcattaaagccgtcgaaagtggtgtagatatgtttgattgtgtaattcctacgcgacatgctagaaatggttatctttatacttcagaaggagtagttaaaataagaaatgctgccaacaaacattcggtcgagcctattgataaggaatgcgattgttatacttgtcgaaacttttcaagaagctatttacatcatttagacaagaccaatgaaatgctaggctctactctgcaaactatacacaaccttactttttacattaacttgatgagaaatttgcgagtatcaattgaaaaaggtaaattgcaatcctttattaaaagatttgaagaaacttggaataattcagacaaccccaatataaatatctaga

SEQ ID NO: 240167 - DNA, 559 bp, Unknown
  Bacterial polypeptide expressing nucleotide sequence isolated from the Sargasso Sea
atgaaattctcaataacttctagcgatgagatttcttctgctcgaagtggaatcatcgaaacacaaaatagtgtaattaaaactccagtttttatgcctattgcgacacaaggttctgtcaaaactattgaccctgaggttctgtatcatttaaatagccaaattattttaggtaatacatatcatttatatcttaggcctggctatgaaatcattcataaatctggcggattacattcatttatgaactggggcaattctatattaacagatagtggtggatttcaagttttttcgctagccaagttaaatgatatatcagatgatggtgtccactttcaatctcacttagacggtagtaaacattttcttactcctgaattatcaatggaaattcaaaggaatttggggtccgatattataatggcttttgatgaatgccctgatggaaaagcagacagaattttaattgataaagcagtggccaggagtacgctatggtttaatagatgtaagaaatatttgaacgacaatgcacctctttatgattgggagcaaa

SEQ ID NO: 240168 - DNA, 661 bp, Unknown
  Bacterial polypeptide expressing nucleotide sequence isolated from the Sargasso Sea
aatggcattaaaaaattttgcctttaaagttttagataaagataagtttgcaagaagaggtgtgattgaaacacatcgtggagtaattaatacacctgcatttatgccggttggaacacaagcgacggtaaaagcttgcacaatcgaagatataaaaaaaactggttcacagattattttatcgaatacttatcacttaatgattaggcctggagttgaaagaatacagactgctggaggattgcataactttatgaattgtgatttacccatattaaccgattcaggcggttttcaagtaatgtctctttccaaacttaataaggttgatagagaaaaaggagctatatttagttctcatgtggacggaaaaaaatttttcttgagtcctgaagaaagtatacgaattcaacttggtttaaattctgatatagtaatgataatggacgaatgtccacgaaaatctgatgattataatttgattaaaagatcgatggatttgtcactttattgggccaaaagatcaaaaaaagcttttggattaaatcctcacaaaggtatttttggtattgttcagggaggtctctttaacgatttaagaaaacaatctttaaatgagttgattaaaattgattttgatggttatgcaatgggtggttag

SEQ ID NO: 240169 - DNA, 1135 bp, Unknown
  Bacterial polypeptide expressing nucleotide sequence isolated from the Sargasso Sea
tttgaaattttctataatttcattcaataatacttcttctgctcgaaatggtttaataacaactgatcattctgagattgagacacctgtttttatgccgattggaacaaatggcgttattaaaacaatactaccaaaagaactatatgatataaatacaaatatcgttttaagtaatacgtaccatttatttttgagaccaggtcataagcttatcgcgcaaggtggaggattacatcaatttatgaattgggataaatctattttaactgatagtggtggttttcaagtttattctttagcaaaactaaataatatttctgatgagggtgtaaagtttcaatctcatattgatggtagttcccaatttatttcaccagaaatttctatggaaatacaacaatcattaggttcagatattataatggcatttgatgtatgtcctgcaggaggtgaagataaaaaagttatagataatgcagttgaacagactaataaatggatcagaagatgtaaaagttatttggaaaataacaaatcaatatataattggaaccaatgtttattccccatagttcagggaggtgtttatcctgatttaagaataaaaagtgtgaatcaattaatatcttatagtacatgcggtatggcaataggcggtctagctgttggtgaagaaaaaaatgcaatgtttgatattatatcaatgatggatgaaattttacccaaagatcagcccaggtatcttatgggtgttggtagaccaacagaccttgttcgttcaatcagtctaggtattgatatgtttgattgtgttttaccaacacgtaatggaagaaatggtcaactttttacctctgaaggagtaattaatatagaaaattcgcgtttcacagatgattttaattccgttgatgaggaatgtaactgtactttatgtaataattatactagatcatatttacgtcatttatttaatattaatgaaatgttaggattaagattagcttcaatgcataatattactttttatatgagacttatggaaacgatccgaaatgaaataagcaaaaatagttttgataaatggtcgaagcagtttttaaataaacacttaaatgatcaaaggatgtaa

SEQ ID NO: 240170 - DNA, 1045 bp, Unknown
  Bacterial polypeptide expressing nucleotide sequence isolated from the Sargasso Sea
aagaggcaatattaaaacacctgcatttatgcctatagctactcaaggagcagttaagtttactcccatagagtttatagaacagattggatatgaattaacgctctcaaatacctatcacttactattaagacctggattagaaaggctttctagtgttgatggtatttctgagtttatgggatggaataagcccgtattaacagactctggaggttttcaggtgatgtctctatcaaaattaagaaaaatatctgaagagggagtaaaattccaatctcatattgatggagcatcacactttttaactcctgaaaatgtaattgattatcagaatataattaagtctgatattcaaatggttctagatgaatgtattcagtaccccgaatcttacgagaatgttaaaaagtcaatggaattatcacttagatgggctgagagatccagaaaacattataataaaaataaaagtaaaatttatggagcccaatttggaataattcaaggaggtgtatttaaagatttaagagagacatcaatttctgaaacagttaattttgattttgagggatatgctatcggcggactagctgttggtgaaggtcatgaaaaaatgattgaggttgttgattatactgcacctcaattacctgaagataaggtgagatatctgatgggagttggaaaacctaatgatattattgaggcagtttacaggggtgttgatatttttgattgtgtcatcccaaccagagaaggtagacatggtatcgcttatattggctctagttctattaatttgaagaattctaaatttgagagtgatttaactccattagatgaaggtagcgattactttgtttcaaaaaaatattcaaaaagttatttaaatcatttattaaaaattaaagaccctttaggaccaatgttaatttctcttcataatcttaattattacttcaatttgatggctaatctgggagcttccattgaagaaggtagattagatatttttagagaagatttttataaagataattaa

SEQ ID NO: 240171 - DNA, 967 bp, Unknown
  Bacterial polypeptide expressing nucleotide sequence isolated from the Sargasso Sea
tttgaaattttctgttttatctgaagataaccactctttagcaaggactggcttaattgaaactgaacattcaaaaattgaaactccagtatttatgccagttggtacccatggagtagtaaagacattatcacctgatgatttaaataatttgaatgtgaatataatgctttcaaatacataccacctttatttaagacctggtacagacattattcataaaaataatggtcttcataaatttttaaattggaataaaagtattttaactgatagtggtggttatcaagtattttcattgagcaatatgaatgaaattgctaatgatggagtaaagtttagatctcacttagatggaagtgaacatttattcactcctgaaaaatcaatggaagttcaaagacaattaggttctgatattattatggcatttgattattgtccgccagctgattgttcatctaaggaattaaagagggcatcttttttgacagaaaaatggacaagaatagcttatgagtatttatctgataaaaaaggtatttatggacatgaacaaacactttttccaattattcaaggaggtattaatccagacgaaagaataaaatgccttgaacaaatgcttccatttgctgagtgtggcatcgccattggaggtctttctgttggagagaaaaaagagccaatgttagacattgttgaattacttggaggtaaaatgcctaaagatcaaccgagatacttaatgggcgttggtaagccaacagatttagttaagtcaattttacggggtgtagatatgtttgattgtgttttacctgctagaaatgctaggaacggacaaatctttacacatgaaggtgttattaatattatgaatagtaattataaaaatgatacttcacctattgataaatatagttcaatagaatttgctcagattttttcaaaatcttacttaagg

SEQ ID NO: 240172 - DNA, 585 bp, Unknown
  Bacterial polypeptide expressing nucleotide sequence isolated from the Sargasso Sea
tatttggcattatccaaggtggcatttataaagatttaagagaagaatcattagacatcttaaaaaagatagaatttgaaggttatgctattggtggcttatctgttggagagccaaaagatgatttacaaggcattactagtcacatcgcccctctaatgcccgaaaataagccaagatatttgatgggggttggtacccctttagatatagtgaaggctgtagagagtggtatcgatatgttcgattgtgtaattccaactcgacatgccagaaatggatatttatatacctcggaaggaatagttaagataagaaattctattcataaaaattcattagaaaaacttgatccaaactgtgattgttatacttgttcaaatttttcgagaagctatttacatcatttggacaagacaaaggagatgcttggttctactttgctaacgatacataatctttatttttatttaaatcttatgagaaatttgcgagtagccattgaaacaggtacattgcagtcctttgtaaaggaattcgagataacttggaataatacaagtaatcccaatatagatatttaga

SEQ ID NO: 240173 - DNA, 848 bp, Unknown
  Bacterial polypeptide expressing nucleotide sequence isolated from the Sargasso Sea
tgattcaggaggatatcaagtttttagtttggccaaattaaataatatttctgataaaggtgtggaatttaaaaatccaagagatggtagtcatgtttttttatcacctgaaaaagtaatacagattcaaatggatcttggatcggatgttgcgatggcttttgatcattgtcctccgcatacagctaacgaaaatgatattgaggactctttacaaagaactcattcatggttgcaaaaatgtgttgagactcatcagaaatccaatcaagcattattcggtatagttcaaggtggaaagtatccgagattgagagaatatagcgcaaaatatacaagttcttttgatctgcctggaatagcagtgggaggtgtaagtgttggcgaggcagtcgaagaaatacatagtgtaattaattacgtcccgaaattcttaccaataaataaaccaagatatttaatgggaattggctctttaaaagaaatttctctagctgttgctaatggattcgatatatttgactgtgttttgcctacaagactaggaagacatgggactgcattttttaatgatgaaagattgaatttgcgaaatgctcgatttaaaaatgacttttctccgattgacaaaacttgtaaatgcgaaacctgtaaatcctattctcgagcatatttgcatcatctaattagaaatgacgaaatattaggcctaactctcataagtttgcataatattgctcacttaataagatttaccaatgcaatttctactgcaattagagataattgttttacaaatgatttcgctccttggaaaacatcctctattgctcaccatacgtggtaac

SEQ ID NO: 240174 - DNA, 718 bp, Unknown
  Bacterial polypeptide expressing nucleotide sequence isolated from the Sargasso Sea
ggagaaataaatactcctgcatttatgcctgtaggaactcaagcaacggttaaaggagtttttattgatgatattattaaaacaggaagtgaaataatactctcaaatacatatcatttaatgattagaccaggacccgagagaatcgaagcagtgggggggttacataaatttatgaattgcaaacttcctattttgactgactctggaggttatcaagtgatgtctttatcgaaattcaataaaattgacagagataaaggagctatctttcagtcacatatagatggaaaaacttttattttaagtcctgaggaaagtattaaaattcaaaaaaaacttaattcagacattgttatggtaatggatgagtgtccaaaaaatactaatgattataatgtaattaaaacctctatggatctatctacagagtgggcaaagcgatctaaggaagaatttggaacaaatccacaaaaggctttgtttggtatagttcaaggtggattatttaaagatttgagaaatgagtctcttaataaattaatagatatagaatttgacggatatgctattggtggcttagcagttggagaaacccaaaaagaaatgtttaatgttttggatggcatcaaagataacttaccaattgataaaccacgatatttaatgggagtgggaactccatccgatatattaggagcggtaaaaggggtataga

SEQ ID NO: 240175 - DNA, 936 bp, Unknown
  Bacterial polypeptide expressing nucleotide sequence isolated from the Sargasso Sea
tccgtccaggagatgagattataaagcagcttggtggccttcataatttttgtaattggcagaaacctattcttacagattcaggtggctttcaggtatggagtttaggcgatctagcaaaagtttcagagaaaggggtaagttttaaatcaccttatgatggaaagaatatatttatgagtccagaagattcaattcaaattcaagaaaatcttggttcggatattgtgatggtattcgatgaatgtacaaactatccatccaataaaaaagaagcgcaaaaatctatggagctgtcagcaagatgggcagctagatcaaaagaagctcataaatcagaatcagcattgtttggaattgtgcagggaggaatgtatgaagatttaagagaagaatcactaaatcttaccttggcatgtgaatttgatggcattgcgattggagggttaagtgttggcgagcccaaagaagaaaaaacaaaagtgcttaaacatttatcaaatattcttccagaagataagccaaggtatcttatgggagtagggaagcctgaagatattgttgaagcagtcttctatggtgttgaaatgtttgactgtgtcttgcctacgaggaatgcaaggaatggacagcttataactagcacaggagtgataaatattaggaatgcgaaatataaaaatgatgattcaccgatagatgaaaatttagattctaaagtttgtaaaaattattcaaaagcctatttacatcatctagataaaactaatgaaatgttagggtcaatgcttgccagctatcacaatatttattattaccatgagctaatgaagcaaattagacaatcaattgatgacgatatattcgtaaactttgcaaaagacttttataatagtcgaaatttaccaattccagattatttggagggcttataaa

SEQ ID NO: 240176 - DNA, 1027 bp, Unknown
  Bacterial polypeptide expressing nucleotide sequence isolated from the Sargasso Sea
ggtacggtcaaagccacaactccggaagaactgaaaaaacttgggactcagattcttctaggaaacacctaccaccttcatttgcgtcccggagatgaactgattcagaagctcggcggattacaccagttcatgaattgggagggacctattcttaccgacagtggaggatttcaggttttctctcttgctaaactgctcaaacgtgaagaagagggggtgatcttcagaagtcacatcgacggtcgtgaaatcaagatcaccccggaatcctcgataatcatccagcagaatcttggctccaccatcatgatgtgcttcgatgaatgcctggaattgccggcaaaacgtgaaagaatccaaagctctctggaactcacaacacgctgggcaaaacgatgcaaagaatccagaacttctgaccaggctctgttcggtatcatccagggagggggggaagaagatcttcgtgaagaaagtcttcagcaacttcttgaaatcggcttcgatggttacgccatcggaggattaagtgttggtgaaagtaatgaagatatgtatcgggtcacacgccacatagctccccaaatgccgttagaatgtccacgctatttgatgggggtgggagaaccccgagatctgttggagggggttgaagcaggggtagacatgttcgattgcgtgcttccgacacgaaacgcaagaaacggctccctttttaccagcaggggaaaagtttccatcaaacaggcccgctaccgggaagatccggagcctcttgactcggattgtcactgtgagacttgtcagcattacagcagagcctatctcagacatctttatctttcaggagaaatcctagggatgcgcttgaacaccctgcataatctgcattttttcctgaatctgatgaggaaggcgagagaagcgatccttgaaaaccgcttttctcagttcaaaaaagacttcctggaacaatatcaacataaagaatcaattgaattaaagaaagcagaaagcggataaa

SEQ ID NO: 240177 - DNA, 1033 bp, Unknown
  Bacterial polypeptide expressing nucleotide sequence isolated from the Sargasso Sea
aaaattaatacacctgcatttatgcctgttggtacacaggctacagttaaagctacatttattaatgatataattaaaacaggtagtgagataatattaggaaatacttaccatctcatgcttagacctggaactgaaagaatacaagctgcaggtggcttgcatcaatttatgaattgtaaattacctatacttacagattctggtgggtttcaagtaatgtctctttctaagttaaataaaattgataaagaaaaaggagcaatttttaaatcccatatagatggaaaggaatttattttgagtcctgaagaaagcattaaagttcaaaaagatcttaattcagatattgttatggttatggacgaatgtccaaaaaaaagtgttgaatatgaaaaaataaaagactcaatgaatttatcaatgtattgggctgatagatcaaaaaaagcatttggtacaaaccctcataaagctatttttggaattattcaaggaggtttatttaaagatttaagaattaaatctttggaacaacttgagaaaataaactttgatggatatgcaattggaggtcttgccgtgggagagagtcaaaaagaaatgtttaaagtattagatgatattagtaatttcatgccaaaagataagccgaggtacttaatgggtgttggaactccttcagatattatcggagcagtaaaaagaggtgtcgatatgtttgattgtgttttaccaacaaggtctggcagaacaggattagcatttacgtggaatggaaggataaacattcgtaactctaaatatcaaaatgataattcaccactagatccgaaatgtgcaaaatttgatttaaataaatactctaaaaactatttaaatcatctgtttaacacaaatgaaatacttggttctatgttgctaactttacataatataaatttttaccaagaacttatggaaacaataagaaaaaatattgaaaaagggacatttcaacaatttcatgattcatatattaataagctataat

SEQ ID NO: 240178 - DNA, 471 bp, Unknown
  Bacterial polypeptide expressing nucleotide sequence isolated from the Sargasso Sea
tgtcggtcggcgaaccgaaagaagacatgatgcgcgtgctgaaccatatcggcccgaagctgccggccgacaagccgcattacctgatgggcgtcggcacgccggaagacctggtggcgggcgtggccgccggcgtcgacatgttcgactgcgtgatgccgacccgcaacgcgcgcaacggctggctctttacccgcttcggcgacatcaagatccgcaacgccgcgcacaaaaactcactgcgtccgctcgacgagcaatgcggttgctacacctgccgaaacttcacccggggctacctgcaccatctgcatcgtgtaggggaaatcctcggtgcgcagttgaacacgattcacaacctgcactattacctcgagttgatgcaggaaatgcgcgacgcgatcgacgcaaaactgttcgggccgttccgtcagcgcttccacgagaaccgcgcgcgcggcatcgattagc

SEQ ID NO: 240179 - DNA, 216 bp, Unknown
  Bacterial polypeptide expressing nucleotide sequence isolated from the Sargasso Sea
tatgtctgatgtatttcacttgggtttgaaaaaagcggatctgcaaggcgccaccctggcgatcgtccccggtgaccccgagcgcgtgaagcgcatcgcagaactgttggacaacccggtgcacctggccagccatcgtgaattcaccacctggcgcggcgagatggacggcaaggccgtgatcatctgctccaccggtatcggtggcccgtccac

SEQ ID NO: 240180 - DNA, 760 bp, Unknown
  Bacterial polypeptide expressing nucleotide sequence isolated from the Sargasso Sea
atggctgatgtatttcacttaggtttgaccaaagcgatgctcgatggtgccactttggcgattgtgccgggcgatccagagcgtgtaaaacgtattgccgagttaatggataatgctacattcctcgcaagccaccgcgagtacaccagctacttagcgtatgctgacggtaagcctgtggtgatttgctctaccggtatcggtggtccatcgacttctatcgcagtagaagagttagcgcaattaggcgtgaataccttcctgcgtgtgggtaccacaggtgcgattcaaccccatgtaaatgtgggtgatgtgattgtgactcaagcgtcagtgcgtttagatggcgcgagcttacattttgcacctatggagttcccagcagttgctaacttcgaatgtaccacagctatggttgctgcgtgccgcgatgcgggcgtagagcctcatatcggtgttactgcatcttctgataccttctacccaggtcaagagcgttatgacactgtgactggccgtgtgacccgtcgttttgctggctcaatgaaagagtggcaggatatgggcgtgctgaactatgaaatggaatcagcgaccctattcactatgtgtgcgactcaaggttggcgtgcggcgtgtgtggctggcgttatcgtaaaccgcactcaacaggaaatcccgaacgaagcgacaatgaagcaaactgaagtcagtgctgtttctatcgtcgtggctgcggctaagaagcttctggcttaat

SEQ ID NO: 240181 - DNA, 760 bp, Unknown
  Bacterial polypeptide expressing nucleotide sequence isolated from the Sargasso Sea
atggctgatgtatttcatttaggtttgaccaaagcgatgctcgatggcgctacgttggcgattgtgccaggcgatcctgagcgtgtaaaacgtattgctgagttaatggataatccaacgtttcttgcaagccaccgcgagtacaccagctacctagcgtatgctgatggtaagccagtggtgatttgttctaccggtatcggtggtccatcaacatcgattgcggtagaagagttagcgcaattaggcgtgaataccttcttacgtgttggtactacaggtgcgattcaaccccatgtgaatgtgggtgatgtgattgtgactcaagcgtcagtgcgtttagatggcgcgagcttacattttgcaccaatggagttcccagcagtggctaactttgaatgtaccacagctatggttgctgcgtgccgcgatgcgggcgtagagccacatattggtgttaccgcatcttcagataccttctatccaggtcaagagcgttacgacactgtcactggccgtgtgacccgccgttttgctggttcaatgaaagagtggcaagaaatgggcgtgctgaactatgaaatggaatcagctaccctatttactatgtgtgcgactcaaggttggcgcgctgcctgtgtggcgggtgtgatcgtaaaccgtactcaacaagaaattcctgatgaagcaacaatgaagaaaaccgaagtcagtgcggtttctatcgtggttgcagcggctaagaagttactcgcgtaat

SEQ ID NO: 240182 - DNA, 757 bp, Unknown
  Bacterial polypeptide expressing nucleotide sequence isolated from the Sargasso Sea
tatgtctgatgtatttcacttgggtttgaagaaagcggatctgcaaggcgccaccctggcgatcgtccctggtgatcccgagcgcgtgaagcgcatcgcagagctgttggataacccggtgcacctggccagccatcgtgaattcactacctggcgcggcgagatggacggcaaagccgtgatcatctgctccaccggtatcggcggcccgtccacttccatcgcggtggaagagctggctcagctgggcatccgtaccttcctgcgcatcggcaccaccggcgccatccagccgcacctgaacgtgggtgacgtgatcgtcactaccggttccgtgcgcctcgacggtgccagcctgcacttcgcgccgatggagttcccggccgtggccgacttcgactgcaccaccgcgctggtgaacaccgccaaagagctgggttccaagctgcacatcggtgtgactgcctcctccgataccttctacccgggtcaggagcgttacgacaccgtatccggccgcgtcgtgagccgtttccagggttccatgaaagagtggcaagccatgggcgtgctgaactacgagatggaatctgctaccctgctgaccatgtgcaccagccagggcctgcgcgccggtatggtggctggcgtcatcgtcaaccgtacccagcaggaaatcccgaacgccgagaccatggcgaaaaccgaatctgatgccatcaagatcgtactgggcgccgcccgcaagctgatctga

SEQ ID NO: 240183 - DNA, 283 bp, Unknown
  Bacterial polypeptide expressing nucleotide sequence isolated from the Sargasso Sea
ctaccttataatactctaagtcaggactatgagttagaatatggcaaagctacaatcgaaatacacagtgacgcacttaatcgtaatgataaagttctaatagttgatgatttaatagcaactggaggtactgcattagcatctattgaattagttaaaaaattaggtgcaaatgttaacggctgtacttttataattgacttaccagaattaaaaggaagagaaaaaattgaagaaattggtattgaagtgcaaacattgtgcagttttgaagggtactaaa

SEQ ID NO: 240184 - DNA, 484 bp, Unknown
  Bacterial polypeptide expressing nucleotide sequence isolated from the Sargasso Sea
aaaaggtatactttttagagatataactacattaattaaaaatgaaaaagctttttctgagtgtattgaccaaatagtagaaagatctaaaaaattccaatttaacaaattagctgctatagaatctcgaggttttgtttttgcttctgcggtttcctatattttaaaaaaaccttttattcttttaagaaaaaaaaataaattgccaagcgacgtacattcaattgactttgaattagaatatggaacggctacaatggaagttcataaagacgctatcgatcaagatgactcagttttattaatagatgatttaatagctacaggtggaactgctgaagctgcagcaaaattaatcgaaatgtctaaaggaaaagttgctggctatgtttttgtaataaatctatttgatttaggcggttgcgataatcttctaaaaaaaggttataaagttgaaaacttaattgaatttccaggacactaa

SEQ ID NO: 240185 - DNA, 479 bp, Unknown
  Bacterial polypeptide expressing nucleotide sequence isolated from the Sargasso Sea
tatggatttaaaagaatatataagatcaattcctgactaccctaaaaaaggcatactgttcagagatattactactttaataaaagattcaaaggcattcaattactcaattgataaaattgtagaaatttcagagaaattaaaattcgataaaatagcggctatagaatcaagaggctttgtttttgcttcggcagtctcctataagttgaaaaaacctttcataatgttgagaaaaaaaaataaattacctgctggtaaaatttcagtagatttccaattggaatatggaacagcaacattagaagtccataaggattctattagctctggagaaagagtattaataatagatgacctaattgctactggaggaacagcagaagctggtgctaaattagttgaaatgtctaaaggggaagttgcaggatttatttttattataaacttatttgatttaggtggaaataaaaaaactg

SEQ ID NO: 240186 - DNA, 442 bp, Unknown
  Bacterial polypeptide expressing nucleotide sequence isolated from the Sargasso Sea
atggacttaaaaaattttattagatcaataccagattatccaaaaaaaggaattctttttagagacatcacaacgttgattaaagatgaaaatgcttttgctgaaactattaatcaaattgttgaaagatcaaagaaatataattttacaaaaatagcagcaatagagtcgagaggatttgtattcgcttctgcagtttcttatattttaaaaaaaccttttattatgttaaggaaaaaaaataaacttcccgctgatgttcactcagtagattttgagctcgaatatggaacagctactattgaagttcataaagactccataggaaatgaagactctgttttaattattgatgatttaattgcaaccggaggaactgcagaagcagcagcaaaacttgtagaaatttcaaatggtaaagtagcagcttttatatttgtta

SEQ ID NO: 240187 - DNA, 529 bp, Unknown
  Bacterial polypeptide expressing nucleotide sequence isolated from the Sargasso Sea
tatgaatttaaaagattttattcgatctattccagattatcctaaaaaagggatattatttagagatataactactctaataaaagatgaaaatgcttttgcagaaacaattaatcaaataatcgaaaaatcaaaaaaatataaatttgataaaatagcagctatagagtctagaggatttgtatttgcttcagcagtttcttatattttaaaaaagccttttataatgcttagaaaaaaagataaattaccagctgatgtgcattcagtagattttgaacttgagtatggaactgccaccatagaagtccacaaggattctattaatcaaaatgataaagtattaataatagatgatctaatagctactggtggaacagcagaagcatcagcaaaattaattgaactttcaaaaggcaaagttgctgcttttatttttgttattaatttatttgatctaggtggttcagataatttaaaaaaaaatggttacaaaacagaaaacttaattgattttccaggacattaa

SEQ ID NO: 240188 - DNA, 351 bp, Unknown
  Bacterial polypeptide expressing nucleotide sequence isolated from the Sargasso Sea
ttgaatctagaggattcatcatagcatgtgcattagcactgaaatataacaaaggaatgattctcgtacgaaaggcaggaaaattacctggtaaagttgtcaagacatcatatactctagagtatggaaaggcaacattagaagttcagaaagacgtcattcaagaaggacaacgtgttttgatttgtgatgatttgttagcaactggaggtacagcaaaagctgcagcaaagttaattgaaaaaattaatggaaccatagtgggatttgcattcattatagaattacttgaattaaacggtagagataagattaaagattatagatcagaatcattggtggaatactaga

SEQ ID NO: 240189 - DNA, 412 bp, Unknown
  Bacterial polypeptide expressing nucleotide sequence isolated from the Sargasso Sea
atgaacttaaaagattttattagatcaattgcagactatccaaaaaaaggtattttatttagggatattacaactttgattaaagatgaaaatgcatttacagaatgtattaatcaaattattgaaagatcaaaaaaatacaacttcactaaaatagctgcgatagaatctagaggatttgtttttgcatcagcagtttcttatattttaaaaaaaccatttattatgcttagaaaaaaaaacaaacttcctgctgatgttcattcaattgattttgagttagaatacggaacagccacgatagaagttcataaagactcaattaatgaaaaagatagtattcttattattgatgatctgattgctactggtggtactgctgaggctgcagctaaattagttgagatttcaa

SEQ ID NO: 240190 - DNA, 271 bp, Unknown
  Bacterial polypeptide expressing nucleotide sequence isolated from the Sargasso Sea
ttacccggggaaagtaataacaaaagaatacagtttagaatatggcacatcaaaaatgtctattagacaaaacattaacttaaaaaacaaaaacataattttagtcgatgatttactagccactggtggaactttaagatgtggtgaagagttggtaaataataaagagggaaacgtattattttcactaactgttatagagcttgtaaaattaaatggttataaaaacttaaattcaaaagtatattcgttggttaagtatgatgactaa

SEQ ID NO: 240191 - DNA, 148 bp, Unknown
  Bacterial polypeptide expressing nucleotide sequence isolated from the Sargasso Sea
tatggatttaaaaaaatatattagatcaatacccgattatccaaaaaaaggcattttatttagggatataacaacattaataaaaaaccctgaggcttttaattttagtgttgataaaatcatagaaatatcaaaaaaaataaaattt

SEQ ID NO: 240192 - DNA, 304 bp, Unknown
  Bacterial polypeptide expressing nucleotide sequence isolated from the Sargasso Sea
agattgtcggtttgtgttggcccgaaaagcgggaaaactgccaagtaaaactatcacagaagaatatgaattggaatatggtgtagatgctatagaaatgcatagggaggatattaataaaggtgataggataataattgttgatgatttgttggcaacaggaggcaccgcaaaagctacgggaaatattattaaaaaattagatggagaaattgtaagctatgcttttttaattatacttaacttccttaacggaaatcaactattaaaacctgaccctgtattcagtattattgaatactaa

SEQ ID NO: 240193 - DNA, 520 bp, Unknown
  Bacterial polypeptide expressing nucleotide sequence isolated from the Sargasso Sea
aaaaattttattagatcaataccagattatccaaaaaaaggaattctttttagagacattacaactttgattaaagatgaaaatgcttttgctgaaactatcaatcaaattcttgatcgttccaaaaaatttaattttaccaaaatagcagcaatagagtcgagaggatttgtttttgcttcagcagtttcatatttgctaaaaaaaccatttattatgcttagaaaaaaaaataaattacccgcagaagttcattcaatagattttaaacttgaatatgggacagcaactattgaagtacataaagattctataggaagtaaagactctgttttaattatagatgatttgattgcaactggaggaaccgcagaagcagcagcaaaacttgtggaaatttcaaaaggaaaagtagctgcatttatatttgttatcaatttattcgatctcggcggatctgatagcttaattaaaaataattataaagttgagaatttaatcaattttccaggacattagt

SEQ ID NO: 240194 - DNA, 529 bp, Unknown
  Bacterial polypeptide expressing nucleotide sequence isolated from the Sargasso Sea
atggacttaaaggagcacataaggtcaattcaagactatcctaaaaaagggatactttttagagatattacaacgctaataaaaaatgaaaaagctttttgcgaatgtgttgaccaaatagttgaacgatcgaaaaaatttaaatttgataaattggctgcaatagaatctagaggatttgtattcgcttctgcagtttcctacattttaaaaaaaccatttatacttttgcgaaaaaaaaataagttacccggtgatgttcattctattgattttgaattagaatatggaactgctacaatggaggttcataaagatgcaataaatcaaaatgactcggttcttttaatagacgacttaattgcaacaggtggaactgcagaagcagctgctaagttaattgaaatatctaaaggtagcgttgctggttatgtttttgtaataaatttatttgatttaggaggatgtgataatcttaaaaaaaaaggttataaaattgaaaatttgattgaatttccaggacattaaa

SEQ ID NO: 240195 - DNA, 529 bp, Unknown
  Bacterial polypeptide expressing nucleotide sequence isolated from the Sargasso Sea
tatggacttaaaaaattttattagatcaataccagattatccaaaaaaaggaattctttttagagacattacaacgttgattaaagatgaaaatgcatttgctgcaactatcaatcaaatagttcaaagatcaaagaaatataattttacaaaaatagcagcaatagagtcgaggggatttgtattcgcttctgcagtttcttatattttaaaaaaaccttttattatgttaaggaaaaaaaataaacttcccgctgatgttcactcagtagattttgagctcgaatatggaacagctactattgaagttcataaagactccataggaaatgaagactctgtcttaattattgatgatttaattgcaaccggaggaactgcagaagcagcagcaaaacttgtagaaatttcaaatggtaaagtagcagcttttatatttgttattaatttatttgatcttggtgggtcagataacttgattaaaaaaaattacaaagttgaaaatttaattgaatttccagggcattaa

SEQ ID NO: 240196 - DNA, 391 bp, Unknown
  Bacterial polypeptide expressing nucleotide sequence isolated from the Sargasso Sea
atggatttaaaagattatattaggtcaattcccgactacccaaaaaaaggaattctttttagagatataacaacattaattaaagacgaaaaagcatttaaggaatgtataaatcaaattgtagacaggtgtaaaaaatttaaaattgataaaattgctgcaatagaatcaagaggttttgtttttgcatcagcagtttcgtatttacttgataaaccatttattttattaagaaaaaaaaataagttacctgctgacacacactcagtggattttcaacttgaatatggaacagctactattgaggttcataaagattcaataaataaagatgattctgttttaataatagatgacctaatagcaactggaggaactgcggaggctgccg

SEQ ID NO: 240197 - DNA, 529 bp, Unknown
  Bacterial polypeptide expressing nucleotide sequence isolated from the Sargasso Sea
atgaatttaaaagattttattagatctattcctgattatccaaaaaaaggtatactttttagagatattactaccttgataaaagatgaaaatgcattcgcagaaacaataaatcaaattgttgaaagatcaaaaaaatttaatttcactaaaattgcagcaatagaatctaggggttttgtttttgcatcagctgtttcgtatattttaaaaaaaccatttataatgcttagaaaaaaaaataaattaccagcagacgtacattcagttgattttgagcttgagtatggaacagcaacaattgaggtgcacaaagattctattaatgagaatgatagtgtattaattatagatgatcttatagccacaggaggaacagcggaagcagcagcagaattagttgagatctcgaaaggaaaagttgctgctttcatttttgttattaacttatttgacttaaatggttcggataatttaattaaaaaaggttatcaaatcgagaatttaattaattttccaggtcattgaa

SEQ ID NO: 240198 - DNA, 502 bp, Unknown
  Bacterial polypeptide expressing nucleotide sequence isolated from the Sargasso Sea
tatgataaattataaaaaatatataaaagaatataaagactttccaatagatggtattaactatcttgatatgaatccaatatatcaggatggacaaataagaacaagattagttagagattgtgtagacagtgctaggaaagtagattttgattatattggtattgtggagtcaagaggatttattattggttctataatagcacatgaacttggaaagggtgttgttttactgagaagtaaaaaaaatagattacctggaaaaactcatactgttggacatacattagaatatggagaatcaatggttcaagttcaagagggtgagggtaaggttcttgtatttgatgatgtattagctacaggtggaactgccaaaggttctatcgaagttttaaataaagctggatacactccagtaggagctttattccttgtggaattagatttcctaaatcctaaattagatataccacatcaaagcataattcattatgagtag

SEQ ID NO: 240199 - DNA, 295 bp, Unknown
  Bacterial polypeptide expressing nucleotide sequence isolated from the Sargasso Sea
aatgattcttcttagaaaggcaggaaaattacctggaaaagttgcaaagacatcatatacgctagaatatggcaaggcgacattagaagtacaaaaagatgttatcaaagaagggcaacgtgtagttatttgtgatgatttacttgcaacaggaggaactgcaaaggcagcagcaaaattaattgagaaaattaaaggagaaattacaggctttgcattcattattgaattacttgaactaaatggcagagataagattaaagattatagatcagaatcactggtggaatactaa

SEQ ID NO: 240200 - DNA, 493 bp, Unknown
  Bacterial polypeptide expressing nucleotide sequence isolated from the Sargasso Sea
taccctaaaaaaggtattttatttagagacatcacaactttgattaaaaatgcaaatgcatttgccgaaaccattaatcaaataattgaaagatcaaagaaatataattttacaaaaattgctgcgatagagtcaagaggttttgtgtttgcttctgcagtttcttatattttaaaaaaaccttttattatgcttaggaaaaaaaataaattgcctgctgatgtacattctgtagattttgagcttgaatatggaacagcaaccattgaagttcataaagactcattaaatgaaaatgatagtgtattgataattgatgatttgattgctacaggtggaaccgcagaagcagcagctaaacttgttgaactttctagtagtaaagtttctgcttttgtttttgtgattaatttatttgatttaggagggtcagataagttaataaaaaaaaactataaagttgaaaatttagttgattttcctggtcattaat

SEQ ID NO: 240201 - DNA, 474 bp, Unknown
  Bacterial polypeptide expressing nucleotide sequence isolated from the Sargasso Sea
tatttagagatatcactactttaattaaagatgagaatgcttttgaggaaacaataaatcaaatagttaaaagatcaaagaaatacaattttacaaaaattgcagcaattgagtctcgtggttttgtatttgcatctgcggtttcttatattttgaaaaaaccatttataatgttaagaaaaaaaaataaattacctgctgatgttcatactattgattttgaactagagtatggaacagcaacaattgaagtgcataaagattctttaaatgaaaatgatagtgttttgattatagatgacttaattgcaactggtggtacagccgaagcagcagccaagcttgtagaaatttcaaagggaaaagtcgcagcattcatttttgtcattaacttatttgatttaggtgggtctgaaaacctgataaaaaacagttataaagttgaaaatttaatagatttccctggacattaat

SEQ ID NO: 240202 - DNA, 118 bp, Unknown
  Bacterial polypeptide expressing nucleotide sequence isolated from the Sargasso Sea
tatggatctaaaaaaatacataaggtcaattcaagattacccaaaaaagggaattttatttcgcgatattacgaccttaattaaaaatgcagaagcttttaaatatacaaatgataaa

SEQ ID NO: 240203 - DNA, 529 bp, Unknown
  Bacterial polypeptide expressing nucleotide sequence isolated from the Sargasso Sea
aatgaacttaaaagaccatattcgatcaataaaggattatccaaaaaaaggtatattatttagagatattacaactttaataaaaaatgaggaagctttcattaaatgtatagatgaaattgtagatcgaagtaaaaaatttaaatttgataaaattgctgcaatagaatctagaggttttgttttcgcttctgcagtatcctatttgcttaaaaaaccattcattcttttaaggaagaaaaacaaattacctgctgaaactcattctgtggaatttgaattagaatatggaaaagctacaatggaaatccataaagattctattaaagaaaatgaatcagtgctgctaatagatgatttaattgctacaggcggaacagctgaagctgctactaaactaattgaattatctaaaggaaaagtcgcagggtttatttttgtaattaatttatttgatcttggtggttgtgataatttagttaaaaaaggtcataaaatagaaaatttaattgattttccaggtcattaa

SEQ ID NO: 240204 - DNA, 529 bp, Unknown
  Bacterial polypeptide expressing nucleotide sequence isolated from the Sargasso Sea
atggatttaaaagaatatattagatcaatacccgactatccaaaaaagggaattttgtttagagatataacaacacttattaaagatgaaaaagcattttctaaaacaattgatttgattgttaaaaagtctgaaaaatttgaaattgataaaattgcagcaattgagtctcgtggttttgtgtttgcatccgctgtctcatacattttaaaaaaacctttcataatgctaaggaaaaagaataaacttcctgcagatacacacagtgtaaattttgaattagaatacggaacagcaacaattgagattcacaaagattcaataaagaaaaatgataatattttaattatagatgatttgatagctactggtggaacagctgaagcagctgcgaaacttgtggaaatatcgaatggaaatgtatcagcttttatttttgtaattaatttatttgatcttggtggctgcaataaattaattgaaaaaggatacaaagtagaaaatttaatggattttcctggtcactaaa

SEQ ID NO: 240205 - DNA, 529 bp, Unknown
  Bacterial polypeptide expressing nucleotide sequence isolated from the Sargasso Sea
atgaacttaaaagactatattagatcaatccctgactaccctaaaaaaggcattttattcagagatataactactttaatcaaaaatgaaaaagcatttaaagaaacgattgatcaaataattgaaaggtcaaaaaagtttaattttactaaaattgcagcaattgaatcaagaggatttgttttcgcttcagccgtttcatatattttaaaaaagccttttgtgatgcttagaaaaaaaaataaattaccggctgatgtatattcggtagattttgagcttgaatatggaactgcaacgattgaagttcataaagactcgattgatgaaaacgaaaatgttttaattattgatgatcttatcgcaactggtggaactgcagaagcagctgcccaacttatagaaatttcaaaaggaaaggtggaggcttttatttttgtaattaatttatttgatctaggaggaactgataaattactaaaaaaagaatataaagttgaaagcctaattgaatttccaggacattaaa

SEQ ID NO: 240206 - DNA, 529 bp, Unknown
  Bacterial polypeptide expressing nucleotide sequence isolated from the Sargasso Sea
tatggatttaaaaaaacatataagatcaatacaagactatcctaaaaaaggcattctttttagagatataaccactttaattaagaacgaaaaagcattctgtgagtgtatagaccaattagttgaaaaatctaaaaaatttgagtttaataaattagcggcaatagaatctagaggttttgtttttgcttcagctgtttcatatttattaaaaaaaccttttattctcttaagaaagaaaaataaattacctgctgaaacacacacaatagatttcgaattagaatatggaaccgcaacaatggaagtgcataaagatgcaataaataaaaatgataatgttcttttaatcgatgatttaatagcaacaggtggtacagcagaagcagctgcaaaacttattgaaatgtctgagggaaatgtagcaggatatgtttttgtaataaatctatttgatttagatggatgcaataaactgataaaaaaaggttataaagtagaaaatttaatagaatttccaggtcattaa

SEQ ID NO: 240207 - DNA, 493 bp, Unknown
  Bacterial polypeptide expressing nucleotide sequence isolated from the Sargasso Sea
atgaatttgaaagattttattagatctattccagattatcccaaaaaagggattttatttagagacattactacactgattaaggatgaaaatgcatttgctaaaaccattgatcaaatagttgaaagatcaaagaaatataatttttcaaaaatcgctgcaatagagtctagaggatttgtatttgcttctgcagtttcttatattttaaaaaaaccttttattatgctaagaaaaaaaaataaactaccagctgatgttcactctgtagattttgaattagaatatggaacggctactattgaagttcataaagactcattaaacgaaaatgatagtgttttaataattgatgatttaattgcaactggaggaactgcagaagcagcagcaaaacttgtagaaatttcaaatggtaaagtggcagctttcatatttgttattaatttatttgatctgggtgggtcagataacttacttaaaagtaactata

SEQ ID NO: 240208 - DNA, 295 bp, Unknown
  Bacterial polypeptide expressing nucleotide sequence isolated from the Sargasso Sea
atggatttaaaaaaatatataagatctattccagattacccaaaaaaaggcattttatttagagatattactactttgataaaaaaccctgaggcttttaatttcgctattgataaaattgtcgatatatccaaaaaagttaaattcgataaaattgctgccattgaatcaagaggattcgtttttgcttcagctgtgtcctataagttgaaaaaaccattaattatgatgagaaaaaaaaataaacttccagcagaaagatattcagttgattttgaattagaatatgaaaagc

SEQ ID NO: 240209 - DNA, 529 bp, Unknown
  Bacterial polypeptide expressing nucleotide sequence isolated from the Sargasso Sea
atggatttaaaagattatattcgctcaattaaagattatcctaaaaagggtattttatttagagatataactactttaataaagaatgagactgcttttgaggaaacgattaatcaaattgtcgaaagatccaaaaaatttaaggtagataaaatagctgcaattgaatctcgtggttttgtatttgcatctgctgtttcttacatattaaaaaaaccatttataatgctaagaaaaaaaaacaaacttcctgctgatgtgcactcagttgattttgaacttgaatatggaacagcaacaatagaggttcataaagattcaatttcagaaaatgattcagttctaataatagatgatttgatagcaacaggaggaaccgcagaagctgcagcgaaacttatagaaatttctgatggaaatgttgcagcttttatatttgtcataaatctttttgacttaggtggttgcgataatcttataaaaaaaggatataaagttgaaaatttaatggaatttccaggtcattagt

SEQ ID NO: 240210 - DNA, 520 bp, Unknown
  Bacterial polypeptide expressing nucleotide sequence isolated from the Sargasso Sea
aatggaaaacattaaaaaatacatagctgaaataactgattttcccaaagtaggaataacctacagagatttaaatcctatatataaagagcccaatgcatggaaagaattaatgttgccactgcacaagctaatatcttctgcaaaaccagattatatagctggcatagagtcgagaggatttatttctgcatcagctctcgcttttaagcttgaaataggatttattcctattagaaaacctaataaattacctggagatgtattaggaattgattataaacttgagtatggtgaagacaggctagagattcaaagaaattcaattaaaccaaatagcaaggtaattttaattgatgatttattagcaacaggagggactgcagctgccgcaggtaaattgatcaataaagcaggaggtgatttaatcggatacgcatttcttgtagaacttactgaacttaatggcagaaataatttatattccaatttatttatagaaagtctaataaagtattaa

SEQ ID NO: 240211 - DNA, 310 bp, Unknown
  Bacterial polypeptide expressing nucleotide sequence isolated from the Sargasso Sea
tatgaaagaatatgtaagaacgattgctgattatcctgttaaaggtatccagtttagagatataactacgcttttgcaagatgcaggtcattttaggcaagtagtggatgagatgacttctccatggaaaaataaaaaaattgatgcagtactcagtattgaatcaagaggttttattatggcaggagctatagcatattttttaaatgccgctttcataccattaagaaaacctcataagctaccatttgaaacatacaaagtttcatacgatctggaatacggttcaactgaaatgcacattcacact

SEQ ID NO: 240212 - DNA, 316 bp, Unknown
  Bacterial polypeptide expressing nucleotide sequence isolated from the Sargasso Sea
ttgaacaaaaaactaaaaaataatcttgaaaagaaagttagggtaattcttaattttccaaaaaaaggtattcagtttcaagatataacttcaatcacagacagtaagcagctttttaccgaagttgttaatgaaatttctaaatattgtaaaaaaaataaatttactaaagtagctggtatagaagcaagaggcttcatctttggatcagcagttgcctacaagcttggcttaccttttattccaataagaaaaaaagggaaacttcccggaaaaatagtcaaacaaaaatacaagttagagtatggaatggatg

SEQ ID NO: 240213 - DNA, 439 bp, Unknown
  Bacterial polypeptide expressing nucleotide sequence isolated from the Sargasso Sea
tatgaacttaaaagattatattagatcaatacctgattatccaaaaaaaggcattttatttagagatatcacaacattaattaaagatgaaaatgctttttgtgaaaccattaatcaaatcgtagaaagatcgaaaaaatttaattttacaaaaattgcggcaatagaatctaggggttttgtgtttgcttcagcagtttcatatgtattaaaaaaaccatttataatgcttcgaaaaaaaaataaattacctgcagaagttcattcggttgattttgagttagaatatggaaaagctacgattgaggttcataaagactctattaataataatgacacagttcttattatagatgacttaattgctactgggggaactgctgaagctgctgcaaaattaatcgaatttagcaaaggaaatgttgcgggttttatattt

SEQ ID NO: 240214 - DNA, 529 bp, Unknown
  Bacterial polypeptide expressing nucleotide sequence isolated from the Sargasso Sea
tatggatttaaaagaatatattcggtcgatacctgactatccaaaaaggggcattttatttagagacataacaactctcattaaaaatgaaaaagcttttgaggagacagttaaccaaattattgaaagatcaaaaaaatataaagttgataaaattgcagcaattgagtcgagaggttttgtttttgcatcagcagtttcatatttactaaaaaaaccgttcatcatgttacgtaagaaaaataaattacctgccgatgttcattctgttgattttgagcttgaatatggaacagccacaatagaagtacacaaagattcgattaatgaaaaagacaatgtcttaataattgatgatttaattgctacaggaggtacagcagaagctgctgcaaaattagttgagatctcaaatggaaaggttgctgcattcatttttgtaattaatttatttgaccttggaggatgcgaaaaattaattcaaaataattataaagttgaaaatttaattgaatttcctggtcactaa

SEQ ID NO: 240215 - DNA, 529 bp, Unknown
  Bacterial polypeptide expressing nucleotide sequence isolated from the Sargasso Sea
atggatttaaaagattatattagatcaattcctgactatcctaaaaagggaattttatttagagatatcacaactttaattaaagatgaaaatgctttttcatgttgcgtagacttaatagttgaaaaatccaaaaattttaattttgataaaattgcagccatagagtctagaggatttgtatttgcatcggcagtatcgtatttagttaagaaaccttttataatgttgagaaaaaaaaataagcttcctgctgaaactcattctgttgattttgaacttgaatacggaacagctactatcgaagtacataaagactctatagaaaaaaatgataatatattaataattgatgacctaatcgccacaggtggaacggcagaagcagctgcaaaactagtaaaaatttcgaatggaaatattgcaggttttatttttgtaataaatttatttgatttaggaggaaataagaatttaacaaaacaaaattataaagttgaaaatttaattgaatttcctggacattaag

SEQ ID NO: 240216 - DNA, 529 bp, Unknown
  Bacterial polypeptide expressing nucleotide sequence isolated from the Sargasso Sea
atgaatttaaaagattatattagatctattccagattatccaaaaaagggcattttatttagagatatcactactttaattaaagatgaaaatgcatatgcagaaacaattaatcagattgttgaaagatcaaaaaaatttagctttacaaaaattgcggccatagagtctagaggatttgtgtttgcttctgctgtttcttttgtacttaaaaaaccatttgttatgctaagaaaaaaaaataaattaccagcagatgttcactcagtagattttgatcttgaatatggaactgcaactattgaagtccacaaagattcaattaatgaaaaagacgaggtattaataatagatgaccttatagcgactggaggaactgccaaagcagcagcaaaattggttgaagtttctaaaggtaaagttgcagcatttgtatttgtaataaacttatttgatctaggtggatctgataatttagtaaaaagtaattataaagttgagaatttaattgaatttcctggacattaga

SEQ ID NO: 240217 - DNA, 491 bp, Unknown
  Bacterial polypeptide expressing nucleotide sequence isolated from the Sargasso Sea
tatgaatttaaaagattttattaggtctattcctgattatccaaaaaaaggtatattatttagagatatcacaactctaatcaaagacgaaaaagcgtttgcagacactattaatcaaatagtggaaagatcaaaaaaatttaactttaataaaatagcagctatagaatcaagaggttttgtttttgcatctgctgtttcatatatcgttaaaaaaccttttataatgttaagaaaaaaaaataaattacctgctgaagttcattctgtagattttgaattagaatatggaactgcaactatcgaggttcataaagattctattaataaggatgataaagtcctaattattgatgatttaattgcaaccggtggtactgctgaagctgccgctaaattagtagaaatttcaggtggaaatgttgcctgttttgtatttgttataaatctttttgatttgaatggctctgacaatttaattaaaaaaggtt

SEQ ID NO: 240218 - DNA, 388 bp, Unknown
  Bacterial polypeptide expressing nucleotide sequence isolated from the Sargasso Sea
atgaatttaaaagaatatattaggtcaattcaagattatcctaaaaaaggaattttatttagagatattacaactcttataaaaaatgaaaaagcattcaaagaatgcattaatcaaatagttgaaagatcaaaaaaattcaaatttgataaaatagccgctgtcgaatcaagaggttttgtttttgcctcagctatttcttatattttagataaaccatttataatgctcagaaaaaaaaataagcttcctgcagaagttcattctattgattttgaattggaatatggaacagctactattgaagttcacaaagactcttttgataagaacgataatgtattaattattgatgatttaatagcaactggaggcacagcagaagctg

SEQ ID NO: 240219 - DNA, 446 bp, Unknown
  Bacterial polypeptide expressing nucleotide sequence isolated from the Sargasso Sea
acttcaaaatgctggtcattttaaacacgttattgatgagatgacaacaccttggattaataaaaaaattgatgcagtattaagtatagagtctagaggatttattatggcaggtgcaattgcatataatattggagctgcatttataccattcagaaaaccagataaactacctggtgaaacgtataaagtatcatatgatttagaatacggttctaccgaaatgcatgttcataaagatgcattagataatcatactaatcttcttataattgatgatcttttagctactggtggaacagcattagctgcgatagaattagtaaatatgtttgaaaataaaaatataataggtgctggatttattataaatttgcctaaattaaaaggtgatcaaaaattaataaataaaggtatcaatattcattcattgatggagttttaaa

SEQ ID NO: 240220 - DNA, 493 bp, Unknown
  Bacterial polypeptide expressing nucleotide sequence isolated from the Sargasso Sea
taccctaaaaaaggaatactgtttagagatatcaccactttaattaaaagtcctcaagcatttaaatatacagtagataaaattattgagatttcaaaaaaaattaaatttgataaggtttcagctattgagtccagaggctttgtgtttgcatcagcagtatcttatttgcttaataaacctttaattcttttaagaaaaaaaaataagttacctgcagaaaggcactctgttgactttaagttagagtatggtgaagctacaattgaagttcataaagactcaataaataaaggtgaaaatattttagttatagacgacttaattgcgacagggggaacggctgaagctgctgcaaaactaattgagttatctgggggatcggtcgctggatttatatttgtaataaatctctttgatttacctggtaacgatcttctcaaaaaaaagtcttattttactgaaagtttaattgagtttcccggtcactaga

SEQ ID NO: 240221 - DNA, 529 bp, Unknown
  Bacterial polypeptide expressing nucleotide sequence isolated from the Sargasso Sea
tatgaatttaaaagattttattagatcaatacctgattacccgaaaaaagggatattatttagagatattactacactaatcaaagatgaaaatgctttttctgaaacaattaaccaaataattgaaagatcaaaaaagcttaggtttaataaaatagccgcaatagaatcaagaggctttgtttttgcatcagcagtttcatatattttaaaaaaacctttcatcatgttaaggaaaaaaaataagctaccttctgaagttcattctgtagattttgagcttgaatatggtaccgctacaatagaggtgcataaagactctataggtaaagatgataatgttcttgttattgatgatttaattgcaactggtggaactgctgaagcagctgcaaaattagttgaaatttctggaggaaatgtatctggttttatttttgtaataaatctttttgacttaaatggatctgacaatttacaaaagaaaggttacaaagtggaaaatttaattgaatttccaggtcactaa

SEQ ID NO: 240222 - DNA, 484 bp, Unknown
  Bacterial polypeptide expressing nucleotide sequence isolated from the Sargasso Sea
tatggatttaaaagattatattcgatcaataaaagattatccaaaaaagggtattttatttagggatattactactttaattaaagatgaattggcttttgaagaaacaattaatcaaattgttgaaaggtctaaaaaatttaaggtagataaaatagctgcaattgaatcacgaggatttgtttttgcatctgctgtttcttacatcttaaaaaaaccatttatattgcttagaaaaaaaaataaactccctgctgaagttcactcagttaattttgaacttgaatatggaactgcaactattgaggttcataaagattctatttctaaaaatgaatctgtgctaataatagatgacttaattgctacaggtgggacagctgaagcagcagcaaaacttatagaggtttctgaaggtaaagttgaagcctttatatttgtaattaatctttttgatttaggtggttgcgataatctttctaaa

SEQ ID NO: 240223 - DNA, 178 bp, Unknown
  Bacterial polypeptide expressing nucleotide sequence isolated from the Sargasso Sea
atggaagatcttcagaaatggattaagagttacccagattttccttcaaaaggaattcttttcagggatataagccccctattggctgaaccttcagcattgagtcttttgaaagataaatttgttgaaaccattagacctctttcgcccgattacattgcaggtatagatgccagag

SEQ ID NO: 240224 - DNA, 529 bp, Unknown
  Bacterial polypeptide expressing nucleotide sequence isolated from the Sargasso Sea
aatgaacttaaaagactacattagatcaattcctgattatccaaaaaaaggtattttatttagagatatcactactttaattaaagatgaaagtgcattcgcagaaaccatcaatcaaattgtagaaagatcaaaaaaatataacttcaataaaattgctgctattgaatcaagaggattcgtttttgcttctgcagtttcatacatcctaaaaaaaccatttataatgcttaggaaaaaaaataaattaccagctgatgtccattctgttgattttgaacttgaatatggaacggccactatcgaagttcataaagactctctagataaaaatgatagtgttttaattattgatgacttaatagctactggcggtacagcagaagcagctgctaaactagttgaaatttcaaacagtaaagtagcagcgtttatttttgtaattaatttattcgatttaggtggatctgataatttaaaaaagaataattatagagttgaaaatttaattgattttccaggacactaa

SEQ ID NO: 240225 - DNA, 91 bp, Unknown
  Bacterial polypeptide expressing nucleotide sequence isolated from the Sargasso Sea
atggatttaaaaaaatatataagatcaatacctgattatccaaaaaaaggaatattattcagagatataactacattaatcaaaaatcctg

SEQ ID NO: 240226 - DNA, 517 bp, Unknown
  Bacterial polypeptide expressing nucleotide sequence isolated from the Sargasso Sea
tttgaaagaatttgttagaacaattaaagactacccaataaaaggcattcagtttagagacataaccacactattgcaaagagcagacttatttcatgacttaattgatgaaatgacaaaaccttgggaaaataaaaatattgatgcaattgtaagcattgaggcaagaggttttataatggcaggcgcaatagcgtataaattaaatacttcgtttattccaatgcgtaagcctgataagttacctgctgacacatttaaagtgaaatttgatttagaatatggttcaactgaaatgcacctccataaagacgcccttgacaaccatcaaaatattttaataattgatgatttgcttgcgactggcggaactgccgtagcagctgttaagcttattaatatgtttaaaaacaaaaatattgttggagcgggatttataataaatctacctgaattaaaaggtgaagaaattttgaataaaatgggtataaaaacccactcacttatggaattttaa

SEQ ID NO: 240227 - DNA, 289 bp, Unknown
  Bacterial polypeptide expressing nucleotide sequence isolated from the Sargasso Sea
aaaccagataaactacccgggtgaaacatataaagtatcatatgatttagaatacggttctaccgaaatgcatgttcataaagatgcattagataatcatactaatcttcttataattgatgatcttttagctactggaggaacagcgttagctgcgatagaattagtaaatatgtttgagaataaaaatataataggtgctggatttattataaatttgcctaaattaaaaggtgatcaaaaattaataaataaaggtattaatattcattcattgatggagttttaa

SEQ ID NO: 240228 - DNA, 565 bp, Unknown
  Bacterial polypeptide expressing nucleotide sequence isolated from the Sargasso Sea
aatgggagtgaaattaaaaattgtgacagatcctttaaaccttaagaaatatatcagaaatatcaaagattttccaatagatggtatcgagttcagagatattacaagtctaattgaatctcctgaagcttttgtaagaacttgtgatgaactaataaagattaccaaagattttaacccctctgctgtggcaagcattgaaagcagaggctttatatttgctggttcaatatcttataagcttgctttgccctttgtcttagcaagaaagccaggtaagttacctaatgccacattcaaaaagaattttgatctagaatatggcagcacatcaattgaaattcagaagaatacggtgctcaaagcctccgaccgtgttgtcatagttgatgacttagttgcaactggaggtacggctatagcttgtgctgaattattaacagaaaactttaatattaagaaatcaaatattctaattttaagcgttatagatctgcctgacttaggcggtagtaaattaattcaggatcagggctaccaaattgagactcttgtcagttattaa

SEQ ID NO: 240229 - DNA, 535 bp, Unknown
  Bacterial polypeptide expressing nucleotide sequence isolated from the Sargasso Sea
atggctgaaaagttaattataaaatttgatgaatatttagatacagttgagaaattagcattaacaataagtcaaaattataaaccaactgttttagttggcatcatgagaggggcagctcctataattgacatcttatctaggattttaaagttaccgactgcatatatagtaatccaaagttattctggtagtggaattgaaaataaacagggagaactaatttttgcacgagatataagttcgatcgctagtaatatcgattatgaaagagtattattagtagatgatctatctgatacaggtcttacactaaataaaagtatagaatggttaaaacaatatgaaccagttaaaaattatattaaagagattaaaacagcctgtttgtggaaaaaaaaatcgtcttcatttacaccagatttttgtcccgttagattgagtagtgacccatggataattcagcctacagagcattatgaagaattaaatattgaagagatagtttctaaacgaaaaaaaagggctaaataat

SEQ ID NO: 240230 - DNA, 273 bp, Unknown
  Bacterial polypeptide expressing nucleotide sequence isolated from the Sargasso Sea
aatgaaacaatttattagatctataaatgattatccaaaaaaaggaataatttttcgagatataacgccattattagaagatcctcttcagtttcgaacaatgatagattgtatgactaatccttggaaagaaaaaaatattgatgcagttttaagtattgaggcacgaggatttattatggctggtgcaattgcatataatcttggtgcagcatttatacctttaagaaagccggataaactgccctgtgagacttatcaagtgtcttatga

SEQ ID NO: 240231 - DNA, 520 bp, Unknown
  Bacterial polypeptide expressing nucleotide sequence isolated from the Sargasso Sea
ttgacatcttttaatttaaataattacataaaagatcattttgattttcctgaaaagggaatagtatttaaggattggctcccattgcttcagaaacctgaggcattcaatgaggtcataaaccaaatttctaattgggatcaatttaataatgccgatgcaattatagctatcgatgcacggggctttattttgggatcatgtattgcatatagattatctaagcctttaattcttgctagaaaaccaggaaaacttccaggagaattaataacaaaatcctatcaactagaatatggaaaaaatgaattatcgattcagaaggattccttagctgaatttgataattttctaataattgatgatttgttggcaactggtgggacagttaattccgttgttaatattttggaagaagccaagaaaaatatagttggattatttattttaattgaacttctaaaattaaaaggaagagaaaattttaatttccccattaaaagtatcgtaagtttttgat

SEQ ID NO: 240232 - DNA, 529 bp, Unknown
  Bacterial polypeptide expressing nucleotide sequence isolated from the Sargasso Sea
atgaatcttaaagagtatattagatcaatacctgattacccaaaaaaaggaattttattcagagatataacaacgcttattaagaatgaaaaagcttttacagaaactataaaccagataattgaaatattaaaaaaatataaattcgacaaaattgccgctattgagtctagaggatttgtatttgcttctgcagtttcttatttattaaagaaaccatttattttactaagaaaaaaaaataaattaccagctgaaagattttcaattgattttgaacttgagtatggaacagcgacaatagaaatgcataaggactcggttaatatgggagataaggtagtaattattgatgatttaatagcaacaggaggaactgctgaggctggagctaaaataattgagatgggaaatgctcaaattgaattatttatatttgtcataaatttatttgatcttggtggctgtgataagcttattgaaaaaggatataaagtagaaaacttaattgaatttcctggacattaat

SEQ ID NO: 240233 - DNA, 359 bp, Unknown
  Bacterial polypeptide expressing nucleotide sequence isolated from the Sargasso Sea
aatgaaagaatacgttcgaacaattgctgattatcctgttgaaggaattcaatttagagatattacaacattgttgcaaaatgcaggacattttaaacaagtcattgatgacatggtaaaaccatgggaaaataaaaaaatagatgcagttttaagcatagaatcacgtggatttattatggcaggtgcaatagcttattttttaaatgcagcatttgttcctttgagaaagcctcataaactcccatttgatactttcaaaacctcatacgacttagaatatggatcaactgaaatgcatattcatacagatgccttagatggtcataaagatttactaattattgatgatcttttag

SEQ ID NO: 240234 - DNA, 529 bp, Unknown
  Bacterial polypeptide expressing nucleotide sequence isolated from the Sargasso Sea
tatggatttaaaagaacacataagatcgatacaagattatcctaaaaaaggcatactttttagagatataactactttaattaagaatgaaaaagctttttgcgaatgtgtagatcaaatagttgaaagatctaaaaaatttcaatttaataaattagcagccatagagtccagaggttttgtttttgcttcggcagtttcctatttattaaaaaaacctttcatacttttaaggaagaaaaataaattaccagcagaaacacattctattgaatttaaattagaatatggaacagcaactatggaaatgcacaaagatgcaattgataaaaatgataatgttcttctaatagatgatttgatagcaacaggtggaactgcagaagcggctgcaaaacttattgaaatgtctgggggaaatgtagcaggatatgtttttgtaataaatctatttgatttagatggatgtgataaacttataaaaaaaggttacaaagtagaaaatttaatagaatttccaggtcattag

SEQ ID NO: 240235 - DNA, 529 bp, Unknown
  Bacterial polypeptide expressing nucleotide sequence isolated from the Sargasso Sea
atggatttaaaaaaatttataaggtcgatacctgattatccaaaaaaaggtattttatttagagacattacaactttaattaaagaagagaaagcatttgaagaaacaattaatcaaatcgttgaacgatcaagaaaatttaaattttcaaagattgctgcgattgaatccagaggttttgtattcgcttcggctgtatcttatattctaaaaaaaccttttattatgttgagaaaaaaaaataagttaccagccgaaactcactctgttgattttgaactagaatatggaaaagccacaattgaagtacataaagactcgatcaatcaaggagaagctgttttaattattgacgatttaatagccacaggaggtacagccgaggcagccgctaaattaattgatttttcaaaaggatcggttgctgggtttatttttgttataaatctttttgacttaaagggatcggataaattaattaatttaggatataaagtagaaaatttaattaattttcctgggcattaat

SEQ ID NO: 240236 - DNA, 529 bp, Unknown
  Bacterial polypeptide expressing nucleotide sequence isolated from the Sargasso Sea
tatgaatttaaaaaaatatataagatcaatacctgattatccaaaaaaaggaatactgtttagagatatcacgactcttattaaaaatcccgaagcatttaattatacagtagatagaattgttgaaatttcgaaaaaaattaaatttgacaaaatatcagcaatagaatctagaggttttatttttgcttcagctgtctcatacctgctcaataaacctttaatacttttaagaaaaaaaaataaattacctgcagaaagacattctgttgattttaaattagagtacggtgaggctactattgaagtacacaaagattcaatagaaaaaaaggagaaaatattggttatagacgatctaatagctacaggggggacagctgaagcagcagcaaaaattatagaaatatcaggaggtacagtagctggttttatctttgttataaatttattcgatctacctggtaacaacctgcttaaaaaaaaatcttattttactgaaagcttaatagaatttcctggtcactag

SEQ ID NO: 240237 - DNA, 406 bp, Unknown
  Bacterial polypeptide expressing nucleotide sequence isolated from the Sargasso Sea
atgcaaagtcttaatgaattaattgacacgtacaaagactatcctaaaaaaggaattgagtttaaagatgttttaggcattattcaaaaacctcaagtattcaagcaacttgtcttgaacatgtcatctagtcaaatcataaaaaacgctgaagcaataattgctatagatgctagaggttttatttttggatcagcgatctctttgcatgcatcaaagcctatggttgtagcgagaaaacctggcaaacttccaggagaacttctagaagaaaaatataatttagagtatggagaaaattcactttccattcaaaaaaaagctttaaaaaaattcaaatcttatgcaattgttgatgatttattagctactggcggaacagtaaattgtgtttcaaaaatttgaa

SEQ ID NO: 240238 - DNA, 529 bp, Unknown
  Bacterial polypeptide expressing nucleotide sequence isolated from the Sargasso Sea
atggatttaaaagaatatattagatcaattcctgactatccaaaaaaaggtatcttatttagggacattactactttaatcaaaaatgaaactgctttcgcggaaactataaatcaaattttagaaagatccaaaaaatataaatttgataaaattgcagcaatagagtctagaggatttgtttttgcatcagctgtatcttatttgcttaaaaaaccttttatattattgagaaaaaaaaataaattacctgcagacacttactctgttgattttgaacttgaatatggaacggctacaattgaaatgcataaagactctataaatgagaatgaatctgtattaataattgatgatctgatcgcaacaggagggacagcaaaagctgcagcaaaattaattaaaatgtcaaaaggaaatgtttctgcatttatattcgtaataaatcttttcgatttaggaggttgtgataacctagttgaagaaggatataaaattgaaaatttaattgaatttcctggtcattaga

SEQ ID NO: 240239 - DNA, 262 bp, Unknown
  Bacterial polypeptide expressing nucleotide sequence isolated from the Sargasso Sea
ttgaaaaaaaatctagataacagcataaaaaaagcaattcgaactattcctgattttccaaagagcggaattatgttcagagatattacctcattacttgaaaaaccattaatttttaagagagttgtaaataaaataagtggtcttgctagaaaaaaaaagattacaaaaataatcggcattgagtcacgcggatttatttttgcagcgcctgttgctgcaaaattagggctgcctttaattttgattagaaaaagtggta

SEQ ID NO: 240240 - DNA, 529 bp, Unknown
  Bacterial polypeptide expressing nucleotide sequence isolated from the Sargasso Sea
tatggatttaaaagaatatattagatcaattcctgactatcctaaaaagggcattttatttagagacataacaactctcattaaaaatgaaaaagcttttgaagagacaattaaccaaattattgagagatcgaaaaaatataaagttgataaaatagctgcgattgagtcaagaggctttgtttttgcatctgcagtatcatatctcttaaaaaaacccttcatcatgctacgtaagaaaaataaattacctgctgatgttcattctattgattttgaacttgaatatgggacagcaacaatcgaagttcacaaggactcaattaatgaaaatgataatgttctaataattgatgatttaattgctacaggaggtactgcagatgctgcagctaaattagttaaaatctcaaaaggaaaggtagctgcattcatttttgtaattaatttatttgatcttggaggatgtaagaaattaatccaaaataattataaagttgagaatttgatagaatttcccggtcattaa

SEQ ID NO: 240241 - DNA, 517 bp, Unknown
  Bacterial polypeptide expressing nucleotide sequence isolated from the Sargasso Sea
atgaaagaacatgttagaacaattttagattatccagttaaaggaataaaatttagagatatcactactttacttcaagattcaaaacattttaaaaatgttatagatttaatgactgatccttggagagattcaaaaatagatgccatacttagtattgaatcaaggggctttattatggctggagctatagcatataaattagatacagcttttatacctttaagaaaacctgacaagttaccaggagaaacttataaagtttcttatactttagaatatggatcaacagaaatgcatatacataaggatgctcttgataatcatactaatttattaataatagatgatcttttagcaactgggggtacagctttagcagcaatagaacttataaatagatttaaaaataaaaatattattggcgcaggttttataattaatcttccagatctcaaaggtgaaaaaaaattattagataaaaaaattagaatccattcattaatggaattttaat

SEQ ID NO: 240242 - DNA, 348 bp, Unknown
  Bacterial polypeptide expressing nucleotide sequence isolated from the Sargasso Sea
aatgaaagaatacgttcgaacaattgctgattatcctgttaaaggaattcaattcagagatattacaacattgttgcaaaatgcaggacactttaaacaagtaattgatgacatggtaaaaccatggcaaaataaaaaaatagatgcagttttaagtatagaatcacgtggatttattatggcaggcgcaatagcctattttttaaatgcagcatttgttcctttgagaaagcctcataaacttccatttgatactttcaaaacctcatacgatttagaatatggatcaactgaaatgcatattcatacagatgccttagatggtcataaagatttactaattattga

SEQ ID NO: 240243 - DNA, 529 bp, Unknown
  Bacterial polypeptide expressing nucleotide sequence isolated from the Sargasso Sea
atgaatttaaaagattttattaggtcaataccagattatcccaaaaaagggattttatttagagatatcactactttaataaaagatgaaaaggcatttgcggaaacaattaacaaaatagttaaaaaatctaaaaattttaattttgataaaattgctgcaatcgaatctagaggttttgtttttgcatcagcagtctcttacatattaaaaaaaccttttattatgttaagaaaaaaaaataagttacctgcagaagtccattctgtagatttcgaactcgaatacggaaaggcaactattgaagttcataaagactccattgaaaaaaatgacaaagttttaataattgatgatttaattgctacaggaggaacagcagaagctgctgctaaactggttgaaatttctgagggaaatgtatccggctttgtatttgtaattaacttatttgacttaaaaggatcagataatttagttaataggggttataaagtagagagcctaattgaatttccaggtcattaat

SEQ ID NO: 240244 - DNA, 472 bp, Unknown
  Bacterial polypeptide expressing nucleotide sequence isolated from the Sargasso Sea
cataaccagtcttattgaaaccccagatgcatttgtcgaaacttgcactcagttgactgacattactaaatcatttgatgccacttcaattgcaagcattgaaagcagggggtttatatttgcagggtctatagcaaaagatctgtctctaccttttattcttgctagaaaacctgggaagttacccaatgagacttttgttaaggattttgatttagagtatggaagcacctctatcgagatccaaaaaaataccatggtaaatgaatcggacagagttgttatcgtcgatgatttggttgcaactggaggtacagccattgcatgtgctgagttactgacagagaacttcaatgttcgaagagaaaatatattaattcttgcagtgattgatttaccagaccttggtggaagccatctgatagctgatcaaggatatggcattgaaacccttgtaagctatactgcataa

SEQ ID NO: 240245 - DNA, 529 bp, Unknown
  Bacterial polypeptide expressing nucleotide sequence isolated from the Sargasso Sea
tatggatttaaaagactatattcgttcaataaaagattatcccaaaaaaggtattttatttagagatataaccactttaataaagaatgagactgcttttcaagaaacaattaatcaaattgttgaaagatcaaaaaaatttaaggtagataaaatcgctgcaattgagtcacgcggttttgtatttgcatccgcagtttcttacatattaaaaaaaccattcataatgttaagaaaaagaaacaaactccctgctgatgtacattctgttgattttgagcttgagtatggaacagcaacaatagaagttcacaaagactctatctctgaaaatgaatcagtattaataattgatgacttaattgctacaggtggtacagcagaggctgcagcaaagcttattgaaatttcaaagggcaaagttgcagcctttatatttgttataaatctctttgatttaggaggttgtgataatcttataacaaaaggttataaaattgaaaatttgatggacttctcaggtcattaa

SEQ ID NO: 240246 - DNA, 298 bp, Unknown
  Bacterial polypeptide expressing nucleotide sequence isolated from the Sargasso Sea
aatgaaagaatatgtacgaacaatatctgactacccagtaaatggaattcaatttagagatattacaacacttcttcaagatgcaggtcattttaaaaaagttatagaagatatgacttctccatggaaagataaaaaaatagatgcagttcttagtatcgagtctagaggatttattatggctggagctatagcttattttttaaatgctgcttttattccattaagaaagcctcataaacttccttttgaaacatataaagtttcatatgaattagaatatggatcaactgaaatg

SEQ ID NO: 240247 - DNA, 529 bp, Unknown
  Bacterial polypeptide expressing nucleotide sequence isolated from the Sargasso Sea
tatggacttaaaaaattttattagatcaataccagattatccaaaaaaaggaattctttttagagacattacaacgttgattaaagatgaaaatgcatttgctgcaactatcaatcaaatagttgaaagatcaaagaaatataattttaccaaaatagcagctatagagtcgaggggatttgtattcgcttctgcagtttcttatattttaaaaaaaccttttattatgttaaggaaaaaaaataaacttcccgctgatgttcactcagtagattttgagctcgaatatggaacagctactattgaagttcataaagactccataggaaatgaagactctgttttaattattgatgatttaattgcaaccggaggaactgcagaagcagcagcaaaacttgtagaaatttcaaatggtaaagtagcagcttttatatttgttattaatttatttgatcttggtgggtcagataacttgattaaaaaaaattacaaagttgaaaatttaattaaatttccagggcattaa

SEQ ID NO: 240248 - DNA, 529 bp, Unknown
  Bacterial polypeptide expressing nucleotide sequence isolated from the Sargasso Sea
tatggatttaaaagaatatattagatcaatacaagactatcctaaaaagggaattttatttagagatattacaactttaataaaaaatgaaaaagcattttctaatactattgatcaaataattgaaagatcaaaaaaatttaaaatagataaaattgcagcaattgaatcacgtggttttgtttttgcctccgcagtttcatatttattaaaaaagccttttatattactaagaaaaaaaaataaattacctgcagatactcattctgtagattttgatcttgaatatggaaaagcaactattgaagtacacaaggactctgtcaatgaaaaagattctgttttaattattgatgatttaatcgctactggaggcacagcagaagctgctgcgaaactggtagagatttcaaaaggaaaggttgcaggatttatttttgtaattaatttatttgatttaggaggaaatgataaattaatcaaaaaaggttataaaactgaaagtttaatagaatttcctggacattaa

SEQ ID NO: 240249 - DNA, 529 bp, Unknown
  Bacterial polypeptide expressing nucleotide sequence isolated from the Sargasso Sea
atggatttaaaagaatatattagatcgattccagactatcctaaaaaaggaatattatttagagacattactaccctaattaaagacgaaaaagcattttcagaatgtattaatcaaattgttgaaaaatcaaaaaatttcaaatttaacaaaattgcagcaattgaatctagaggctttgtatttgcttcagcagtatcatatttattaaaaaaaccctttataatgttgagaaaaaaaaataaattaccagcagatacttactctgtagattttgagcttgagtatgggacagcaacaattgaagtgcataaagactcgatacaaaaagaagattctgtgcttataattgatgatttgattgcaactggtggaacagctgaagcagcatctaaattagtagaactttcaaatggcaatattgctggtttcatttttgttataaatctttttgatttaggtggttgcaataaattaaaaaagaaaaattataaagtaagcagtctaattgaattcccaggtcattaat

SEQ ID NO: 240250 - DNA, 496 bp, Unknown
  Bacterial polypeptide expressing nucleotide sequence isolated from the Sargasso Sea
tttgattaagacttataaaaattttcccaaacaaggtatagcttttattgatgtacttggaattattcaagatccagaagctttcagggaattaattttaaaaatggcttcaaataacatagtaaaaaattctgaagcgataatctcgatagaggccagaggttttatttttggttcagcaatttctcttcaagcctcgaaaccaatgatagttgccaggaagccgggaaaacttcctggtgaactaattcaagagaaatacgatttggaatatggagaggattctatctgcattcaacaagaggctcttaaaaagtttaattattacattataattgatgatattttggctacaggcggaacagcccaatgtgtggcaaatctaatttataaaaatggaggtaatgtagctggtctattaactgttgttgaattgataaatcttgatgggagatctaaatttaatttccctgtagaatcgatcttaaaaatttag

SEQ ID NO: 240251 - DNA, 529 bp, Unknown
  Bacterial polypeptide expressing nucleotide sequence isolated from the Sargasso Sea
atgaacttaaaagaccacataagatctattaaagattatccaaaaaaaggaatattatttagggatattacaaccttaatcaagaatgaaaaagccttttgtgaatgcatagatcaaatagttaaagtttcaaaaaaatttgaatttaacaaaatcgctgcaatggaatccagaggttttgtttttgcttctgcggtatcttatatactgaaaaaaccatttatcttactcagaaaaaaaaataaactgccagctgaaacttattcaattgattttgaattagaatatggaaaagctacaatggaagttcataaagattctattgaaaaaaatgataatgttttattgattgatgatttaatagcaactggtggaactgctcaggctgctgcaaaattgattgaaatttcaatgggaaaggttgctggttttatttttgtaataaatctttttgatctaaatggatgtaataatctaacaaaaaagggttataaaattgaaaacttaattgaatttccagggcattaga

SEQ ID NO: 240252 - DNA, 516 bp, Unknown
  Bacterial polypeptide expressing nucleotide sequence isolated from the Sargasso Sea
tatgaaagaatttgtaagaaccatattagattatcccgttaaaggaattcaatttagagatatcacaactttattgcaaaatgctggtcattttaaacaagtaatagacgaaatgacaaatccatgggttaataaaaaaattgatgcagtactaagtattgaatctagaggttttattatggcaggagcaattgcttataaattaaattcagcctttattccttttcgtaagccagacaaattgcctggagagacttataaagtttcttataccctagaatatggctctactgaaatgcatgttcataaagatgcattagaaggacataccaatcttcttatagttgatgatcttttagcaacaggaggtactgctcttgcagctttagatttagtaaatatgtttaagaataaaaatataataggggctggttttattataaatttacctgaattaaaaggtgatcaaaaattaataaataaaggaataaatattcattcattgatggagtttta

SEQ ID NO: 240253 - DNA, 218 bp, Unknown
  Bacterial polypeptide expressing nucleotide sequence isolated from the Sargasso Sea
tgaggtacataaggacgctattaaatcaggtagcagagttttgatggttgatgatttgctggcgacaggaggtacaatggaaggaagttcaaggctgatcgagaaagcaggaggaattattattggatatgcctttgttattgaattaattgacctaaaaggcagaacaaaattggataaacctgtttactcacttgtgtctttcgaaggcgattgat

SEQ ID NO: 240254 - DNA, 489 bp, Unknown
  Bacterial polypeptide expressing nucleotide sequence isolated from the Sargasso Sea
ctaaaaaaggtatactttttagagatataacaaccttaattaagaatgaaaaagctttttctaaatgtatagatcaaataattgagagatctaaaaaatttaaatttaataaattggctgctatagaatctagaggttttgtatttgcatcagcagcttcatatttattaaaaaaacctttcatacttttaagaaaaaaaaataaactacctgcagaaacacattctgttgaatttgaattagaatatggaactgcaacaatagaagttcacaaggactcaattaacaaagatgataatgttctcataatagatgatttaatagctactggcggaactgcagaagcggcggcaaaactaattgaaatgtctgatggtaaagtagcaggatatgtttttgttataaatctttttgatttaggtggatgtgataatcttttgaaaaaaggttatgaagtagaaaatctaatagattttccaggacattaat

SEQ ID NO: 240255 - DNA, 320 bp, Unknown
  Bacterial polypeptide expressing nucleotide sequence isolated from the Sargasso Sea
atatgctttgtcaaaatcttttgtgttagccagaaagcctggaaagttgccaagaaaagcagcagaaaaatttttctcattagaatatggtacaaatacagtacatatacatgaagatgctatatcagaaggtgataaggttctagttgtcgatgatttgattgcaacaggcggtactgctatggcaactgctgaattatgtcaagaattgggcgcatcagaggttcatataattgctttaattgacttgcctaaattaggtggatcaaagaagcttgctgaaaagtttggcgaagtaataactcttatagattattaat

SEQ ID NO: 240256 - DNA, 529 bp, Unknown
  Bacterial polypeptide expressing nucleotide sequence isolated from the Sargasso Sea
atgaatttaaaaaaatttattagatccataccagattatccaaaaaaaggaattctttttagagatattacaactcttattaaagatgaaaatgcttttagggaaacaattaatcaaattttagaacgttctaaaaaaattaattttaacaaaatagcagctatagaatctaggggatttgtatttgcatctgcagtttcgtatcttttaaaaaaacctttaatcatgctgcgaaaaaaaaataaactaccagcagaagttcattcagttgattttgaacttgaatacggaaaagcaacaatagaagtgcataaagattctatagaaaaaaatgattctgttttaattgtagatgatttgattgcaactggtggaacggcagaggctgcagctaaactaattgaaatttcgaatggagaagtagctggatttatatttgtaattaatttatttgatttaggtggttcagaaaacttaataaaaaaaaattataaagtagaaaatttaattaattttccaggtcattagt

SEQ ID NO: 240257 - DNA, 307 bp, Unknown
  Bacterial polypeptide expressing nucleotide sequence isolated from the Sargasso Sea
catgaataatgatttaaaaagtattcgaattataaaagactttccaaaaaaaggtatcgctttttacgatatatctacaattttatcaaatcctaaaatttttaacagagttgtaaactcaatgtcaaaggaggtaaataaattaaatgctaatactatagttgggatagactcaagaggatttatttttgcgtcagctattgccttcaaattaaaaaaaaagttagttatgattagaaaaaaagggaaattaccaggtaagacctttaatacaagttacaaacttgagtacggctctaataattag

SEQ ID NO: 240258 - DNA, 589 bp, Unknown
  Bacterial polypeptide expressing nucleotide sequence isolated from the Sargasso Sea
cgtgagcagccctccggctacccgaaccggtgcttcacgcgcgccggctggaaaagaaagcgcaggatgccgtttaacgctgatccctatatctcaaagacgccgggctttccgaaggaaagtatcacgcttctacgacatcagcccgatcctcgaggacagtgccgtgatccggcaggcgatggacgcgcttgccgacctcacccgcccgatgcagcccgacatcattgccggcgtcgatgcgcggggattcctgttcgcgctgccgctggcactcgagcttgcatgcggcatggtgatggtacgcaaggcgggcaaacttcccggcgagctgttcgaacaatcctatgcccttgaatatggcgaggcgcggctgtcgattcagacaagccggcagcttcgcggcaagcgcgtcgtgctgtgcgacgacctgctggcgaccggcggaacgctcgaagcctccgccaggctcgtcgagcaatgcggcggcatcctcgccggtgccgtctgcgtgatcgagttgaccggtctcaaggggcgggcgcggcttgactgtccggtagcggcactgcaaacctacgaattctga

SEQ ID NO: 240259 - DNA, 529 bp, Unknown
  Bacterial polypeptide expressing nucleotide sequence isolated from the Sargasso Sea
atggatttaaaaaaacatataagatcaattcaagattatccaaaaaaaggtatattatttcgagatataactactttaattaaaaatcctgaagcttttagatttgcaaatgataaaataatagaattatcaaaaaaaatagaatttgataaagtctcagctatagagtctagaggtttcgtttttgcttctgctgtgtcatatgtcttaaataaaccatttatattgctcagaaaaaaaaataagcttccagcagaaacacactcggtagattttaaattagagtatggagaagcaactattgaggttcataaagactcaattttaaaaggagaaaaaattcttgttattgatgatttaattgctactggagggactgcagaagcagctgcgaaactaatagaaatttccggtggtaaggttgctggatttatttttgtaattaatctttttgatttaccaggaaataatctcctcaagaaaaaaggatataaaacagagagtttaattgagtttcctggtcattagg

SEQ ID NO: 240260 - DNA, 529 bp, Unknown
  Bacterial polypeptide expressing nucleotide sequence isolated from the Sargasso Sea
tatgaatttaaaagattatattagatctatcccagattatcccaaaaaaggtattttatttagagatatcactacattaattaaagatgaaaatgcttttgcagaaactattaaccaaattgtagaaagatctaaaaagtataattttactaaaattgcagcaatagagtctcgtggttttgtatttgcgtcagcagtttcttatattttaaagaaaccatttataatgctcagaaagaaaaataaattaccagctaatgtgcactctattgattttgaacttgagtatggaacagctaccattgaagttcataaagactctttagatgaaaaggatagtgtcttaattatagacgatttaattgcaacaggtggtacggctggagcggctgctaaacttattgaaatgtcaaaaagtaaagtttcagcatttgtatttgtgattaacttattcgacttaggtggatcagataatttagtaaaaaaaaattactatgttgaaaatttaatagaatttcctgggcattaa

SEQ ID NO: 240261 - DNA, 529 bp, Unknown
  Bacterial polypeptide expressing nucleotide sequence isolated from the Sargasso Sea
tatggatttaaaagattatattagatcaattcaggattatccaaaaaagggaattctatttagagatataactacattgattaaaaatgaaaaagcttttaaacaatgtattaatcaaatagttgaaagatgtaaaaaattcaaagtagacaagatagctgctgttgagtctagaggttttgtttttgcttctgctgtatcttatttaattagcaaaccttttattctcttaagaaaaaaaaataaactacccgcagaaacccattcgattgattttcaattagagtatggaactgcaacaatcgaagttcataaagattcaattaaagaaaaagattctgtattaataatagatgatttaatagcaactggaggaacggctgaggctgctgcaaaacttgttgaaatatccaaaggttcggtggctggatttatttttgttattaatctttttgatttaggtggttgtgacaaattacttaaatcaggatacaaagtagaaaatttaattgagtttccaggacactaa

SEQ ID NO: 240262 - DNA, 517 bp, Unknown
  Bacterial polypeptide expressing nucleotide sequence isolated from the Sargasso Sea
atgaaagaatatgtaagaacaattttagattacccggttaagggtatccaattcagagacataacaacattacttcaagatgctggaatttttcgtaaagtgatcgatgagatgactgaagcttggaaaaatgaaaaaattgatgctattttaagcatagaatctcgcggatttataatggctggtgctatggcctataatttgaatactgcatttattcctctaaggaaaccagataaacttccatctcaaacttataaagtttcctttgatcttgaatatggatctactgaaattcatattcataccgatgctttagacaaccataaaaacttacttatcattgatgatttgttagccacaggaggaactgcattagctgcaattgaactagtaagaaagtttaaagataaaaatattgtgggcgctggttttattattaatttaccgaaccttaaaggagaggaaaaacttaaagaacaaaaaattaaaactcattctctaatggaattttaat

SEQ ID NO: 240263 - DNA, 517 bp, Unknown
  Bacterial polypeptide expressing nucleotide sequence isolated from the Sargasso Sea
atgaaagaatatgtaagaacaatattggactatcctgtcaaaggtattcaatttagagacattacaactctcttacaagatgctggtcattttaaacaagtaattgatgaaatgactgagccatggaaaaataattcaattgacgctgtgttgagtattgaatcaagaggttttattatggcaggagcaattgcatacaatataggtgcagcttttattccactaagaaaacctgataaacttccaggagcaacttataaagtttcatacactttagaatacggctctactgaaatgcatatacataaagatgcattagataatcataaaaatttattaatcattgatgatctacttgcaactggaggtacagcattagcttcagtagatttaattgagaaatttgaaaataagaatattgtaggtgctggttttattataaatcttccagatctaaaaggtgacaaaaaacttcaagaaagaggaattaatattcactcgttaatggatttttaat

SEQ ID NO: 240264 - DNA, 529 bp, Unknown
  Bacterial polypeptide expressing nucleotide sequence isolated from the Sargasso Sea
aatggatttaaaaaaatttataaggtctatacctgattatccaaagaaaggtattttatttagagacattacaactttaatcaaagacgataaagcttttgaagagacaattaatcagatagttgaaagatcaaaaaaatttcaatttaataaaattgcagctattgaatcgagaggttttgtatttgcttctgctgtttcatatattttaaaaaaaccttttataatgctaagaaaaaaaaataaattaccagcagaaacttactcggtagattttgagcttgagtatggaaccgctacaattgaggttcacaaagattcgattaatgaaaatgacagtgttctaataattgacgatttgattgctactggaggaactgctgaagcagcttcaaaattaattgaaatttctaaaggtaaagttgaggcattcatatttgttataaatctatttgatttaggtgggtctgataaattaattgataaaggttttaaagttgaaaatctaatcaatttccctggtcattaa

SEQ ID NO: 240265 - DNA, 408 bp, Unknown
  Bacterial polypeptide expressing nucleotide sequence isolated from the Sargasso Sea
aactaatttaccaaatgtctacaaatcaaataataaaaaattctgatgcgatactctcaatagaagcaaggggttttatttttggctcagcaatttcccttcaggcatctaaaccaatgatagttgctagaaagcctggaaaactgcctggggaattaattcaagaaaattataacttggagtacggagaggattctttatcaatccaaaatgaagcaatccagaaatttagttcttacgcaattgttgatgaccttttagctactgggggaacagttaattgtgcggctaaattactaaaaaaaaacggaaagaaaataactggtctactaactgttgttgagttagtagaatttgatggaagatcaaagtttgatttccctgttaaatcaatactatcaatgtgat

SEQ ID NO: 240266 - DNA, 529 bp, Unknown
  Bacterial polypeptide expressing nucleotide sequence isolated from the Sargasso Sea
tatgaacttaaaaaaacacataagatctatagaggattatccaaaaaaaggaatactttttagagatataacaacactaattaaaaatgaggaagctttttctgaatgtatagatcaaatagtagaaagatcaaaaaaatttaaatttaacaaattagccgcaatagaatctagaggttttgtttttgcttctgctgtttcctatatattaaaaaaaccatttatacttctacgaaaaaaaaataaactacctagtgaagtacattcagtagattttgaattagagtatggtgctgctacaatagaagtacacaaggatgctatagataaaaatgattcagtcttgattatagacgacttgatagctaccggaggtactgctgaagctgcagcaaagcttatagaaatatctaatggaaaggtcgcaggatatgtttttgttataaatctttttgatttaggtggatgcgataatcttttgaaaaaaggacataaagtagaaaatttagttgaatttcctggacattaa

SEQ ID NO: 240267 - DNA, 430 bp, Unknown
  Bacterial polypeptide expressing nucleotide sequence isolated from the Sargasso Sea
atgaatctaagagataagattggagattacccagattttcctaaaaaaggaattctttttagagatttttcaccaatattaggagatccatccgcattatcattcatggtagaggagttttcaaagaaatttcatccaaatgacgtggatgtttttgcaggaattgaatcaagaggattcattattgcgtgtgcactggcattaaaatacaataaaggaatgattcttcttcgaaaggctggaaagttacctggaaaagttgcaaagacatcatatacactagaatatggcaaggcaacactagaagttcaaaaagatgtcatcgaagaaggtcaacgagttgttatttgcgatgatttgctcgcaacaggaggtacagcaaaagcagcagcaaaattaattgagaaaattaaaggagaaattataggat

SEQ ID NO: 240268 - DNA, 465 bp, Unknown
  Bacterial polypeptide expressing nucleotide sequence isolated from the Sargasso Sea
tcagagatattacaacattgttgcaaaatgcaggtcactttaaacaagtcattgatgacatggtaaaaccatggcaaaataaaaaaatagatgcagttttgagcatagaatcacgtggatttattatggcaggcgcaatagcttattttttaaatgcagcatttattcctttgagaaaacctcataaacttccatttgatactttcaaaatctcatacgacttagaatatggatcaactgaaatgcatattcatacagatgccttagatggtcataaagatttactaattattgatgatcttttagcaacaggtggaaccgcacttgcggcagtagaattaattaaaaagtttgaagacaaaaatattgttggtgcaggttttataataaatttaccagatttaagtggtgataaaaaactaattgaaaaaggaattgagatacattctttaatggagttttaaa

SEQ ID NO: 240269 - DNA, 526 bp, Unknown
  Bacterial polypeptide expressing nucleotide sequence isolated from the Sargasso Sea
tatggatttaaaagaatatattagatcaattcctgactatccaaaaaaaggtattttatttagggacattaccactttaatcaaaaacgaaacagcttttgccgaaacaataaatcaaattgtagaaagatcaaaaaattataaagttgataaaattgcagcaattgaatctagaggatttgtttttgcttctgctgtttcctatttattaaaaaaaccatttatattattaagaaaaaaaaataaattaccagcagatacttattctgtagattttgaacttgagtatggaacagcaacaatcgaaatgcataaagattctatagatgaaaatgactctgtattaattattgacgatctaattgctactggtgggacagcaaaagctgctgcaaaacttattgaaatgtcaaaaggaaacatttctgcatttatatttgttataaatctttttgacttaggtggatgcaatgatttaattaaagaagaatacaaaattgaaaatttaattgaatttcctggtcat

SEQ ID NO: 240270 - DNA, 250 bp, Unknown
  Bacterial polypeptide expressing nucleotide sequence isolated from the Sargasso Sea
atgagcaatataaatttatataattgtatagaaagcattattgatttcccaaaaaaagggattttatttagagatattagtcctttgcttgctaattttgaagcgacttctgaacttagaaatatttttttaaatgaagctttgaaatataaaattgattatgtggcgggaatagatgctagaggtttcttattttcaactttattaagtcaagatttaaaagttggttcaattttgatcagaaaaccag

SEQ ID NO: 240271 - DNA, 517 bp, Unknown
  Bacterial polypeptide expressing nucleotide sequence isolated from the Sargasso Sea
aatgaaagaatatgtaagaacaatactagactatcctgtcaaaggtattcaatttagggacataacaactcttttacaagatgctggtcattttaaacaagtgattgatgaaatgactgagccctggaaaaatactccaattgacgctgtattgagtattgaatcaagaggttttattatggctggagcaattgcatacaatataggtgctgcatttgtgcctctaagaaaacctgataaacttcctggcgaaacatataaagtttcatatactttagaatacggttctactgagatgcatatacataaagatgctttagataatcataaaaatttattaatcattgatgatttacttgcaactggtggaacagcattagcatcagtagacttaattgagaaatttgataataaaaatattgtcggtgctggctttattattaatcttcctgatttaaatggcgataaaaaacttcaagaaagaggaattaatattcactcattaatggatttttaa

SEQ ID NO: 240272 - DNA, 529 bp, Unknown
  Bacterial polypeptide expressing nucleotide sequence isolated from the Sargasso Sea
tatgaatttaaaagattttattagatctattcaagattatccaaaaaaagggatattatttagagatattactacactcataaaagatgaaaaagctttctcacaaacaataaaccaaattgttgaaagatcaaaaaaatatgattttgacaaaattgcagctatagaatctagaggttttgtatttgcttcagctgtttcttacattttaaaaaaaccttttataatgttaagaaaaaaaaataaattaccagcagatgttcactctgttgattttaaattagaatatggaactgcaacaattgaagttcataaagactccattgaaaaaaatgaggaagttttaataattgatgatttaatagcaactggaggtactgcagaagctgctgcgaaattaatagaaatttcaggaggaaaagtggcttgttttatatttgttataaacctatttgatttaaatggatcgtacaatttacttaaaaaaggatataagatagaaaatttgattgaatttccaggtcattaa

SEQ ID NO: 240273 - DNA, 529 bp, Unknown
  Bacterial polypeptide expressing nucleotide sequence isolated from the Sargasso Sea
tatggatttaaaaaaacatattagatcaattccagactatcctaaaaaagggattttgtttcgtgacattacaacgttaattaaagatccggctgcttttaaatataccaatgataaaatcgtagaaatcgctaaaaaattggactttgataaagttgcagcaatcgaatcaaggggttttgtttttgcctctacagtatcttatattttgaacaaaccgtttatactattaagaaaaaaaaataaactacctgctgatacacactcagttgattttaaactagaatatggtgaagctacaatagaagtgcataaagactctatttcaaaaggggagaaaatattggtcattgatgatctaattgcaacaggaggcacagccgaggctgccgccaaactaattaatatatcaggtggtgaagtttctgggtttatttttgtaattaatttatttgatttacctggtgaaaaacttttaaaaaacaaaggatataaaattcaaagtttagttgaatttcctgggcactaa

SEQ ID NO: 240274 - DNA, 139 bp, Unknown
  Bacterial polypeptide expressing nucleotide sequence isolated from the Sargasso Sea
tatggatttaaaaaaatatattagatcaatacctgactacccaaaaaaaggcattttatttagagatataacaactttaataaaagatcctaaagcttttaattttagtgttgataaaatcatagaaatatcaaaaaaa

SEQ ID NO: 240275 - DNA, 337 bp, Unknown
  Bacterial polypeptide expressing nucleotide sequence isolated from the Sargasso Sea
ttgaacaaaaaactcgtaaataaattaaaaaaaaatattcgagtaattcccaactttccaaagaaggggattctttttcaagacattacttcaattactgataacaaaaaattgtttgctgaagttgttaacgaaatatcaaagtatgccagaaagaaaaaatttaccaaaattgcaggtgttgaagcaaggggtttcatcttcggtgctgctgttgcttttaagctaggccttcctttcgttccaataagaaaaagaggaaagcttcctggaaaaattctgcggcaaaaatattctcttgagtacggcaacgacgaaatccaaattcatagtaatg

SEQ ID NO: 240276 - DNA, 276 bp, Unknown
  Bacterial polypeptide expressing nucleotide sequence isolated from the Sargasso Sea
tatggatttgaaaaaatatataagatctatacctgattaccctaaaaaaggaatactgtttagagatatcaccactttaattaaaagccctgaagcatttaaatatacagtaaataaaattgtcgaaatttcaaaaaaagttaaatttgataaagttgcggctatagagtctaggggatttgttttcgcatcagcagtttcatatttacttaataaaccgcttattcttttaagaaaaaaaaataaattgcccgcagaaagacattcggttgattt

SEQ ID NO: 240277 - DNA, 520 bp, Unknown
  Bacterial polypeptide expressing nucleotide sequence isolated from the Sargasso Sea
catgaataatgatttaaaaagtattcgaattataaaagactttcccaaaaaaggtatagctttttacgatatatctacaatattatcaaatcctaaagtttttaatagagttgtaagctcaatgtcaaaggaggtaaataaattaaatgcgaatactatagttgggatagactcaagaggatttatttttgcctcagctattgcctacaaattaaaaaaaaagttagttatgattagaaaaaaaggtaaattaccaggcaaaacctttaatacaagttataaacttgagtacggctctaataaattagaaattcaaagtgatatgataagaaattcagacaatgttgttataattgacgacatttttgctacaagtggaacaatacgtgcatcaatgaaattaattaaaaaaactaaagctaaaattaaaggtattgtagtgctcttagaattaagctttctcggtggaagatcaaaaattaaaaataaacttatcagtttaaataaagttaatacttag

SEQ ID NO: 240278 - DNA, 195 bp, Unknown
  Bacterial polypeptide expressing nucleotide sequence isolated from the Sargasso Sea
ccgaaggaagcagggtgttgctcgtcgatgatctgattgccacaggaggcaccatccaaggcagtgccaaactgataaaaatggtgggcggagtgatcgtcggttatgcctttgtcatcgaactggttgacctggaaggccggaagggtttgcaggaacctgttttttccctgatcgaatttgaaggacattagg

SEQ ID NO: 240279 - DNA, 535 bp, Unknown
  Bacterial polypeptide expressing nucleotide sequence isolated from the Sargasso Sea
atggctgaaaagttaattataaaatttgatgaatatttagatacagttgagaaattagcattaacaataagtcaaaattataaaccaactgttttagttggtatcatgagaggggcagctcctataattgacatcttatctaggattttaaagttaccgactgcatatatagtaattcaaagttattctggtagtggaattgaaaataaacagggagaactaatttttgcacgagatataagttccatcgcaagtaatatcgattatgaaagagtattattagtagatgatctatctgatacaggtcttacactaaataaaagtatagaatggttaaagcaatatgaaccagttaaaaattatattaaagagattaaaacagcctgtttgtggaaaaaaaaatcgtcttcatttacaccagatttttgtcccgttaaattgagtagtgacccatggataattcagcctacagagcattatgaagaattaaatattgaagagatagtttctaaacaaaaaaaaagggctaaataat

SEQ ID NO: 240280 - DNA, 529 bp, Unknown
  Bacterial polypeptide expressing nucleotide sequence isolated from the Sargasso Sea
tatgaatttaaaagattatattagatctataccggattacccaaaaaaagggattttattcagagatattacaactctaattaaagataaagatgctttctcagagacgattaatcaaataattgataaatcaaaacaatatgaatttgataaaattgcagcaatagagtctaggggatttgtgtttgcttcagcagtttcttatattcttaaaaaaccttttataatgcttagaaaaaaaaataaactgcctgcggatgttcattctgttgattttgaattagagtatgggactgccactattgaagtacacaaggactctataaatatgaatgaaaaagttttaattattgatgacttaattgcaacaggaggtactgctgaagcagctgcaaaactaatcgaaatgtcagaaggaaaagttgctgcattcattttcgtaataaatctttttgacttaaaaggttgtgataatttaattaaaaaaaattataaggtagaaaatttaattgaatttccaggtcattaa

SEQ ID NO: 240281 - DNA, 529 bp, Unknown
  Bacterial polypeptide expressing nucleotide sequence isolated from the Sargasso Sea
atgaatttaaaagactttattagatctattccagattatccaaaaaaaggtattttatttagagatataactacactaattaaaaatgagaaagctttttcagaaacaattgatcaaattgtagaaagatcaaaaaaaatgaaatttaataaaattgctgcaattgaatcaaggggatttgtttttgcatcagcagtttcttatattttaaaaaaaccatttataatgttaaggaaaaaagataaattgccagctgatgtgcactctgtagattttgaattggagtatggaaaagctactattgaagtccataaagattcgattagtgaaggagattctattttaattatcgacgatttgattgctactggtggaactgctgatgctgcagcaaaacttgttgaaatttctaaaggaaaagttgctggatttatatttgtgataaatctttttgatctaaatggttctgatggtttaatcaaaaaaggttataatgtagaaaacttaatagaatttccaggccattgaa

SEQ ID NO: 240282 - DNA, 529 bp, Unknown
  Bacterial polypeptide expressing nucleotide sequence isolated from the Sargasso Sea
atggatttgaaagattatattcgtcaaattaaagattatcctaaaaaaggtattttatttagagatataactaccctgataaaagataaattagcatttgaggaaacaattaatcagatagttgaaaaatcaaaaaaatttaaggtggataaaattgctgcaattgaatctcgtggttttgtgtttgcatccgctgtttcttacattttaaaaaaaccttttataatgttaagaaaaaagaacaaacttcctgctgatgttcactcagtagatttccaattagaatatggaactgcaacaatagaggttcacaaagattctatttctgaaaatgactcagtcttaataattgatgatttaatagcaacaggtggaactgcagaggctgctgcaaaacttatagaaatttctaaaggaaatgttgctgcatttatatttgttataaacctctttgatttaggaggatgtgataatcttttaaaaaaaggttatgaagttgaaaatttgatggattttccaggtcactgat

SEQ ID NO: 240283 - DNA, 398 bp, Unknown
  Bacterial polypeptide expressing nucleotide sequence isolated from the Sargasso Sea
aatgaatttaaaaaaatttataagatcaatacctgactatcctaaaaaaggcattttattcagagacatcacaactttaatcaaagatcaaaaagcgtttgaagaaactattaatcaaattgtggaaagatcaaaaaaatttgattttactaaaattgcagcaattgagtccagaggttttgtttttgcttcagctgtatcctatcttttaaaaaagccattcatattacttagaaagaaaaataaattaccgtctgatacacattcagtagattttgaattggagtacggcactgccacaatagaagtgcataaagattctataaataaagatgatagtgtacttattattgatgacttaatcgctacgggtggaactgcggaggcagcggcaaaat

SEQ ID NO: 240284 - DNA, 451 bp, Unknown
  Bacterial polypeptide expressing nucleotide sequence isolated from the Sargasso Sea
atggatttaaaagattatattagatcaattcaagattatccaaaaaaaggaattctttttagagatataactacattagtaaaaaatgaaaaagcatttaaagaatgtattaatcaaatagttgatagaagtaagaaatttaaaattgataaaatagcagctattgaatctagaggatttgttttcgcatctgcagtatcatatttaattgataaaccttttatacttcttagaaaaaaaaataaattgcctgctgaaactcattcagttgattttgaactcgaatatggaactgcaactatagaagtacacaaggactccattgaaaaaaatgactcggtattaatcattgatgatttaatagccaccggaggaactgctgaggcagctgcaaaattagttgagatatcaaaaggttcggtatctggatttatttttgttattaatcttt

SEQ ID NO: 240285 - DNA, 529 bp, Unknown
  Bacterial polypeptide expressing nucleotide sequence isolated from the Sargasso Sea
tatggatttaaaagaatatattaggtcaattccagattatcctaaaaagggaattctttttagagatattacaactttaataaaaaacgaaaaagctttttgcaattgtattgataaaatagttgaaaaatctaagaacttcaacttcaacaaggttgcggctgtagaatcgagaggttttgtttttgcatcagcaatatcatatttagtaaaaaagccatttatacttttaagaaaaaaaaataaattacctgctgacacacattcagttgattttgaacttgaatatggaacagcaacaatagaggttcacaaggattccatcgatgacaaagataaggttttagtaatagatgatcttatagctacaggtggaactgctgaagcatctgctaaattgatagaaatgtcaaaaggatcagtggcgggttttatatttgtaataaatcttttcgatttgggtggatctaaaaaattgatcgatgaaggttacaaggttgaaaatttgatggattttcctggtcactag

SEQ ID NO: 240286 - DNA, 118 bp, Unknown
  Bacterial polypeptide expressing nucleotide sequence isolated from the Sargasso Sea
atggatttaaaaaaatatatcaggtcaattaaagattatccaaaaaagggtattctatttagagacataactactttaataaaaaatgagaaagcttttgaagaaactattaaccaaa

SEQ ID NO: 240287 - DNA, 412 bp, Unknown
  Bacterial polypeptide expressing nucleotide sequence isolated from the Sargasso Sea
tatgaatttaaaagactttattagatctatcccagattatccaaaaaaaggtattttattcagagatatcacaactcttattaaaaatgaaaaagctttttcagaaacaattgatcaaattgtagaaagatcaaaaaatatgaaatttaataaagttgctgcaattgagtcgagaggatttgtttttgcatcagcggtttcctacattttaaaaaaaccatttataatgttaagaaaaaaaaataaattgccagctgatgtgcactctgttgattttcaattagagtatggaaaagctactatagaagttcataaagattcaataattgatggagattctattttaattattgacgatttaattgctactggtggcacagctgatgcagcagcaaaacttgtagaaatttct

SEQ ID NO: 240288 - DNA, 529 bp, Unknown
  Bacterial polypeptide expressing nucleotide sequence isolated from the Sargasso Sea
tatggatttaaaagattatatcagatcaatacctgattatcctaaaaagggaattttatttagagatatcactaccttaatcgaagatgaaaaagcgtttgctcattgtatagatttaatatttcaaaaatctaaaaattttaattttgataaaattgccgcgatagagtctagaggattcgtgtttgcttctgctgtatcatatttagccaagaaaccttttattatgctaagaaaaaaaaacaaacttccatctgaaacacactctgttgattttgagctcgaatatgggaaagctactattgaggtacataaagactctataaaagaaaataacaaagtattaattatcgatgatttaattgctactggtgggacggctgaagcagcagcaaaactagtaaatatatctcacggaaaagttgcgggatttatttttgtaataaatttatttgatttaagcggctgtgataatttaaggaaacaaaattacaaagttgaaaatttaattgaatttcctggacactaa

SEQ ID NO: 240289 - DNA, 529 bp, Unknown
  Bacterial polypeptide expressing nucleotide sequence isolated from the Sargasso Sea
atggatttaaaagaacatattagatcaattaaagactatcctaaaaagggaattcttttcagagatataacaacacttataaaaaatgaaaaggcattcaaagaatgtattaaccaaattgttgaaagatcaaaaaaattccagtttgataaaattgcagctgtagaatctagaggctttgtttttgcatcagctatttcttatatacttgataaaccgttcataatgttgagaaaaaaaaataaattacctgctgatgttcattcagtagactttgaacttgagtatggaacagcaacaatagaagtccataaagattcttttggtgaaggtgataaagtcttaattatagacgatttaattgctactggcggtactgcagaagctgctgctaaattaatagagatatcaaaaagcaaggttgcaggttttatttttgtaattaatttatttgatcttggtggcactgataatcttttgaaaaagggttatgaagtagaaaatcttttagattttcctggacattaat

SEQ ID NO: 240290 - DNA, 178 bp, Unknown
  Bacterial polypeptide expressing nucleotide sequence isolated from the Sargasso Sea
tatggatttaaaaaaatatataagatcaattcctgattatcctaaaaaaggtatactgtttcgagatattacaactttaataaaagattcaaaggcatttaattactcgattgaccagattatagaaatttctaagaaattagattttgataaaatagctgcaatagaatctaggggt

SEQ ID NO: 240291 - DNA, 494 bp, Unknown
  Bacterial polypeptide expressing nucleotide sequence isolated from the Sargasso Sea
tatggatttaaaagaatatattagatcaataccagactatcccaaaaaaggaatattatttagagacattaccactctaattaaagacgaaaaagcattcgagaaatgtattaatcaaattgttgaaaaatcaaaaaattttaaatttaataaaattgcagcaattgaatctagaggttttgtatttgcttcagcggtatcatatttattaaaaaaacctttaataatgttgagaaaaaaaaataaattaccagcagacacttactccgttgattttgagcttgaatatggaaaagctacaattgaagtacataaagactcgataaaaaaagaagattctgtgctcataattgatgatttgattgcgactggtggaacagctgaagcagcgtctaaattagtagaaatttcaaatggcaaagtcgctggatttatttttgttataaacctttttgatttagatggttgcaacaaattaaaaaaaaaaaattata

SEQ ID NO: 240292 - DNA, 529 bp, Unknown
  Bacterial polypeptide expressing nucleotide sequence isolated from the Sargasso Sea
tatggatttaaaaaaacacataagatctattaaagattatccaaaaaagggaattttatttagagatataactacattaattaaaaatcctgaagctttcaaatttacaaatgataaaataattgaaatagctaaaaaaattgattttgataaggttgctgcaattgagtctagaggttttgtttttgcctcaacagtatcttatattttaagtaaaccttttatattactaagaaaaaaagataaattaccggctgagacacactctgtagacttcaaattagagtatggagaagcgactatagaagtacacaaagactcgattaacaaagatgaaaagattcttgtgattgatgatttaattgcgacaggtggtacggcagaagcggcggctaagttgataggaatatctggtggaaaagtagctgcgtttatatttgtgattaatctatttgatttaccaggcgagaaattactaaaagataaaggttttatagtaaagagtttgattgaatttccaggacactaa

SEQ ID NO: 240293 - DNA, 529 bp, Unknown
  Bacterial polypeptide expressing nucleotide sequence isolated from the Sargasso Sea
tatggatttaaaagattatattagatcaatacctgattatccaaaaaaaggaattctcttcagagatataacgactttaataaaagataaagatgctttttctgagtgtataaatcaaatagttgaaaaatctaaaaattataattttgataaaatagcagcaattgagtctaggggatttgtttttgcatctgcagtctcgtacattttaaaaaaaccttttattatgttaaggaaaaaaaataagctaccagctgatgttcattcaattgactttgagctcgagtatggaactgcaactattgaagtgcataaagattcaataagccaaaatgaaaatgtactgattatcgatgatttaatagctactggcggaacagctgaggctgcagcaaaattagttgaaatttcaaaaggaaaaattgcagcctttatatttgttataaatctttttgacttaggtggatgtgataaattaatgaaaaaaagttttaaagttgaaaatttaattgaatttcctggacactaa

SEQ ID NO: 240294 - DNA, 517 bp, Unknown
  Bacterial polypeptide expressing nucleotide sequence isolated from the Sargasso Sea
atgaaagaatatgtaagaacaatattagactatcctgttaaaggtatccaatttagagacattacaactctattacaagatgctggtcattttaaacaagtaattgatgaaatgactgagccctggaaaaatacttcaattgatgctgtattaagtattgaatcaagaggttttattatggctggagcaattgcatacaatataggtgctgcttttgtgcctctaagaaaacctgataaactacctggcgaaacatataaagtttcatacactttagaatacggctctactgagatgcatatacataaagatgctttagataatcataaaaatttattaattattgatgatttacttgcaactggtggaacagcattagcatcagtagacttaatcgagaaatttgataaaaaaaatattgttggtgctggctttattattaatcttcctgatttaaatggtgataaaaaacttcaagaaagaggaattaacattcactcattaatggatttttaat

SEQ ID NO: 240295 - DNA, 529 bp, Unknown
  Bacterial polypeptide expressing nucleotide sequence isolated from the Sargasso Sea
atggatttaaaagaatatattagatcaataccagactatcccaaaaaaggaatattatttagagatattactactctaattaaagacgaaaaagcattcgcagaatctatcaatcaaattgttgaaaaatcaaaaaattttaaatttaataaaattgcagcaattgaatctagaggttttgtgtttgcttcagcagtatcatatttattaaaaaaaccttttataatgttgagaaaaaaaaataaattgccagcagacacttactccgttgattttgagcttgaatatggaacagctacaattgaagtacataaagactcgatacaaaaagaagattctgtactcataattgatgatttgattgctacaggaggaacagctgaagcagcggccaaacttgtgaaaatatctaaaggaagtgttgcaggatttatttttgtaattaacttatttgatttaggtggttgtgatagtataaaaaaaaaaggccacaaagtagcaaacttaattgaatttccaggacattaaa

SEQ ID NO: 240296 - DNA, 529 bp, Unknown
  Bacterial polypeptide expressing nucleotide sequence isolated from the Sargasso Sea
atggatttaaaagaatatattagatcaatagcagactatcccaaaaaaggaatattatttagagatattactactctaattaaagacgaaaaagcattcgcagaatgtattaatcaaattgttgaaaaatcaaaaaattttaaatttaataaaattgcagcaattgaatctagaggttttgtttttgcttcagcagtatcatatttattaaaaaaaccttttataatgttgagaaaaaaaaataaattaccagctgatacttactccgttgattttgagctcgaatatggaacagctacaattgaagtgcataaagattcaattcaaaaagaagattctgtactcataattgatgatttgattgcaactggtggaactgctgaggcagcagccaaacttgtaaaaatatccaaaggaagtgttgcaggatttatttttgtaattaacttatttgatctaggtggttgtgatagtataaaaaaaaagggacacaaagtagaaaacttaattgaatttccaggacactagt

SEQ ID NO: 240297 - DNA, 529 bp, Unknown
  Bacterial polypeptide expressing nucleotide sequence isolated from the Sargasso Sea
tatggatttaaaagaatatattagatcaatacctgattatcctaaaaagggaattttatttagagatatcacaacattaataaaaaatgaaaaagcatttaaaaatacaattgatcaaatagtagaaagatctaaaaattttaaagttgacaaaattgcagctgtcgagtcgagaggttttgtctttgcttctgctgtatcgtacattttaaataaaccatttgtaatgcttaggaaaaaaaataaattacctgcagatactcactctgtagattttcaacttgaatatggtacagcaacaattgaggttcacaaagattcgatagatcaaaatgaatctattttaataatcgatgatttaattgctaccggcggaacagctgaggctgctgcaaaactagttggaatgtcaggtggaaaaattacaggatttatttttgtaattaatctttttgatttaggaggttgtgaaaatcttaaaaaaaaaggatataaggttgaaagcttaattgaatttccgggacactaa

SEQ ID NO: 240298 - DNA, 529 bp, Unknown
  Bacterial polypeptide expressing nucleotide sequence isolated from the Sargasso Sea
aatgaacttaaaagaccatatacgatctataaaagactacccgaaaaaagggatattatttagagatattactactctaataaaaaatgaagaagcttttgctaaatgtatagatcaaatagtagacagtagtaaaaaattcaagtttgataaaattgcagcaatagagtctagaggttttgtttttgcctccgcagtttcttatttattaaaaaaaccttttatacttttaagaaaaaaaaataaattacccgcagaaacacattctattgaatttgagttagaatatggaaaagctgtaatggaaattcataaagattctattaaagaaaatgactctgttttattaatagatgacttaattgctaccggaggcacagctgaagctgctgcaaaattagttgaggtgtcaaagggcaaagtttctggttttatttttgttattaatttatttgaccttggtgggtgtaataatttattaaaaaatggttacaaagttgaaaatcttatagaatttccaggccattag

SEQ ID NO: 240299 - DNA, 529 bp, Unknown
  Bacterial polypeptide expressing nucleotide sequence isolated from the Sargasso Sea
tatgaatttaaaagatcatattagatcaattcctgattatcctaaaaaaggtattttatttagagatataactactcttattaagaacgaaaaagcttttgccgaaacaatcaatcaaattattgaaagatccaaaaaatataaaattgataagattgcagcaatagaatcaagaggttttgtttttgcttctgcagtttcttatatccttaaaaaaccttttataatgttaagaaaaaaaaataaattaccagctgaagtacattctgtagattttgaattagaatacggaacagcaactattgaagttcacaaagattctatttcaaaagatgagactgttttaataattgatgatctgattgcaactggaggtactgcaaaagccgctgctaaattggtagaaatgtgtgaagctaaagtagctgcatttgtctttgttattaatttatttgatttaggtggctctgataatttagttaagaataactacaaagttgaaaatttaattaattttcctggccattaa

SEQ ID NO: 240300 - DNA, 536 bp, Unknown
  Bacterial polypeptide expressing nucleotide sequence isolated from the Sargasso Sea
tactattatgaatttaaaagattatattagatctattcccgattatccaaaaaaaggtattttatttagagatataactaccttaattaaagatgaaaatgcgtttgcagagacaattaatcaaattattgaaagatcaaaaaaatataattttacaaaaatagcggctattgagtctagaggttttgtatttgcatcagctgtttcgtttgttcttaaaaaaccatttattatgcttagaaaaaaaaataagttgcctgcagatgttcactcagtagattttgagcttgaatatgggactgcaacaattgaggttcataaagactctataaatgaaaaagatgaagttttaattatagatgatttaattgcaactggaggtacagctgaagctgcagcaaaattggttgaaatttctaaaggtaaagttgcagcatttgtatttgtaattaacctattcgatctaggtggatcagataatttagtaaaaagtaattataaagttgagaatttaattgaatttccagggcattaaa

SEQ ID NO: 240301 - DNA, 517 bp, Unknown
  Bacterial polypeptide expressing nucleotide sequence isolated from the Sargasso Sea
ttgaaagaatttgttagaacaattaaagactacccaataaaaggcattcaatttagagacataaccacactattgcaacgagcagatttatttcatgacttaattgatgaaatgacaaaaccttgggaaaataaaaatattgatgcaattgtaagcattgaggcaagaggttttattatggcaggcgcaatagcgtataaattaaatactgcgtttattccaatgcgtaagcctgataagttacctgctgacacatttaaaataaaatttgatttagaatatggttcaactgaaatgcaccttcacaaggacgctcttgataaccatcaaaatattttaataattgatgatttgcttgcaacgggtggaactgctgtagcagctgttaagcttattaatatgtttgaaaacaaaaatattgttggagcggggtttataataaatctacctgaattaaaaggtgaagaaattttgaataaaatggacatagaaacccactcacttatggaattttaaa

SEQ ID NO: 240302 - DNA, 414 bp, Unknown
  Bacterial polypeptide expressing nucleotide sequence isolated from the Sargasso Sea
tatggatttaaaagaatatattagatcaattcctgactatcctaaaaagggaattctttttagagatataactactttgataaagaatgaaaaagctttttgttactgtatagatcaaattgttgaaaaatctaaagaatttaaatttaacaaaatagcagctgtagaatctagaggttttgtttttgcttcggcgatttcatatattttaaaaaaaccttttatattacttaggaagaaaaataaattacctgctgaaactcattcaattgactttgaattggagtatggaacagcaactattgagatgcacaaagattctataattaaagatgactctgtaattataatagatgatttaattgcaactggtggaactgcagaagctgctgctaaattaataaaaatctcaaa

SEQ ID NO: 240303 - DNA, 529 bp, Unknown
  Bacterial polypeptide expressing nucleotide sequence isolated from the Sargasso Sea
atggatttaaaagattatattagatcaattgctgactatccaaaaaaaggaatactttttagagatattacaacattgattaagaatgaaaatgcatttaaacacacaatagatctgttagttgaagcaagcaaagtatttaattcaaataaaattgcagcaattgagtctagaggctttgtttttgcgtctgcagtatcatacttaaccaataaacctttcataatgttaagaaaaaaaaataaattaccagcagagacctattcagtagattttcaacttgagtatggtgatgcaacaatagaagtacacaaagattcgattaataaaggtgataaagtgctaataatagacgaccttattgcaacaggaggaacagctgaggcatctgcaaaattggttgaaatgtcagagggaagtgtagcaggttttatctttgtaattaatttattcgatcttggtggatgtgaaaaactcattgaaaaaggttacaaaataaaaaatttaattgaatttccaggtcactaat

SEQ ID NO: 240304 - DNA, 529 bp, Unknown
  Bacterial polypeptide expressing nucleotide sequence isolated from the Sargasso Sea
tatggatttaaaagaacatattagatcaattcaagactatcctaaaaagggaattctatttagagatatcacaactctcataaaaaatgaaaaggcatttaaagaatgtatcaaccaaattgttgagagatcaaaaaaatttaattttgataaaattgcggctgtagagtctagaggttttgtatttgcttctgctatctcatacatcttagataagccatttataatgttaagaaaaaaaaataaactacccgctgaggtacattctgttgattttgagcttgaatatggaacagctacaattgaagtccacaaagactcatttaatgaaaatgataatgtattaattattgatgacctaattgctactggaggcactgctgaagctgcagctcaattaattgaaatatcagaaagcaaagttgcaggatttatctttgtaattaatttatttgatcttggtggtactgataatcttttaaaaaagggttataaagtagaaaatcttttagattttccaggacattaa

SEQ ID NO: 240305 - DNA, 529 bp, Unknown
  Bacterial polypeptide expressing nucleotide sequence isolated from the Sargasso Sea
tatggatttaaaagaatatattagatcaattcctgattatcctaaaaaaggaatattgtttagagacataacaactttgattaagaatgaaaaagcatttaccgctacaatagatcaaataattgaggtgtctaaaaaatataagatagacaaaatcgcagctatagaatctagagggtttgtatttgcatctgcagtatcttacttacttaaaaaaccttttgtattgttaagaaaaaaaaataaattgcctgcggatacatattctgtggactttgaattagaatatggaactgccactatagaaatgcataaggactctgtagaaaaaaatgattctgttttaattattgatgatttaattgcaacaggcggaacagcagatgcagctgcgaaactaattaaaatgtcaggcggtaatatatcagcatttatatttgtaattaatctttttgatttaggtgggatagataaattaattaaagatggttatatggttgaaagtttagttaaatttccaggtcactga

SEQ ID NO: 240306 - DNA, 544 bp, Unknown
  Bacterial polypeptide expressing nucleotide sequence isolated from the Sargasso Sea
aatgaatgaccctttaaaccttaaaagatttattagaacagttgataattttcctattgatggaatttcttttcgagatatcactagcctaattgagactcctgaagcatttgtcaaaacatgcgatgaattaacgaaaatcgctaaagattttgactctgatattgttgcaagcatagagagtaggggttttatctttgctggaacaatagcaagagatttaagtttaccttttgttttagccagaaagccaggaaaacttccaaatgaaacttataaaaagagttttgatcttgagtacggaagcacatcaatagagatacaaaaaaatacgcttataggaaataaccaaaaagttgttattgttgacgacttggttgcaactggaggaacagctatagcatgcgcagaattatttacagaaaactttaatgttaaaaattcaaatatcttgattttaagcattattgatcttccggaacttggaggcagcaagttaattaaagaaaaaggctttgctataaaaacaataattgattattaa

SEQ ID NO: 240307 - DNA, 529 bp, Unknown
  Bacterial polypeptide expressing nucleotide sequence isolated from the Sargasso Sea
atggatttaaaagaatatattagatcaattccagattatcctaaaaagggaattctttttagagatataacaactttaattaaaaatgaaaaagctttcacttattgtatagatcaaattgcggataaatctaaggaatttaaatttaataaaatagcagctgttgaatctagagggtttgtttttgcatcggctctttcatacatacttaaaaagccttttatattacttagaaaaaaaaataaattaccagccgagactcactctgttgattttgaattagagtatggaactgcaactatagaggtccacaaagactctattgacaaagatgactcagttatcgtaattgatgatttaattgcaacaggtggtactgctgatgcagctgcagaattaataaagatttctaatggaaaagttgcaggatttatttttgttattaatctttttgatttaggtggatccgataaattaattaagcagggctacaaggtaaaaaatctaattaattttcctggtcattaat

SEQ ID NO: 240308 - DNA, 529 bp, Unknown
  Bacterial polypeptide expressing nucleotide sequence isolated from the Sargasso Sea
atgaatttgaaagattttattagatctattccagattaccccaaaaaagggattttatttagagacattactacactgattaaaaatgaaaatgcatttgctgaaaccatcaatcaaatagttgaaagatcaaagaaatataagtttacaaaaattgctgcaatagagtctagaggatttgtttttgcctctgcagtttcatatttattaaaaaaaccttttattatgctaaggaaaaaaaataaacttcctgctgatgttcactctatagattttgagttagaatatggaacggccaccattgaagttcataaagattcattaaacgaaaatgatagtgttttaataattgatgatttgattgcaaccggaggaaccgcagaagcagcagcaaaacttgttgaaatttcaaatggtaaagtggcagcttttatatttgttattaatttatttgatcttggtgggtcagataacttaattaaaaataactacaaagttgaaaatttaattaattttccagggcattaat

SEQ ID NO: 240309 - DNA, 529 bp, Unknown
  Bacterial polypeptide expressing nucleotide sequence isolated from the Sargasso Sea
atggatttaaaagaatatattaggtcaataccagactaccctaaaaaagggattttatttagagatattacaaccttaatcaaaaatgaaaaagcttttactgaaactattaatcaaatagttgaaagatcaaaaaattttaaatttaataaaatagctgcaatcgaatctagaggattcgtatttgcctcagcagtttcctatttgcttaaaaaaccatttattcttttaagaaaaaaaaataaacttcctgccgaaagatattcagtagattttgagcttgaatatggaactgcaacaattgaaatgcataaagactcgattaataaaaatgattctgttttaataattgatgatttaattgcaacaggtggtactgctgatgcagcagcaaaaataattgaaatgtcaaaaggtaaagtaagtggttttatttttgttataaatctttttgatttaggaggttgtgacaatcttattgaaaagggttataaaatagaaaatttgataagtttccctggccattaaa

SEQ ID NO: 240310 - DNA, 544 bp, Unknown
  Bacterial polypeptide expressing nucleotide sequence isolated from the Sargasso Sea
catgagtgacccgcttaaacttaaacaattcatcaggacagttaatgattttccaattgatgggatagcttttagagatatcactagtctaatcgaaacccctgtcgcctttgttaaaacctgtgatgaacttacaagtatttctgaattgtttgatgccacttcaattgcaagcattgaaagcagaggatttatatttgcaggatcgatagccaaagatttatctttgccatttattcttgccagaaagcctggaaaactgcccaatgagacttttataaaggattttgaccttgaatatggaagtacatccattgaaattcagaaaaacaccgttgtgaatgaatcagacagagttgtaatcgtcgatgatctggttgcaactggcggcacagctattgcctgtgcagagcttcttacagagaactttaacgtgaaaaaacaaaacattcttattcttgctgtaattgatttgccagatttaggcggcagtaaactgattgctgatcaaggatataaaattgagacccttgtaagttattga

SEQ ID NO: 240311 - DNA, 331 bp, Unknown
  Bacterial polypeptide expressing nucleotide sequence isolated from the Sargasso Sea
tctgtctctgccttttattcttgctagaaaacctgggaagttacccaatgaaacttatgttaaggattttgatttagagtatggaagcacctctatcgagattcaaaaaaataccatggtaaatgaatcggacagagttgttatcgtcgatgatttggttgcaactggaggcacagccattgcatgcgctgagttactgacagaaaacttcaatgttcgaagagaaaatatattaattcttgcagtgattgatttaccagaccttggtggaagccatttgattgctgatcaaggatatggcattgaaacccttgtaagctatacttcataa

SEQ ID NO: 240312 - DNA, 529 bp, Unknown
  Bacterial polypeptide expressing nucleotide sequence isolated from the Sargasso Sea
tatggatttaaaagaacatattaggtcaattcaagactatcctaaaaagggaattcttttcagagatataacaacacttattaaaaatgaaaaagcattcaaagagtgtattaaccaaattgttgaaagatcaaaaaaattccagtttaataaaattggagctgtagagtctagaggatttgtttttgcatcagctatttcttatatacttgataaaccattcataatgttgagaaagaagaataaattacctgctgacgttcattcagtagactttgagcttgagtatggaactgcaacaatagaagtccataaagattcattcgatgaaggtgataaagttttaataattgatgatttaattgctactggcggcaccgcagaagcagctgctaaattaatagaaatatcaaaaagtaaggtggctggatttatatttgtaataaatctttttgatttaggtggtacagataatctagttaaaaaaggatattctgttgaaaatcttttagattttccaggacattaa

SEQ ID NO: 240313 - DNA, 421 bp, Unknown
  Bacterial polypeptide expressing nucleotide sequence isolated from the Sargasso Sea
tctgatatttatttttaatcgttataaagataaaaatataactgcaatcgcgggaattgaagctcgcggatttatatttggagctattattgcagaaagattaggaatttcctttgttccaataagaaaaaaaaacaagctaccatgtaaagttatatcagaagagtacatgctagaatatggctctgatatattagaattagatattacagctttaaactcagattctatcgttgtaatcattgatgatttaattgctaccggaggtacagcaattgcagctggtaatttaatcaagaagctaggtgcaaatatccatgaatattcatttttagtaaacttaccagatttaggaggcgaaaataaattaaaagattgtaattacagcgtacattacttaattgaatatgagggagaataa

SEQ ID NO: 240314 - DNA, 529 bp, Unknown
  Bacterial polypeptide expressing nucleotide sequence isolated from the Sargasso Sea
tatgaatttaaaagatcatattagatcaattcctgattatccaaaaaaaggtattttatttagagatataactactctaattaagaacgaaaaagcttttgccgaaacgatcaatcaaattattgaaagatctaaaaaatataaaatcgataagattgctgcaatagaatcaagaggttttgtgtttgcttctgcggtttcttatatcctaaaaaaaccttttataatgttgagaaaaaaaaataaattaccagctgaggtacattctgtagattttgaattggagtacggaacagcaactattgaagttcacaaagattctattttaaaagatgagtctgttttgataattgatgacctaattgcaacaggtggaactgcagaagctgctgcaaaattggtcgaaatgtgtgaagctaaagttgcagcctttgtttttgtaattaatttatttgatttaggtggatctgataatttaattaaaaaaaattataaagttgaaaatttaattgattttccaggacattaa

SEQ ID NO: 240315 - DNA, 355 bp, Unknown
  Bacterial polypeptide expressing nucleotide sequence isolated from the Sargasso Sea
tatgaaaaaattagaagatttgattatcacttataaggattttccaaaaaaaggtatcgattttaaagacgttttagaaattcttcaatatccagaaatttttcatgaccttattttaaaaatgtcttcaaatgaatttttaaaaaatgctgaagcaataatttccatagatgcgaggggatttatttttggttctgcagttgctctacaattatctaaacccatgattgtggcacgaaaacctggaaagctaccaggccatatattaacaagagaatatgatttagaatatggaaaaaattctctttcaatacaaagtaaagccctgaaaaagttcaattcttttgtaatcgta

SEQ ID NO: 240316 - DNA, 577 bp, Unknown
  Bacterial polypeptide expressing nucleotide sequence isolated from the Sargasso Sea
ttgccatatcaaaaaaataatttatttatttatatatcgcaatttattatggatttaaaagattatattagatcaatcaaagattatccaaaaaaaggaattctttttagggacataacaacattaattaaaaatgaaaaagcttttaaagaatgtattgatcaaatagttgaaagaactaaaaaatttaaggtagataagatagcggctattgaatcaagaggttttgtatttgcatcagcggtatcttatatactaaacaaaccttttattttgctaagaaaaaaaaataaacttccagcagaatctcattcagtcgatttcgaattagagtatggaactgcaactatagaagttcataaagattcaattaaagaaaatgattcagttttaattattgacgatttaatagctacaggcggtacagccgaagcagctgcaaaactagttacaatatcaaaaggatctgtttcaggatttatttttgttataaatctttttgatctaggtggttgtgataaactaattaaattaggtcacaaagttgaaaacttaattgagttccctggacattagt

SEQ ID NO: 240317 - DNA, 535 bp, Unknown
  Bacterial polypeptide expressing nucleotide sequence isolated from the Sargasso Sea
atggctgaaaagttaattataaaatttgatgaatatttagatacagttgagaaattagcattaacaataagtcaaaattacaaaccaactgttttagttggtataatgagaggggcagctcctataattgacatcttatctaggattttaaagttaccaactgcatatatagtaattcaaagttattctggtagtggaattgaaaataaacagggagaactaatttttgcacgagatataagttcgatcgcaagtaatagtgattatgaaagagtattattagttgatgatctatctgatacaggtcttacactaaataaaagtatagaatggttaaaacaatatgaaccagttaaaaattatattaaagaaataaaaacagcctgtttgtggaaaaaaaaatcgtcttcatttacaccagatttttgccccattagattgaatagtgatccatggataattcagcccacagaacattatgaagaattaaatattgagaagatagtttctaaacaaaaaaaaagggctaaataat

SEQ ID NO: 240318 - DNA, 550 bp, Unknown
  Bacterial polypeptide expressing nucleotide sequence isolated from the Sargasso Sea
aatgagcgatccttataatctcaagcaatttgttcggacagttgaggactttccaattgatggaattacctttagagatataaccagtctgatagaaaccccagatgcatttatcaaaacttgtaataagttgacggaaatttctaaattatttgatgccacttcaattgcaagcattgaaagcagaggattcatttttgctggctccatagcaaaagatctgtctctacctttcattcttgccaggaagcctggaaaactacccaataagactttcattaaggactttgatttagagtatggaagcacctctatcgagattcaaaaaaataccatggtaaataaatcggacagagttgttatagttgacgatttagtcgcaactggaggcacagccattgcctgcgctgagttacttacagagaacttcaatgttctaaatgaaaatatattaattcttgcagtgattgatttaccagaccttggtggaagccagctgatagctgatcaaggatatggcattgaaacccttctaagttatacttcttaa

SEQ ID NO: 240319 - DNA, 529 bp, Unknown
  Bacterial polypeptide expressing nucleotide sequence isolated from the Sargasso Sea
tatgaatttaaaagattttattagatctataccagattacccaaaaaaagggattttatttagagatataacaactttaattaaagataaaaatgcattttctgaaacaattgatcaaataattgaaaaatctaaaaaatatgattttgataaaatagcagcaattgagtcgagaggttttgtatttgcttcagctgtatcctatatcttaaaaaaacctttcattttattaagaaaaaaaaataaattaccagctgaagttcactctgtggattttgaattagaatatggtaaggccacgattgaagtacataaagattctatagaaaaaaatgataaagttttaattattgatgatttgattgcaactggtggaaccgctgaagcggcagctaaattaattgaaatttctggtggaaaaatagcttgttttatttttgtaataaatctttttgacttaaatggatcaaataaactagtaaaaattgggcataaagtagaaaatttaattgagtttcctggtcactaa

SEQ ID NO: 240320 - DNA, 544 bp, Unknown
  Bacterial polypeptide expressing nucleotide sequence isolated from the Sargasso Sea
aatgagcgacagattagacttaaagaaatatattagaaccgttaaagatttcccgattgacgggatcatttttagagacattacaagtttaattgaaacacctgaagccttcataaaaacatgtgatgaactaaccagaataacgaaagaatttggggctaacatagttgcaagcattgaaagcagaggctttattttcgcaggtacaattgctagagatcttgagttaccttttgttcttgcgagaaaacctggaaaacttccaaatcaaacttataaaaaaagctttgatcttgaatacggtagcacctctatagagatacaacaaaatactaatgtaaataaagatcaaaaaattgtaatagtagatgatttggttgcaaccggaggaactgccattgcttgtgctgagttatttactgaaaactttaatatcaatgcctcagatattcttattttaactgttatagatctaccagatttgggaggtagcgatttaataaaaaatcaagggtatcacattgaaacaatagttgattattaa

SEQ ID NO: 240321 - DNA, 529 bp, Unknown
  Bacterial polypeptide expressing nucleotide sequence isolated from the Sargasso Sea
atgaaattagaaaaaacaattaaatcaattccgaattatcctaaaaaaggtatcctttttagagatataacatctctattagaaaataagagagcttttaatacaactgttaaaagaatgtataaaattacaaaaaaaataccccataataagcttgcggctattgagtctagaggttttatttttgcttctgtcctcgcgtatttagaaaaaaaacctttaatattgctaagaaaaaagaataaacttccagataaaagaatttcacaaaaatttaccctagaatacggaaaggcaacaattgaggtacataaaagatcagtcaaaaaaaatgataaaatattaattgttgatgacttgatcgcaacaggaggtacagctcttgctgctgcgaaactaattgaaaaatgcaaagggaaagtcgcaggatatatatttttaattaatttattcgatttacctggtaatgaaaaattagagaaaaaagattataagtcttttagtttaataaagtttccaggacattaaa

SEQ ID NO: 240322 - DNA, 529 bp, Unknown
  Bacterial polypeptide expressing nucleotide sequence isolated from the Sargasso Sea
tatgaacttaaaagattacatcagatcaattcctgattatcccaaaaaagggattttatttagagatataactacactaatcaaagatgaaaacgcatttgctgaaacaattgatcaaattatagaaagatcaaaaaaatataattttaccaaaatagcagccatagaatctcgaggttttgtgtttgcttctgctgtctcgtatattctaaaaaaaccttttattatgttaagaaaaaaaaataaattaccagctgatgttcattctatagattttaaactagaatatggaactgcaacaattgaagttcacaaagactctattaatgaaaatgatgaagttttaattatagatgatcttattgcaactggaggaactgctgaagctgctgcaaaattaattgagatttcgagaggtaaagtttcagcatttgtatttgtcataaacctatttgatctaggtggatcagaaaatttagtaaaaaataattataaagttgagaatttaattgaatttccagggcattag

SEQ ID NO: 240323 - DNA, 529 bp, Unknown
  Bacterial polypeptide expressing nucleotide sequence isolated from the Sargasso Sea
atgaatttaaaagactttattagatctattccagactatcccaaaaaaggtatactttttagagatataacaactttaattaaagacgaaaaagcatttactgaaacaattgatcaaattgttgagagatctaaaaaatttaaagtagataaaattgcagcaattgaatcaagaggttttgtttttgcatcagcggtttcttatgttcttaaaaaaccttttataatgcttagaaaaaaaaataaattacctgctgatgttcattcaattgattttgaattagaatatggaacagcaacaattgaagttcacaaagattcaattcaagagaatgattctgtattagttattgatgatcttatagctaccggtggtactgctgaagcagctggtaaactaataaaacaatcaaaaggtaatgtttctggttttatttttgttataaatttatttgatttaggtggatgtgataatcttatcaaagaaggatttaaagtagaaaatcttattgaatttccaggtcactaaa

SEQ ID NO: 240324 - DNA, 529 bp, Unknown
  Bacterial polypeptide expressing nucleotide sequence isolated from the Sargasso Sea
atgaatttaaaagattttataaggtcaattcctgactatccaaaaaaaggtatactatttagagatatcactaccttaataaaaaatgaaaaagcattttcttatactattgatttaatagttgaaaaatcaaaacaatttaaagttgataaaattgcagcaattgaatcaagaggttttgtttttgcttctgctgtttcttatattttaaaaaaaccatttatattattaaggaaaaaaaataaacttcctggtgatacttattctgtagattttaaacttgaatatggtgatgctacaatggaagtgcacaaggactcgattgatgcgaatgactccgtcttgttgattgatgatttaattgcaactggaggaacggcagaggctgcagctaaattaattgaaatttccaaaggtaaagttgctggatttatctttgttatcaatttatttgatctaggaggaagtgatagcttaataaaaaatggatataaagttgaaaatttaatagattttcctggtcattaat

SEQ ID NO: 240325 - DNA, 504 bp, Unknown
  Bacterial polypeptide expressing nucleotide sequence isolated from the Sargasso Sea
aatggataaagtgttatcttgattttccgaaggagggcatattatttagagatataagccttctgcttgcaagtccagaaggtatgagcatggtaaaaaaagaattcgtatcgttaatttctgattggaaacctgatcttattgcaggaatagatgctagaggattccttttctcttctctcattggtgaagcaatgaatataggaactttaatgattagaaagtctggtaagttacccggagaagttatagagagaagctacgacttagaatatgggtcaaacaaacttgctatgcaaaagactaatagtctaaaaggtaagaaagtcgtaataatggatgatttactcgctaccggaggtactttaatgtgcgcaagagaacttatcgaatcacagggtgcattagtttgtgggtgcgcagttgttgtagagctcagttttttaaggggctcagaacttctggaatgtccagttgttagcctagcttcatatgaagactaga

SEQ ID NO: 240326 - DNA, 502 bp, Unknown
  Bacterial polypeptide expressing nucleotide sequence isolated from the Sargasso Sea
atggacttaaaaaattttattagatcaataccagattatccaaaaaaaggaattctttttagagacattacaacgttgattaaagatgaaaatgcatttgctgcaactatcaatcaaatagttgaaagatcaaagaaatataattttaccaaaatagcagctatagagtcgaggggatttgtattcgcttctgcagtttcttatattttaaaaaaaccttttattatgttaaggaaaaaaaataaacttcccgctgatgttcactcagtagattttgagctcgaatatggaacagctactattgaagttcataaagactccataggaaatgaagactctgttttaattattgatgatttaattgcaaccggaggaactgcagaagcagcagcaaaacttgtagaaatttcaaatggtaaagtagcagcttttatatttgttattaatttatttgatcttggtgggtcagataacttgattaaaaaaaaattacaaagttgaa

SEQ ID NO: 240327 - DNA, 367 bp, Unknown
  Bacterial polypeptide expressing nucleotide sequence isolated from the Sargasso Sea
atggctgaaaagttaattataaaatttgatgaatatttagatacagttgagaaattagcattaacaataagtcaaaattataaaccaactgttttagttggtataatgagaggggcagctcctataattgatatcttatctaggattttaaagttaccaactgcatatatagtaattcaaagttattctggtagtggaattgaaaataaacagggagaactaatttttgcacgagatataagttcgattgcaagtaatagcgattatgaaagagtattattagttgatgatctatctgatacaggtcttacactaaataaaagtatagaatggttaaaacaatatgaaccagttaaaaattatatta

SEQ ID NO: 240328 - DNA, 529 bp, Unknown
  Bacterial polypeptide expressing nucleotide sequence isolated from the Sargasso Sea
tatggatttaaaagattatattagatcgattcctgattatccgaaaaagggaattttatttagagatatcactacattaattgaagatgaaaaagcatttgctcactgcattgatttaatatttgaaaaatctcaaaattttaaatttgataaaattgctgcaattgagtctagaggttttgtatttgcttccgctgtatcatatttagccaagaaaccttttattatgctaagaaaaaaaaacaaacttccatctgatacacactctgttgattttgaactggaatatggcaaagctactattgaggtgcataaagactctataaaaaaaaatgacaaagtattaattatcgatgatttaattgctactggtgggacggctgaggcagcagcaaaactggtaaatatatctcatggaacagttgcgggttttatttttgtaataaatttgtttgatttaagtggctctgataatttaagaaaacaaaattacaaagtcgaaaatctaatagaatttcctggacactaa

SEQ ID NO: 240329 - DNA, 550 bp, Unknown
  Bacterial polypeptide expressing nucleotide sequence isolated from the Sargasso Sea
atgagcgatccttataatttgaagcaatatattaggaaagttgaagactttccaattgacgggattactttcagagacataaccagtcttattgaaacaccagatgcatttgtcgaaacttgtactcagttgactgacattactaaatcatttgatgccacttcaattgcaagtattgaaagtagaggttttatatttgctgggtctatagcaaaagatctgtctctgccttttgttcttgctagaaaacctgggaagttgcctaatgagactttcgttaaggattttgatttagagtatggaagtacctctatcgagattcaaaaaaataccatggtaaatgaatcggacagagttgttatcgtcgatgatttggttgcaactggaggcacagccattgcgtgtgctgagttactgacagaaaacttcaatgttcgaaaagaaaatatattaattcttgcagtgattgatttaccagaccttggcggtagccagctgatagctgatcaaggatatggcattgaaacccttgtaagctatacttcataag

SEQ ID NO: 240330 - DNA, 544 bp, Unknown
  Bacterial polypeptide expressing nucleotide sequence isolated from the Sargasso Sea
atgagtgatccacttaaaattaaacaatacattaggacggttaatgattttccaattgatggtatagcttttagggatattacgagtctaatcgaaacccctgttgcttttgttgaaacctgtgaagagcttacaagaatttctaaatcatttgatgccacttcaattgcaagcatagaaagcagaggatttatatttgcaggctccatagccaaagatttatctttaccatttattcttgccagaaagcctggaaaactgcccaatgagacttttatgaaggattttgaccttgaatatggaagtacatccattgaaattcagaaaaacaccgttgtgagtgaatcagacagagttgtaatcgtcgatgatctggttgcaactggtggcacagctattgcctgtgcagagcttcttacagagaactttaacgtgaaaaaacaaaacattcttattcttgctgtaattgatttgccagatttaggtggcagtaaactgattgctgatcaaggatataaaattgagacccttgtaagttattgat

SEQ ID NO: 240331 - DNA, 535 bp, Unknown
  Bacterial polypeptide expressing nucleotide sequence isolated from the Sargasso Sea
atgtcagaaaaattaataatcaactttgaagaatatctgaaaaccgttgaaaaacttgctattcagatcaatcaaacgtttaatcctactgtactagttggaatcatgagaggggccgccccaataattgatatattgtccagaatttataaacttccaactgcttatatagtaattcaaagttactctggcgaaggtatggaagataaacaggggaaccttgtatttgcaagagacattagttcaattgctagaaataaagattttgaaagagtccttctggtagatgatctgtccgatacaggtcttactttaaatagaagcatagattggcttaaaaattataaaccaataaaaaattatataaaagaaattaaaactgcatgtttatggaaaaaaaaatcatcatctttcagtccagatttttgcccagtaaaattaaacaatgatccttggatagttcagccaacagaacattttgaggaattaaatatcaaacaaattattgaaaaacataaaaaaaaagaaggctaga

SEQ ID NO: 240332 - DNA, 529 bp, Unknown
  Bacterial polypeptide expressing nucleotide sequence isolated from the Sargasso Sea
tatgaatttaaaagattatattcgctcaattaaagattatcctaaaaaaggtattttatttagagatataaccactttaataaagaatgagactgcttttgaagagtcaataaatcaaattgttgaaagatccaaaaaatttaaggtagataaaatcgctgcaattgagtcacgtggttttgtgtttgcgtccgctgtttcttacattttaaaaaaaccattcataatgttaagaaaaaaaaataaactacctgctgatgtacactcagttgattttgagcttgaatatggaactgcaacaatagaggttcataaagactcaatttcagaaaatgactctgttcttataatagatgatttgatagcaacaggaggaaccgcagaagctgcagcagaacttatagaaatttccaaaggtaatgttgcagcctttatatttgtcataaatctttttgacttaggtggttgtgataatctattaaaaaaaggatataaagttgaaaatttgatggactttccaggccattaa

SEQ ID NO: 240333 - DNA, 544 bp, Unknown
  Bacterial polypeptide expressing nucleotide sequence isolated from the Sargasso Sea
atgaacgactttttaaaccttaaaagatttattagaacagttgataattttcctattgatggaatttcttttcgagatatcactagcctaattgagactcctgaagcatttgtaaaaacatgtgatgaattaacaaaaattgctcaagattttggtgctgaaattgttgcaagtattgagagtagaggttttatctttgccggaaccatagcaagagatttaagtttaccttttgttttagccagaaagccaggaaaacttccaaatgaaacttataaaaagagttttgatcttgaatacggaagcacatcaatagaaatacaaaaaaatacggttatagggaataaccaaaaagttgttatcgttgacgatttggttgcaaccggaggaacggcgatagcatgcgcagaattatttacagaaaactttaatgttaaaaattcagatattttgattttaagtatcattgatctgccagaccttggcggtagcaagctaatcaaagaaaaaggttttgctataaaaacaataattgattattgat

SEQ ID NO: 240334 - DNA, 550 bp, Unknown
  Bacterial polypeptide expressing nucleotide sequence isolated from the Sargasso Sea
atgagtgatcaatataaccttaagcagcatatcaggactgtaaatgattttcctattgatggaataactttcagagacattactagtttaatagaacatccagaagcatttgttgaaacttgtactcaattgacaaagatttctaaatcatttaatgctacttccattgccagcattgaaagcagagggtttatattcgctggctcaatagctaaagacctgtctttgccttttattcttgctaggaagcctggaaagttaccaaatgagactttcgttaagggatttgatttagagtacggtagtacttctatcgagatccaaaaaaataccatggtaaatgaatctgacagagttgttatagtcgatgatctggtcgcaactggagggacggccattgcctgtgctgagttactgactgagaacttcagtgttcaaaatgaaaatattttaattcttgcagtcattgatttaccggatctaggaggaagtcaactgattgctgatcaaggatatggaattgaaaccctcgtaagctatagttcgtaac

SEQ ID NO: 240335 - DNA, 529 bp, Unknown
  Bacterial polypeptide expressing nucleotide sequence isolated from the Sargasso Sea
atgaatttaaaagattatataagatcaattcctgactatcctaaaaaaggcatactgtttagagatattactactttaataaaagattcaaaggcatttaactactcaattgatcaaattataaaaatttcaaataaattagattttgataaaatagctgcaattgaatcaagaggctttgtttttgcatcagcagtctcgtataagttgaaaaaaccatttattatgatgagaaagaaaaataaactaccttcagaaaaaatttcagttgattttcaattagaatatggaacagcaacattagaaattcataaggactctttgagtgaaggggataaagttttaataattgatgatttaatagctactggaggtacagctgaggctggagcaaaattagtagaaatgtcaaaagctaaagttgctggctttatttttataattaatttatttgatctaggtggtaacaaaaaactaattgataaatcttattttactaagagtcttattgagttcccaggacattaaa

SEQ ID NO: 240336 - DNA, 371 bp, Unknown
  Bacterial polypeptide expressing nucleotide sequence isolated from the Sargasso Sea
aatgaaagaatatgtaagaacaatattagattatcctgtcaaaggtattcaatttagagacattacaactctcttgcaagatgctgatcattttaaacaagtgattgataaaatgactgagccatggaaaaataattcaattgacgctgtgttgagtattgaatcaagaggttttattatggcaggagcgattgcatacaatataggtgcagcttttattccactaagaaaacctgataaacttccaggagcaacttataaagtttcatatactttagaatatggctctactgaaatgcatatacataaagatgctttagataatcataaaaatttattaattattgatgatttacttgcaactggaggta

SEQ ID NO: 240337 - DNA, 517 bp, Unknown
  Bacterial polypeptide expressing nucleotide sequence isolated from the Sargasso Sea
aatgaaagagtacgtcagaacaattttagactatcctgttaaaggtattcaattcagagatattacaacacttttacaagatgcagggcattttaaacaagttattgatgaaatgacaaacccatggaaaaatttagatatagatgctgttttaagtattgagtctcgtggctttataatggcaggagcaatagcatatcatataggtgccgcttttatacctttaagaaagcctgataaacttccaggagaaaccttcaaagtttcttataccttagaatatggatcaactgagatgcacattcacaaggatgcactcgacaatcataaaaatttattaattatagatgatttgcttgcaactggaggtactgcacttgcagcaattgatttaattaatatgtttgaaaataaaaatattattggagcaggttttattattaatctcccagaattgaagggtgataaaaaactgcaagaaagaggagtgaaaatacattcattgatggagttttaa

SEQ ID NO: 240338 - DNA, 411 bp, Unknown
  Bacterial polypeptide expressing nucleotide sequence isolated from the Sargasso Sea
aatgagtgatccacttaaaattaaacaatacattaggacggttaatgattttccaattgatggtatagcttttagggatattacgagtctaatcgaaacccctgttgcttttgttgaaacctgtgaagagcttacaagaatttctgaatcgtttgatgccacttcaattgcaagcatagaaagcagaggatttatatttgcaggctccatagccaaagatttatctttgccatttattcttgccagaaagcctggaaaactgcccaatgagacttttatgaaggattttgaccttgaatatggaagtacatccattgaaattcagaaaaacaccgttgtgaatgaatcagacagcgttgtaatcgtcgatgatctggttgcaactggtggcacagctattgcctgtgcaga

SEQ ID NO: 240339 - DNA, 448 bp, Unknown
  Bacterial polypeptide expressing nucleotide sequence isolated from the Sargasso Sea
aaaaagatttttagtttagtgattgatcatatttcagtaattgcaaaaaagaaaaaaattaataagattattggaattgactcacggggctttatatttgcagctcccgttgcttataaaaataagataccattggttttaattagaaaatcaggaaaattacctggtaatacatttaaggcgaggtattcattagagtatggcaatgaccaaatggaactaaataaaatgtctattaataagtatgacagtgtaatgatagtcgatgatttaatagctacaggaggaactgcaaaagcatctgcagaccttattaaaaaaactaattcaaaacctattgaatttatttttattattggactctctgatttattgggtatccagaaattaactaagaaaggtcacaaatgcacactcctatcatcatttaaagagagtgaaaaatgaa

SEQ ID NO: 240340 - DNA, 262 bp, Unknown
  Bacterial polypeptide expressing nucleotide sequence isolated from the Sargasso Sea
tataaagtatcatatgatttagaatacggttctaccgaaatgcatgttcataaagatgcattagataatcatactaatcttcttataattgatgatcttttagctactggtggaacagcattagctgcgatagaattagtaaatatgtttgagaataaaaatataataggtgctggatttattataaatttacctgaattaaaaggtgatcaaaaattaataaataaagatataaatattcattcattgatggagttttaaa

SEQ ID NO: 240341 - DNA, 529 bp, Unknown
  Bacterial polypeptide expressing nucleotide sequence isolated from the Sargasso Sea
atgaatctaaaagattatataagatcaatacctgattatccaaaaaaaggtatactttttagggacataactacattaattaaaaatgaaaaagcatttgcaaaaacgatagatttgattgttgaaagatcaaaacaatttcaagttgataagattgcagcaattgagtctagaggtttcgtttttgcatcagcagtttcttatattttgaaaaaaccatttattcttcttagaaaaaaaaataaattgcctgctgaaacccattctattgatttcaaattagaatatggagatgcaacaatggaggtgcataaagactcgattaatgagaaagataacgtattgttaatagatgatcttattgcaacaggtggtacagctgaggctgcagcaaagttaattgaaatttctaaaggtaaagtttcaggttttatatttgtaataaatttatttgatttaaaaggttcagataatttaattaacaaaggatataaagtagaaaatttaatggattttccaggtcattagt

SEQ ID NO: 240342 - DNA, 430 bp, Unknown
  Bacterial polypeptide expressing nucleotide sequence isolated from the Sargasso Sea
atggatttaaaagaatatattagatcaattcctgactatccaaaaaaaggtattttatttagggacattacaactttaatcaaaaacgaaacagcttttgccgaaacaataaatcaaattgtggaaagatcaaaaaattataaaattgataaaattgcagcaattgaatctagaggatttgtttttgcttctgctgtttcctatttattgaaaaaaccatttatattattaagaaaaaaaaataaattaccagcagatacttattctgtagattttgaacttgagtatggaacagcaacaatcgaaatgcataaagactctatagatgaaaatgactctgtattaattattgatgatctaattgctactggcggaacagcaaaagctgctgcaaaacttattgaaatgtcaaaaggaaacatttctgcat

SEQ ID NO: 240343 - DNA, 535 bp, Unknown
  Bacterial polypeptide expressing nucleotide sequence isolated from the Sargasso Sea
atggctgaaaagttaattataaaatttaatgaatatctagatacagttgaaaaattagctttggtaataaatcagaaatataaaccaactgttttagttggaattatgagaggagctgctcctataattgatattttatctaggattttaaagttacctactgcatatatagtaattcaaagttattctggtagtggaattgaaaataaacagggcgaactaatatttgcaagagacataagttcaatagcaaaaaatgttgattatgagagagtgttgttagtggatgatctttcagatacaggcctgactttaaacaaaagtatagaatggttgaaacaatataaaccagtaaaaaactatataaaagaaattaaaactgcatgtttgtggaagaaaaaatcttcgtccttcacacctgacttttgtcctgtaatgcttgaaaatgacccatggattattcagccaacagagcattatgaagaattaaatatagaagaaataatttctaaacaaaaaaagggagctaaataaa

SEQ ID NO: 240344 - DNA, 403 bp, Unknown
  Bacterial polypeptide expressing nucleotide sequence isolated from the Sargasso Sea
gatgacagataaatttaaattaaaagaatatattagaacagttaataattttcctattgctggtattaaatttagagatattaccagtttgattgaaaatccctctgctttcaaaataacctgtaatgaactttcaaacgctacctctaaatatcgagcttctaaaattgtaagcattgagagtagaggttttatttttgcaggctccgttgctaatgatttaagcttgccttttgtacttgcaagaaaaccaggcaaacttcctaatgaaacacatcaaaaaagttttgatcttgagtatggtagtacttcaatagaaattcaaaaaaatacatcaatatccatcaaagataaaattgttattatcgatgaccttatagcaacaggaggcactgctattgct

SEQ ID NO: 240345 - DNA, 517 bp, Unknown
  Bacterial polypeptide expressing nucleotide sequence isolated from the Sargasso Sea
atgaaagattatgtaagaacaatattagattatcctgttaagggtattaaatttagagacattactacattattacaaaatgcaggtcattttaaacaagtaatagatgaaatgacaataccatggaaaaataaaaaaatagatgcagtattaagtattgaatcaagaggatttataatggctggagctattgcttataatattggagctgcatttatacctttaagaaaacctgataaacttcctggagagacatataaagtttcatatacattagagtatggttccacagagatgcatattcacaaagatgcacttgataatcatttaaatttactaattatcgatgatttacttgcaacaggtggtactgctttagctgcccttgaattaattgaaaaatttgaaaataaaaatattataggttctggttttataattaatcttcctgacttaggtggagagaagaaattaaaaaataaaggtataaaaattcattcattgatggagttttgac

SEQ ID NO: 240346 - DNA, 286 bp, Unknown
  Bacterial polypeptide expressing nucleotide sequence isolated from the Sargasso Sea
catggccgacagcctcgatcagcaattacgagctctggtcagggatgtacccgattttcccaagccaggaatcttgttccgtgacttgactccagtgatgcgtgatccgcaggcctggcgccaagtcatggagggaatgcaggcctcgttgagcccattacagcctgaggtgattgttggaattgaggcgcgtggattcatcgtgggcaccagcttggcgatggcgatggggctggggtttgtgcccgttcgtaagcccgggaaattgccgggtccaataacggct

SEQ ID NO: 240347 - DNA, 428 bp, Unknown
  Bacterial polypeptide expressing nucleotide sequence isolated from the Sargasso Sea
aatgaaagaatatgtaagaacaattgcagattatcccgtacaaggaattcaattcagggacattactaccttattacaaaatgcgggacactttaaacaagttattgatgacatggtaaaaccttggaaaaataaaaagattgatgcagttttaagtattgaatcacgtggttttataatggctggtgcaatcgcttattttttaaatgctgcttttattcctttgcgaaaacctcataaactaccttttgatactttcaaagtttcatatgatttagaatatggatcgactgaaatgcatatacatactgacgctttagacggacacaaagatttacttattattgatgatcttcttgctacaggaggaactgcacttgcagcaattgaatttaataataaattttcaaataaaatgtatttggagc

SEQ ID NO: 240348 - DNA, 485 bp, Unknown
  Bacterial polypeptide expressing nucleotide sequence isolated from the Sargasso Sea
attgaacaaaaaactaaaaaataaactcaagaagaaaattagggtaattcctgattttccaaaaaagggaattctgtttcaggatataacatctattacagataataagaaacttttcaaagaagttgttcttgagatttccaaatatgttaagaaaaacaagtttacgaaaattgctgcagttgaagcgcgtggatttatttttggttctgcagtttcttttaaaacagagatcccatttgttcccatcagaaaaaaagataaacttcctggaaaaattttgaaacaaaaatataaactagagtacggcatagatgaaatacaaattcataaaaactctatcaatgaacaagatagagtgctgataattgatgatctgattgcaacaggaggtactgcactcgcatcagcacaattagttaggaagtgtaaagctaaatcgattgagttttattttataattgatctaaaaaatattggagggt

SEQ ID NO: 240349 - DNA, 406 bp, Unknown
  Bacterial polypeptide expressing nucleotide sequence isolated from the Sargasso Sea
atggagattaagacaattgagagttacataagcaaaatacctgattatcctaaaccaggtattttgttttatgatatatccactctaatctctgacaaagcggctttttcagcctccatcaagcttttaagtaaagctgttcaaaaatataatttcgatatgatagcagccatagacgccagaggatttctttttggaagtgccatagcatttcatttagaaaaggggttaattatggtgcgaaaaaaaaataagctaccaggcaagaaaattagcttcgagtatgaattagagtatgggacagatacactggaattaaacaccgaagcaaaaggaaaaaaaatattgattgtcgatgacctcctagctacgggaggtacagctggtgcaacaatcgaattatgaa

SEQ ID NO: 240350 - DNA, 502 bp, Unknown
  Bacterial polypeptide expressing nucleotide sequence isolated from the Sargasso Sea
atgaaagaatacgttcgaacaattgctgattatcctgttgaaggaattcaattcagagatattacaacattattgcaaaatgcaggacactttaaacaagtcattgatgatatggtaaaaccatggcaaaataaaaaaatagacgcagttttaagtatagaatcacgtggatttattatggcaggggcaatagcttattttttaaatgcagcatttgttcctttgagaaagcctcataaacttccatttgatactttcaaaacctcatacgacttagaatatggatcaactgaaatgcatattcatacagatgccttagatggtcataaagatttattaattattgatgatcttttagcaacaggtggaaccgcacttgcagcagtagaattaattaaaaagtttgaagacaaaaacattgttggtgcaggttttataataaatttaccagatttaagtggtgataaaaaactaattgaaaaagaaattgagatacattctt

SEQ ID NO: 240351 - DNA, 505 bp, Unknown
  Bacterial polypeptide expressing nucleotide sequence isolated from the Sargasso Sea
tatggacctaaaaaaaattatcagagaaattcaagattatcccgaaaaaggaatcatatttagagacatctctacaatactagcaaatcccgatgctttttcctttacaataaatgaattaggaaaaaatattcaaaaatttaatcctgattatttagctgctgtagagtcaagaggttttatttttgcttctcccctttctcaaatttttaaaattccattaattttaattagaaaaaaaggtaaattgccaccacctgtaataggtattgattatgatctcgaatatggaaaggatactttagaagtttcttcttcagtaattccaaaatcgaaaaacatactaattgttgatgatattatagctactggaggtactgtgaatgcttcgatagatttaattgagaaaactggaaataaagttttggggattttaagtgttattgatcttaaattatataaaaaaccttttacagtacctttaagatcaattattcattattaa

SEQ ID NO: 240352 - DNA, 414 bp, Unknown
  Bacterial polypeptide expressing nucleotide sequence isolated from the Sargasso Sea
aatgaatattcaagaattaaagaaaaaaatcagaaatattcctgactttccaaaaaaaggcattcagtataaagatataaccactgtccttgaaaattatgatgcatttaaatattctattgatttcttttatgataaatttgttaataaagaaatagatactgtagttggaattgaaagcagagggtttatatttggggctccgctcgcgttaaggcttaaaaaaggatttgtattggcaaggaagcccaataagcttccagcaaaaaaaatatctaaaagctataagcttgagtatggaatggattctattgaaatgcatgctgattctattaatgaaaatgacaaagtattaatagttgatgatttgctggctactggcggtacagctaaagcagtaggtgaattagtaag

SEQ ID NO: 240353 - DNA, 517 bp, Unknown
  Bacterial polypeptide expressing nucleotide sequence isolated from the Sargasso Sea
atgaaagaatacgttcgaacaattgctgattatcctgttgaaggaattcaattcagagatattacaacattgttgcaaaatgcaggacactttaaaaaagtcattgatgacatggtaaaaccatggcaaaataaaaaaatagatgcagttttaagcatagaatcacgtggatttattatggcaggtgcaatagcttattttttaaatgcagcatttgttcctttgagaaagcctcataaacttccatttgatacttttaaagtctcgtacgacttagaatatggatcaactgaaatgcatatccataccgatgctttagaaaatcataaagatttactaattattgatgatcttttagcaacaggcggaactgcacttgcagcagtagagttaattaaaaagtttgaagacaaaaatattgttggtgcaggttttataataaatttaccagatttaagtggtgataaaaaactaattgaaaaaggaattgaaatacattctttaatggagttttaaa

SEQ ID NO: 240354 - DNA, 541 bp, Unknown
  Bacterial polypeptide expressing nucleotide sequence isolated from the Sargasso Sea
gttgaacaaaaaactcgtaaataaattaaaaaaaaatattcgagtaattcccaactttccaaagaagggaatactttttcaagacattacttcaattaccgataacaaaaaattgtttactgaagttattaatgaaatatcaaagtatgccagaaagaaaaaatttaccaaaattgcaggcgttgaggcgaggggtttcatctttggtgccactgttgcttttaaactaggtcttcctttcgttccaataagaaaaaaaggaaagcttcctggaaaagttatgcgacaaaaatattatcttgagtacggcaacgacgaaatccaaattcatagtaattcgattacttcacgagataggattttaataattgatgacttaattgcaactggtggtaccgctatagcttcagcaaagcttatctccaagtgcaaagtaaaaaatatcgaattttattttataattgatctcaaaaatattggaggttcgcagaaattaggaaagaaatttaaactgtcttcaattttagaggctgaagggtaa

SEQ ID NO: 240355 - DNA, 345 bp, Unknown
  Bacterial polypeptide expressing nucleotide sequence isolated from the Sargasso Sea
ttgcttctgcggttgcttataatttatcaaaatcttttattttgttaagaaaaaaaggaaaactccccgctgaaagactgtcacaagattttgtgcttgaatatggaaaagcgacaatcgaagttcataaagattctatagaacaaaatgattctgttttaattatagacgatcttattgcaacaggaggaactgcagaagctggcgcaaaactaattgaaaaatctggtggtaaagttgcgggctttgtttttgtaattaatttatttgatttaaatggtacaaaaaaattaattgaaaaaggatataaggtcacgagcctaataaattttcctggccactaaa

SEQ ID NO: 240356 - DNA, 502 bp, Unknown
  Bacterial polypeptide expressing nucleotide sequence isolated from the Sargasso Sea
aatgaaagaacatatacgtacaatttatgacttcccaattaaaggtattaaatatcgcgatattaccacattattaaaaaaccctaagttattttcgtcattgatcgatcagatgacagaaccttggaaagaaaaaagtatagacgcggttttaagtatagagtcacgaggatttattatggccggagccatagcatacaaactaaatgctgcgtttgttccattgagaaaacctggtaagttgccatctgatacttataaagtttcttatgatttagaatatggatctacagacatggaaattcacaaagatgctcttgaaggccacaccaatttattaataattgatgatcttttggctacaggtggaaccgttattgcagctatagatttaattaacaaattcgaggcgaagaaaattattggggctggatttataataaacttaagtgatttagaaggccaaaaaaaattggacttaaaaggaattaattatcatttt

SEQ ID NO: 240357 - DNA, 535 bp, Unknown
  Bacterial polypeptide expressing nucleotide sequence isolated from the Sargasso Sea
tatgaaagagtttcaggatctgaaagatagtattaggacagtgccagattatccagtccagggcgttcaattcagagatataacaacccttctccaaaatgcagatctttttaaaaagatgattgatggaatgacaaatcagtgggttgaaacttccatagatgcaattctaagcattgagtccagagggtttataatggctggggctcttgcctataatcttggaacggcatttgttcctctgcggaaaccagaaaaattaccctatgatacttattcagtctcctatgacctcgagtatggctctactgatatgcatattcatatcgacgctcttagggggcataaaaagcttcttataattgacgatcttttagcaacaggaggcaccgttttagcatctcttgatctaattaaaaaatttgaaggaaaggagattgttggtgccggctttgtaataaatcttccttccttgggaggtttggacaagctaaactcgctaaatgtaaataccagatttctaatggagttttga

SEQ ID NO: 240358 - DNA, 352 bp, Unknown
  Bacterial polypeptide expressing nucleotide sequence isolated from the Sargasso Sea
tttgtttttgccatcggctgtctcatatctattaaaaaagccttttattcttttaagaaagaaagggaaattgcctgcagaaacgcattctgttgaatttgagttagaatatggaagagcaacaatggaaatacataaagactctattgttaaaaatgacttagttttattaattgacgatttaattgcaacaggtggaacagctgaagctgcagcaaaattagtagaaaaatctgaaggtaaagttgcaggatttttgtttgttataaatttatttgatttaaacggaataaaaaaattaaaagaaaaaggttataattcaattagccttctagattttccaggccattaa

SEQ ID NO: 240359 - DNA, 529 bp, Unknown
  Bacterial polypeptide expressing nucleotide sequence isolated from the Sargasso Sea
atgaatattgaacaaataaaagaaacaataacaatagttaaaaattatcctattaagggtatagtatttaaagatatcaccacgcttttagaaaatcctgaagcttttaaatcaacagtagacattatggttgataaggtaaaacacttagatttcaatagagttgttggcgttgaatcaagaggatttttctggtctggaccaattgcctacgctttatcaaaatcatttgtattagctagaaagcctggaaaattgcccagaaaagcagctgaaaagtttttctctttagaatatggaacaaatacagtacatattcatgaagatgcaattaaaaagggagataaagtcttggtagttgatgatttaattgcaactggcggcaccgcaatggcaactgcagaactttgccaagaattaggtgcaacagaagttcatataattgcattaattgatctaccaaaactaggtggatctaaaaagcttgctgaaaaatttggtgaagtaattactcttttagattattaat

SEQ ID NO: 240360 - DNA, 517 bp, Unknown
  Bacterial polypeptide expressing nucleotide sequence isolated from the Sargasso Sea
atgaaagagtatgtaagaaccatagctgattatccagtaaaaggtattcaatttagagatattactactttattacaagatgcaggtcattttaaagaagtaattgatgatatgactaaaccatggaaaaataaaaatattgatgcagttttaagtattgagtctagggggtttattatggccggtgcaattgcatattttttgaatgcagcttttatacctcttagaaagcctgataaacttccatttaaaacttacaaagtttcatatgatttagaatatggctcaaccgaaatgcatattcacacggatgccttagatgggcatgataatttattaattatagatgatcttttagcaactggaggcactgctttagcagcagttgagttaattgaaaagttcaatgataaaaatattgttggagcaggatttattattaatttacctgatcttaatggagataaaaaattaatagataaaggaattaatattcattcattgatggagttttaaa

SEQ ID NO: 240361 - DNA, 544 bp, Unknown
  Bacterial polypeptide expressing nucleotide sequence isolated from the Sargasso Sea
ctttgacgaatatgccatcaaatcgctgattcgcccggtgccgggcttcccgaaagaaggtgtcaccttccgcgacatcaccccgctgttccagtcacccaaggccctgcgcatggtggccgacagcctgatccagcgctatatcgacagcccggtcacgcatatcggcgccatcgacgcccgcggctttctgatcggctcgattctcgcctacgaactcaaccggcccctggtactgttccgcaaggccggcaagctgcccgccgacacgctcagcgccagctacgagaccgagtacggcgaggcaacgctgcaaatgcaccgcgacgccctgagcggcggcgaacaggtgctgctgctggatgacctgatcgccaccggtggtactttcctggcagccgccagcctcgtgcgtcagagcggtgctgatgtctacgaagccgctgccatcatcgatctgcccgacctgggcggctcgcaacagatgcaggacaccggcatccccacgtacaccctctgcgcctttgccgaaagcgagcgctga

SEQ ID NO: 240362 - DNA, 514 bp, Unknown
  Bacterial polypeptide expressing nucleotide sequence isolated from the Sargasso Sea
atgaaaaaattagaagatttgattttcacttataaggattttccaaaaaagggtattgattttaaagatgttctagaaattcttcaatatccagatatttttcaggaccttatttcaaaaatgtcttcaagtaattttttaaaaaatgctgaagcaatagtttcaatagatgcgaggggatttatttttggttctgcagttgctctagaatcatctaaacccatgattgttgcacgaaaaccaggcaagctaccaggacacttattaacaagagaatatgatttggaatatggaaagaattctctttcaatacaaagtaatgccatgaaaaaattcaattctttcgtgatcgtagacgacttgttagcgacaggagggactgtaaattgtgtttcgaggttgctacaagatcaaaggaaggaagttctaggtttaattaccgttattgaattaagtaaattgaaaggtaggtcgaacattaattttcctgttgaatcaattatttcgctttgaa

SEQ ID NO: 240363 - DNA, 305 bp, Unknown
  Bacterial polypeptide expressing nucleotide sequence isolated from the Sargasso Sea
tggtggtggtgtggtatgtgcaagaaaagagggaaagacaccaaccgcaaaacatacagttagttatgacttggagtatggtagtgctaccttagaaatggcagtggttgaacatcttgacagtagtcgagctgtaatcgtagacgacgtattagcgacaggtggtacacttcaggctacaaatcaattagcgacggaagttggttatgatgttatagataatattgtcttagtggatttatcattcataccaagaacagagaactttaaccttaatgtaaaatcggtggtgacttatgagtgat

SEQ ID NO: 240364 - DNA, 435 bp, Unknown
  Bacterial polypeptide expressing nucleotide sequence isolated from the Sargasso Sea
ataatcaagagccagaagtttttagggaagtaatcctaaaaatgtcttcacataaaattataaaaaattctgaagcgatcatctcaatagaagctagaggatttatttttggctcagcaatttcgtttcatgcatcgaaaccaatgattgttgcaagaaagcccggaaaacttcctggagaattaattaaagaggattacgatttggagtatggcaaaaactctttatcaatccaaaaggatgctattaaaaaatttagttcttatgcaattgtcgatgatctcttagctactggtgggacagtaaattgtgtatctaagttggcttatcaaaatggtaagagtatcacaggcttattaactgtggttgaattagtagaactttgtggaaggtctaaatttaatttcccagtagagtctataatttctatctaga

SEQ ID NO: 240365 - DNA, 514 bp, Unknown
  Bacterial polypeptide expressing nucleotide sequence isolated from the Sargasso Sea
tatgaatctaaaagataagattgcagattatccaaatttccctaaaaaaggaattttgtttagagatttctcaccaatcttaggtgatccatcagcactatcatttatggtagaagaattttcaaagaaattccatcctaatgacgtagatgtttttgctggaattgaatctagaggattcatcatagcatgcgcattagcactgaaatacaacaaaggaatgattcttgtacgaaaggcaggaaaattacctggcaaagttgttaagacatcatatactctagagtatgggaaggcaacattagaaattcagaaagacgtcattcaagaaggacaacgtgttttgatttgtgatgatttgttagcaactggaggtacagcaaaagctgcagcaaaattaattgaaaaaattaatggaacgatagttggatttgcattcattatagaattacttgaattaaacggtcgagataagattaaagattacagatcagaatcattggtggaatactag

SEQ ID NO: 240366 - DNA, 460 bp, Unknown
  Bacterial polypeptide expressing nucleotide sequence isolated from the Sargasso Sea
ttgtttagagatttttcaccaatcctaggtgatccatcagcactgtcatttatgatagaagaattttcaaagaagttccatcctaatgacgtggatgtttttgccggaattgaatctagaggattcatcatagcgtgtgcattagcactgaaatataacaaaggaatgattcttgtacgaaaggcagggaaattacctggcaaagttgttaaaacatcatatactctagagtatggtaaggcaacattagaagttcagaaagacgtcattcaagagggacaacgtgttttgatttgtgatgatttgttagcaactggaggtacagcaaaagctgcagcaaaattaattgaaaaaattaatggaactatagtgggatttgcattcattatagaattacttgaattaaacggtcgagataagattaaagattacagatcagaatcattggtggaatactaaa

SEQ ID NO: 240367 - DNA, 532 bp, Unknown
  Bacterial polypeptide expressing nucleotide sequence isolated from the Sargasso Sea
catgtcatcaatcaaagatcttataagaacaattcccgattttcccattgagggtatcatgtttagggatgtgactactctatttgatgatgctataggctttcagaaatgtatcgatagactcgcagaaccctacaaaaaggctaacgtcgataaagttataggtctagaggcaaggggatttataattggtggggcaattgctaaagaattggagtgtggttttatcccaatccggaaagaaggaaaacttccaagcaaaacaatagctcaagattatgaattagaatacggaaaagccaccttagagatacatgaggatgcattatccgccggagataaagtcattatagtagatgatctgcttgcaactggaggtacagcggaagctggaatagctttaatagaaaaactaggtggagaaattttggggtgctcttttattgttaacttaccagacttgggcggaagcaaaaaactggaacaaatgggagtttctactcatattttatgcgaatttgaaggaaattaa

SEQ ID NO: 240368 - DNA, 496 bp, Unknown
  Bacterial polypeptide expressing nucleotide sequence isolated from the Sargasso Sea
atgtcgtttaaaaattatatcacagagataccaaactttccgattgacggagtaaatttcaaagacctgtcacctttgattagtgatagtaaaatgttcagagaagccattaaaacgatgggtgatttaattatttgggaagataaaaaatatgttggtggagttgattattggataggtattgaatcacgtggatttatatttgcttctgctctggctatgcattttggtggtggtgttgtctgtgctagaaaagagggaaaaacaccaactgctaaacatacagttagttatgatttggaatacggaagtgcgacattagaaatggcacacgttgaacatcttgacagtagtagagccgtgatagtggatgacgtattagctacaggtggtacacttcaggctactaatcagttggcaaaggaggttggttatgagattgttgataaccttgtattagttgatttacaattcgtaccaagaacagaaaacttga

SEQ ID NO: 240369 - DNA, 537 bp, Unknown
  Bacterial polypeptide expressing nucleotide sequence isolated from the Sargasso Sea
gactctcaagtaactttttattaatgaaaattgaagaaattgaaagtttcataggaaaggttcctgattttcctaaacctggtatccttttctatgacatttcaactcttatttataacaatgaagcctttacctcctcattagaaaagtttggggaattattcgataaatataagtttgataccatagcagcaatagatgctagaggcttcatatttggatcagctttagctcacaaacttaaacttggaatgatgatgattagaaaaaaaaataaattaccaggtaagaaaatttcgtttgaatatgatttagaatatggaaaagatactcttgagataaatataaatgttaaaaataaaaaatttttacttatagatgatcttttagctacagggggaacagcaaatgctgcggtaaaattaattgaaaaagctggtggaaaagtttcttgctttggatcattgatagaactatcttttttaaaagggcgcaataaactttctgtccccgtacaaacacttattaagtattaat

SEQ ID NO: 240370 - DNA, 382 bp, Unknown
  Bacterial polypeptide expressing nucleotide sequence isolated from the Sargasso Sea
atggatcttaaaaaatatattagatcaataccagattatccaaaaaaaggaatcttatttagagatattacaacacttattaaagatgaaaatgcatttgcagaaactattaaccaaattgtagaaagatcaaaaaaatttgaattttctaaaatagctgcaattgagtctagaggttttgtttttgcatctgctgtttcatatatacttaaaaaaccttttgttatgcttcgaaaaaaaaataagttacctgcagatgttcattcagttgattttgagcttgaatacggaaaagcaacaatagaagttcacaaagactctataagtgaaaaagactcagttttgataattgatgatttaattgctacaggaggtacagcag

SEQ ID NO: 240371 - DNA, 529 bp, Unknown
  Bacterial polypeptide expressing nucleotide sequence isolated from the Sargasso Sea
atggatttaaaaaaatatataagatcaattccagactatcctaaaaagggaattttattcagagatattacaaccttaataaaaaatcctgaggcttttaaatttaccaacgataaaataattgagatcgccaaaaaaatgcaatttgacaaggtggcagcgatagagtctagaggatttgtttttgcctcaacagtttcttacatattaaataaaccttttattttgcttagaaaaagaaacaaattacctgcggaaactttttctgtagatttcactctagaatatggtgatgcaacgattgaggtacataaagactcgattagtaaagatgagaaaatacttgtaatagatgaccttatcgccactggaggaactgccgaggctgctgcaaaattaataaaaatatctggcggttcagttgctggttttatttttgttataaatttatttgatcttccagggaataagttattgaaagataaaggttttaaaacggactgtttggtcgaatttccaggacattaat

SEQ ID NO: 240372 - DNA, 472 bp, Unknown
  Bacterial polypeptide expressing nucleotide sequence isolated from the Sargasso Sea
atggatttaaaaaaatatattagatcaatacaagattatccaaaaaagggtgtactttttagagatataactactcttattaaaaacgaaaaagctttttgtgagtgtattgaccaaattgttagtaaatccaataattttcaatttaataaattagccgcaatagaatctagaggttttgtttttgcctctgccgtttcttatatattaaaaaaaccatttattcttcttaggaaaaaaaataaattgcctgcagcattacactctgttgattttaagttagaatatgggacggcaactatgcaagttcataaagacgccattaatgaaaatgatacggttcttttaattgacgatttaatcgctacaggaggaacagctgaagctgcggcaaaactaatagaaatttctaatggaaaagtggcaggctatatttttgtaataaatctttttgatttaggtggatgtgata

SEQ ID NO: 240373 - DNA, 403 bp, Unknown
  Bacterial polypeptide expressing nucleotide sequence isolated from the Sargasso Sea
agaagaattttcaaagaaatttcatcctaatgatattgatgtttttgccggaattgaatctagaggattcatcatagcatgtgcattagcactgaaatacaataaaggaatgatacttgtgcgaaaagcaggaaaattacctggaaaaattgtaaaaacatcatatacactagagtatggaaaagcgacgttagaaattcagaaagatgtcattcaagaaggacaacgtgttctaatttgtgatgatttgttagcaacaggaggtacagcaaaggcggctgcaaaattaattgagaaaattaacggaaccgtagtgggatttgcatttattattgaattacttgatttgaatggtcgagataagattaaagagtatagatcagaatcattggtggaatactaa

SEQ ID NO: 240374 - DNA, 361 bp, Unknown
  Bacterial polypeptide expressing nucleotide sequence isolated from the Sargasso Sea
tatgaacttaaaacaacatatccgcgatgtacccgattttccaaagccgggcatactctttcgcgacattacgccgctgcttgcaagccatgaagcatttgctgagtcgatacacaagttagccgaaccgtggcagaattcggccattgatgccgttgctgctgttgaagccagaggatttctctttgccggacctcttgctctcaaacttggtgttggtttgattcccgttcgcaaaccaggaaaactgccggctgatacgatcagttaccagtatgaattggagtacggtacagatacgctcgaaatgcacagtggaattctgacgccacagtcacgtgtgctgattatcgacgatgta

SEQ ID NO: 240375 - DNA, 529 bp, Unknown
  Bacterial polypeptide expressing nucleotide sequence isolated from the Sargasso Sea
atggacctcaaaaaatatataagatcgataccggattatcctaaaaaggggattttatttagagacatcactacattaataaaaaatgctgatgcctttaaggttacaaatgacaaaattctagagatagcaaaaaaaatagagtttagtaaagtagccgcaatagagtcacgtgggtttatttttgcatcaactatctcctatcttcttaaaaaaccatttattcttcttagaaaaaaaaataagttgcctggcgaagttcactcaatagattttgaacttgaatatggaaaagcaactatagaggtacataaagactccattgaaaaaaatgacaaaatacttgttatagatgatttgatagctacaggtggtactgcagaagcagcagctaaattaattgagatttctggcggaaaggtagccgcattcatatttgtaattaacttatttgatttacctggtaatgatcttttaaaaaaaaaaggttacttaacaaaaagcttaatagagtttcctggacattaga

SEQ ID NO: 240376 - DNA, 400 bp, Unknown
  Bacterial polypeptide expressing nucleotide sequence isolated from the Sargasso Sea
tatggattataaatcgctaataacagatattcaaaattttcctattgatggggttaattttaaagatatatcacctctattggcatctcctcagtttgatgaggtaattcttaaaatgggtgagttagtagaaaaaccagattactgggttggcatcgaatcaagagggtttatttttgcaagtgctttatctgtaaaatttggtggaggagttatcctttgccggaaagcaggtaaattaccaggcaaaattataactaaaacctatgttactgaatatagtgaggatgaattatcaatacagaaaggcactggcaaggttatcattgtagatgatgtactggctactggtgggactttaagtacagtcaattcactatgtgtttctgcaggttacgat

SEQ ID NO: 240377 - DNA, 481 bp, Unknown
  Bacterial polypeptide expressing nucleotide sequence isolated from the Sargasso Sea
atgaatattgaacaaataaaagaaacaataacaatcgttaaagattatcctattaagggtatagtatttaaagatattactacacttttagaaaatcctgaggcattcaaatctactgttgatattatggtagacaaggtgaaacacttagattttaatagagtggtaggagttgaatctagaggatttttctggtctggaccaattgcttatgctttatcaaaatcatttgtattagctagaaagcctggaaaattgccaagaaaagcagctgaaaaattcttttctttagagtatggtactaacactgtacatattcatgaagatgcaatttcaaaaggagataaagtattagtagtagatgatttaattgcaaccggtggtactgcaatggccactgctgaactttgtcaggaattaggtgcctctgaagtgcatataattgcgttaattgacctacctaagttaggtggatcaaaaa

SEQ ID NO: 240378 - DNA, 517 bp, Unknown
  Bacterial polypeptide expressing nucleotide sequence isolated from the Sargasso Sea
catggaagatcttaagaaatggattaagagttaccctgatttcccctctaaaggaattctatttagagatataagccctttgttggccgaaccgaaagctttaagtctattaaaggatcgcttcatagaaaccattaaacctctcaatgccgattatgttgcaggtatcgatgctagaggttttttattttgtactttagttgcagaaaacctgggtctaggtgcattaatgataagaaagcccaataagcttccaggagagctcattgaaaagagttatgagcttgaatacggcagtaattcattaactgttcaaaagaaagatttagagggtaaatcaatagttattgtagatgatctgttagcaacaggagggtcaatgcaatgttctaaagaactattagagtctcttggtgccaatgtagtagcaggggctgttgtcatagaactgaagtctcttaagggttcatctgctctcaatatgcccattatcagcctcataagctatgaagactag

SEQ ID NO: 240379 - DNA, 514 bp, Unknown
  Bacterial polypeptide expressing nucleotide sequence isolated from the Sargasso Sea
atggatttaaaaaaatatataagatcaattcaagattatccaaaaaaaggaattttattcagagatattactaccctcataaaaaatgctgaagcttttaaatatacaaatgataaaataattgaaatttctaaaaaaattgactttgataaagttgcggctattgagtccagggggttcatatttgcctcgacagtctcttatttaatggaaaagccttttattttacttagaaaaaaagataagcttccagctgaaacccactcaatagattttgaacttgaatatggcaaagcaactatagaagtacacaaagactcaattaataaaggtgaaaaagtacttattattgatgatttaattgctacaggtgggactgcagaagctgctgcaaaacttgtggagctctctggtggaaaagtggctggatttatatttgtaattaatctttttgatttacctggagaaaaacttcttaagaagaaaggctatctgactaaaagtttaattgaat

SEQ ID NO: 240380 - DNA, 229 bp, Unknown
  Bacterial polypeptide expressing nucleotide sequence isolated from the Sargasso Sea
catggattacataaaacaaaaaatacgtacaattcctgatttcccaaaaccgggaatactcttccgtgatattacaacacttctttctgatccagaggcatttaattccgttattgatctgtttgtagaacattaccagaagcaacaaattgatcttgtagtaggtatagaatcaaggggatttattgtcggagctccattagctttacgtttaggaaagggcttatcc

SEQ ID NO: 240381 - DNA, 134 bp, Unknown
  Bacterial polypeptide expressing nucleotide sequence isolated from the Sargasso Sea
tatgaatctttccgaacacattcgtcctattcctgactttcccaagccaggtattctctttcgagatatcactccgcttctcgcacatccagaagccctcaaagaagctattcagcagattgcagctccctggc

SEQ ID NO: 240382 - DNA, 262 bp, Unknown
  Bacterial polypeptide expressing nucleotide sequence isolated from the Sargasso Sea
gatgagtatcaaaagtaaaataagaacaatacctaactaccctaaagatgggattatgtttagagatatttctagccttctctccgatgcggacgggtttatcgaaactattgaaactttggctaacagatattacgaaaaaaaagatgattttgactttattataggaatcgaatcaagaggcttcatattaggtgcggcactagcacttaagctagaaaaaggcttcataatggtaagaaaaccgggcaagcttcctggg

SEQ ID NO: 240383 - DNA, 458 bp, Unknown
  Bacterial polypeptide expressing nucleotide sequence isolated from the Sargasso Sea
tatgaatttaaaagattttattagatctattccaaattacccaaagaaaggtattttatttagagatataaccaccctaattaaagatgaaaaagcatttgctgaaacaataaatcaaattgttgaaaaatctaaaaaatttgaatttaataaaattgccgcaatcgaatcaagaggttttgtatttgcttctgcagtttcatatcttttgaacaaaccattcattatgcttagaaaaaaaaataagttaccagctgatgtgcattcagttgattttgaacttgagtatgggacagcaactatagaagttcataaagattctatcaataaagaagataaagtattaattattgatgatttaattgctacaggtggaactgctaaggcagcagcacaactagtagaaatctctaaaggaaaagtttctgcatttatttttgtaataaatttatttgatt

SEQ ID NO: 240384 - DNA, 514 bp, Unknown
  Bacterial polypeptide expressing nucleotide sequence isolated from the Sargasso Sea
atgaaaaatttagaaagtttgatcaagacatattatgatttccccaaaaaaggtattgctttcaaagacatccttgggataattcaagatcctgaagtttttagggaactaatccttaagatgtcttcaaataatgtaataaagaattctgaggcgattatctcaatagaggcaagagggtttatttttggttcagcaatttcccttcaggcctcgaaaccaatgctggtagctagaaagcctggaaaacttcctggggaactcataaacgaaaaatactctttagagtatggtcaaagcactatatcaatacaaaaagaatcacttaacagatttaaatcatatgcaattgttgatgacttgcttgctactggtggaacagttgaatgtgtagctaatttaataagaaaagaaggtaaaagtgtatgtggcttagttactgttgttgagcttttggagctcgaaggaagatctcgctttgactttcctgttgagtctataatttgtctataaa

SEQ ID NO: 240385 - DNA, 477 bp, Unknown
  Bacterial polypeptide expressing nucleotide sequence isolated from the Sargasso Sea
gatgaaatctttaattgaaaaaattagaaccgttccgaattttccccaaaatgggattatgtttagagatattaccacgcttttgattgatcctgatggttttaaaacagcaattgatatgactgtgaaaaagtggcgtggtctaggcgtaacaaaaattgtaggaattgacgctcgtggattcatattgggtggcgctattgcctataatttaggcgtggggtttttgcccgttcgcaaaaaaggaaaattaccacccgaaaccataagcgaagaatatcaactagaatatggcgtagacactttagaagttttacaggaatcattggatagctcagataaagttgtagtggtcgatgatttaattgcaacgggggggactgcagaggcaacagtcaaacttattaggcgtctaagggcagaggttctaggatgttctttcatcataaatttgcctgatttagggggggtttctaa

SEQ ID NO: 240386 - DNA, 266 bp, Unknown
  Bacterial polypeptide expressing nucleotide sequence isolated from the Sargasso Sea
cccaacccacggggtggattatgaattggaatatgggaaagaccgggtgaaagtgcatcaagacgccatttccgaaggaagcagagtgttgctcgtcgatgatctgattgccacaggaggcaccatccaaggcagtgcgaaactgataaaaatggcaggtggagtgatcgtcggttatgcctttgtcatcgaactgattgacctggaaggccggaagggtttgcaggaacctgttttttccctaatcgaatttgaaggacattagg

SEQ ID NO: 240387 - DNA, 529 bp, Unknown
  Bacterial polypeptide expressing nucleotide sequence isolated from the Sargasso Sea
aatgctggaaagtatagatcttgaccgaacaattgctaaagttcccgattaccccaaaccgggaatcctattctatgatatttcaacactccttatgaatacgcaagcttgggcagcaaccgtcagaaggctggcagataaaatcagtcaatataagcctgatattatagcaggtatagagtctagaggatttttactggcgagtcccgtagcaatcgaattaacggctggagttcaaatgataaggaaacaaggtaaactacctggagaaactctctctcacacttacgacctagaatacggccatgatacgctagaaattcaaaaaagttctgctttaagtggcaaacgcgttgccattattgatgatatttttgcaacaggaggcacactgagcgctgcaaccactctgatccggaagcaagagtcaattgtagtttgctctgcgtgtattctggaactagctttcctgaaagggagaagcaaacttgacgcaccttttatttcactggttcaagttactgaataa

SEQ ID NO: 240388 - DNA, 532 bp, Unknown
  Bacterial polypeptide expressing nucleotide sequence isolated from the Sargasso Sea
gaaagagtttcaagatcttaaagatagtattaggacagttccggattatccagttcagggtgttcaatttagggatattactacacttcttcaaaagccacatttattcaaaaaaatgattgatgctatgacaaatcagtggaaagcatatcagatagatgcaattttaagtattgagtctaggggattcataatggcgggagctctagcatacaatttaaatactgcgtttattccactcagaaaacctcagaagctaccatttaaaacgcactctgtttcatatgaacttgagtatggggctacggatatgcatatccatattgatgcgctcgatgggcataccaatcttctaataattgatgatctattagcaacaggtggaacggttatagcagcacttgatttgataaagaaatttcaagataaaataattgttggagctggttttgttattaatcttcctgaattaggtggtggcacaaaactcgaaaagctcggcgttgagtcaaaatatttattagaattttga

SEQ ID NO: 240389 - DNA, 301 bp, Unknown
  Bacterial polypeptide expressing nucleotide sequence isolated from the Sargasso Sea
attgaacaaaaaactaaaaaataaactcaaaaaaaagataagagtgataccaaattttcctaaaaagggtattcaatttcaggacatcacttcaatcactgacaacaggaagctttttactgaagtgattgatgaaatttctaaatattgtaaaaaaaataaatttagtaaagtggcgggtatagaagcaagaggttttatttttggatcagctatttcctataaacttggcttaccttttgtaccaataagaaaaaaagggaaacttcctggaaaggtaataaaacaaaatacaagttag

SEQ ID NO: 240390 - DNA, 529 bp, Unknown
  Bacterial polypeptide expressing nucleotide sequence isolated from the Sargasso Sea
tatggatttaaaaaaatatattagatcaataccagactatccgaaaaaaggcattttatttagggatataacaacattgataaaaaatcctgaggcctttaattttagtgttgataaaatcatagaaatatcaaaaaaaataaaattcgataaagttgcagctatagaatctagagggtttatttttgctgctgttgtctcttataggttgaaaaaacctcttgtaatgatgagaaaaaaaaataaattacctgctgcaagatattccgtcgattttgagttggaatatgggaaagccacaatagaagtgcataaagattctattaataaagatgataatattttaattatagacgatttaattgctaccgggggtacagctgaagctggggcaaaattggtagagatttcaaagggaaaagttgctggttttatttttataataaatttatttgatctgggtggtaatcaaaaattaaaagacaattcctattttactgaaagcttaatagattttcctggtcactaa

SEQ ID NO: 240391 - DNA, 147 bp, Unknown
  Bacterial polypeptide expressing nucleotide sequence isolated from the Sargasso Sea
tatggatttaaaaaaatacattagatcaatacccaattatccaaaaaaaggcattttatttagggatataacaacattaataaaaaaccctgaggcttttaattttagtgttgataaaatcatagaaatatcaaaaaaaataaaatt

SEQ ID NO: 240392 - DNA, 406 bp, Unknown
  Bacterial polypeptide expressing nucleotide sequence isolated from the Sargasso Sea
tatgaacttaactgactacattaaagatgttcctaactttcctaaaaagggaattatttttaaggatatttgtcctttattaaaaagtcctgaagcatggactaaagttatgacacaactaggtcttttttgtgaagagactactcctgatcttattgttggtattgagtctagaggatttattgttggaagttctttagcaactagacaaagacttgggtttgttcccatcagaaagagtggaaaattacctggtaatgtgttaaaagcagactatactttagagtatggtgaagatgaattagaaattcaaatagatgcttttgagggtaatcctagagtgttattaatagatgatttacttgctactggtggtacagtaaatgcttcaacagagttgatagaa

SEQ ID NO: 240393 - DNA, 211 bp, Unknown
  Bacterial polypeptide expressing nucleotide sequence isolated from the Sargasso Sea
gttggatcttcgccaattcattcgagacattcctgacttcccgaaaccaggaattctgttccgtgatttcacacctctgctgcgagaccctgaagcttggcgggccgtcatgaagcagatgggaaccatctgcgaggctctcaagccagacctgatcgtgggcatcgaatcccgtggtttcatcgtgggggacgtcctggcgaccgatctg

SEQ ID NO: 240394 - DNA, 529 bp, Unknown
  Bacterial polypeptide expressing nucleotide sequence isolated from the Sargasso Sea
atggatttaaaaaaatatatacgttcaattcctgattatcctaaaaagggaattttatttagagatataaccacattaataaaaaacccagaagcttttaactttactattgataaaattgttgagatttcgaaaaagttaaagttcgacaaaatatcagctatagaatcaagaggttttgtttttgcttctgttgtgtcctataagttgaaaaaacctttaataatgatgagaaagaaaaacaaattacctgctgagagatactcggttgatttcgaacttgaatatggaaaagctacaattgaaatacataaagattctataaacaaaaatgataaagttctaattatagacgatttaattgcaacaggaggaactgcagaggccggggcaaaattagttgaaatttccggaggtaaagtagctggttttatttttataataaatttatttgatttgggtggtaacaaaaaattgcttgctaaatcttatttcgctgaaagtttattagaatttcccggacattaaa

SEQ ID NO: 240395 - DNA, 529 bp, Unknown
  Bacterial polypeptide expressing nucleotide sequence isolated from the Sargasso Sea
atggatttaaaaaaatatattagatcaatacctgactatccaaaaaaaggaatcttattcagagatataacaactttaataaaaaatcccgatgcttttaactatagtgttgataaaattatagaaatatcaaaaaaaataaaatttgataaagtctcagcaatagagtctaggggttttatttttgcatctgttgtctcctataagttgaaaaaaccccttgtcatgatgagaaaaaaaaataaattacctgcagaaaggcactctgttgattttgagttagaatacggcaaagccacgatagaagttcataaagactctatcagtaaaggtgaaagtattttaataattgatgatctaatagcaacgggaggaacagctgaggcagctgctaaactagttgaaatttctggaggcaaagtttcaggttttatttttataataaatctttttgatcttggtggaaataaaaaactagaagataactcttattttactgaaagtttaatcgattttcctggacactaat

SEQ ID NO: 240396 - DNA, 409 bp, Unknown
  Bacterial polypeptide expressing nucleotide sequence isolated from the Sargasso Sea
aatgaaagaatacgttcgaacaattgctgattatcctgttaaaggaattcaattcagagatattacaacattgttgcaaaatgcaggtcactttaaacaagtcattgatgacatggtaaaaccatggcaaaataaaaaaatagatgcagttttaagcatagaatcacgtggatttattatggcaggtgcaatagcttattttttaaatgcagcatttattcctttgagaaaacctcataaacttccatttgatactttcaaaatctcatacgacttagaatatggatcaactgaaatgcatattcatacagatgccttagatggtcataaagatttactaattattgatgatcttttagcaacaggtggaaccgcacttgcggcagtagagttaattaaaaagtttgaa

SEQ ID NO: 240397 - DNA, 366 bp, Unknown
  Bacterial polypeptide expressing nucleotide sequence isolated from the Sargasso Sea
tatgaacattgaaaaatacattagagatattcaagattttccaaaaccaggaataggttttaaagatataactccattgctgcaaaatgcccaagctactcaagcttgtttgaatttgttagtcagttcgttacaggataaaaagattgataaggttgttggagtagagagtagaggtttcttttttggaatgcttttagctcaaaaattaggtgttggatttattcctgttagaaaaccaaaaaaattgccttttgatactatttcggcttcctatgaattagaatatggttcagatgtattagaaatgcacactgatgctattgaaaaaggagaaaatgttttaatacacgatgatgttttggc

SEQ ID NO: 240398 - DNA, 541 bp, Unknown
  Bacterial polypeptide expressing nucleotide sequence isolated from the Sargasso Sea
ttgaacaaaaaactaaaaaataatcttgaaaagaaaattagagtaattcctaattttccaaaaaaaggaattcagtttcaagatatcacttcaatcacagacagtaggaggctttttaccgaagttgttaatgaaatttctaaatattgtaaaaaaaataaatttactaaagtagctggtatagaagcgagaggcttcatctttggatcagctgttgcctacaagcttggcttaccttttattccaataagaaaaaaagggaaacttccaggaaaaatagtcaaacaaaaatacaagctagagtatggaatggatgaaatccaggtacacaaacactctatcacctctagagataaggttttgattatcgatgacttaattgcaaccggcggaacagctagcgcggctgcaaagctaatttcaaaacttggagttaaaaaaattgaattttttatgataattgatttatggaaccttgaaggctcaaaaaaaatttctaaaagttatcaggtaaggtctttgatgaaggcagaaggatagt

SEQ ID NO: 240399 - DNA, 385 bp, Unknown
  Bacterial polypeptide expressing nucleotide sequence isolated from the Sargasso Sea
atggaaaaaaaattaataatatcttttgaccaatacttagaaacagtagaaaaattatcagttgagataaataaaacatataaccctacagttttagtgggaattatgcgaggtgctgccccaataatagatattctatcaagaatttttaaattacccacagcttacatagttattcaaagctattcaggcaaaggcattgaggataaacaaggtgaattagttttttcaagagagataagttcaatagcgagcgagagagattttaagagagttttactagttgatgatttgtctgatacaggtttaacactaaataaaagtatagactggttaaaaaattatgatcctataaagaattttataacagagataaaaacagcat

SEQ ID NO: 240400 - DNA, 410 bp, Unknown
  Bacterial polypeptide expressing nucleotide sequence isolated from the Sargasso Sea
cactattgatatcttttatgaagaattcaagaatagcaatatagatacggtagttggtattgagagtagaggttttatttttgctgcgcccttagctcttagacttaattgcggtatggtgcttgcaagaaagccagggaaacttccttctaaaataatttctgaagaatatagtttagaatacggggaagattctatagaaatgcatgtagattcaataaatgttaagtctaatgttttaattgtagatgatctcttggcaactggaggcactgcaaaatctgtttgtaatctggtagctaaattaggcggaaaaattcacgctgcttcttttttaattatactaaaagatttgaatggtaaagaaatgttacctgttgatcaaatcttcagtatattagaattttagg

SEQ ID NO: 240401 - DNA, 457 bp, Unknown
  Bacterial polypeptide expressing nucleotide sequence isolated from the Sargasso Sea
cgggaccatcctaaaactggtatattatttagagatattcaacctttattagctaatcatgagatttttagaaaagcaattaatgatatgcttaacttaatcgattacactaaagttgattattttatagggatagaatcaagaggatttatttttagcactagccttgctataaattctggtaaaggaaataaactaattagaaaaaagggtaaacttccacctcataatttagtttcattaaaatatgatactgaatatagctcagataatattgaaatggaaaaaggacaggggagagtaattatagtagatgatgtttatgcaactggtggaacaatgagtgcttctatagaacttgcagaaaaagcaggatacaatgttattgatacaatatgttttttagatattggtctaaagaaaaatcataatacaaaatgcgtaatatattattagt

SEQ ID NO: 240402 - DNA, 241 bp, Unknown
  Bacterial polypeptide expressing nucleotide sequence isolated from the Sargasso Sea
tttgaagttaacagaaagaataaatcaatccattagagatgttgctgacttccctaaaaaagggatagtgttcaaggatataacaccaattttaaaagatgctcaattatctaaagatatatgtgatgagcttgctattaattttgatagtgaagtgactcatgttgctggaatagaaagtagaggttttctatttggatttcctgctgcaatgaaaaaagatatttcctttattctaata

SEQ ID NO: 240403 - DNA, 514 bp, Unknown
  Bacterial polypeptide expressing nucleotide sequence isolated from the Sargasso Sea
atggatttaagcaagtacattagagatattccggattttcctattcaagggataattttcaaagatataacccctttgttatcagatacaggtgcatttcaagaaactattaacagaataattaagaattataattttgatgaaattgatgttattgctggtgttgaatctagaggtttcttattggcagctccaatagcagatcgtatgaaaaaaccattagttttatttagaaagagtgggaaacttccctataaaactaagtcggcaagttatgatttagaatatggtagcagtactatagaaattcatgaagattcaatcaaaacaaaagatagaatattattgattgatgacttaatagctacaggcggaacattaagtgcatgtttggatttagtagatcagtttaatgctaaagttaatggaatagctgtaataattgaattaagctttttaaatggcagagatatgcttaaaaatgtagatattttttcattaattaagtactagt

SEQ ID NO: 240404 - DNA, 381 bp, Unknown
  Bacterial polypeptide expressing nucleotide sequence isolated from the Sargasso Sea
tatggaactctctaagtacattgatacggtcctaaattatcctcaagacggtgttgcgtttaaggacattacacctctacttcgtaataaggatgcatttcgtttcgcattggatgaatttgagagacactttgctggtgacggtatccaatatgtggctggtatagaagcgcgtggttttctatttgcttcagcattggctgatagattgaaatgcggattgataccgattcgtaagtcagggaaacttccaggtgatgtcataactcaagagtacgaccttgaatatggaacagctgagcttggaatacgtaaggacagtttgacagataatgcgcgagttctgattattgacgatgttttggcgactggcggaactgc

SEQ ID NO: 240405 - DNA, 529 bp, Unknown
  Bacterial polypeptide expressing nucleotide sequence isolated from the Sargasso Sea
tatggacttaaaaaaatatattagatcaatacccgactatcctaagaaaggtattttgttccgggatattactactttaatcaagaatgcagaggcatttaagtacactaacgataagattattgaattatcaaaaaaaattcaatttgataaggttgccgccatagagtctagaggatttgtttttgcttctactgtatcatatcaacttagtaagccttttgttctattaagaaaaaaaaataagttacctgcagaaactcactcggttgactttgagctagaatatggaaaagctactatagaagtacataaagactcgatttctgagaatgaaaaaattcttattatagatgatttaattgcaactggtggtaccgctgaagctgcagcaaaactggttgaaatatctggaggaaaggttgctggttttatttttgttattaacctttttgatttacctggcaataaactattaaataaaaaaggatataaaacccatagtttgatagaatttccaggacactag

SEQ ID NO: 240406 - DNA, 532 bp, Unknown
  Bacterial polypeptide expressing nucleotide sequence isolated from the Sargasso Sea
attgaaaagcaatataaattatcttgaaaagaaaatacgtgcgataaaagactatcccaaaccgggtatcatttatcaggatatcacacctcttttaagagacccacaggccttttcacttgcaattgacctatgttgtgaaaaagtggatcgcgatatcgatttaatagctgcaattgatgcaagaggttttattttaggttctggtattgcatacaagactggaaaaggaatcatcccaattcgtaaaatgaataagttaccatataacgtaatagcagaaaaatattccctcgagtatggtcatgatcaaattgaattacacactgactcaatcgaggaaggtcaaaaaatagttttggttgatgatgttttggcaaccggcggaacaacagaagctgctattaaacttatcgataggttaggtggtcagttgtgcgcgatcattttcttattagaactcaaagacctgaatggtcgcacaaagatagcaaaatatgcagataacattcactccttgatcgaattttag

SEQ ID NO: 240407 - DNA, 478 bp, Unknown
  Bacterial polypeptide expressing nucleotide sequence isolated from the Sargasso Sea
aaaaaggaatttatttcagacatttacttctattactgatgatgcaaaactattaagacaagttgtaaagtcaatatctcgttatgctaaaaaaaataaatttaccaaaattgcagcggttgaagctagaggttttatttttggaacagcaattgcttatgaatgcaatgttccattagttccaattcgaaaaaaaggtaagttacctggggatgttttaaaacaaaaatatagcttagagtacggaaatgatgaaattcagatacataaaggttcaatcaattctaaagataaagtgttaattgttgatgacctaattgcgacaggtggaaccgcattagcatctgcaaaattgatttcaaaacttaaagtaaaaaaaatagaattttatatgattattgatcttgaaaatgtaggcggatctcaagctgtaggcaagaaatataaaatttcttctttattaaaaactaaaggataa

SEQ ID NO: 240408 - DNA, 459 bp, Unknown
  Bacterial polypeptide expressing nucleotide sequence isolated from the Sargasso Sea
tattttctcttgtatcggatcctacatgtcaaaaaaaaattgttgaaaagatagctagttatgcacgaaaaaattctataaccaaaatagcaggtatagaagcaagaggtttcatatttggatctcttgtagcttacaaattgaatattccctttgttcccattaggaaaaaaggaaagttaccaggcaaagttaataagataaaatacaaacttgagtatggctttgatcagatagagatgcaggactgctcattaaaaaaacaagataaggttttgattgtcgatgacttaattgcaacagggggaacagcattagcatcatctaaattaatatccaaaatgggtatcaaaagcattttttttgcatttgtcattaatctatataatctgaaaggagtaagattgttagagaagaataagtattcatatatgtctataattgatgccgaaggttaaa

SEQ ID NO: 240409 - DNA, 507 bp, Unknown
  Bacterial polypeptide expressing nucleotide sequence isolated from the Sargasso Sea
taaaagacaagattgcagattatccaaattttcctaaaaaaggaattttgtttagagatttctcaccaatcctaggggacccatcagcactatcatttatgatagaagaattttcaaagaaattccatcctaacgacgtggatgtttttgccggaattgaatctagaggattcattatagcttgcgccctggcacaaaaatataacaaaggaatgattcttgtgcgaaaggcaggaaaattacctggaaaagttgttaaaacatcatatactctagaatatggtaaggcaacattagaaattcaaaaagatgttattcaagagggggaacgtgttttaatttgtgatgacttgttggcaactggaggtacagcaaaagcagcagcaaaattaattgaaaaaattaatggaacaatagtgggatttgcatttattatagaattacttgaattaaacggtcgagataagattaaagattacagatctgaatcattggtggaatactaga

SEQ ID NO: 240410 - DNA, 514 bp, Unknown
  Bacterial polypeptide expressing nucleotide sequence isolated from the Sargasso Sea
tatgaaaaaattagaagatttgattcttacttataaggatttcccaaaaaaaggtattgattttaaagacgttttagaaatccttcaatatccagatatttttaaggacattattttaaagatgtctgcaaataaatttttaaaaaatgctgaagcaatagtttccatagatgcgaggggatttatttttggttctgcagttgctctagaatcgtctaaacctatgattgttgctcgaaaaccgggcaagctaccaggacatatatttgaaagggaatatgctttggaatatggaaaaaattctctttcaatacaaagtaatgccctgaaaaaatttaattcttttgtaatcgtagatgatttgttagctacaggaggaacagttaattgtgtatcaaggttgcttcatgaagaaaggaaagaaattttaggtttaataactgtagttgaattgaagaaattaaaaggcagatcaaaacttaattttccagttcaatctatggttaaagtttag

SEQ ID NO: 240411 - DNA, 520 bp, Unknown
  Bacterial polypeptide expressing nucleotide sequence isolated from the Sargasso Sea
tttgaataaatttgaccaatggatagataattatcctgattttccaaaaaaaggtattttgtttaaagacataagtcctttattggcaagtcctgaaggtatgagtctgctaaaaaaagaattcgtgaagttaattgcagttttgaaacctgatctaatagctggcatagatgcaagaggatttcttttttcaactttaatcggtgaatcactaaacatagggtcattaatgatcagaaagtcaggtaagttgccaggtgaagttatagaaaggagctatgatttagaatatgggtccaacactcttgcaatgcaaaagcttaataatctcaaagacaaaaaggtagtaataatggatgatctgctggctactgggggtaccatgcaatgtgccaaagatctcattgaatcacaaggtgcagaggtttgtggttgtgcggtggttgtggagcttaatttcttagaagcttcgaagtttttagaatgccctgttattagtcttgcctcttatgaaatttaa

SEQ ID NO: 240412 - DNA, 529 bp, Unknown
  Bacterial polypeptide expressing nucleotide sequence isolated from the Sargasso Sea
aatgaatattgaacaaataaaagaaacaataacaattgttaaagattatcctatcaagggtatagtatttaaagatattactacgcttttagaaaatcctgaagctttcaaatcaactgtgaacataatggttgataaagtaaaacacttagatttcaatagagttgttggggttgagtcgagaggatttttctggtcgggaccaattgcttatgctttatcaaaatcatttgtgttggctagaaagcctggaaaattacctagaaaagccgctgaaaagttcttttcattggaatatggtacaaatacagtacacattcatgaagacgcaataaaaaaaggggataaagtgttagtagttgatgatttaattgctactggtggcactgcaatggccacagcagaactttgccaggaattgggtgcaactgaagttcatataattgctttaattgatttaccgaaattaggcggatctaagaagcttgctgaaaagtttggtgaagtaattactcttttagactattaa

SEQ ID NO: 240413 - DNA, 319 bp, Unknown
  Bacterial polypeptide expressing nucleotide sequence isolated from the Sargasso Sea
tcagcgtcagtccctcgggttcgtgcctgtgcgcaaaccgggaaaacttccgggcggggtgatcggcatcgattacagcctcgaatacggcagcgatcgcctggagattcaggaggacgccctcaacggcaagccgagggtgctggtggtggatgatctgctggccaccggtggcacggcatcggcggcaggtgccctggtggacaaggccggtggcacgctctgcggtttcgccttcgtgatcgagctcgatggactcggtggtcgcgcggccctgccgcaggggctgcctgtggaagctctgctcgtctattcctga

SEQ ID NO: 240414 - DNA, 517 bp, Unknown
  Bacterial polypeptide expressing nucleotide sequence isolated from the Sargasso Sea
atggaagatcttcaaaaatggattaagagttacccagattttccttcaaaaggaattcttttcagagatataagtcccctattggctgaaccttcagcattgagccttttgaaagataaatttgttgagaccattagacctctttcgcctgattacattgcaggtatagatgctagaggttttttattctgtactttggtagcagaacaattagggcttggagcattgatgattagaaagccaaataaacttcctggagagctcatagagaaaaagtatgagcttgaatatggcaccaattcattgagcattcaaaagttaaatctagagaataaatctatagttatcatagatgatttattggctaccggagggtctatgcaatgttcaaaggatctattagagtctctgggtgctaatgtggtaggaggagctgtagttattgagctcacatccctgaaaggatcttctcaactcaatatgccaatcataagtctcatcagctatgctgactgac

SEQ ID NO: 240415 - DNA, 529 bp, Unknown
  Bacterial polypeptide expressing nucleotide sequence isolated from the Sargasso Sea
atggacttaaagaaatatattcgatctatccctgattatccaaaaaagggtattttgtttagagacataacaactttaataaaaaacgcaggcgcatttaaatatgcaaatgataaaattattgagatttctaataagttagattttgataaagttgcagcaatagagtcaagaggttttgtatttgcgtcaactctatcttaccactcacaaaagccgttcatactcttaagaaaaaaagataaacttccagcacctactcattctgttgattttgaacttgagtatggaaaagctacaattgaaatacataaagactctattgaaaagggagaaaaaattttaattatagatgatttaattgcaacagggggaactgctgatgctgcagcaaagcttatagaaatttcagggggaaaagtagcaggttttatatttgttattaatctttttgacttgccaggtgaaaaacttttaaaagataaagggtatatcttgaaaagtttagtaagatttccaggtcactaaa

SEQ ID NO: 240416 - DNA, 514 bp, Unknown
  Bacterial polypeptide expressing nucleotide sequence isolated from the Sargasso Sea
atgaatctaagagataagattggagattatccagattttcctaaaaaaggaattctgttcagagatttttcaccaatattgggcgatccttcagcattgtcatttatggtagaagaattttcaaaaaaatttcacccaaatgatgtcgatgtttttgcaggaattgaatcaagaggatttattattgcgtgtgcattagcgctaaaatacaataaagggatgattcttcttcgaaaagcaggaaaattacctggaaaagttgcaaagacatcatatacactagaatatggtaaggcaatattagaagtccaaaaagatgtaatcaaagaaggtcaacgagttgtcatttgtgatgatttgcttgcaacaggcggtacagcaaaagcagcagcaaaattaattgaaaaaattaaaggaaagatcacagggtttgcattcataatagaattacttgaattaaacggtagagataagattaaagattatagatcagaatcattggtggaatattaga

SEQ ID NO: 240417 - DNA, 517 bp, Unknown
  Bacterial polypeptide expressing nucleotide sequence isolated from the Sargasso Sea
aatgaaagaatacgttcgaacaattgctgattatcctgttaaaggaattcaattcagagatattacaacattgttgcaaaatgcaggacactttaaacaagttattgatgacatggtaaaaccatggcaaaataaaaaaatagatgcagttttaagtatagaatcacgtggatttattatggcaggtgcaatagcttattttttaaatgcagcatttgttcctttgagaaagcctcataaacttccatttgaaactttcaaaacctcatacgacttagaatatggatcaactgaaatgcatattcatacagatgctttagatggtcataaagatttattaattattgatgatcttttagcaacaggtggaactgcacttgcggcagtagaattaattaaaaagtttgaagacaaaaatattgttggtgcaggttttataataaatttaccagatttaagtggtgataaaaaactaattgaaaaaggaattgagatacattctttaatggagttttaa

SEQ ID NO: 240418 - DNA, 529 bp, Unknown
  Bacterial polypeptide expressing nucleotide sequence isolated from the Sargasso Sea
aatggacttaaaaaaatatattagatcaattcctgattatccaaaaaagggaattttattcagagatataacaactctcataaaaaatgctgaagcatttaaatttacaaatgatagaattgtagaaattgcaaaaactatagattttgacaaagtggctgcgattgagtctcgtggattcgtttttgcctcaactgtttcttatctcttaaataaaccttttgttcttttaagaaaaaaaaataaattaccagctgacgtgcactcaatagactttaaacttgaatatggagacgcaacgattgaagtgcataaagactctattgaaaaaaatgaaaaaattctaatcattgatgatttaatagctactggaggaactgctgaagcagcagccaaactaattgaaatttcaggggggaaagtcgctgcttttatttttgtaataaatctgtttgatttgccgggaaataatttattaaaggaaaaaggttataaaactcaaagcttaattgagtttcccggacactaa

SEQ ID NO: 240419 - DNA, 529 bp, Unknown
  Bacterial polypeptide expressing nucleotide sequence isolated from the Sargasso Sea
tatggatttaaaaaaatatattagatcaatacccgattatccaaaaaaaggtattttatttagggatataacaacattaataaaaaaccctgaggcttttaattttagtgttgataaaatcatagaaatatcaaaaaaaataaaatttgataaagttgcagctatagaatctagaggttttatttttgctgctgttgtctcttataggttgaaaaaacctcttataatgatgagaaaaaaaaataaactacctgctgagagacactctgtagattttgaattggaatatggaagagcaacaatagaggtacataaagattctattggtaaggatgataatgttttaattatcgacgatttaattgcaactggtggtacagctgaagctggggcaaagttagttgagatttcagagggaaaagttgctggctttatttttataataaatttatttgatctgggtggtaaccaaaagttgaaagataattcttattttactgaaagcttaatagatttccctggtcactaa

SEQ ID NO: 240420 - DNA, 538 bp, Unknown
  Bacterial polypeptide expressing nucleotide sequence isolated from the Sargasso Sea
atggataaaataggaattaaaaaatacatccgaacaattacagattttccacataaaggaataatgtttagagatgttaccactttattctccgatcctaatgggtttgaccttacaattaaaggtatgctgtcctcagttgaaaataccaatatagataaggttgtgggtatagaggcacgaggatttattttgggtggtgccttagcaaacaagctacattgtggcttcgttccaatccgaaaatcggggaaactaccaggctcagtaattagccaagactatgaactcgaatatggccaagataccttagagatacacttagaaagcattggacctggtgaaagagttctactgatagatgatcttttagcaactggcggcactgcagaagctggagttaagttaatagaaaagttgggtggtaatattgtgtcatgtaattttattgtaaatttaccggatctaggaggcagcaagaaacttgcaaatttaggtttatcaacacactttttgtgttcgttcagtggtacataat

SEQ ID NO: 240421 - DNA, 514 bp, Unknown
  Bacterial polypeptide expressing nucleotide sequence isolated from the Sargasso Sea
tatgaatctaaaagacaagattgcagattatccaaattttcctaaaaaaggaattttgtttagagatttctcaccaatcttaggcgatccatcatcactgtcatttatgatagaagaattctcaaagaagttccatcctaatgacgtggatgtttttgctggaattgagtctagaggattcatcatagcttgcgccctggcacaaaaatataacaaaggaatgattcttgtacgaaaggcaggaaaattaccgggcaaagttgttaagacatcatatactctagagtatggtaaggcaacattagaagttcagaaagacgtcattcaagaaggacaacgtgttttgatttgtgatgatttgttagcaactggaggtacagcaaaagctgcagcaaaattaattgaaaaaattaatggaacgatagttggatttgcattcattatagaattacttgaattaaacggtcgagataagattaaagattacagatcagaatcattggtggaatactag

SEQ ID NO: 240422 - DNA, 541 bp, Unknown
  Bacterial polypeptide expressing nucleotide sequence isolated from the Sargasso Sea
ttgaacaaaaaactaaaaaataatcttgaaaagaaaattagggtaattcctaattttccaaaaaaaggtattcagtttcaagatataacttcaatcacagacagtaagcagctttttaccgaagttgttaatgaaatttctaaatattgtaaaaaaaataaatttactaaagtagctgggatagaagcaagaggcttcatctttggatcagctgttgcctacaagcttggcttgccttttattccaataagaaaaaaagggaaacttccagggaaaattgtcaaacaaaaatacaagttagagtatggaatggatgaaatccaggtacacaaacactctatcacttcaagagataaggttttgattgtcgatgacttaattgcaaccggtggaacagctaacgcggccgcaaagctaatttcaaaacttggagttaaaagaattgaattttttatgataattgatttatggaaccttgaaggctcaaaaaagatttctaaaagttatcagataagatctttgatgaaggcagaaggatagt

SEQ ID NO: 240423 - DNA, 529 bp, Unknown
  Bacterial polypeptide expressing nucleotide sequence isolated from the Sargasso Sea
atgaatatagaacaaattaaagaaacaataacaatcgttaaagactatccaataaagggtatagtttttaaagatatcactacgcttttagaaaatcctgacgcatttaaatctactgttgatattatgatagataaagtaaggcatttagattttaatagagtcgtaggagttgaatctagaggatttttctggtctggaccaattgcatatgctttatcaaaatcatttgttttagctagaaagcctggaaagttaccgagaaaagcagctgaaaaatttttctcattggaatatggtactaatactgtccatatacatgaagatgctatttcggaaggagataaagtattagttgtagatgatttaattgcaacaggtggtacagcaatggcaactgctgagctatgtcaagagcttggtgcatctgaggttcatatcatcgcactaattgatttaccaaaattaggtggatctaaaatgctttcagaaaaatttggtgaagttataacactgattgattattaat

SEQ ID NO: 240424 - DNA, 535 bp, Unknown
  Bacterial polypeptide expressing nucleotide sequence isolated from the Sargasso Sea
tatgaaagagtttcaggatctgaaagatagtattaggacagttccagattatccagtccagggcgttcaattcagagatattacaacacttcttcaaaagccacatttattcaaaaaaatgattgatgccatgacaagtcaatgggaaccgtatctgattgatgcaatcttaagtattgagtctagaggattcattatggcgggagctctagcctacaacttagaaactgcatttattcctctcagaaagcctcaaaagctaccatttaaaactcactctgtttcctacgaactcgagtatggggctacggacatgcacatccatactgatgcactcgacgggcacaccaatcttcttataattgatgatcttttagcaacgggtggaacggttatagcggcactcgacctgataaagaaattccaagataaagaggttgtgggcgctgggttcgttattaatctccctgaattaggtggtcacacaaaactcgaaaatctcggtgttgagtcaaaatatttattagaattctga

SEQ ID NO: 240425 - DNA, 517 bp, Unknown
  Bacterial polypeptide expressing nucleotide sequence isolated from the Sargasso Sea
atggaagatcttcaaaaatggattaagagttaccctgattttccttcaaaaggaattcttttcagagatataagccccttgttggctgaaccagcagcactgagcctcttgaaagatagatttgctgaaaccattagacctctttcacctgactatattgcaggtatcgatgccagaggttttttattctgtactttggttgcagaatacttaggggttggagcattgatgatcagaaagccagataaacttcctggagagctagtagaaaaaagttataagctagaatatggtactaattctttgagcatccaagagcaaaatctagagaacaagtctatagtaatcatagatgatctattagccaccggtgggtctatgcaatgttcaaaggaactattagagtctttgggtgctaatgttgtagcaggggctgtagtcattgagctcacatctctaaaaggatcgactaagttagatatgcccattataagtctcattagttatgcagactgag

SEQ ID NO: 240426 - DNA, 514 bp, Unknown
  Bacterial polypeptide expressing nucleotide sequence isolated from the Sargasso Sea
atgaatctaagagataaaattggagattatccagattttcccaaaaaagggattttgttcagagatttttcaccaatattaggagatccatctgcattatcatttatggtagaagagttttcaaaaaaatttcatccaaatgatgtagatgtttttgcaggaattgaatcaagaggattcatcattgcatgtgcattggcactaaaatacaacaaaggaatgattcttcttcgaaaagcaggaaaattacctggaaaggttgcaaagacatcatatacgttagaatatggtaaagcaacattagaagtccaaaaagatgtaattaaagagggtcaacgagttgtcatttgtgatgatttacttgcaacaggcggtacagcaaaagcagcagcaaaattaattgagaaaatcaacggagagattacagggtttgcattcataatagaattacttgaattggacggtagagaaaaaattaaagattatagatcagagtcattggtggaatactaga

SEQ ID NO: 240427 - DNA, 529 bp, Unknown
  Bacterial polypeptide expressing nucleotide sequence isolated from the Sargasso Sea
aatgtcaataaaatcaaaaataagaacaatagaaaactatccgattgaaggagtgatgttcagagatatttcgagcttaatttctgattcaaagggactaaaagatacaattgatttattaagaaagaagtttattgatgatgattttaattatattgcaggaatagaatctcgtggtttcattttaggttcagcacttgcatattcaatgaaaaaaggttttgtaatgataaggaaaccaggaaagctgcccggcaatgtcatcgaagaagaatatcaattggagtatggtacagataaaattgaaatccaatcggatgcttttccagataaatctaagatcctattggttgatgacttaatagctactggaggtactattatagctgcaatctcactgattgagaggttgggaggaataatatcgagcacggcttttattgttgatctgcctgatcttggaggaagtcaaaagattaaagacttaggttataatttctttgccttaacagagtttgacggtgagtag

SEQ ID NO: 240428 - DNA, 517 bp, Unknown
  Bacterial polypeptide expressing nucleotide sequence isolated from the Sargasso Sea
atgaaagaatacgttcgaacaattgctgattatcctgttgaaggaattcaattcagagatattacaacattgttgcaaaatgcaggacactttaaacaagtcattgatgacatggtaaaaccatggcaaaataaaaaaatagatgcagttttaagcatagaatcacgtggatttattatggcaggtgcaatagcttattttttaaatgcagcatttgttcctttaagaaagcctcataaacttccatttgatactttcaaaacctcatacgacttagaatatggatcaactgaaatgcatattcatacagatgccttagatggtcataaagatttactaattattgatgatcttttagcaacaggtggaaccgcacttgcggcagtagaattaattaaaaagtttgaagacaaaaatattgttggtgcaggttttataataaatttaccagatttaagtggtgataaaaaactaattgaaaaaggaattgagatacattctttaatggagttttaaa

SEQ ID NO: 240429 - DNA, 544 bp, Unknown
  Bacterial polypeptide expressing nucleotide sequence isolated from the Sargasso Sea
atgaaaaatcagttagcaattcttcttaaaagaaatctaagagtaatccctaatttcccaaaaaaaggaattatgtttcaggatatattctctttgattgaaaaacctgaactccttaaaaaaattgttaatgagatttctaaaatagttaaaaaggaaaaaataacaaaaattatagggattgatgcacgaggatttatttttgggtctattgtttcaaataacaataatattccttttgtgccaataaggaaaaaaggcaaacttcctggcgctgtttacaaaaagaagtataagctcgagtatgggtacgatcaagtagagcttcaaaaaaatagtcttttaaaaaaagacaaagttttaatagtggatgacctgatagctacaggtggaacggcaattgctgctgccaaactagttgaaaatgtttcatcaaaaaaggtaagcttcatgtttgttatagacctttataatttaaatggcgccactgttttgaaaaataaaggttacaaagtctttagtattatgaaggcggaagggtgat

SEQ ID NO: 240430 - DNA, 547 bp, Unknown
  Bacterial polypeptide expressing nucleotide sequence isolated from the Sargasso Sea
tatgaatacagaaaccttatccttgataaagcaaagcattaaaacgattcctaattatcctaaggaagggattctatttcgcgatgtgaccagtctgctggaaaatgccgcggcctataaagcgactatcgatttattagttgagcaatatcgcaataaaggctttaccaagattgtgggcaccgaagcccgtggtttcttatttggtgcgcctttagcactggaattaggcattggttttgtgccagtacgtaagcctggtaagttgccacgcgcgactattagccaaagctatgagctggaatatggccacgatagccttgaaatccatactgatgcgattacggcgaatgacaaagtattggtggttgacgatttgctggccaccggcggcactatcgaagccacagtcaaacttatccgacaactgggtggtgaagtgcaagatgcggcctttgtgatttcattacctgatctcggtggcgaagcccgtttaactgccttaggtcttgagttggttaaactttgtgagtttgaaggcgaataa

SEQ ID NO: 240431 - DNA, 370 bp, Unknown
  Bacterial polypeptide expressing nucleotide sequence isolated from the Sargasso Sea
atggctcagccgcttgagggattgattcgctcactgccggattacccgaaaaagggaatcatcttccgggatatcaccaccctgctgcagagtccttcggggtttcgccaggcggtggacgaaatggtccagccctttgccggcagtggcattggctgtgtcgcgggcatcgaggcccgtggattcattctcggcggcgcggttgcgcaccaattatcggttggcttcgttgcgatcaggaaaaagggcaaactgccctggcaaaccatatcggtcgagtatgaactggagtacggcagcgatgaagtcgagatccataccgacagttttgaaccgggccagaaggtgctgatcgttgacgatctgattg

SEQ ID NO: 240432 - DNA, 520 bp, Unknown
  Bacterial polypeptide expressing nucleotide sequence isolated from the Sargasso Sea
cttggatttacagaccaccatccggtcgattccggacttccccaagccgggaatcctgtttcgggacatcagccccatgctgcgaaatcccgccgcgatgaatgaggtgatgcggcgtcttggccaggtctgcgatgcggtgcagccggatctcattgtgggcattgaatccagaggcttcgtcgttggcacgccgctggctctgcagcgttccctcggatttgttcccgtacgcaaaccaggaaaacttcccggagctgtgatcggggtggattacgccctggaatacggaagcgatcgactggaaattcagagcgatgccctcagcggcaagccgcgggtgctggttgtggacgacctcctcgccaccggtggaacggcagcagcgactgggacgttggtccgcgatgcgggcggacagctggtggggtttgccttcgtcatcgaattggaggctcttggagggcgttctgcccttcccgatgacgtccccgtggaatcgttaatccgttatccctga

SEQ ID NO: 240433 - DNA, 553 bp, Unknown
  Bacterial polypeptide expressing nucleotide sequence isolated from the Sargasso Sea
atggattacttaaaacaaaaaatacgtacaattcctgatttcccaaaaccgggaatactcttccgtgatattacaacacttcttgctgattcagaggcatttaattccgttattgacctgtttgttgaacattacaaagaagaacaaattgatattgtagtaggtattgaatcaaggggctttattgtaggggctccgctagctttgagattagacaaggggtttattcctgtccgcaaagcaggtaaactaccaggtcccacacatggagttgaatacaatctagagtatggcagtgatctagttgaggtacataaggacgctattgaaccaggcagcagagttttgatggttgatgatttactggcgacaggaggtacaatggtaggaagttcaaagctgattgagaaagcaggaggaattattattggatatgcctttgttattgaattaattgacttaaaaggtagaacaagcttagataaacctgtctactcacttgtttctttcgataggagattgatacaaagtaaatccatgaataaatattaat

SEQ ID NO: 240434 - DNA, 490 bp, Unknown
  Bacterial polypeptide expressing nucleotide sequence isolated from the Sargasso Sea
atggagtcactgaagtcactaattagacacgtcccagattttccgaagccgggcattttgttctacgacatcacgacactgcttgctgatgccgacgggcttcggcagtcgatcgatgcactggctgatccttttcgggatcaggagattgatttggtcgtgggcatcgagagccggggatttatttttggcacagcggtcgccgaccgcttgggggttggtttcgttcccgtacgcaaaccagggaaattaccgtcgaccactgtccgtgtcgagtatgaactggaatatgggacagatgctctggagatgcacgacgacgcagtccagaaaggtcaacgcgtgttacttgttgacgatctgttggcgacaggtggtacggcaaaagcggttgttgaactgccgaccggccgtggtgcagaggtgcatgccctggcatttttgattgagctggagtttttgccaggcagagagaagctgggcgctcaga

SEQ ID NO: 240435 - DNA, 298 bp, Unknown
  Bacterial polypeptide expressing nucleotide sequence isolated from the Sargasso Sea
catggaagacgagatacttagcagaatcaaatcgaccatccgcactgtccccgacttcccaatagagggaatcatgttcagggacatcacacccgtcctcggtgaacccggtttgctttcttccattacagaccggttcgccgaggacctccagaaactcggatgggaaccagaagcggtcgtcggcccagaggcccgaggcttcattttcggtccattgctcgccgagcgtataggatgcggcttcgtacccgtccgtaagcccgggaagctaccatcctccacgaggagagtcgag

SEQ ID NO: 240436 - DNA, 520 bp, Unknown
  Bacterial polypeptide expressing nucleotide sequence isolated from the Sargasso Sea
gatggacctcaagcaaaagatacggacgatcccagatttccctgaaccgggaatcctctttcgtgacatcaccaccctcctcagtgacgctgaggcgttgaatgaaatgatcgaaaggttcactgaacactaccgtgacgaaaaaatcgatctggtggtaggaatcgaatcccgaggattcatcgtcggcactcccctggcaattcgcctgggcaaaggatttgtcccgatccggaaggcaggaaaacttccaggcccaacccatggggtggattatgaactggaatatgggaaagaccgggttgaagtgcatcaagacgccattcccgaaggaagcagggtgttgctcgtcgatgatctgattgccacaggaggcaccatccaaggcagtgcgaaactgataaaaatggtaggtggagtaatcgtcggttatgcctttgtcatcgaactggttgacctggaaggcaggaagggtttgcaggaacctgttttttccctgatcgaatttgaaggacattag

SEQ ID NO: 240437 - DNA, 532 bp, Unknown
  Bacterial polypeptide expressing nucleotide sequence isolated from the Sargasso Sea
tatgagcgacgtcaccgtcggcgatctcgaagccgccatccgaaacgtacccgacttcccacagtcgggcattcaattcaaagacatcacccccgtgcttggcgacgcccggctctttgccggcgccattgatctcatggcggcccggcacgccgatgccagcatcgacgcctgcgtgggcattgatgcgcgtgggtttatctttgccgccgcggctgctaagcaactcggcaccggctttgtgccggttcgaaaaaaaggcaagctgccgtggaaaacccacgaggaaagctacagcctcgagtacggcgaagccactgtggccattcatcaggacgccctgcaacccggagctcgggtattgttgcttgatgacctgctcgccaccggcggcaccgccgccgcggctgtcaagttgctcaaaaagatcggcgcggaaattgtggagatcgggtttctaatcgagttgggctttctcaatggccgcgaaaaaatgaacggttcgccgatcaattcgctgatcacctattaa

SEQ ID NO: 240438 - DNA, 547 bp, Unknown
  Bacterial polypeptide expressing nucleotide sequence isolated from the Sargasso Sea
gatgaaccaagacagtttagcgcttatcaagaacagcataaaaaccattcctgattatccaaagcccggcattatgtttcgtgatgtcacaagcttgttagaaagcgctgaagcgtacaaagcaacgattgcaattttagttgctcactaccaatcaaaagggtttacgaaagtggttggcacagaagcgcgtggttttttatttggcgctccgctagcgctagagttaggtgttggttttgttcctgtgcgtaagccaggcaaattaccgcgcgaaaccattagccaaacttatgagcttgaatacggtaaagacaccttagaaattcacaccgatgccattaatgcaaacgataaagtgttggtgattgacgacttacttgccactggcggtaccattgaagcaaccgttaaacttatccgtcaacttggcggcgaagtcgctcatgctgcatttgtgatttcattacctgaaattggcggtgaaaagcgcctgcaagatttaggcatagaagtattgagcttgtgtgagtttgaaggtgaatag

SEQ ID NO: 240439 - DNA, 568 bp, Unknown
  Bacterial polypeptide expressing nucleotide sequence isolated from the Sargasso Sea
catgtccaacgcgctcgcgagcgcgccgctcgatgcggccgactacatcaaaagccacatccgtacggtgtccgactggccgcagccgggcgtgcagtttcgcgacatcacgccgctcctgcaggagccgaagtcgctacgcgtgctgatcgatctattcgttcagcgctatatcgatgcgaagctcgactacatcgccgggctggatgcgcgtggcttcatcatcgggccgattctggcttacgagctgaacctcggcttcattccgatccgcaagcaaggcaagctgccgtacaagcgggtcgcgcagtcgtatgagctcgaatacggcaccgcgaccgtcgagattcacgaggacgcctgcaagccgggcgaccgtgtcgtgatcgtcgacgatctgatcgccaccggcggcaccatgatggcgggcaagattctgctcgagcgactgggcgcggtggtggtggaaggtgcggcgattatcgatctgcctgaactcggcggttcggctctgctgcgcaacgggggcctgccgctttataccgtgactgaattcggcggccactga

SEQ ID NO: 240440 - DNA, 455 bp, Unknown
  Bacterial polypeptide expressing nucleotide sequence isolated from the Sargasso Sea
catggattacttaaaacaaaaaatacgtacaattcctgatttcccaaaaccgggaatactcttccgagatattacaacacttcttgcagattcagaggcatttaattccgttattgacctgtttgttgaacattacaaagaagaacaaattgatgttgtagtaggtattgaatcaagggggtttattgtaggggctccgctagctttgagattagacaagggctttattcctgttcgtaaagcagggaaactaccaggtccaacacatggagttgaatacgatttagagtatggcagtgatctagttgaggttcataaggacgctattgaatcaggaagcagagttttgatggttgatgatttactggcgacaggaggtacaatggaaggaagttcaaaactgatcgagaaagcaggaggaattattatttggatatgccttttgttattgaatt

SEQ ID NO: 240441 - DNA, 360 bp, Unknown
  Bacterial polypeptide expressing nucleotide sequence isolated from the Sargasso Sea
ggaatgaagctagagggttcatttttggggctagcctggcaagcagtctaggttgtggatttgtaccaataagaaagccaggtaaacttccttataaaacgtacagtcaagattatagtctcgaatacggcactgatatcatggaaattcatactgatgctattgagagtaaggataatatattactacttgacgatgtacttgcaactggaggaacggcgtgcgctgctttgaagttattacaaaaatttaagtgtaaaatcatagaatgcctttttctattagaaatttcttctttgaaaggatctgaaaaaatagttagtcaaaataaaaaatacttttctttaataaagtattaat

SEQ ID NO: 240442 - DNA, 529 bp, Unknown
  Bacterial polypeptide expressing nucleotide sequence isolated from the Sargasso Sea
catgaatttaaaaaactacatcaaagacattccagactttcctaaaaaaggaatcctcttcagagatatatcacctctcctaaaaagtcctgaaggttggagtaaagttataacacaattaggttttttctgtgaagaaattactcctgatattattgtgggtattgagtccagaggatttattgttggaagtgctttagcaacacaacaaaagactggatttgttcctattagaaagaagggaaaattacctggtgtgcctggcaaagatgtaataggggtagattatgctttagagtatggtcaagatacactagagattcttgtagatgcctttgacaataatcctagagttttattggttgatgatttacttgccactggtggaacagtagatgctgcttcagaattgatagaaagagttggtggtcaattagtaggatgtgcgtttataatagaattgaatgaattaaatggtagagaaaatatccctaacgttccaataagatctttaattagatatgaatag

SEQ ID NO: 240443 - DNA, 401 bp, Unknown
  Bacterial polypeptide expressing nucleotide sequence isolated from the Sargasso Sea
ggacctccaacaactcggatgggaacccgattcggtagtcggcccagaggctcggggtttcatcttcggcccacttctcgcggatcgcctaggttgcggcttcgttcccgtacggaagccggggaaactgccatcttccacaaggcgggtcgagtactctctcgagtacggctccaatgctcttgaaattcacgaggatgcgatacagccaggtcaaagagtcgtcatcatcgatgacctcctagccactggaggtacgatttctgcctgtgccagactgtgtgaggaactaggtgcggaggttctaggagccttgttcctgatcgaactcgacggtttaggcgccagggaggccatagaacccgtgaaggcgcatgcactactctcctacccggcatgag

SEQ ID NO: 240444 - DNA, 472 bp, Unknown
  Bacterial polypeptide expressing nucleotide sequence isolated from the Sargasso Sea
tatgaatataaaatcatatataacagatataatggattttccttcagatggaattatttttagagatattagccctctaatcggaaattatgaggcattaaactacgttttagatagttttgaaaaatatgctttaactttagattttgattgtattgctgctattgatgctagaggttttatttttggtgctccaatagcaaatagattaaaagttccttttgtaccaataaggaaatcaggaaaactgccccctccattgaaaagtatcagatacgatttggaatacggaaaatcaagtttggagtgcaaggatgatatattaaaaaataacaaaaaagtaattcttattgatgacttgttagcaactggaggcactataaatgctgctatagaacttatatccagtactggagcagcagtaaaatcagctttacttgtagttgaattattatatcttaatggcagaaat

SEQ ID NO: 240445 - DNA, 532 bp, Unknown
  Bacterial polypeptide expressing nucleotide sequence isolated from the Sargasso Sea
tatgacgcaaaaactgagggacgccgttcggacggtaccggacttcccaattgagggaatcatgttccgggatatcacacctgtcctgtccgacggcaccctcctttctgctacaacagatctgttcattgagaggatgaatgaggcgggttggacgcccgaagcaatagtcggcccagaagctagaggcttcatcttcggggccttacttgccgccgaattaggaatatcatttgttccagtccgtaagccaggaaaactcccagcatcgaagatgagagtagattactctctcgagtatggaacaaactcattggagatgcacgaggacgcgttgaagcccggagaaagagcggtaatagtcgacgatcttctagcaactggtggcacggtaaacgcctgcattgaactctgtcagaaagcaggggcggaagtagtcggggcattattcgtaatcgagttggacgggctagatggaaggggcacgatatcacccgtaccaagcatatcgctcttggacttcccctgctaa

SEQ ID NO: 240446 - DNA, 466 bp, Unknown
  Bacterial polypeptide expressing nucleotide sequence isolated from the Sargasso Sea
tatgaatacagaaaccttatccttgataaagcaaagcattaaaaccattcctaattatcctaaggaagggattctatttcgcgatgtgaccagtctgctggaaaatgctgcagcctataaagcgactattgatttattagttgagcattaccgcaacaaaggctttaccaagattgtgggtaccgaagcccgtggttttctgtttggtgcacctttggcgttggaattaggtattggttttgtgccagttcgtaagccaggtaaactgccacgcgcgacgattagccaaagctatgagctggaatatggccacgatagccttgaaatccataccgatgcgattaccgctaacgacaaagtgctagtggttgacgacttgctggccacgggcggtactatcgaagccacggtaaaacttatccgccaactcggtggtgaagtgcaagatgccgcccttgtgatttcg

SEQ ID NO: 240447 - DNA, 523 bp, Unknown
  Bacterial polypeptide expressing nucleotide sequence isolated from the Sargasso Sea
atggattacctgaaaaagaaaatacgtacaattcctgacttcccaaaaccgggaatactcttccgtgacataacaacacttcttgctgatccagaggcatttaattccgttattgatctgtttgtagaacattacaaggaagaacaaattgatcttgtagtaggaatagaatctaggggatttattattggggccccgctatctttgcgtttaggcaagagttttattcctgtccgtaaagcaggcaaactccctggtcccacacacggagttgaatacgacctggaatatggcactgacctggttgaagtccaccaggacgcgattgaatcaggcagcagagttttgatggttgatgatttgctggcaacaggtggtacaatggaaggaagttcaaggctgatcgagaaagcaggaggaattattaccggatatgcctttgttattgaattgatggacttaaaaggcaggaacagacttgataagccagtttattcacttgtaacttttgaaggcgattaaa

SEQ ID NO: 240448 - DNA, 514 bp, Unknown
  Bacterial polypeptide expressing nucleotide sequence isolated from the Sargasso Sea
cttgatagtggatttcccgcaatcaggagtcgtttttagggatatcacgccaattctggcatcaccccaaatctccgacgcggccagcaccagccttgccgaaaatatccgaagttttggaggcactaaagtcatcggtatcgagagtcgaggtttcatcttcgccagcgttgcagccaataaaacagtcctacctatgctcctcgctagaaaaccgggcaaactaccgaaagagacattcgtgaaaaactatcacctcgagtatgggacttcatcgatcgagttgcatatggattccgatatatctaaaacagacagagtggtcatagtcgatgacctggtcgcaaccggaggcacagcgttggccgtagcgactcttgtgagtgaaaattttggcgtccctcatcagaacatcctaatttcggcattaatcgatattggagaatgcgatggcggcacacagataacctccaaaggatataactaccatgccctcgctcaatcaatcctgtga

SEQ ID NO: 240449 - DNA, 422 bp, Unknown
  Bacterial polypeptide expressing nucleotide sequence isolated from the Sargasso Sea
cttgactttacagaaaagaattagtaataccgtaagagatgttgaagattttccaaaaaagggaatagtttttaaagacataacaccaattttaaaaaatgctagtttatgcgctgatattatagatttttttgttgctgaattacctttagacgtttctcatgttgttggtgttgaaagcagagggtttttattcggatttccagttagtattaaaaaagaaatcccttttgttttgataagaaaaaaggggaaattaccttttgataaggttagtttatcttatgagcttgaatatggaaatgctgaaattgaaatgaatgttgattccgttgggcctggagataaagttgtgattcatgatgacttattagctactggtggaactgcaattgcagcagcaaaacttataaagaatcaag

SEQ ID NO: 240450 - DNA, 365 bp, Unknown
  Bacterial polypeptide expressing nucleotide sequence isolated from the Sargasso Sea
tatgtcttctaaaaaaaacataacggcaatcgcaaccaaaataagagatatacctgatttcccgaagaaaggaataatattcaaagatataactcctgtattgtctgatattgaaacttttagaatgtctgtcgaagaaatgactgctccatatatggatcaaaacatagatgttgtcgttggaattgaatctcgaggattcatatttggagctccaatagcagatatattgaactgtagttttgtaccagttcggaaacctgggaaattaccttcaaaaacaaaaagtatttcatatgatttggaatatggaagtgattccctagaaatacatgaagatgcaatagattctggtcaaaatattt

SEQ ID NO: 240451 - DNA, 288 bp, Unknown
  Bacterial polypeptide expressing nucleotide sequence isolated from the Sargasso Sea
cttggatttacagacttatatccgctcaattccggactttcccaagccgggcatcctgtttcgggacatcaatccattgctgcgaaatcccgctgcgatggtggaggtgatgcggcgtcttggcgcgatctgcgatgcggtgcagccggatctcattgttggcattgaatccagaggcttcatcgttggcacgccgctggccctgcagcgctcccttggatttgtccccgttcgtaaaccgggaaaactgcccggagcagtgatcggggtggattatgccctggagta

SEQ ID NO: 240452 - DNA, 469 bp, Unknown
  Bacterial polypeptide expressing nucleotide sequence isolated from the Sargasso Sea
tatgagcaatataaatctttatgactttattgatgaaattcaagattttccaaaaaaaggaattttgtttagagatataagtcctcttttagaggataaggatgcttttaaattacttatattaaaaatgcttaaggaaattaataattataaaattgacttaattgctggcattgattcaagaggtttcttgttttcgacgatattagctcatcaattgaatgtcgggtcaataatgataagaaaaacaaataaattaccagggaatgtcattgaaaaaaaatatgagttagaatatggatattctatcctaacgttacaaaaaaaaagaaatctcaatggaaaaaatttattaattgttgatgatcttcttgctactggaggcacattaaaatgtgcggaagagcttatttctgaagtaggaggtaatgttgttttaactggagttgcaattgagttgaaatgcttt

SEQ ID NO: 240453 - DNA, 468 bp, Unknown
  Bacterial polypeptide expressing nucleotide sequence isolated from the Sargasso Sea
ccaaagagggaatcgttttcaaagatatagcgccgctcctgttgtcgccgaaggcgcttcgaagcgtatgtgaagaattagcatcctcgaatcacagtgcgactctggttgctgggatagaggccagaggctttatttttggctctttggtcgcaaacattttagaagttggttttgttccactgagaaaaccaggcaagcttcctagagaaacattcaatatttcttatgaattagaatatggaaaggcagaattagaaatgcacaccgatgcgctaaagcagtctgactcagtgctgatcatagacgatgtcttagctactggagggaccgccacggccggagtgcaattaattgaaaaagcaggcgccaaagtttccggactcgggtttgtcattgagattaaacttctcaaaggaaaaaataggcttaaaaattatcccgtaaagacgcttgtaacttattaga

SEQ ID NO: 240454 - DNA, 523 bp, Unknown
  Bacterial polypeptide expressing nucleotide sequence isolated from the Sargasso Sea
tatggatcaccttaaacagaaaatacgaacaatccctgactttccaaaaccgggaatactcttccgagacattacaacacttcttgctgatccagaggcatttaattcagttattgatctgtttgtagaacattaccaggaagaacaaattgatctcgtagtaggaatagaatcgagaggatttattattggagccccgctagctttgcgtttaggcaagagttttattcctgtccgtaaagcaggcaaactccctggtcccacacacggagttgaatacgacctggaatatggcactgacctagttgaagtccaccaggacgcgattgattcaggcagcagagttttgatggttgatgatttgctggcaacaggcggtacaatggaaggaagttcaaggctgatcgagaaagcaggagggattataaccggatatgccttcgttattgaattgattgacttaaaaggcaggaacagactggataagccagttttttcacttgtgacttttgaaggagattaa

SEQ ID NO: 240455 - DNA, 520 bp, Unknown
  Bacterial polypeptide expressing nucleotide sequence isolated from the Sargasso Sea
atggacctcaaagagaaaatacggacgatcccggatttccctgaaccgggaatcctctttcgtgacatcaccaccctcctcagtgatgctgaggcgttgaatgaaatgatcgaaaggtttacagaacattaccgtgacgagaaaatcgatctggtggtaggaatcgaatcccgaggattcatcgtcggcactcccctggcaattcgcctgggcaaaggatttgtcccgatccggaaggcaggaaaacttccaggtccaacccatggggtggattatgaactagaatacggaaaagaccgggttgaagtgcatcaagacgccattcccgaaggaagcagagtgttgcttgtcgatgatctgattgccacaggaggcaccatccaaggcagcgccaaactggtgaaaatggtgggcggagtgatcgtcggttatgcctttgtcatcgaactggttgacctggagggcaggaagggtttgcaggaaccggttttttccctgatcgaatttgaaggacattagg

SEQ ID NO: 240456 - DNA, 523 bp, Unknown
  Bacterial polypeptide expressing nucleotide sequence isolated from the Sargasso Sea
tatggattacctaaaacaaaaaatacgtaccattcctgactttccaaaaaaaggaatacttttccgtgatattactacacttcttgctgatccagaggcatttaaatccgttattgacctatttattgaacattacaggaaggagcaaattgatctagtagtaggtatagaatctaggggatttatagtcggagctcctttagctttaggactaggcaaagggtttattcctgtccgcaaagcaggaaaactgcctggccccacacatggagtagaatatgaactggaatatggcactgacttggttgaagtacataaggatgcgattgaaaaaggcagtagagttttgatggttgatgatttgcttgcaacagggggtaccatggaaggaagttcaaagttgattgagaaggcaggaggaattattaatggatatgcttttgttattgaattaattgacttaaaaggcagaagcagactggataaacctgtttattcacttgtgtcttttgaaggcgattga

SEQ ID NO: 240457 - DNA, 568 bp, Unknown
  Bacterial polypeptide expressing nucleotide sequence isolated from the Sargasso Sea
catgccgcattcgtcgtcgggcgcaccgctcgatccggtcgccttcatccacagccagatccgcacggtgcccgactggccgcagccgggcgtgatgttccgcgacattacgacgctgctgcagagcccgaaggcgctgcgcatcctcgtcgacctgttcgtcgagcgctatgtcgatgcgaaactcgactacgtcgcggggctcgacgcgcgcggcttcatcatcgcgccgatcgtcgcgtacgagctgagcgtcggcttcgtgccgatccgcaaggtcggcaagctgccgtacaagacgcgctcggaatcgtacgacctcgaatacggcagcgcgacggtcgagatccacgaagacgcgtgccgccccggcgaccgcgtgatcatcatggacgacctgatcgcgaccggcggcacgatgatggcggggcgcaacctgctgcagcggctcggcgcggaagtcgtcgaaggcgcggcgatcatcgacctgcccgatctcggcggctcggcgctgctgcgcaatgcgggactgcccgtctacaccgtcaccgaattcgccggccactga

SEQ ID NO: 240458 - DNA, 313 bp, Unknown
  Bacterial polypeptide expressing nucleotide sequence isolated from the Sargasso Sea
ggtcttccttttgttccgattagaaaaaaaggaaagcttcctggtaaagttctgcgacaaaaatattctcttgagtacggcaatgacgaaatccaaattcatagtaattcgattacttcacgagatagggttttaataattgatgacttgattgcaactggtggtaccgctgtagcttcagcaaagcttatctccaaatgcaaagtaaaaaatatcgaattttattttattatcgatctcaaaaatgttgggggttctcagaaattaggaaagaaatttaaactgtcttcaattttagaggctgaagggtaat

SEQ ID NO: 240459 - DNA, 346 bp, Unknown
  Bacterial polypeptide expressing nucleotide sequence isolated from the Sargasso Sea
gatggacctcaaagagaaaatacggacgatcccggatttcccagaaccgggaatcctctttcgagatatcactaccctcctcagtgacgctgaggcgttgaatgaaatgatcgaaaggttcactgaacactatcgtgacgagaaaatcgatatggtggtaggaatcgaatcccggggattcatcgtcggcacgccactggcaattcgcctgggcaaaggatttgttccgatccggaaggcaggaaaacttccaggtccaacccacggggtggattatgaactggaatatgggaaagaccgggttgaagtgcatcaagacgccattcccgaaggaagcagggtattg

SEQ ID NO: 240460 - DNA, 529 bp, Unknown
  Bacterial polypeptide expressing nucleotide sequence isolated from the Sargasso Sea
aatgctggaaagtataaatctcgaggaaacaattgccaaagttcccgattacccaaaaccggggatcctgttctatgatatctcgacactcttaatgaatacgcaagcttggacagcgaccatgaaaagactagcaggtgaaattagtcagtataagcctgatattatagcaggaatagaatcgagaggtttcttactggcaagtcccgtggcaatcgaattagaggttggagttcagatgataaggaaaaaaggtaagctgcctggagaaactctctctcatacttacgacctagaatacggccatgatacgctagaaattcagaaaagttctgctttaagtggcaaacgcgttgcaattgttgatgatatttttgcaacaggaggcacactgagcgctgcaaccactctgatccggaagcaagggtctattgtagtttgcttagcatgtattctggaactagctttcctgaaaggaaaagccaaacttgacgcgccgttcatttcactagttcaagttagtgaataa

SEQ ID NO: 240461 - DNA, 535 bp, Unknown
  Bacterial polypeptide expressing nucleotide sequence isolated from the Sargasso Sea
atggctcagccgcttgagggattgattcgctcactgccggattaccccaaagaaggaatcatcttccgggatatcaccaccctgctgcagagtccttccgggtttcgccaggcggtagacgaaatggtgcagccttttgccggcagtggcatcggctgcgtcgcgggaatcgaggcccgtggtttcattctcggcggagcggttgcgcaccagttgtcggttggcttcgttgcaatcaggaagaagggcaaactgccctggcaaaccctgtcggtcgagtatgaactggagtacggcagtgatgaagtcgaaatccataccgacagttttgagccgggtcagaaggtgctgatcgttgacgatctgattgcgacaggcggcaccgcctgtgctgccgttcaactggtacgtcaagcgggcgctgaagtcgttggtgcgagttttgtgatcgatcttcccgacctgggcggccgggaaaaactggcagcgatggatgtcccggtacgcaccctaatcggttttgaaggcgagtagc

SEQ ID NO: 240462 - DNA, 547 bp, Unknown
  Bacterial polypeptide expressing nucleotide sequence isolated from the Sargasso Sea
atgaatccggaaaccctgaaatttatcgaagcgagcatcaagaccattcccgactatccgaagccgggcatcctgtttcgcgacatcaccagcctgatcgagaatgccgatgccttcaaggccaccatcgatctgctggccaatcactatcgtgatcaagggatcaccaagattgtcggtaccgaagcgcgcggcttcatcttcggtgcgccggttgcctacgccatgggtctgggcttcgtgccggttcgcaagccgggcaaactgccccgcgccgtcatcgaagagtcctatgccctcgaatacggcaccgacaccctgcaactgcacaccgacgccatcgtgcccggtgacaaggtgctggtcgtggacgatctgctggccaccggcggcaccgtcgatgccaccgtcaagctcattcgccgcgccggcggtgaagtggttgatgccgccttcattatctccctgccgtccctcggtggtgatgcccgcctgactgccgccggcgtcaaggtggtttctctggtcgaactgccgggcgaataag

SEQ ID NO: 240463 - DNA, 520 bp, Unknown
  Bacterial polypeptide expressing nucleotide sequence isolated from the Sargasso Sea
ttggatttacagacttatatccgctcaattccggactttcccaagccgggcatcctgtttcgggacatcaatccattgctgcgaaatcccgctgcgatggtggaggtgatgcggcgtcttggcgcgatctgcgatgcggtgcagccggatctcattgttggcattgaatccagaggcttcatcgttggcacgccgctggccctgcagcgctcccttggatttgtccccgttcgtaaaccgggaaaactgcccggagcagtgatcggggtggattacgccctggagtacggcactgatcgactcgaaatccagagcgatgccctgaccggcaatccccgggtgctggtggtggatgacctgctcgccacgggtggaacggccgcggccacaggctcgttggtgcgtgctgcaggcggtgagctggtgggatttgcctttgtgattgaactggagccgcttggaggacgttccgccctgcctgatgaggttcctgcggagtcgttaatccgttacccctgat

SEQ ID NO: 240464 - DNA, 541 bp, Unknown
  Bacterial polypeptide expressing nucleotide sequence isolated from the Sargasso Sea
ttgaacaaaaaactcgtaaataaattaaaaaaaaatattcgggtaattcccgactttccaaagaaggggattctttttcaggacatcacttccattactgataacaaaaaattatttactgaagtaattaacgaaatttcaaaatatgctcgaaagcagaagtttactaaaattgcaggtgttgaagcaaggggtttcatcttcggtgcttcagttgcttttaaactgggccttccttttgttccgataagaaaaaaaggaaagctacctggaaaggttctgcggcaaagatattctcttgagtatggcaacgacgaaatccaaattcatagtaattcgattacttctcaagatagggttttaataattgatgacttaattgcaaccgggggtaccgctgtagcttcagcaaagcttatctcaaagtgcaaagtaaaaaacatcgaattttattttataatcgatctcaaaaatgttggaggttcgaaagaattagaaaagaaatttaaactgtcttcaattttggaggctgaagggtaat

SEQ ID NO: 240465 - DNA, 514 bp, Unknown
  Bacterial polypeptide expressing nucleotide sequence isolated from the Sargasso Sea
tatgaatattagtaactacataagatctatagataattttccttcaaaaggaattacattcagagatattactccaatatttcaagatcctaatattttcaattttgttatagaggaaatgagaaaatatatagataaagttaaacctgattatcttgcagctattgattcaagaggatttcttttaggatcagctcttgcattatcatctaaaattccacttatactaatcagaaagaaaggaaagttacctccacctgttatatctcaaaaatattctttggaatatggagatgattatttagaattatcttctcaaataaatttatcaggtaaaaatgtaataataattgacgatgttcttgctacaggaggtaccattacagccgcaataaaattaatagaaaaacttgaaggggaggttattggattgaatttcttaatcaatttaataaatattgaaaagccttctgaaataaagaattatccaattaatttcctcaagtcatattag

SEQ ID NO: 240466 - DNA, 514 bp, Unknown
  Bacterial polypeptide expressing nucleotide sequence isolated from the Sargasso Sea
attgaaaatttctaaaactttaatatcgcaagaagaaatagaaaataaaatttcggaaattgcagaaataataaatagtaagtataaagacgaagagcttgtagttattggcattctaaaaggagcttttatagttgtgagcgatcttgctaagcagcttcagattgatgtcacctttgactttatgagcattaaatcttattacggatctgaatcctctggacaaattaaaattgttaaagatttggagtatgacatttcaaataaaaatattttgatcgttgaagacatctacgacacaggattaaccctctcaagcttaaaaaaattacttgaatctagaaatccaaaaactatagaaatttttagcatgtttgttaaaaagggagtttcaaaagacccaattgaaattgattacagcggattcgaaattggcccggaatttgtagtgggttatggtctagattacaacggaaaatatagagaattgccttatttggccgttctctcttaa

SEQ ID NO: 240467 - DNA, 407 bp, Unknown
  Bacterial polypeptide expressing nucleotide sequence isolated from the Sargasso Sea
tgtcctaaatggtagcttcatttttcttgctgatttagttaggtgtataaatattgatgtagaaataagctttattaaagcacgtagctacaatggtaaacaaaagttcgacaaaataaaatttgatttctttgattttgatagtataaaaggtaaagatattataattatcgaagatattgttgatacaggtgatacagttagtaaaattagaaataaaatgattaataaggccaattctgtagccatagcagcttttttgttaaaaccaaacaaagccaaacttaattttgaaattgattgggtaggatttgaaattcccgatgaatttgtagtaggttatggtcttgattataatcaaaaatttagaaatttgaatggtatttatcagggaatagaaatttaat

SEQ ID NO: 240468 - DNA, 145 bp, Unknown
  Bacterial polypeptide expressing nucleotide sequence isolated from the Sargasso Sea
gacaaaccttcaagacgagaaatacaaattaaatctcgttggttaggctttgaaataccagatgaatttgtagttggttatggcatagattatgcgcaaatgaataggaacctttcctatattggaaaggttaggtttatataaa

SEQ ID NO: 240469 - DNA, 418 bp, Unknown
  Bacterial polypeptide expressing nucleotide sequence isolated from the Sargasso Sea
agtcgttgggttgcttagaggatcattcatgtttattgcagacttggttagatgcttggatattcctgtagaggttgactttataacagtttcatcctacggcagtgagatgttctcaagtggcaacgtaaaaattttaaaagacttagatggcgatattaatggacatgatgtattattggttgaagatatcgtagatactgggaaaacgctagaggcagtaatagaaatgcttgaaacaagagttccaaattcaatcaaggtatgcgctctactgaacaaacaatcaagaaggatttcaaatattaaagctgactggatagggtttgaaattcctgatgaatttgttgtaggttatggaattgactatgatcaaagaaataggaatttaccctatataggaaaagttgtaaaataa

SEQ ID NO: 240470 - DNA, 532 bp, Unknown
  Bacterial polypeptide expressing nucleotide sequence isolated from the Sargasso Sea
tatgattgaacgagaaaatctaaaagaggtaatttccaaagaagaattgagctcaagaattgcggagattggtgccgagatatctaacgcttataatttagaatcagtagtttttattgtggttttaaatggtagttttatatttgcatcagatttgattagggccgtagatattgaatgcgaggtcgactttattaaagttacgagttattcaggaatgaaatcagagggaaaaattaattttgaaaaagatatatctactgaaatagctggaaaaaatatcattattgttgaagatattatagatagtggaaatactattaattttgtaaaagaatttattgataataaaaatccaaaatcgttgaaaatagctactttgcttttaaaaactaaaattgcaaagctaagttttaagattgattgggtaggttttgaaatttcatcagaatttgttgtaggatatggcttggattataatcaaaaattaaggaatttaaatgcagtttatagacttgggggagttaattaa

SEQ ID NO: 240471 - DNA, 286 bp, Unknown
  Bacterial polypeptide expressing nucleotide sequence isolated from the Sargasso Sea
aatggtgatgtcaaaaagtttagatttggatataaaaaatagaagtataatcattgtagaagatattattgattctggaatgtcaattgagttcatctataattatcttaatgattttaatccaaaagatatttctattgtttcactcttagctaaaaagagtgtttctaagttaaattttaaaattgattttataggatttgaaatatcatcagagtttgttgtaggatatgggctagattataatcaaagatttaggaatatagattcaatatataaattataa

SEQ ID NO: 240472 - DNA, 502 bp, Unknown
  Bacterial polypeptide expressing nucleotide sequence isolated from the Sargasso Sea
aatgaaattaaataaaagaaaactcagaatacttttcgataaggttacaattgaaaaacgtgtagaagaaatggctattgaattatcgaataagtttgaaaataaaaaaccaatatttataggtgttttaaatgggagttttatatttgcttcagatttattaagaaatcttagtattaattgtgaaatagattttattaaattatcgagctataaaggacagaatacaactggtactgtaagattattaaaggatatatcagctgacattactaatagggatgtaattattgttgaagatattattgattcaggattaactattgaatttcttgtaaagaggcttaaaggcgcttctccgcgtagtataacaattgtaacattattatttaagccagatatagcaaaaataagtttacctatagatataattgggtttgaaattgcaccacattttgttgtaggatacgggttagattatgaccaaaattatagacaattg

SEQ ID NO: 240473 - DNA, 469 bp, Unknown
  Bacterial polypeptide expressing nucleotide sequence isolated from the Sargasso Sea
aaatattggtgagtctatctcaaagaaatttattggaaaaaaacccatctttattggtgtccttaagggtagttttatattcacagcagatcttttaagatccataaaaattgactgtgaagttgaatttataaaagttcaaagctataaaggaacacaatcaacaggcaatgttaaaattacttcagatataaaagcaaatttagagggcaggcatatcattttagtagaggatattattgattcgggtaaaactataaaatttttaataagtgagtttaagaaaaagtcagtcaaatcaatatcaatagccacattcttgatgaagtcaaatcaacaaaaatttgatttcccaatagattatattggttttgaaattaaacaaggttttgtagtaggatatggattagactataaccaaaaatataggaatttagacagtgtttacgtcttagaaagaaaaaattaa

SEQ ID NO: 240474 - DNA, 997 bp, Unknown
  Bacterial polypeptide expressing nucleotide sequence isolated from the Sargasso Sea
atatattgcaccgcttttccagcagaagtcgcggtgttacccttcaaaagcccttctcagggcttttcttacgatcaaggcagacttttccgacccttcaaaggcgaggccggaagtgggaaaagcgccggcaccctcaaggagcccctcgccatgcacgccatcagctttatccaggacttggccgtgatcatgctggtggcaggggtggtcaccatcctgtttcaccgcttcaagcagccggtggtgttgggctacatcgtcgccggcttcattatcggcccccacactccgccgtttggcctgatccacgatgaagacacgatcaagaccctggcggagctgggggtcatcttcctgatgttctgcctgggcctggaattcagcctgcgcaagctattcaaagtcggggccacggcgtttatcgcggcgttcctggaaatcgtactgatgatctggatcggctacgagatcggccgctggttcgactggagcaccatggactcgctgttcctcggagcgatcctggcaatctcctcgaccaccattatcgtcaaggctctcaacgacctgaagatgaaagaccagcggttcgcccagctgattttcggtgtgctgattgtggaggacatcctgggtatcggcatcattgccttgctgtcgagcatcgccgtgagtggcacggtcagctccggcgaggtgttctccacagtcggcaagctctcgctgttcatgatcgttgcgctggtgattggtattttgctggtgccgcgcctgctggcttatgtggccaagtttgaaagcaacgagatgctgctgatcacggtattggggctgtgctttggtttctgcctgctggtggtgaagttggaatacagcatggtgctcggggcctttttgatcggcgcgatcatggctgaatcccggcagttgattaagatcaaacgcctgatcgaacccgttcgcgacatgttcagcgcgatttcttcgtggcgat

SEQ ID NO: 240475 - DNA, 250 bp, Unknown
  Bacterial polypeptide expressing nucleotide sequence isolated from the Sargasso Sea
tatggataattcaaaatatgtgattgatcaaatgatatcagcaaaaagtatagctgcccgtgtagaagctttggctcatcagataactaatcactttcatgacactgaaaaattgatcgttgtgggtcttctcagaggttcttttgtttttattgcagatttagcgagagaaatatcgctacctattgaaattgatttcttggaggcatcttcttatggaaatcaaatggaaagctccagagaagtaaga

SEQ ID NO: 240476 - DNA, 532 bp, Unknown
  Bacterial polypeptide expressing nucleotide sequence isolated from the Sargasso Sea
atgggtgaacataagaatttaatagaactaatttcgtcaagtgagattgacgtaaaaatcaaagatatcgccgacgacatatctttgtatttcaataacgaatcagtagtatttgtaattgttttaaacggtggattcatttttggatctgaaataaccaagtctgttgacttggattgtgaagttgattttataaaagtttcaagttataatggtagagattctcaaacagatattaagcttgaaaaagatttatcgattgatgtagccggaaaaaacgttgttattatcgaagatattatagatacgggaaatacaataaattatttgattaaattaattgagagacataatccaaaattaattaaagtagcaactttgcttcttaaaccagaaagagcgatctctaaaacgaatattgattgggttgggtttaaaattgaaacagatttcgtggttggatttggcttggattatgatcaaaaattcaggaatttaaatggtatttataaactcgggggagttaattaga

SEQ ID NO: 240477 - DNA, 1549 bp, Unknown
  Bacterial polypeptide expressing nucleotide sequence isolated from the Sargasso Sea
atgtcaaaaatttataaattatttttagtaacattctttctatttaatactaatcatatttattctgatgtaagtttttatataggtgaaactaaaataataggtaccatagaaaacaatgttcacacttatctaggtattccttttgcggagcctcctattggagagttgcgatgggaaaagactaaagcaaaaatatttaatgaagataaatattatgcaaataagtttgcatcagcatgcatgcaaggaccaagaattgtaaattggtataaaggcgttgctattggttttggtggtgatccaaattatatcgatatgccggatgtgagtgaagattgcctttatttaaacatgtgggtcccagaaaatattgagaaacaaaccaagctaccagtattagtatatattcatggtggctctaatagagcaggctggtcttttgaaccaaactatataggtgagaaattatccaaagaaggagtaatagtagttactgttgcatatagactgggcatatttggtttttattcgcaccctcaattaggtgtatctaattttgcattacttgatctaatagaatcgttaaaatggataaaaaagaatatttctaaagtaggcggagacccacataatgtaacaatttcaggtgagtcagcaggcgctacaaatgtagcccatttaatagcatcccccttaagtaaaaatttatttaaaagagcaatccaccaaagtgcaggctggtcaatttcagataaagattatattgaaagcaatgaacacataaagttatctaataaactatctgttgaattaactggttatgataacaaaagagctagtattaatgagctaaaaaaaattaactcaataaaattgctcaatcaagcagaaaagatttatggttatacaggctattatcctgtggtagacaatcattcaatactcgaaccgatttttacatcatttgatacaggaaattttaatcatgtcgatcttattattggaaccaactcagatgaagaactaatgtatttagctgaagattattatttatctaatttttatgatgaaagagaaagttgggggttttatgtagatgatgataaattaaatttaattgtagaagatattaaaagcgagaaaaaaaagcttaattatttattaacgtcgagaaattggacttgtccatcatcatttattgctaaatctttaactaagcatacaaataataatgtttggttttattcatttgatagggtaagagaaggtgaaaagagtaaagagatgggtgcttatcatggagcagaaataccttacatatttaatacacatgataaatggttgccaacctcaagaatagatgatcttataacaagaaaaatacaagcacattggataaatttcttaaaaaccggaaatccaaatactacctataaaacatggcatcaatttgattcagaaaagtttaatatattttcgtatgatagatactcgaagatgaagatcagtcaagcaaaaccggtatgtattgagttaggttattagc

SEQ ID NO: 240478 - DNA, 514 bp, Unknown
  Bacterial polypeptide expressing nucleotide sequence isolated from the Sargasso Sea
attgaagattactaagaaaatcttaagcgaagaacaaatacaagaaagaattattaaattagcaagtgaaattaacaccgactacgagggaaaaaatttaattatcttaggagtattaaaaggtgctttcattgcaataagtgatctggctaaaaatctaaatattgatgtttcttttgaatttatgagcatatcttcttatgaaggctctgagtcaacaggccaaataaaaattgaaaaagatttagatattgacattagtgggaaaaacattttaattgtggaggacatatttgatacaggcttaactctctcgtccttaattgatatattagaatctcgaaaccctaagagcattgaaattatgtgcatgtttgtaaaatctgtagagaaaaaaattcctgtaaaaataaagtataaaggttttgaaattggctcagaatttgtagttggctatgggcttgactatatgggtaaatatagagagcttccttatttagccgaattatcttag

SEQ ID NO: 240479 - DNA, 479 bp, Unknown
  Bacterial polypeptide expressing nucleotide sequence isolated from the Sargasso Sea
tatggagaattataaagttgatatcttaataagcgacaaagagattactgaaagggttagccagcttgggaaaattatatctgcatcatattcagatacaaataaattaatagtcgttgggttacttagaggatcattcatgtttattgcagatttagtcaggtgcttaaatattcctgtagaagttgactttataacagtttcatcttacggcagcgaaatgttttcaagtggtaacgtgaaaattttaaaagatttagacggcgatattaatggacatgatgtattattagttgaggatattgtagatactgggaaaacactcgaagcagttatagaaatgcttgaaacgagagttccaaattcaattaaggtttgcgctcttttaaacaaacaatcaaggaggatttcagatattaaagcagactggataggctttgaaattcctgatgaatttgttgttgggtatggaattgact

SEQ ID NO: 240480 - DNA, 423 bp, Unknown
  Bacterial polypeptide expressing nucleotide sequence isolated from the Sargasso Sea
ttattattggtgtattaaatggtagttttattttcttatcagatcttgtgaggttatttgattttgattgtgaaattgattttgtaaaagcgaatagttatgttggcaaagaatcatcaggcaaagtaaaattagataaagatgtatccatagatataaataatagaagagtgattttagttgaggatattattgatactggattaaccatggaatttttatacgaacatatcttatcttttggtccgaaagatattaccattgtgacattattatcaaaaaaaaataattataaattaaattttaaaatagattttataggttttgaaattgattcagactttattgtcggatacgggctagatttgaatcataaatatagaaatttagattcattgtacggattaaatagaaaaaattagt

SEQ ID NO: 240481 - DNA, 514 bp, Unknown
  Bacterial polypeptide expressing nucleotide sequence isolated from the Sargasso Sea
ttgaagattactaagaaaatcttaagcgaagaacaaatacaagaaagaattattaaattagcaagtgaaattaacaccgactataagggaaaaaatctaattattttgggagtattaaaaggtgcttttattgcaattagtgatttggctaaaaatttgaatattgatgtgtcttttgaatttatgagcatttcttcttatgaaggctctgagtcaacaggtcaaataaaaattgaaaaagatttagatattgacattagtggaaaaaacattttaattgtggaggacatatttgatacaggactaaccctctcgtcattaattgatattttagaatctcgaaaccctgagagcattgaaattatgtgcatgtttgtaaaatctgtagagaaaaaaattcctgtaaaaataaagtataaaggttttgaaattggttcagaatttgtagttggctatgggcttgactatatgggtaaatatagagagcttccttatttagctgaattatcttgaa

SEQ ID NO: 240482 - DNA, 514 bp, Unknown
  Bacterial polypeptide expressing nucleotide sequence isolated from the Sargasso Sea
attgaaaatttctaaaactttaatatcgcaagaagaaatagaaaataaaatttcggaaattgcagaaataataaatagtaagtataaagatgaagagcttgtaattattggcattctgaaaggagcttttatagttgtaagcgaccttgctaagcaacttcagattgatgttacctttgactttatgagtattaaatcttattacggatctgaatcatctggacaaattaaaattattaaagatttggagtatgacatttcaaataaaaatattttgatagtcgaagacatctatgacacaggattaaccctctcaagcttaaaaaaattacttgaatctagaaatccaaaaagtattgaaatttttagcatgtttgttaaaaaaggagtttcaaaagacccaattgaaatcgattacagtggatttgaaattggccctgaatttgtagtgggttatggtctagactacaacggaaaatatagagaattgccttatttagcccttctctcttaa

SEQ ID NO: 240483 - DNA, 529 bp, Unknown
  Bacterial polypeptide expressing nucleotide sequence isolated from the Sargasso Sea
atgcggataaataataaaaaattaataaaaattatagatgaagtatcgatacaaaaacgtgtaaaagagatagctatcgaattaacatctaagtttaaggataataaaccaatttttattggcgtattaaatggtagttttatttttatttcagatttggtaagaaatttaaatattaattgtgaaatagattttattaaagtatcaagttataaaggtcaggatactaccggtacagtaaagttgttaaaggatatatctgctgatattacaaatcgagatgttattattgttgaagatataattgattcaggattaactattgaattcctagtaaaaaggcttaaaggtgcttctccaaaaagtatatctatcgtaactttgttgctaaagccagatattgcaagattaggtttaccaatagatataattgggtttgaaattgcaccggattttgttgtaggatacggcttagattatgaccaagatttaaggcacttaccagagatttatagattggataaataaa

SEQ ID NO: 240484 - DNA, 529 bp, Unknown
  Bacterial polypeptide expressing nucleotide sequence isolated from the Sargasso Sea
tatgattgaacgagaaaatctaaaagaggtaatttccaaagaagaattgagctcaagaattgcggagattggtgccgagatatctaacgcttataatttagaatcagtagtttttattgtggttttaaatggtagttttatatttgcatcagatttgattagggccgtagatattgaatgcgaggtcgactttattaaagttacgagttattcaggaatgaaatcagagggaaaaattaattttgaaaaagatatatctactgaaatagctggaaaaaatatcattattgttgaagatattatagatagtggaaatactattaattttgtaaaagaatttattgataataaaaatccaaaatcgttgaaaatagctactttccttttaaaaactaaaattgcaaagctaagttttaagattgattgggtaggttttgaaatttcaccagaatttgttgtaggatatggcttggattataatcaaaaattgaggaatttaaatgcagtttatagacttggggggagttaa

SEQ ID NO: 240485 - DNA, 472 bp, Unknown
  Bacterial polypeptide expressing nucleotide sequence isolated from the Sargasso Sea
gcacttagctaaagagattgaattagagtttaaagaaacagacaagcttattgttgttgggcttttaagaggttcttttgtttttatagcagatttagttcgcgaacttaacttacctgttgaagtagattttcttgaggcatcatcttatggcgatgaaatggtttcatccaaggaggttaggattctaaaagacctcagagctgctattgaaggaaaagatgtccttctcgttgaggatatagttgatacaggttttacactgcatcatgtaaccaacttacttttatcaagaggcccagctaaattaaagactatagctttgcttgacaaaccaagccgacgtgagacagaaattaaagcagattggactggttttgaaataccagatgagtttgtcgtcggctatgggatagactacgcccagagaaatagaaacctttcttttatcgggaaagttcggttcatttaa

SEQ ID NO: 240486 - DNA, 516 bp, Unknown
  Bacterial polypeptide expressing nucleotide sequence isolated from the Sargasso Sea
aattgaagattactaaaaaaataataagtgaagaagagatacaagaaagaattattaatttagctaatgaaattaataatgattatcgagaaaaaaatttaatcatactaggagtattaaaaggggccttcattgcaattagtgatttagcaaaaaatttaaatattgacgtttcttttgagtttatgagtatctcctcctacgaaggctctgaatcaacagggcaaataaagattgaaaaagatttagatattgacattagtggtaagaatgttcttattgtcgaagacatatttgacacaggccttaccctttcatctttaatcgatatactaaaatcacgaaatccggaaagtattgaaattatgtgtatgtttgtaaaaccaattgagaaaaaaataccagtagaaataaaatataaaggctttcagataggttcagaatttgtagttggctatgggttggactatatgggtaaatatagagagctaccttatttagcagaattatcttaga

SEQ ID NO: 240487 - DNA, 424 bp, Unknown
  Bacterial polypeptide expressing nucleotide sequence isolated from the Sargasso Sea
tgatggtgggattgttaaaggctcagtcgtatttatggctgatctgtgccgccgtattaaaggccatgttgaaatcgattttatgtcggtttcgagctatggcaatgccatgaccagctcacgggatgtgaaagtgctgaaggatgtgcaatcggatatcgctggccgcgacgtgctgattgtggaagacttaattgactcgggcaacactttaaacaaagtgcgcgaaatgctgttattgcgtgagccaaagagcttagccctgtgcactctgttggataaacccgaacgccgtgaagtggatgttaaagtcgactttatcggttttacgatcccagacgagtttattgtgggttacggcatcgattatgcggagcaataccgcaacttgccttatatcgccaaagtggtgccgctcgaataa

SEQ ID NO: 240488 - DNA, 541 bp, Unknown
  Bacterial polypeptide expressing nucleotide sequence isolated from the Sargasso Sea
atgtcagagcgaccatatgtcattgatgaaatgatttctgcaaaagcaattgcggccagggtagaggagctatgcaaaaatattcagaatgaattcgtaggtacagataaactcattgtcgtgggtttgctgcgaggttcattcgtatttattgcagacttggtgcgtgaattagatctgccggtagaagttgatttcttggaagcatcgtcttacggcgatggtatggaaagctcaagagaagtgcgcatattgaaagacctgaggggtgcaattgaaggaagagacgtactggtcgtagaagatatagtcgatactggctatactttgagccatgtaatagcattactaaaatcgagaggtcctgctcggttaaaatcaattgctttactagataagccaagcagacgagagattgatgtaaaagcagattggacgggttttaagataccagatgagtttgttgttggttatggaattgactatgctcaacgcaacagaaatttggaccacattgggaaagtccgatttactggctaga

SEQ ID NO: 240489 - DNA, 553 bp, Unknown
  Bacterial polypeptide expressing nucleotide sequence isolated from the Sargasso Sea
atggtcaaggttgtgaaaaaaacaagatataaaattgatcaaatgatttcagcaaaaatggttgctgccagggtggaatctttggcggaggagatcactgaattttataaagatacagaacagttaatagttgttggactgctccgaggttcgtttgtctttatagctgatttagctcgcgaaatagaccttccagtagaaattgattttttagaagcctcatcttatggcaatgctatggaaagttcccgagaagtaagaattttgaaagacattaatggagaaatatctggcaaggatgtattagttgtagaggacatcgttgatactggtcacaccctaaatcacgtcttaaatttattgaaatcgcgagagccaaaaagaatagaagcttgtgcattgctagacaaaccgcttcgtagagaagttgaagtctattcgaaatggataggttttgaaattccagatgagtttgtcgttggatatggtattgattacgctcaaagagatagaaatttgtcatatattggtaaagtaagatttttagattgat

SEQ ID NO: 240490 - DNA, 418 bp, Unknown
  Bacterial polypeptide expressing nucleotide sequence isolated from the Sargasso Sea
atgaaaaaaaatataaaaccttattctgtagatacattaatttcagaaaaagaaataaagaaacgtattattgaattaggcaaagaggtaaaccttttctacaaggagacgaaaaaacttttagttgttggattattaagaggttcttttgtatttattgctgatttagtaagggagcttaaaatacctgttgaagttgattttatgactgcctctagttatggaaactctatgcaatcttcaaataatattagaattttgacagatttaaatacagatattaaaaatttagatgtactcttagtagaagatattattgacactggacacactcttaatcaagtaatcaaattacttaaaagtagaaaacctagaagtttagaagtttgttgcttgttaaataaattttcgcgacggg

SEQ ID NO: 240491 - DNA, 495 bp, Unknown
  Bacterial polypeptide expressing nucleotide sequence isolated from the Sargasso Sea
aatgaaactcaaaatttcatcaaagaaaattaaaacaagagtagaacaaataggccgtgagctatcacaagaatataagcaggaaaaccctatctttattggagttttaaatgggagctttatgtttttatctgatttaattagagcattatctattgaatgtgaaatatcttttcttcaattaaaaagctatgatggtaaaaaatctacaggaagtgtagatataataaaggattttgacgttagtttaaaaaataggcatgttgttatagtagaagatataatagatacaggaaccactttgaaatttcttttaaataaaattaacgaaatccctataaaatcaataagaatagtgactctacttgttagagatattgaaaggccttttgaatttacaattgatcatattggttttgaaatttctcaggaatttgttgtaggatatgggctagattacaatcaaaaatttaggcatttagatagtatttatgt

SEQ ID NO: 240492 - DNA, 532 bp, Unknown
  Bacterial polypeptide expressing nucleotide sequence isolated from the Sargasso Sea
atgaaacacaccaccgaagtgatgatctccgctgaagagattagccaaaaattggatcaaatggctgagcaaatcaatgcccactatgccaacagcgagcgtttgctgatggtgggattattaaaaggctcagtcgtatttatggctgatctgtgccgccgtattaaaggccatgttgaaatcgattttatgtcggtttcgagttatggcaattccatgaccagctcacgggatgtgaaagtgctgaaggatgtgcaatcggatatcgcgggccgcgacgtgctgattgtggaagacttgattgactcgggcaacaccttaaacaaagtgcgcgaaatgctgttattgcgtgagccaaagagcttagccctgtgcactctgttggataaacccgagcgccgcgaagtggatgtcaaagtcgactttatcggttttactatcccagatgagtttattgtgggttacggcatcgattatgctgagcaatatcgcaacttgccttatatcgctaaagtggtgccgctcgaataag

SEQ ID NO: 240493 - DNA, 541 bp, Unknown
  Bacterial polypeptide expressing nucleotide sequence isolated from the Sargasso Sea
catgaaaaaaatcgacgataatttaattagtctttactcgtcatctgatattaagaatagagtagaagagttaggttcggaaatatctgaagaatatgaaaaaaaagagcctatttttattggcgtattaaatggtagttttatttttatggctgacctcatgagatccttatcgatagattgtgaaatggatttcataaaagtccgtagttattctggtaaaaaatcatccggaacaatccagcttttaaaggatatatcagctgatgtaaaagatagaaatataattttagttgaagatattatagataccggccttacgataaagtttctacgtgaaagattatttggttcatcaccaaaatcaattgcaatcgcaactttgttgtataaacctagtgtagcaaaaattgattttaaaatagattatattgggtttgaaattcctcaggaatttgttgtaggatatgggttagattatgaacaaaaaatgagacatttaagtggcttatatatgataaaaaatgatttatcagaatga

SEQ ID NO: 240494 - DNA, 532 bp, Unknown
  Bacterial polypeptide expressing nucleotide sequence isolated from the Sargasso Sea
tatgaaacacaccaccgaagtgatgatctccgcggaagagatcagccaaaaattggatcaaatggccgagcaaatcaatgcccactatgccaacagcgagcgtttgctgatggtgggattattaaaaggttcagtcgtatttatggctgatctgtgccgccgtattaaaggccatgttgaaatcgattttatgtcggtttcgagctatggcaatgccatgaccagctcacgggatgtgaaagtgctgaaggatgtgcaatcggatatcgcgggccgcgacgtgctgattgtggaagacttaattgactcgggcaacactttaaacaaagtgcgcgaaatgctgttattgcgtgagccaaagagcttagccctgtgcactctattggataaacctgagcgccgcgaagtggatgttaaagtcgactttatcggttttacgatcccagacgagtttattgtgggttacggcatcgattatgctgagcaataccgcaacttgccatatatcgccaaagtggtgccgctcgaataa

SEQ ID NO: 240495 - DNA, 508 bp, Unknown
  Bacterial polypeptide expressing nucleotide sequence isolated from the Sargasso Sea
cctgatcaccgagaccgagatcgcggcgcgaacaacgcagctggcaaggatgatcaaggaacaatatcgtgacaccgaacagcttgtggtcgtcggcctgcttcgcggttcttttgtattcatcgcggatctggtgcggcggctcgaccttccagtcgaagtcgatttcatgaccgtgtcgagctacggcgacaaaatggaatcatcgcgccaggttcgaatcattcaggatctggaaactccgatcaagagacgcgacgtgctgatcgtcgaggacatcatcgacactggccacacgttgtcacaggtctatgacattctcgaaacgcgcgaaccgcgttcactccgcgtctgcgcgctgctgaacaagccgtcacggcgcgaggtcgatgtcgagatcgactgggtcggcttcgaaattccagacgagttcgtgatcggctacggcatcgacttcgcgcagcaggggcgcaacctaccgcatatcggcgtggtcgtcaggaaatag

SEQ ID NO: 240496 - DNA, 391 bp, Unknown
  Bacterial polypeptide expressing nucleotide sequence isolated from the Sargasso Sea
atgactgtgctttccaatcagcaagatattgaaattcttatcactgaagcggaaattgccgcgcgcacaaccaaactagcgcgcaaaattaccgagcattatgctggcacccaacagctggtcgttgtgggattgttgcgcgggtcctttgtctttatcgccgatctggtgcgccgaattgacttgccggttgaagtcgatttcatgaccgtatcatcttatggcaataaaaaagaatcctctcgccaagtgcgcattattcaggatttggaaacctcaatcgccggacgcgatgtgttgatcgtcgaagatattatcgatacgggtcacaccctgtcgcaggtgctgaagattttgaaaacacgccaaccaaaatcactgcgcgtatgca

SEQ ID NO: 240497 - DNA, 340 bp, Unknown
  Bacterial polypeptide expressing nucleotide sequence isolated from the Sargasso Sea
gactgtttctagttatggcaactcaatgtcatcatcagaaaatgtaagaattttaagtgatttaaatactgatattaaaaatatagatgttttattagtagaggatattattgatacagggtacactttattccaggtgattaagttattaaatggaagaaaacctaattcgttagaagtttgttgtttattaaataaatcttccaggagagaaactgacattgacataagatggagtggatttgatattccagatgagtttgtagttggttatggtatcgattatgctcaaaataaccgtaatcttccctatataggtaaagttattaaagcaaattaa

SEQ ID NO: 240498 - DNA, 535 bp, Unknown
  Bacterial polypeptide expressing nucleotide sequence isolated from the Sargasso Sea
tatgactaaaaattatgatgtccaagttttaatcgatgaattaaaaattaaaagtagaataaaagtcctaagtagcgaaataaatcaattttatacgaatacaaataaactgttagtggttggtctgttaagagggtcttttgtctttatagctgatttagcaagagaaattaaagtaccagtagaaattgactttatgacagtttctagctatggaaactctatggtaacctctcataatgttcgcatattgagtgatttaaatacagacataaaaaatactgatgttcttcttgtagaagatatcatagatactggccatactcttaaccaagtaattaaaatgctcaatgaaagagagccaaagtccttagaagtttgttgccttttaaataaatcatcaagacgagaaacagatataaatgtcaactgggtaggttttgacatacctgatgaatttgtagttggctatggaattgattatgcacaaaatgatagaaatttaccttacattgggaaagtagttcaatcaaat

SEQ ID NO: 240499 - DNA, 532 bp, Unknown
  Bacterial polypeptide expressing nucleotide sequence isolated from the Sargasso Sea
gatgaaacacactgtcgaggtgatgatctccgaggctgaagtcgccgcccggatcgccaaattgggtgaagagatcaccgcccgttatcagggctctgacgaagtggtcatgatcggcctgctgcgtggttcctgcatcttcctggccgacctgtgccgccagacccagctgcccatcaccctggattttatgaccgcctccagctatggctccggcatgcacagcacccgtgacgtgcgcatcctcaaagatctggatgacgacatcaaagggaaggacgtggtgatcgtcgaagacatcatcgataccggctacaccctcaacaaggtgcgcgagatcctctctctgcgcgagccgaaatccctggccatctgcaccctgctggacaagccgtcccgccgcgaagtgcaggtgccggtagactggatcggtttctccattcccgatgaattcgtggtgggctgcggcatcgactatgcccagaagtaccgcaatctgaagttcatcggcaaggtagtaccgcaagagtaa

SEQ ID NO: 240500 - DNA, 325 bp, Unknown
  Bacterial polypeptide expressing nucleotide sequence isolated from the Sargasso Sea
gttgcaggatgaggagacagctcaacccaagctcttttatgctaaattgcccgatgacattgctcagcgatatatccttcttctagaccctatgcttgctactggaggttcatgtatcaaggccatcgaggttcttcttgaccaaggtgtccaagaagagaagatactctttttgaacttgattgcttcgccagagggcatcaacaaagtttgcactcgcttccccaagcttactattattactgcttgggtggacgagggccttgacaaccattcctacattgtccctggtcttggtgactttggagacaggtacttcctgtga

SEQ ID NO: 240501 - DNA, 376 bp, Unknown
  Bacterial polypeptide expressing nucleotide sequence isolated from the Sargasso Sea
atgcttacattaatcaaatctccattcctagaatataaattaacaattcttagaaacaaaagaacaaaaaattctctttttagacaaactatgaatgaaataagctatttaattgccgcagaagtattaaaacatataaaatttaaaaaaataaagatacggaccccaatacaaaatactagcggtagcgaaattttcaaccccattattattgttccaatattaagagcaggccttggattagttgaagggtttgttaaatttttacccaatgtagaaaaaggccatattggtctctatagagatgaacagacatatcaacctgtggagtatctgtgcaaattaccaaaagtaatcaataggactattctagttc

SEQ ID NO: 240502 - DNA, 610 bp, Unknown
  Bacterial polypeptide expressing nucleotide sequence isolated from the Sargasso Sea
gaaatttcacacccccttaaagaccactatttatcaattttaagaaacaaagatacagattttgatacatttagaatatctgcatcaaaattatcctatcttttagcagttgaagctactaagcatctatcacttaaaaatatagaaattgaaacaccattagttacaaccagtgcttatgaaattgaaaacaattctgttgctatatctgttttaagagctggattagggttagtcgatggagtaaaagatttaattccaaatgtatcttttggctacattggagttcaaagaaatgaagaaacagctgaacctgaaaattattatgaaaaattaccagaattaaatgataagaatgtttttattttagagcctatgcttgcaacaggggggtctctttcctttgctattgaaacagtaaaaaaatataatcctaaaaatattcatgctctaactgttatagctgctccagaaggaattgaattaattaaggaaaaacatgcagatattactttgattacagcatctatagatgagaagcttaatgaaagttggtatatcgttcctggtcttggtgatatgggcgataggctttttggcacaacttaat

SEQ ID NO: 240503 - DNA, 301 bp, Unknown
  Bacterial polypeptide expressing nucleotide sequence isolated from the Sargasso Sea
tatggtacaacatcttactgtcgttgatcatccactggtacaacataaacttacactaatgagaaaaaagacgacttcaacggtagagtttagacagcttctaagggaaataagtcaatttttagcttatgaaattactagaaatttacctatgactacaagacgaatagaaactcctattgaagaaatggatgcaccaacactagatggaaagaagttagcattaatttcaattctacgcgcaggaaacggacttctagacggtgttttggagttggttccatcagctagagttggtttt

SEQ ID NO: 240504 - DNA, 172 bp, Unknown
  Bacterial polypeptide expressing nucleotide sequence isolated from the Sargasso Sea
ctatatccgttttgtctgcttactggctgctccggaaggggttgagtattttaataaaatccatccggatgtgaagatcttcactgcagcacttgatgacaaactgaatgatcatgcctacatcctgcccggcctgggtgatgctggagaccgaattttcggtaccaagtaa

SEQ ID NO: 240505 - DNA, 442 bp, Unknown
  Bacterial polypeptide expressing nucleotide sequence isolated from the Sargasso Sea
ggaacaaaaaattgtgatcaaagcttcaagcggactttcagatgaagaaattgaaaaaatgatttcagaagccgaagcaaatgcagacagcgataaggacttcagagaattagtcgacattaaaaatcaggccgatcaagttatacatgccactgaaaaatccctagaagatctcggagagaaagtgacaaatgaggaaagatcaactgtcgaatctgctttaaatgacttaaaagatgctctcaagtcagatgaaaaagaaaaaattgaatcgaaacttaagacgctttcggaagcatctgttggtattgctcagaaggcatttgaagaggctcaggcaagcactgatgatgaaacgactgaaactgattcaaaggatgaaaatgtagttgatgctgaatatgaggaagttgattctgaagagaataaaaatactcattaa

SEQ ID NO: 240506 - DNA, 569 bp, Unknown
  Bacterial polypeptide expressing nucleotide sequence isolated from the Sargasso Sea
actgggacgatttgatttaactgatatacccagtaaaccaagaggtatgccacaaattgaagttgcttttgatattgatgccaatggaataataaatgtttcagccacggacaaagaaaccggcaaggaacaaaaaattgtgatcaaagcttcaagcggactttcagatgaagaaattgaaaaaatgatttcagaagccgaagcaaatgccgacagcgataaggacttcagagaattagtcgatatcaaaaatcaggccgatcaagtcatacatgccactgaaaaatccctagaagatcttggagagaaagtgacaaatgaggaaagatcaactgtcgaatctgctttaaatgacttaaaagatgctctcaagtcagatgaaaaagaaaaaattgaatcgaaacttaagacgctttctgaagcatctgttggtattgctcagaaggcatttgaagaggctcaggcaagcactgatggtgaaacgactgaaactgattcaaaggatgaaaatgtagttgatgctgaatatgaggaagttgattctgaagagaataaaaatactcattaat

SEQ ID NO: 240507 - DNA, 97 bp, Unknown
  Bacterial polypeptide expressing nucleotide sequence isolated from the Sargasso Sea
gcgggcctcgatagccaccttgaccaaaatgcatacatcgtgcccggtctaggcgacgctggtgatcgcctgttcggcacgcctgcaaaatattgac

SEQ ID NO: 240508 - DNA, 391 bp, Unknown
  Bacterial polypeptide expressing nucleotide sequence isolated from the Sargasso Sea
aatgattacagtaattaaatcccaatttgttcagcataaactaacaatattaagaagtaaaaaaacttcaaatactgtttttagacaaacaatgaacgagacaagttatttaattgcagcagaagtattgaagtatcttccttataaaagaaccaaagtccagacccctcttaagaacaccaatggaataatcctttctaaacaaataatactagttccgatattaagagcaggtttaggattacttgagggttttgctaaatttcttcctgatgttgaaaagggtcacattggtttatatcgcgatgagcaaacttatgaacccgtagagtacctatttaaattgccaaagataaaaaacaaaaaaattctaatattagaccccatgctt

SEQ ID NO: 240509 - DNA, 89 bp, Unknown
  Bacterial polypeptide expressing nucleotide sequence isolated from the Sargasso Sea
gtcgctcgattcgcacctgaacgagcaagcgtacatcgtgccgggcctcggcgacgcgggcgaccgcctgttcggcaccaagaactgag

SEQ ID NO: 240510 - DNA, 172 bp, Unknown
  Bacterial polypeptide expressing nucleotide sequence isolated from the Sargasso Sea
aatattaaactttgtatctttgttggcagctccagaaaggtattaaaaaatattcgtaaaaatcataaggatctccatatttttacttgtagtcttgataagggactaaacaagaaaaaatatatagtgcccggtcttggagatgctggcgataggtatatgggcacctaat

SEQ ID NO: 240511 - DNA, 412 bp, Unknown
  Bacterial polypeptide expressing nucleotide sequence isolated from the Sargasso Sea
ggactttcagatgaagaaattgaaaaaatgatttcagaagccgaagcaaatgcagacagcgataaggacttcagagaattagtcgacataaaaaatcaggccgatcaagttatacatgccactgaaaaatccctagaagatcttggagagaaagtgacaaatgaggaaagatcaactgtcgaatctgctttaaatgacttaaaagatgctctcaagtcagatgaaaaagaaaaaattgaatcgaaacttaagacgctttcggaagcatctgttggtattgctcagaaggcatttgaagaggctcaggcaagcactgatagtgaaacgactgaaactgattcaaaggatgaaaatgtagttgatgctgaatatgaggaagttgattctgaagagaataaaaatactcattaat

SEQ ID NO: 240512 - DNA, 830 bp, Unknown
  Bacterial polypeptide expressing nucleotide sequence isolated from the Sargasso Sea
attcgtcaatatctcttagaccaactggcctatttcttaacccgagacctcccgctagaaaaaaaagttcttcgaatcttccaggatgcccttgcggattttgaactgagtcccaggcaaatcagtagttggctgaagagactgggacttcatcaacttgcagggaaacctgaaatcgccgttcaaacgacccacgattatgtccggactgctttgctggactgcacagaagatcatgccctatttcatttccaccgaccgctggttaggggtgtcttcataatgctcgaattgaaaaaagactgccggaccgaagcttttcactcccccctgcatgccacagtaaaaaaagtcagggtgaatcctctgaaagaatcggaataccaggtccaggtcgaattccagcaattgctcgaggaaaaacatgggattcttgatttactcaaaccaccttcccaaagtaccgaccaatttctggaattcggagacattccctcccccagccgatctctgaaattgaaactggtaggctgtccactttgtgaggaaacccgccttccgttttggtctttgaaaccaggagcgatccgggaaagcagaaatgtttttggattccccgtctatcactcaccctatccgggatttgaggagtgtgattttcaccgattacgggttacggtctgcccgagatgtttttatgcttcatccaggattgaggattttatagtccaggccggggagccttttcaaaaggaccgggtgatgatcaggaaactctggagtcattcctgtcctgaattgaaaaaaactctgaatgaactacccagccg

SEQ ID NO: 240513 - DNA, 652 bp, Unknown
  Bacterial polypeptide expressing nucleotide sequence isolated from the Sargasso Sea
gatgagtgagagtttacaaattatttcgcatcctgttgtacaacataagttgggtcttctaaggaaagttgaaacaacttctccagagtttcgtctcattgtgcagcaattgagtcctctactagcttatgaagcttgcagggactggcttcatcaggaagaaaaagaggttttaactcctatggaggaagttgctaaagcaaacttcatcattgattggccagttcttgtttctataatgagggcgggtaacggcatgctagacccaattctttcccttttttcctctagtgctgcggggcatattggcatctatagagacaaatttataaagaatactgtcgagtattattttagattgcctgacaatgttcaagataaaaatatccttttgcttgatccccttgttgcgacggccgacactgtaattgcttcaattgataggttgaagcaatatgatgttggtgaaattaggatgctaactcttttgatatccagtcttggtgcatcaaaaattaagagttttcaccctgatgtgaaaatatttgcagctgggtgtcaagaagagcttgattcgaatggatatcttgttccagggttgggagatgccggtgaccgcctttaccagattaataatggaaaacatttgtaa

SEQ ID NO: 240514 - DNA, 1561 bp, Unknown
  Bacterial polypeptide expressing nucleotide sequence isolated from the Sargasso Sea
aatgaaagaaaccgcagagagctatcttggtgagtcaatatctgaggcagtaattactgttcctgcatactttaatgactcacaaagacaagccacaaaagatgctggaaaaattgcaggtttagaggttaaaagaattatcaatgaacccactgcagcagcactggcatatggcatggataagaaacgtggcgataaaaaaatcgccgtctatgatttgggtggtggtacatttgatgtatcgattatcgaaattgccgatgtcgatggagaaaatcaatttgaagtactcgcaacaaatggtgatacattcctcggcggcgaagattttgacctgagagtaattgatcatttgcttggtgaatttcaaaatcaaacaggtatggatatatcaagcgatccccaagcagttcaaagattgaaagaagcagctgaaaaagcaaagattgaattatctaatcaagcacagacagacattaatctgccataccttactgccgatgcttctggccctaaacatctaaaccttactttgacaagagcaaagctagagacattggttgaagatttaatcgttcaaacaatagaaccatgcaagactgcactcagtgatgctgggttatcaaccagtgaaatcaatgacgttattcttgttggcggtcaaactcgaatgcctaaggttgtagaagaggtaaaatcattttttggcgttgagccaagaaaagacgttaatccggatgaagcggtcgcaatcggtgctgctattcaaggcggcgttctttctggggatgtcaaagatgtcttactattagatgtaacgccattgtcattgggtattgagacgcttggaggtgtgacaacaagattaattgaaaaaaacaccacaatccctacaaaagcagagcaaatattttctacagctgaagataatcagacagcagttacaattcatgtgctccaaggagagcgtgaaagatctcaggacaataagtcactgggacgatttgatttaactgatataccaagtaaaccaagaggtatgccacaaattgaagttgcttttgatattgatgccaatggaataataaatgtttcagccacggacaaagaaaccggcaaggaacaaaaaattgtgatcaaagcttcaagcggactttcagatgaagaaattgaaaaaatgatttcagaagccgaagcaaatgcagacagcgataaggacttcagagaattagtcgacattaaaaatcaggccgatcaagttatacatgccactgaaaaatccctagaagatcttggagagaaagtgacaaatgaggaaagatcaactgtcgaatctgctttgaatgacttaaaagatgctctcaagtcagatgaaaaagaaaaaattgaatcgaaacttaagacgctttcggaagcatctgttggtattgctcagaaggcatttgaagaggctcaggcaagcactgatagtgaaacgactgaaactgattcaaaggatgaaaatgtagttgatgctgaatatgaggaagttgattctgaagagaataaaaatactcattaa

SEQ ID NO: 240515 - DNA, 568 bp, Unknown
  Bacterial polypeptide expressing nucleotide sequence isolated from the Sargasso Sea
actgggacgatttgatttaactgatatacctagtaaaccaagaggtatgccacaaattgaagttgcttttgatattgatgccaatggaataattaatgtttcagccacggacaaagaaaccggcaaggaacaaaaaattgtgatcaaagcttcaagcggactttcagatgaagaaattgaaaaaatgatttcagaagccgaagcaaatgcagacagcgataaggacttcagagaattagtcgacattaaaaatcaggccgatcaagttatacatgccactgaaaaatccctggaagatcttggagagaaagtgacaaatgaggaaagatcaactgtcgaatctgctttaaatgacttaaaagatgctctcaagtcagatgaaaaagaaaaaattgaatcgaaacttaagacgctttcggaagcatctgttggtattgctcagaaggcatttgaagaggctcaggcaagcactgatagtgaaacgactgaaactgattcaaaggatgaaaatgtagttgatgctgaatatgaggaagttgattctgaagagaataaaaatactcattaa

SEQ ID NO: 240516 - DNA, 622 bp, Unknown
  Bacterial polypeptide expressing nucleotide sequence isolated from the Sargasso Sea
atggaacttattgaaatttcgcaccctcttaaagatcactatttatcaattttaagaaacaaagatacagattttgatacttttagaatatctgcttctaaattatcatatcttttagcggttgaagctactaaacacctttcacttaagaatattgaaatcgaaacaccattggttacaaccagtgcttatgaagtcgaaaacaactctgttgctatctcagttttaagagctggtttaggattagttgatggagtaaaagatttaattccaaatgtttcttttggctacattggagttcaaagaaatgaagaaacagctgaacctgaaaattattatgaaaaattaccagaattaaatgataaaaatgtttttatattagaacctatgcttgcaacaggaggctctctttcatttgctatagaaacagttaaaaaatacaatcctaaaaatattcatgctctaactgttatagctgctccggagggaattgaattaataaaggaaatgcatccagatataactttgataacagcatctatagatgagaagcttaatgaaaattggtatatcgttcctggtcttggcgatatgggtgataggctttttggcacaacttaaa

SEQ ID NO: 240517 - DNA, 1556 bp, Unknown
  Bacterial polypeptide expressing nucleotide sequence isolated from the Sargasso Sea
aagaaccgctgagagctatcttggtgagtcaatatctgaggcagtaattactgttcctgcgtattttaatgactcacaaagacaagccacaaaagatgctggaaaaattgcaggtttagaggttaagagaattattaatgaacccactgcagcagcactagcatatggcatggataagaaacgtggcgataaaaaaattgccgtctatgatttgggtggcggaacctttgatgtatcgattatcgaaattgccgatgtcgatggagaaaatcaatttgaagtactcgcaacaaatggtgatacatttcttggtggcgaagattttgatctgagagtaattgatcatttgcttggcgaatttcaaaatcaaacaggtatggatatatcaagcgatccccaagcagttcaaagattaaaagaagcagccgaaaaagcaaagattgaattatcaaatcaagcacagacagacattaatctgccataccttactgctgatgcttctgggcctaaacatctaaaccttactttgacaagagcgaagctggaaacattggttgaagatttaatcgttcaaacaatagaaccatgtaaaactgcactcagcgatgctgggttatcaaccagtgaaatcaatgacgttattcttgttggcggtcaaactcgaatgcctaaggttgtagaagaggtaaaatcattttttggcgttgagccaagaaaagacgttaatccggatgaagcggtcgcaatcggtgctgctattcaaggcggcgttctttctggggatgtcaaagatgtcttactactggatgtaacgccattgtcattgggtattgagacacttggtggtgtgacaacaagattaattgaaaaaaataccacaattcccacaaaagcagagcaagtattctctacagctgaagataatcagacagcagttacgattcatgtgctccaaggagagcgtgaacgatctcaggacaataaatcactgggacgatttgatttaactgatatacctagtaaaccaagaggcatgccacaaattgaagttgcttttgatattgatgcaaatggaataataaatgtttcagccacggacaaagaaacaggcaaggaacaaaaaattgtgatcaaagcttcaagtggactttcagatgaagagattgaaaaaatgatttcagaagctgaagcaaatgcagacagtgataaggacttcagagaattagtcgatatcaaaaatcaggccgatcaggttatacatgccactgaaaaatctctagaagatcttggagagaaagtgacaaatgaggaaaggtcaactgtcgaatctgctttaaatgacttgaaagatgctctcaagtcagatgaaaaagaaaaaattgaatcgaaactcaaaacgctttcagaagcatctgttggtattgcacagaaggcatttgaagaggctcaggcaagcacagatagtgaaacgactgaaactgattctaaggaagaaaatgtagttgatgctgaatatgaggaagttgattctgaagagaataaaaatactcattaat

SEQ ID NO: 240518 - DNA, 385 bp, Unknown
  Bacterial polypeptide expressing nucleotide sequence isolated from the Sargasso Sea
gatgagctgccaacggcaattgaaaattcttgatcacccacttatacagcataaactgactttaatgagaagtgtggaaacaccgtctcatagcttccgccgacttttgaaagaaatttctattctaatgtcatacgaagtcttcagtgacttgcctctccaaaatatacatacgaataccccgatgcaatcaatggagtcgccagttttaagtgaaaacactgtatgcctcgttcctataatgcgcgctggaaatggaatgctagatggatttattgaaattgtttctaatgctttggtaggacacattggcctttacagaaacaaagaaacgcttaaagcgcatgattattacataaatcctccccaagccatcgatgttgga

SEQ ID NO: 240519 - DNA, 496 bp, Unknown
  Bacterial polypeptide expressing nucleotide sequence isolated from the Sargasso Sea
atgaatatacctgataactttcatattgtagatcatgccttattaaagcataaactttcaattttgagggatattaatactcgatcaaaagaatttcgtgaactaacaagagagataactagtttgcttgcatatcaagcaacaaaagaactccatacatctatgtatgacattcaaactcctattactactgcaaagggctataaagttgaattagataatattatattaattccagttcttagagctggattaggtatgctacaaggcatgttagacctaattccaaactcttgtgtgggttatataggaatggaaagagatcataatacgcatttacctgtagattattattttaaaatacctaaagaagccgataaaaagacctttattatattggatcccatgcttgcaactggcggtacaatgatcgctgctatagatagacttaaaaagcttggagcaaatgacattttatcaatatctataatatcat

SEQ ID NO: 240520 - DNA, 622 bp, Unknown
  Bacterial polypeptide expressing nucleotide sequence isolated from the Sargasso Sea
atggaacttattgaaatttcacaccccctaaaagaccactatttatcaattttaagaaacaaagaaacagattttgatacatttagaatatctgcgtcaaaattatcctatcttttagcagttgaagctactaagcatctatcacttaaaaatattgaaattgaaacaccattagttacaactagtgctcatgaaattgaaaacaactctgttgctatctctgttttaagagctggattaggattagtcgatggagtaaaagatttaattccaaatgtctcttttggctacattggagttcaaagaaatgaagaaacagctgaacctgaaaattattatgaaaaattaccagaattaaatgataagaatgtttttattttagagcctatgcttgcaactggaggatctctttcctttgctattgaaacagtgaaaaaatacaatcctaaaaatattcatgctttaactgttatagctgctccagaaggaattaaattaattaaggaaaaacattcagatattactttgattacagcatcaatagatgaaaagcttgacgaaaattggtatatcgttcctggtcttggcgatatgggtgataggctttttggcacgacataaa

SEQ ID NO: 240521 - DNA, 133 bp, Unknown
  Bacterial polypeptide expressing nucleotide sequence isolated from the Sargasso Sea
aatgaaagaattttgtaatcaacatcaagatgttgatatatatactggtgcattagatgaaaaacttaataaaaataaatatatagtcccgggcctaggagatgctggagatcgactttatggtacagaataa

SEQ ID NO: 240522 - DNA, 1327 bp, Unknown
  Bacterial polypeptide expressing nucleotide sequence isolated from the Sargasso Sea
tatggtttttgatattcaagaaaattatcaagatgagcagtactcaattcatgtaaatgaaaaaatacatgtcaaaggaggaagttacagagcacttgctatggctaaaagctctctacttcaaatacttattaaaaataaaggatctttagcttttccgctagttgaaataaatgacaatccagattcggagtacagaggattattgatagatttagctagaatgtggcatgatattccaacactaaaaaatataattgatatggctgcattttataagataaatcatattcaattacatctaagtgatgatcaatcatttacatttccaatggaaaaatatcccaaaatagccacccctgatagaccttattcaaagaaggatttcagagaattagttaaatatgctgatgacagagggataattataataccagaacttgacgtcccaggtcactctagacaactagttgagatatatccagaaatttttggagtaaacaatggctttttacaaatcaacccttggaaatctaatgttattaatattgcaagtgaaaaggtttatgaagcaatagatgatatgattggagaaattgttgaggtctttgatacctctccttattttcatattggaggggatgaggcaaatcttgatttatataaaaatgttccagaggtaaaagattttatgaaaaaaaatggtattgaaaatgatgtgcatgaattattcagatattttttagttcgaatgaataaaattgtaaaaaaacataataagaagatgttcttatgggaaggatttagacgtgaggggaaaattgaaatacctagagatgttgttgtttttgaatttgaaactatgtatcatcttccaaatcatcttattgaagatggattcactgttgtaaatacttcttggcaacctctttatcttgttagtggaggactaaaacaacccagatcaagaagagcgatgtggtctccagaaaaaatttattcatggaatatttggagatgggagcattggtgggaaaatacacctgtatataaaaaacctatgcaattagaggaaacctcacaaataataggtgctcagatgtgctcatgggagcaagctggagaagcggaaatcccaactctcagaaaaagattaccagtttttattgaaagagtatggaataataaacaaaaaatcccttttgagaaatttttcccaacagtagaaaaaaatgatttcaaactttctaaaataataaatgataaaagacaagatacgctactattaggatatgattttgaaggtgattgcctttggtgtgactaa

SEQ ID NO: 240523 - DNA, 414 bp, Unknown
  Bacterial polypeptide expressing nucleotide sequence isolated from the Sargasso Sea
gccagtggcctgccgacgacagcctgcaccgcatggtggtactgacgggcggcgagcctttgctgcaggtcgatgaggccctgatcgccgccctgcatgcgcgcggttttcgtatttcggtggaaagcaacggcacggtggccgcacccgagggcatagactggctgtgcatcagccccaaggccggcgccgactggattcagcgcagcggccaggaactcaagctggtctggcctcagcccacattcgatctggcggccattgaagccagcaccgatttccagcactattttctgcagcccatggacaacgcccagcagagcggcaatattaccgcctgtatcgagcaatgcatgcaacgccccggctggcgcctgagcctgcaaacccacaagctcactggaattagatgac

SEQ ID NO: 240524 - DNA, 628 bp, Unknown
  Bacterial polypeptide expressing nucleotide sequence isolated from the Sargasso Sea
tatgtctgtaaaaattttaaatcatccgcttattgatcatcatatgaataaactaagatcaaaagatacaaacaactttgattttcgaattagtgccaaaatagtttcaaatttaatgggatatgagatttttaaaactttgagtactgaaaatgtacaaattaatactcctcttgaaaaatttaagggtagagaagttaaaaaaccatttccatgtttggtatcaattttaagagcaggttcaataattgttgacggattgcttgaagtattaccgaattgttcagttggacatattggcatttatagagatcataaaactttattaccaaaagactatttaacaaaattacctaataatattcataaaaaaaaagtttttttatgtgatccaatgctagctactgggggcagtgcaataagggctattgaggttttaaatgaaaataattgttacgacattagtttaatttgtctattagcttgtgatgaagggataaatttaactttaaaaaaatatcctaaaaccaatatttttgccgctcaaaaggatcctgtattaaataaaaaagggtatattttacctggtctaggagatgctggagatagaatttatggtacagaataa

SEQ ID NO: 240525 - DNA, 443 bp, Unknown
  Bacterial polypeptide expressing nucleotide sequence isolated from the Sargasso Sea
tatgttaattgccccaaaaaatgtagtagaagttaaacacccgctgttgcaacataagttatccttgatgagggataaaaaaactcgttcagttatttttagggctttgatgaaagaagcaggtatgattttgggtgttgaagctactaaagaattaaaatcatatgaaaaaaatatctctacaccattagaagatatgagcgcaacttttttaaaagaaccagagccagctgttgtttctattcttcgtgctggtaatggtttacttgagggactgctccaaattttgcccaatgctgctgtaggatttctaggcatgtctagagaccatgatacacttatgccaatagactattaccaaaaccttcctgcaaatatgtcagataggtcagttattatagtagatccccatgcttgctacagctggaagtgggatagaagct

SEQ ID NO: 240526 - DNA, 595 bp, Unknown
  Bacterial polypeptide expressing nucleotide sequence isolated from the Sargasso Sea
gttggtccaaacccgattggccacgctaaggaatgtcgataccgacatggaaacctttaggcgagcattgggccaaatcggcttgatgctgttgaccgaggcactgcggccattggaaaccaaaacccatcgcgtccggacgcctttggctcgcaccaccggtcaccgtttgcgaagagaaatcctgcttgtgcccattcttcgcgcaggccagggcttggtcggtttggcggatcaactcctccccgaggcgcgccttggctatcttggcatggttcgcaatgaggcgacgttgcagcccgaatgttatctcgaaaaactgccgccgcgcttgaggcggtatgaagtgatgatctgtgatcccatgctcgccaccggcggcagtgccgtggcggccggccaattgcttcagcaacggggcgcggaacgactccattttctccatgccttggccgcgcccgaaggggtgcgagccctgcgcaaagcatttcccaacgaaccggtttacctcggtgcggtcgatgagcggttgaacgagcacggctatattcacccgggcctgggcgatgcgggtgaccgttgttttggtacttga

SEQ ID NO: 240527 - DNA, 475 bp, Unknown
  Bacterial polypeptide expressing nucleotide sequence isolated from the Sargasso Sea
tatgattacatctattaaatcatctttcttagaatacaaaatgactattttaagaaataaaaaaacttctaactctttatttaggcaaactatgaatgaagctagttatttaatagctgcggaggtgcttaaacatctacaatataaaaaaatttctgttcaaacacctttaaccaaaactacaggaacagatttggctcaacaggttatattagttccaatcttgagagcaggattaggtttgttagaaggttttgtaaaattcttacctgatgcagaaaaagggcatattggattatatcgcgatgagcagacttatgagcccgtcgaatatttgtttaaacttcccaaaacaaaagataaaaaagtattggttttagatcccatgttggcaactggcaactcatctatagcggctattaatttaattaaaaacaagggagtaaaggtaaaagatatttttttagtatcttta

SEQ ID NO: 240528 - DNA, 617 bp, Unknown
  Bacterial polypeptide expressing nucleotide sequence isolated from the Sargasso Sea
aatggaagttttgatagttgatcatcccgttgttgctgaaaaacttaccaatatccgacgggatgcaacctcaaacgcttcatttcggcaatatctgcatgagatttctatctttctgatttacgaggcactccgagattcttcgctagaccaaatagccgtcgatactcctcttggtcaatctagttcttttaccgtagttaaccagcccatgtttgtacctattcttcgagctggcctcggcatgttggatgctggtttattaatgtttccagatgcaacagttgggtttgtaggcgcaaagcgcgatgaggaaacgctactcccagaaatttatttgaacaccatccccaatgatcttgatggcacaagagtcgtacttttagatcctgctttagctaccggagggtcggtaaaacaagccatgcaattagctgccaacgccggcgcagatgaaatagttattgtgactgtcctttgttctccggagggaatcgatgcagtagagaaatctgggttaggttcaaaagtagttacggcaggagtagacgagcggttaaatgatgttggttttatatatccaggattaggagatgccggagaccgtcaatttggag

SEQ ID NO: 240529 - DNA, 280 bp, Unknown
  Bacterial polypeptide expressing nucleotide sequence isolated from the Sargasso Sea
ctgccgacagacattgtcgaccgccaggtgatccttggcgatccgatgctggcaacaggcggcagcgccatcatggcggcgacgaaactgcgcgagatgggtgtttcggacattgtcttctcttgccttgtggcagcgccggagggtgttgccgcattccacggcgcacaccccgacattcctattgtcacggcggcgctggaccgcgagctcaacgacaaggcctatattcttccgggtcttggtgatgcgggtgaccggatttacggcaccgactgat
